(19) United States
(12) Patent Application Publication
(10) Pub. No.: US 2025/0222082 A1
(43) Pub. Date: Jul. 10, 2025

(54) PROTEIN AND PEPTIDE VACCINES TARGETING METHANOGENS

(71) Applicant: Arkea Bio Corp., Charlestown, MA (US)

(72) Inventors: Matthew Dunn, Louisville, CO (US); Brigid Arciero, Boulder, CO (US); Colin South, Reno, NV (US); Kristin Adolfsen, Burlington, MA (US); Jeff Bickmeier, Arlington, MA (US); John Sullivan, Lexington, MA (US); Sara Kimler, Boston, MA (US); Lauren Fitch, Malden, MA (US); Joseph Koos, Somerville, MA (US); James Spoonamore, Somerville, MA (US); Zeljko Radulovic, Cambridge, MA (US); Caitlin Allen, Somerville, MA (US); Anna Li, Boston, MA (US); Alexander Hsu, Belmont, MA (US); Sara Tabandeh, Cambridge, MA (US); Frederick Richard Kearney, Walpole, MA (US)

(21) Appl. No.: 19/016,420

(22) Filed: Jan. 10, 2025

Related U.S. Application Data
(60) Provisional application No. 63/645,238, filed on May 10, 2024.
(60) Provisional application No. 63/619,572, filed on Jan. 10, 2024.

(51) Int. Cl. A61K 39/00; A23K 20/105; A23K 20/147; A23K 20/163; A23K 20/28; A23K 50/10; A61K 9/20; A61K 9/28; A61K 9/50; A61K 31/045; A61P 31/00; C07K 16/44

(52) U.S. Cl. CPC A61K 39/0001; A23K 20/105; A23K 20/147; A23K 20/163; A23K 20/28; A23K 50/10; A61K 9/2009; A61K 9/204; A61K 9/282; A61K 9/284; A61K 9/2866; A61K 9/2886; A61K 9/5026; A61K 9/5031; A61K 31/045; A61P 31/00; C07K 16/44; A61K 2039/542; A61K 2039/545; A61K 2039/552; A61K 2039/55555; A61K 2039/55566; A61K 2039/55572; A61K 2039/572; A61K 2039/575; A61K 2039/70

(57) ABSTRACT

The present invention relates to polypeptide and peptide vaccine compositions and methods that reduce methane and/or hydrogen production in animals. The present invention also relates to the treatment of diseases that are associated with methanogens.

### CROSS-REFERENCE TO RELATED APPLICATIONS

[0001] This application claims the benefit of U.S. Provisional Application No. 63/619,572, filed Jan. 10, 2024; and U.S. Provisional Application No. 63/645,238, filed May 10, 2024. The entire contents of each of said applications are incorporated herein in their entirety by this reference.

### INCORPORATION BY REFERENCE OF SEQUENCE LISTING

[0002] The application contains a Sequence Listing which has been submitted electronically in the form of an XML file, created Jan. 3, 2025, and named ARD-00801_SL.xml (93,100,973 bytes), the contents of which are incorporated herein by reference in their entirety.

### BACKGROUND OF THE INVENTION

[0003] Methane (CH₄) is the world's second most abundant greenhouse gas after carbon dioxide (CO₂), accounting for 16% of total greenhouse gas emissions. Livestock emissions, in particular, account for ˜32% of all anthropogenic CH₄ emissions—equating to ˜6% of all CO₂ equivalents (CO₂ₑ) of greenhouse gas emissions and ˜3 billion Tonnes/yr of CO₂ₑ. CH₄ is a powerful greenhouse gas with a potential global warming effect ˜28-fold higher than that of CO₂ over a 100 year period and ˜80-fold higher than that of CO₂ over a 20 year period. Furthermore, CH₄ has an atmospheric half-life of ˜10 years, thus reducing enteric CH₄ emissions could have an immediate and dramatic effect on limiting the rate of global warming, which would be of great significance to efforts to reduce global greenhouse gas emissions. Furthermore, CH₄ emissions also represent energy losses during ruminant production. On average, approximately 2-12% of the energy consumed in feed is lost in the form of CH₄ emissions.

[0004] For ruminants, CH₄ is predominantly formed in the ruminant fore-stomach (rumen) by methanogens, a subgroup of the Archaea. During normal rumen function, plant material is broken down by fiber-degrading microorganisms and fermented mainly to volatile fatty acids, ammonia, hydrogen (H₂) and CO₂. Ruminal methanogens principally use H₂ to reduce CO₂ to CH₄ in a series of reactions that are coupled to ATP synthesis. Additional biochemical pathways to produce CH₄ from acetate and methanol/methylamine substrates are also present, but represent a lower fraction of the total CH₄ biosynthesis in the rumen.

[0005] Attempts have been made to inhibit the action of methanogens in the rumen using a variety of interventions but most have failed, or were met with only limited success, due to low efficacy, poor selectivity, toxicity of compounds against the host, and/or build-up of resistance to anti-methanogen compounds. Further most solutions, e.g., feed additives and antibiotics, are only applicable to intensive production environments where the animal's diet can be effectively controlled to ensure precise daily dosages of the intervention. These solutions are, thus, not effective in extensive, grass-fed production environments where the animals a rarely handled and/or operations where feed cannot readily be mixed daily.

[0006] Accordingly, there is a great need in the art for effective, selective, and safe compositions and methods for inhibiting methanogens.

### SUMMARY OF THE INVENTION

[0007] The present invention is based, at least in part, on the discovery that vaccines of the present disclosure (e.g., vaccines comprising at least one polypeptide and/or at least one peptide fragment) against at least one cell surface antigen or a fragment thereof (e.g., antigenic fragment, epitope) of at least one methanogen, when administered to a subject (e.g., animal, ruminant, human), are surprisingly effective in inducing immune response and antibody production against the methanogen, and reducing the methane production in the subject.

[0008] Previous attempts to vaccinate ruminants and reduce methane production have been largely unsuccessful. Research on a vaccine targeting methanogen(s) has cost between $4 million to $5 million a year for more than 20 years.

[0009] Unfortunately, while the vaccination was able to induce immune response and production of antibodies against methanogens, it was not possible to induce production of a consistently large amount of antibodies; and to produce effective antibodies that can neutralize the growth of the methanogen and/or the production of methane. Thus, vaccination to reduce methane and/or hydrogen production in a subject (e.g., animal, ruminant, human) remained a failure.

[0010] Surprisingly, the vaccine compositions and methods of the present disclosure are surprisingly effective in reducing the CH₄ emission reductions. In addition to CH₄ emission reductions, vaccine compositions and methods of the present disclosure have shown surprising and unexpected reductions in emitted H₂ following treatment. These results are both surprising and unexpected as reductions in CH₄ following treatment with small molecule inhibitors and feed additives have contrarily shown increases in H₂ emissions. The reduction in both CH₄ and H₂ emissions suggest that the vaccine compositions and methods of the present disclosure have utility in improving the feed conversion efficiency and thereby the productivity of treated animals, e.g., increasing the production and/or ruminal concentration of one or more volatile fatty acids (e.g., propionate, butyrate, acetate) in the rumen of the animal, increasing the average daily gain of the animal, reducing the dry matter intake of the animal, reducing the feed requirements of the animal during lactation, and/or increasing the milk production of the animal. Increasing productivity of treated animals can further reduce the carbon intensity of resultant animal products (e.g., milk and meat) as treated animals are not only emit less CH₄ but also produce more product per animal. Thus, the total reduction in carbon intensity of animal-derived products from animals treated with a vaccine composition of the present disclosure may can be calculated as the composite of the CH₄ reduction of the animal following treatment in combination with the reduced carbon footprint associated with growing and maintaining those animals (e.g., less total feed, manure, urine, etc.).

[0011] The vaccine compositions and methods of the present disclosure are useful beyond reducing the methane emission in ruminants. It is well documented that methanogens are associated with various diseases, including a periodontal disease, inflammatory bowel disease (IBD), irritable bowel syndrome (ISB), IBS-C, small intestinal bacterial overgrowth (SIBO), colorectal cancer, obesity and metabolic syndrome, diverticulosis and diverticulitis, gingivitis, and bloat. Thus, the vaccine compositions and methods of the present disclosure have utility in treating these diseases in animals including humans. The vaccines of the present disclosure also provide a surprising and unexpected effect on lactic acidosis (e.g., reducing rumen lactate, increasing pH, or combination thereof). Therefore, the vaccine compositions methods of the present disclosure have utility in treating diseases associated with elevated, increased, or severe lactic acidosis, e.g., liver abscess.

### BRIEF DESCRIPTION OF FIGURES

[0012] FIG. 1A-FIG. 1B show schematic diagrams representing the relative abundance of methanogen species across geographies and herds. The diagrams indicate that methanogen populations are relatively stable across geographies and herds. For example, Methanobrevibacter gottschalkii comprises ˜30-40% of ruminal methanogens globally; thus, a cell vaccine could provide an effective global solution for reducing the amount of methane generated by ruminants.

[0013] FIG. 2 A subway diagram of our improved metatdenovo pipeline.

[0014] FIG. 3 Heatmap of the expression values of 192 genes of interest within the M. gottchalkii transcriptome. Each row represents the expression of a single gene and is labeled by its corresponding protein ID. Each column represents one M. gottschalkii monoculture harvested in exponential phase. Row annotations include any enriched GO terms (GO_group) or Pfams (Pfam_group) and the number of mass spectrometry samples in which the protein was found MS_Samples). Genes with multiple enriched GO terms or Pfams are labeled as such for simplicity.

[0015] FIG. 4 Heatmap of the normalized and transformed expression values of the metaT de novo assembly contigs that best matched to a gene of interest. Each row represents the expression of a single contig and is labeled by the corresponding gene of interest's protein ID and the contig ID, separated by an underscore. Each column represents one rumen sample harvested under different conditions.

[0016] FIG. 5 shows a schematic diagram that illustrates vaccination and post-vaccination testing of a ruminant (e.g., a cow).

[0017] FIG. 6A-FIG. 6C show schematic diagrams that illustrate exemplary tests performed for a ruminant vaccinated with a polypeptide and/or peptide vaccine of the present disclosure. FIG. 6A shows quantifying Ig antibody in serum and saliva of a vaccinated ruminant. The antibody is evaluated for methanogen binding to methanogens (e.g., affinity, specificity, etc.) and/or its effect on the fitness of methanogens (e.g., proliferation, methane production, etc.) upon binding. FIG. 6B shows measuring the amount of methane produced by a vaccinated ruminant using the GreenFeed system (C-lock Inc., Rapid City, South Dakota). FIG. 6C shows evaluation of the changes in the rumen microbiome in a vaccinated ruminant. The 16S rRNA sequencing identifies the presence and the amount of specific methanogens.

[0018] FIG. 7 shows a schematic diagram of an exemplary instrument (e.g., GreenFeed) that measures the methane produced from the rumen of a ruminant.

[0019] FIG. 8 is a schematic of a biochemical pathway and enzymes for the production of methane from acetate (i.e., the acetoclastic pathway), hydrogen and carbon dioxide (i.e., the hydrogenotrophic pathway), and methanol and derivatives thereof (i.e., the methylotrophic pathway).

[0020] FIG. 9 is a schematic describing the reduction of methyl-CoM and coenzyme B into methane by methyl-coenzyme M reductase (MCR), a key enzyme present in methane production via the acetoclastic, hydrogenotrophic, and methylotrophic pathways.

[0021] FIG. 10 is a schematic describing the application of small molecules that affect MCR activity to modulate methane production.

[0022] FIG. 11A shows a computational pipeline (left) for selection of methanogen cell surface proteins for vaccine production. The pipeline includes collation of all ORFs, filtering based on uniqueness to methanogens, cell localization, and function. A network map of key methanogen cell surface protein functions is shown to the right.

[0023] FIG. 11B shows a schematic representation of the protein fragments described in Table 21. The amino acid sequence of each folded domain is designated as a “protein fragment” in Table 21, each of which is useful as an antigen for the vaccines of the present disclosure.

[0024] FIG. 12 is a cross-sectional diagram of the application of a composition for reduction of deleterious atmospheric gases and/or precursors thereof to a flooded ecosystem.

[0025] FIG. 13 shows aerial delivery of a composition for reduction of deleterious atmospheric gases and/or precursors thereof to a flooded ecosystem.

[0026] FIG. 14 shows 3NOP concentration (mM) v. adsorbent (˜20 mM stock solution).

[0027] FIG. 15 shows 3NOP concentration (mM) v. adsorbent (˜8 mM stock solution).

[0028] FIG. 16 shows exemplary multilayer polyelectrolyte coatings of 15% activated carbon tablets.

[0029] FIG. 17 shows exemplary multilayer polyelectrolyte coatings of 25% activated carbon tablets.

[0030] FIG. 18 shows exemplary multilayer polyelectrolyte coatings of 15% activated carbon tablets with 5% sodium lignosulfonate.

[0031] FIG. 19 shows exemplary multilayer polyelectrolyte coatings of 15% activated carbon with 5% hydroxypropyl cellulose.

[0032] FIG. 20 is a graph showing the release profiled of a silica v. activated carbon adsorbent.

[0033] FIG. 21 is a table showing the composition of various polycaprolactone-based formulations according to some embodiments of the invention.

[0034] FIG. 22 is a bar graph showing 3NOP release in mM for exemplary polycaprolactone-based formulations.

[0035] FIG. 23 is a graph showing normalized 3NOP concentration v. release time in days of exemplary polybutylene succinate-based formulations.

[0036] FIG. 24 is a bar graph showing 3NOP release (%) from exemplary PEC microcapsules. Samples are prepared with a 3NOP concentration of 100 μM. Final pH solution ˜7. K, L, F, and E refer to lysine, leucine, phenylalanine, and glutamic acid, respectively. PSS refers to polystyrene sulfonate. FIG. 24 discloses (KKLF)3 as SEQ ID NO: 79312, (EELF)3 as SEQ ID NO: 79313 and (kKlF)3 as SEQ ID NO: 79314.

[0037] FIG. 25 is bar graph showing 3NOP release (%) from exemplary PEC microcapsules. Samples are prepared with a 3NOP concentration of 100 μM. Final pH solution ˜7. PLR refers to poly (L-arginine), and PLK refers to poly (L-lysine). SLS and PSS refer to sodium lignosulfonate and polystyrene sulfonate.

[0038] FIG. 26 shows average daily group ADG (kg per day) for individual animals, grouped by treatment group, as described in Example 12.

[0039] FIG. 27 shows the GreenFeed visitation for all animals, grouped by measurement period, as described in Example 12.

[0040] FIG. 28 shows the GreenFeed visitation pattern overlaid with maximum local temperature (McGregor, TX) as described in Example 12.

[0041] FIG. 29 shows visual definition of AA analysis as described in Example 12.

[0042] FIG. 30 shows ΔΔ CH4 production (g/d) for protein antigen formulations, relative to pre-prime baseline (p0), as described in Example 12.

[0043] FIG. 31 shows ΔΔ CH4 intensity (g/d) for protein antigen formulations, relative to pre-prime baseline (p0), as described in Example 12.

[0044] FIG. 32 shows RPF51698.1 ELISA IgG response, average value of treatment groups over time. Treatment groups 9G & 9H have elevated IgG response against RPF51698.1 protein relative to the control group 9A at d28 & d42 (p<0.001) and d63 (p<0.01). T-tests do not support treatment group 9I being greater than the control group at d42 (p=0.08), as described in Example 12.

[0045] FIG. 33 shows ADC46800.1 ELISA IgG response, average value of treatment groups over time. Treatment groups 9G, 9H, & 9I have elevated IgG response against ADC46800.1 protein compared to the control group 9A (p<0.001 all days except Group 9H d63 p<0.01). T-tests support a difference in Group 9C d63 (p<0.05) but do not support a difference in Group 9D d42 (p=0.2), as described in Example 12.

### DETAILED DESCRIPTION OF THE INVENTION

[0046] Provided herein are vaccines (e.g., comprising at least one protein and/or at least one peptide fragment) against at least one cell surface antigen or a fragment thereof (e.g., antigenic fragment, epitope) of at least one methanogen, which are effective in inducing immune response and antibody production against the methanogen antigen, and reducing the methane and/or hydrogen production in subjects. The vaccines of the present disclosure are also useful in treating diseases in subjects (e.g., animals, mammals, ruminants, humans) that are associated with methanogens (e.g., a periodontal disease, Inflammatory Bowel Disease (IBD), irritable bowel syndrome (ISB), IBS-C, small intestinal bacterial overgrowth (SIBO), colorectal cancer, obesity and metabolic syndrome, diverticulosis and diverticulitis, gingivitis, and/or bloat). The vaccines of the present disclosure are also useful in treating diseases in subjects (e.g., animals, mammals, ruminants, humans) that are associated with elevated, increased, or severe lactic acidosis, e.g., liver abscess.

### Definitions

[0047] The articles “a” and “an” are used herein to refer to one or to more than one (i.e. to at least one) of the grammatical object of the article. By way of example, “an element” means one element or more than one element.

[0048] As used herein, the term “about” when used before a numerical designation, e.g., temperature, time, amount, concentration, and such other, including a range, indicates approximations which may vary by (+) or (−) 10%, 9%, 8%, 7%, 6%, 5%, 4%, 3%, 2%, or 1%.

[0049] The term “administering” is intended to include routes of administration which allow an agent (e.g., a vaccine composition, an agent that reduces methane production in a subject) to perform its intended function. Examples of routes of administration which can be used include injection (subcutaneous, intravenous, parenteral, intraperitoneal, intrathecal, intradermal, intramuscular, etc.), oral, inhalation, and transdermal routes. The injections can be bolus injections or can be continuous infusion. Depending on the route of administration, the agent (e.g., a vaccine composition, an agent that reduces methane production in a subject) can be coated with or disposed in a selected material to protect it from natural conditions which may detrimentally affect its ability to perform its intended function. The agent may be administered alone, or in conjunction with a pharmaceutically acceptable carrier or adjuvant. The agent (e.g., a vaccine composition, an agent that reduces methane production in a subject) also may be administered as a prodrug, which is converted to its active form in vivo.

[0050] The term “conjoint” or “combination” administration, as used herein, refers to the administration of two or more agents that aid in reducing methane production in a subject. The different agents comprising the combination may be administered concomitant with, prior to, or following the administration of one or more agents.

[0051] The term “fragment,” as used herein encompasses any and all that is less than the full length. In some embodiments, a fragment of a polypeptide of the present disclosure is an antigenic fragment of the polypeptide. Such antigenic fragment may comprise at least one epitope that binds to the antibody. In preferred embodiments, a fragment of a polypeptide of the present disclosure is a fragment of the polypeptide that is effective in eliciting immune response and/or inducing antibody production when administered to a subject.

[0052] The term “methanogen,” as used herein, refers to a microorganism that produces methane as a metabolic byproduct. Methanogens belong to the domain Archaea, and include, but are not limited to those of a family Methanobacteriaceae, e.g., those of genera Methanobrevibacter, Methanosphaera, Methanomicrobium, Methanobacterium, Methanocorpusulum, Methanosaeta, Methanoculleus, Methanosarcina, and Thermoplasmatales. Specific methanogens include, but are not limited to, Methanobrevibacter ruminantium (e.g., the M1 strain or strain DSM 1093 (see e.g., World Wide Web at dsmz.de/microorganisms/html/strains/strain.dsm001093. htm) and Methanobrevibacter gottschalkii. Additional relevant species are further described below.

[0053] The term “ruminant” refers to a hoofed herbivorous grazing or browsing mammal that is able to acquire nutrients from plant-based food by fermenting it in a specialized stomach prior to digestion, principally through microbial actions. The process, which takes place in the front part of the digestive system and therefore is called foregut fermentation, typically requires the fermented ingesta (known as cud) to be regurgitated and chewed again. The roughly 200 species of ruminants include both domestic and wild species. Ruminants include, but are not limited to, cattle (e.g., large domesticated ruminant animals, e.g., cows (including dairy cattle), bulls), all domesticated and wild bovines (i.e., those belonged to the family Bovidae; e.g., cows, cattle, bulls, bisons, yaks, African buffalos, water buffalos, antelopes), goats, sheep, giraffes, deer, caribou, and gazelles. In preferred embodiments, ruminants are domesticated. As used herein, the term “ruminant” includes ruminant-like animals or pseudo-ruminant animals such as macropods, llamas, camels, and alpacas. In some embodiments, a ruminant has not been administered with an agent that reduces methane. In other embodiments, a ruminant has been administered or is being administered with an agent that reduces methane.

[0054] As used herein, the term “valency” refers to the number of antigenic components in the vaccine or polypeptide. In some embodiments, the vaccines are monovalent. In some embodiments, the vaccines are divalent. In some embodiments the vaccines are trivalent. In some embodiments the vaccines are multi-valent. Multivalent vaccines may comprise 2, 3, 4, 5, 6, 7, 8, 9, 10, 11, 12, 13, 14, 15, 16, 17, 18, 19, 20, or more antigens or antigenic moieties (e.g., antigenic peptides, etc.). The antigenic components of the vaccines may be in a single polypeptide or peptide molecule. The antigenic components of the vaccines may be in separate polypeptide or peptide molecules.

[0055] The term “subject” refers to any healthy or diseased animal, including any mammal, ruminant, canine, feline, or human.

### Methanogens

[0056] The diversity of the ruminal methanogens is much smaller, and their diversity is much lower than that of rumen bacteria, with archaeal SSU rRNA only accounting for 6.8% of rumen total SSU rRNA. Archaea in the rumen is represented by <3.3% of the total rRNA (both 16S and 18S) therein. Representative family of methanogens includes Methanobacteriaceae. Rumen methanogens typically comprises 2-3% of the total microbial biomass in the rumen.

[0057] Representative genera of methanogens include Methanobrevibacter, Methanosphaera, Methanomicrobium, Methanobacterium, Methanocorpusulum, Methanosaeta, Methanoculleus, Methanosarcina, and Thermoplasmatales.

[0058] Certain species of ruminal methanogens have been isolated into pure cultures: Methanobacterium formicicum, Methanobacterium bryantii, Methanobrevibacter ruminantium, Methanobrevibacter gottschalkii, Methanobrevibacter millerae, Methanobrevibacter olleyae, Methanomicrobium mobile, Methanoculleus olentangyi, and Methanosarcina barkeri. Additional species have been recently isolated, including Methanobrevibacter boviskoreani (isolated from the rumen of Korean native cattle), Methanobacterium beijingense (isolated from the rumen of goat), Methanoculleus marisnigri (isolated from the rumen of Indian crossbred cattle), Methanoculleus bourgensis (isolated from the rumen of Holstein cattle), and Methanosarcina mazei (isolated from the rumen of Korean Hanwoo cattle) (based on the RDP database). A Thermoplasmatales-like pyrrolysine-dependent archaeon BRNA1 was also isolated from bovine (GenBank access number: CP002916).

[0059] Collectively, 16S rRNA gene sequences from cultured methanogens only accounted for approximately 0.7% of the total archaeal sequences of rumen origin, and several taxa do not have a single cultured representative. Most of the isolates are members of the family Methanobacteriaceae. Compared to other anaerobic habitats where >100 species of methanogens of 28 genera have been isolated, the diversity and species richness of ruminal methanogens are quite low, reflecting the highly selective ruminal environment for methanogens. In addition, sequenced ruminal 16S rRNA gene clones shared >95% sequence similarity with that of Methanobrevibacter gottschalkii, Methanobrevibacter thaueri, Methanobrevibacter smithii and Methanosphaera stadtmanae, indicating that these species may be common ruminal methanogens.

[0060] Much of the ruminal methanogen diversity was characterized by 16S rRNA gene sequences. The RDP Release 11 (Update 3) contains 8,623 archaeal 16S rRNA gene sequences of rumen origin. These sequences were generated using the Sanger sequencing technology, which produces higher sequence accuracy than NGS technologies, in 96 separate studies including 48 unpublished studies. About 90% of these sequences were assigned to methanogens. These sequences were classified to 10 known genera, with Methanobrevibacter being represented by 63.2% of all the sequences followed by Methanosphaera (9.8%), Methanomicrobium (7.7%), and Methanobacterium (1.2%). The order Thermoplasmatales, which was previously referred to as the rumen cluster C (RCC) group, is represented by 7.4% of the total archaeal sequences.

### Cell Surface Proteins of Methanogens

[0061] Provided herein is at least one cell surface protein or a fragment thereof (e.g., an antigenic fragment, e.g., a fragment comprising an epitope, e.g., a fragment comprising an extracellular domain or a portion thereof) of at least one methanogen that can be used in a vaccine composition, which can elicit immune response, antibody production, and antibody-mediated neutralization of the growth of methanogens and/or production of methane. Further provided herein are nucleic acid(s) encoding the at least one cell surface protein or a fragment thereof.

[0062] In certain aspects, the at least one cell surface protein or a fragment thereof (e.g., an antigenic fragment, e.g., a fragment comprising an epitope, e.g., a fragment comprising an extracellular domain or a portion thereof) of at least one methanogen is of a family Methanobacteriaceae.

[0063] In some embodiments, the at least one methanogen is of a genus selected from: Methanobrevibacter, Methanosphaera, Methanomicrobium, Methanobacterium, Methanocorpusulum, Methanosaeta, Methanoculleus, Methanosarcina, and Thermoplasmatales.

[0064] In some embodiments, the at least one methanogen comprises Methanobacterium formicicum, Methanobacterium bryantii, Methanobrevibacter ruminantium, Methanobrevibacter millerae, Methanobrevibacter olleyae, Methanomicrobium mobile, Methanoculleus olentangyi, Methanosarcina barkeri, Methanobrevibacter boviskoreani, Methanobacterium beijingense, Methanoculleus marisnigri, Methanoculleus bourgensis, Methanosarcina mazei, Thermoplasmatales archaeon BRNA1, Methanobrevibacter gottschalkii, Methanobrevibacter thaueri, Methanobrevibacter smithii, Methanosphaera stadtmanae, Methanococcoides burtonii, Methanolobus psychrophilus R15, Methanobacterium paludism, Methanohalobium evestigatum, Methanomethylovorans hollandica, Methanothrix soehngenii, Methanocaldococcus vulcanius, Methanosalsum zhilinae, Methanocorpusculum labreanum, Methanoregula formicica, Methanoculleus marisnigri, Methanocella arvoryzae, Methanoculleus bourgensis, Methanolacinia petrolearia, Methanospirillum hungatei, Methanoplanus limicola, Methanohalophilus mahii, Methanococcus aeolicus, Methanosphaerula palustris, Methanocaldococcus fervens, Methanocaldococcus jannaschii, Methanocaldococcus sp. FS406-22, Methanoregula boonei, Methanobrevibacter sp. AbM4, Methanobrevibacter ruminantium, Methanosphaera, Methanobacterium formicicum, Methanocaldococcus villosus, Methanosarcina barkeri, Methanobacterium lacus, Methanotorris igneus, Methanotorris formicicus, Methanocaldococcus infernus, Methanofollis liminatans, Methanothermococcus okinawensis, Methanobrevibacter smithii, Methanobrevibacter, Methanocella conradii, Methanothermococcus thermolithotrophicus, Methanococcus maripaludis, Methanococcus maripaludis, Methanococcus vannielii, Methanothermus fervidus, Methanosarcina acetivorans, Methanosarcina mazei, Methanosaeta harundinacea 6Ac, Methanococcus maripaludis, Methanococcus voltae, Methanolinea tarda, Methanolobus psychrophilus, Methanosaeta harundinacea, or any combination thereof.

[0065] In some embodiments, the at least one methanogen comprises Methanobrevibacter ruminantium. In some embodiments, the at least one methanogen comprises Methanobrevibacter ruminantium M1 (DSM 1093).

[0066] In preferred embodiments, the at least one methanogen comprises Methanobrevibacter gottschalkii. In some embodiments, the at least one methanogen comprises Methanobrevibacter gottschalkii DSM11977.

[0067] In some embodiments, a vaccine composition comprises a polypeptide or a fragment thereof (e.g., an antigenic fragment, an epitope) of at least one cell surface protein. In some embodiments, the polypeptide comprises the extracellular domain or a fragment thereof of at least one cell surface protein. In some embodiments, the polypeptide or a fragment thereof does not comprise the transmembrane and/or intracellular domains or a fragment thereof of the at least one cell surface protein.

[0068] In certain aspects, provided herein are vaccine compositions comprising at least one cell surface protein or a fragment thereof (e.g., an antigenic peptide fragment, e.g., a peptide fragment comprising an epitope, e.g., a peptide fragment comprising an extracellular domain or a portion thereof, e.g., a polypeptide fragment, e.g., peptide fragment) of at least one methanogen.

[0069] In some embodiments, a vaccine composition comprises at least one polypeptide and/or at least one peptide of at least one methanogen.

[0070] In some embodiments, the at least one polypeptide or a fragment thereof does not comprise a signal peptide.

[0071] In some embodiments, the at least one polypeptide or a fragment thereof does not comprise a transmembrane domain.

[0072] In some embodiments, the at least one polypeptide or a fragment thereof comprises at least 90%, 91%, 92%, 93%, 94%, 95%, 96%, 97% 98%, 99%, or 100% sequence identity to an amino acid sequence presented herein. In some embodiments, the at least one polypeptide or a fragment thereof comprises at least 90%, 91%, 92%, 93%, 94%, 95%, 96%, 97% 98%, 99%, or 100% sequence identity to an amino acid sequence set forth in any one of Tables C-F, 1A, 1B, 2A, 2B, 3A, 3B, 4A, 4B, 5A, 5B, and 6A-6G, or a fragment thereof.

[0073] In some embodiments, the at least one polypeptide or a fragment thereof comprises at least 90%, 91%, 92%, 93%, 94%, 95%, 96%, 97% 98%, 99%, or 100% sequence identity to an amino acid sequence encoded by at least one nucleic acid presented herein. In some embodiments, the at least one polypeptide or a fragment thereof is encoded by a nucleic acid comprising the nucleotide sequence set forth in any one of Tables C-F, 1A, 1B, 2A, 2B, 3A, 3B, 4A, 4B, 5A, 5B, and 6A-6G, or a fragment thereof.

[0074] In some embodiments, the at least one polypeptide or a fragment thereof further comprises at least 1, 2, 3, 4, 5, 6, 7, 8, 9, 10, 11, 12, 13, 14, 15, 16, 17, 18, 19, 20, 21, 22, 23, 24, 25, 26, 27, 28, 29, 30, 31, 32, 33, 34, 35, 36, 37, 38, 39, 40, 41, 42, 43, 44, 45, 46, 47, 48, 49, 50, 51, 52, 53, 54, 55, 56, 57, 58, 59, 60, 61, 62, 63, 64, 65, 66, 67, 68, 69, 70, 71, 72, 73, 74, 75, 76, 77, 78, 79, 80, 81, 82, 83, 84, 85, 86, 87, 88, 89, 90, 91, 92, 93, 94, 95, 96, 97, 98, 99, or 100 heterologous amino acid residues that are not native to the cell surface protein of a methanogen.

[0075] In some embodiments, the at least one polypeptide or a fragment thereof further comprises about 1, 2, 3, 4, 5, 6, 7, 8, 9, 10, 11, 12, 13, 14, 15, 16, 17, 18, 19, 20, 21, 22, 23, 24, 25, 26, 27, 28, 29, 30, 31, 32, 33, 34, 35, 36, 37, 38, 39, 40, 41, 42, 43, 44, 45, 46, 47, 48, 49, 50, 51, 52, 53, 54, 55, 56, 57, 58, 59, 60, 61, 62, 63, 64, 65, 66, 67, 68, 69, 70, 71, 72, 73, 74, 75, 76, 77, 78, 79, 80, 81, 82, 83, 84, 85, 86, 87, 88, 89, 90, 91, 92, 93, 94, 95, 96, 97, 98, 99, or 100 heterologous amino acid residues that are not native to the cell surface protein of a methanogen.

[0076] In some embodiments, the at least one polypeptide or a fragment thereof further comprises no more than 1, 2, 3, 4, 5, 6, 7, 8, 9, 10, 11, 12, 13, 14, 15, 16, 17, 18, 19, 20, 21, 22, 23, 24, 25, 26, 27, 28, 29, 30, 31, 32, 33, 34, 35, 36, 37, 38, 39, 40, 41, 42, 43, 44, 45, 46, 47, 48, 49, 50, 51, 52, 53, 54, 55, 56, 57, 58, 59, 60, 61, 62, 63, 64, 65, 66, 67, 68, 69, 70, 71, 72, 73, 74, 75, 76, 77, 78, 79, 80, 81, 82, 83, 84, 85, 86, 87, 88, 89, 90, 91, 92, 93, 94, 95, 96, 97, 98, 99, or 100 heterologous amino acid residues that are not native to the cell surface protein of a methanogen.

[0077] In some embodiments, the heterologous amino acid residues comprise a heterologous signal peptide and/or a heterologous transmembrane domain.

[0078] In some embodiments, a vaccine composition comprises at least one fragment (e.g., at least one polypeptide fragment and/or a peptide fragment) of at least one cell surface protein of at least one methanogen. In some embodiments, a vaccine composition comprises at least one fragment (e.g., polypeptide fragment and/or a peptide fragment), which is not a full-length cell surface protein of at least one methanogen.

[0079] In some embodiments, the at least one fragment of at least one cell surface protein lacks at least 1, 2, 3, 4, 5, 6, 7, 8, 9, 10, 11, 12, 13, 14, 15, 16, 17, 18, 19, 20, 21, 22, 23, 24, 25, 26, 27, 28, 29, 30, 31, 32, 33, 34, 35, 36, 37, 38, 39, 40, 41, 42, 43, 44, 45, 46, 47, 48, 49, 50, 51, 52, 53, 54, 55, 56, 57, 58, 59, 60, 61, 62, 63, 64, 65, 66, 67, 68, 69, 70, 71, 72, 73, 74, 75, 76, 77, 78, 79, 80, 81, 82, 83, 84, 85, 86, 87, 88, 89, 90, 91, 92, 93, 94, 95, 96, 97, 98, 99, or 100 amino acid residues from its native full-length protein sequence.

[0080] In some embodiments, the at least one fragment of at least one cell surface protein lacks about 1, 2, 3, 4, 5, 6, 7, 8, 9, 10, 11, 12, 13, 14, 15, 16, 17, 18, 19, 20, 21, 22, 23, 24, 25, 26, 27, 28, 29, 30, 31, 32, 33, 34, 35, 36, 37, 38, 39, 40, 41, 42, 43, 44, 45, 46, 47, 48, 49, 50, 51, 52, 53, 54, 55, 56, 57, 58, 59, 60, 61, 62, 63, 64, 65, 66, 67, 68, 69, 70, 71, 72, 73, 74, 75, 76, 77, 78, 79, 80, 81, 82, 83, 84, 85, 86, 87, 88, 89, 90, 91, 92, 93, 94, 95, 96, 97, 98, 99, or 100 amino acid residues from its native full-length protein sequence.

[0081] In some embodiments, the at least one fragment of at least one cell surface protein lacks no more than 2, 3, 4, 5, 6, 7, 8, 9, 10, 11, 12, 13, 14, 15, 16, 17, 18, 19, 20, 21, 22, 23, 24, 25, 26, 27, 28, 29, 30, 31, 32, 33, 34, 35, 36, 37, 38, 39, 40, 41, 42, 43, 44, 45, 46, 47, 48, 49, 50, 51, 52, 53, 54, 55, 56, 57, 58, 59, 60, 61, 62, 63, 64, 65, 66, 67, 68, 69, 70, 71, 72, 73, 74, 75, 76, 77, 78, 79, 80, 81, 82, 83, 84, 85, 86, 87, 88, 89, 90, 91, 92, 93, 94, 95, 96, 97, 98, 99, or 100 amino acid residues from its native full-length protein sequence.

[0082] In some embodiments, the at least one fragment of at least one cell surface protein lacks at least, about, or no more than 1, 2, 3, 4, 5, 6, 7, 8, 9, 10, 11, 12, 13, 14, 15, 16, 17, 18, 19, 20, 21, 22, 23, 24, 25, 26, 27, 28, 29, 30, 31, 32, 33, 34, 35, 36, 37, 38, 39, 40, 41, 42, 43, 44, 45, 46, 47, 48, 49, 50, 51, 52, 53, 54, 55, 56, 57, 58, 59, 60, 61, 62, 63, 64, 65, 66, 67, 68, 69, 70, 71, 72, 73, 74, 75, 76, 77, 78, 79, 80, 81, 82, 83, 84, 85, 86, 87, 88, 89, 90, 91, 92, 93, 94, 95, 96, 97, 98, 99, or 100 amino acid residues from the N-terminus of its native full-length protein sequence.

[0083] In some embodiments, the at least one fragment of at least one cell surface protein lacks at least, about, or no more than 1, 2, 3, 4, 5, 6, 7, 8, 9, 10, 11, 12, 13, 14, 15, 16, 17, 18, 19, 20, 21, 22, 23, 24, 25, 26, 27, 28, 29, 30, 31, 32, 33, 34, 35, 36, 37, 38, 39, 40, 41, 42, 43, 44, 45, 46, 47, 48, 49, 50, 51, 52, 53, 54, 55, 56, 57, 58, 59, 60, 61, 62, 63, 64, 65, 66, 67, 68, 69, 70, 71, 72, 73, 74, 75, 76, 77, 78, 79, 80, 81, 82, 83, 84, 85, 86, 87, 88, 89, 90, 91, 92, 93, 94, 95, 96, 97, 98, 99, or 100 amino acid residues from the C-terminus of its native full-length protein sequence.

[0084] In preferred embodiments, the at least one fragment of at least one cell surface protein comprises one or more extracellular domain or a portion thereof. A person of ordinary skill in the art can readily predict an extracellular portion of any given sequence by using a suitable tool known in the art, e.g., TMbed or TMHMM.

[0085] In some embodiments, the at least one fragment of at least one cell surface protein lacks a native signal peptide.

[0086] In some embodiments, the at least one fragment of at least one cell surface protein lacks a native transmembrane domain.

[0087] In certain aspects, certain classes of methanogen cell surface proteins are particularly useful in generating an effective vaccine composition of the present disclosure (e.g., comprising at least one cell surface protein or a fragment thereof of at least one methanogen).

[0088] In some embodiments, the at least one cell surface protein comprises at least one of the following structures and/or functions: adhesin-like, ATP-processing, cell wall biosynthesis, cofactor biosynthesis, CRISPR (provides methanogens an immunity against viruses), energy metabolism, enzyme, fatty acid synthesis, general metabolism, membrane protein, metal-binding, methanogenesis, methanogenesis Mtr proteins, methanogenesis MtrE proteins, phage related, proteolysis, transcription regulation, ribosomal, substrate binding, transcription, transport, and a protein whose gene expression changes in response to lauric acid stress (see Table 6G below).

[0089] A person of ordinary skill in the art can determine the polypeptide sequences from the nucleic acid sequences, or determine the nucleic acid sequences from the polypeptide sequences presented herein or those known in the art.

[0090] The nucleic acid and amino acid sequence information for nucleic acid and polypeptide molecules useful in the present invention are well-known in the art and readily available on publicly available databases, such as the National Center for Biotechnology Information (NCBI).

[0091] The representative cell surface antigens of various methanogens and their nucleic acid sequences and amino acid sequences are provided in the U.S. application Ser. No. 18/350,526 (e.g., Table 2A, Table 2B, Table 3, Table 17A, Table 19, Table 20, and Table 21), U.S. Application No. 63/359,978, or U.S. Application No. 63/524,513, the entire contents of each of which are incorporated herein by reference in its entirety.

[0092] Certain representative antigens and their amino acid and nucleic acid sequences are also presented in Tables C-F, TA, 1B, 2A, 2B, 3A, 3B, 4A, 4B, 5A, 5B, and 6A-6G of the present disclosure.

### Sequences

[0093] As used herein, coding region refers to regions of a nucleotide sequence comprising codons which are translated into amino acid residues, whereas noncoding region refers to regions of a nucleotide sequence that are not translated into amino acids (e.g., 5′ and 3′ untranslated regions).

[0094] Complement [to] or complementary refers to the broad concept of sequence complementarity between regions of two nucleic acid strands or between two regions of the same nucleic acid strand. It is known that an adenine residue of a first nucleic acid region is capable of forming specific hydrogen bonds (base pairing) with a residue of a second nucleic acid region which is antiparallel to the first region if the residue is thymine or uracil. Similarly, it is known that a cytosine residue of a first nucleic acid strand is capable of base pairing with a residue of a second nucleic acid strand which is antiparallel to the first strand if the residue is guanine. A first region of a nucleic acid is complementary to a second region of the same or a different nucleic acid if, when the two regions are arranged in an antiparallel fashion, at least one nucleotide residue of the first region is capable of base pairing with a residue of the second region. In some embodiments, the first region comprises a first portion and the second region comprises a second portion, whereby, when the first and second portions are arranged in an antiparallel fashion, at least about 50%, and preferably at least about 75%, at least about 90%, or at least about 95% of the nucleotide residues of the first portion are capable of base pairing with nucleotide residues in the second portion. In other embodiments, all nucleotide residues of the first portion are capable of base pairing with nucleotide residues in the second portion.

[0095] A nucleic acid is operably linked when it is placed into a functional relationship with another nucleic acid sequence. For instance, a promoter or enhancer is operably linked to a coding sequence if it affects the transcription of the sequence. With respect to transcription regulatory sequences, operably linked means that the DNA sequences being linked are contiguous and, where necessary to join two protein coding regions, contiguous and in reading frame. For switch sequences, operably linked indicates that the sequences are capable of effecting switch recombination.

[0096] There is a known and definite correspondence between the amino acid sequence of a particular protein and the nucleotide sequences that can code for the protein, as defined by the genetic code (shown below). Likewise, there is a known and definite correspondence between the nucleotide sequence of a particular nucleic acid and the amino acid sequence encoded by that nucleic acid, as defined by the genetic code.

GENETIC CODE

| | |
|---|---|
| Alanine (Ala, A) | GCA, GCC, GCG, GCT |
| Arginine (Arg, R) | AGA, ACG, CGA, CGC, CGG, CGT |
| Asparagine (Asn, N) | AAC, AAT |
| Aspartic acid (Asp, D) | GAC, GAT |
| Cysteine (Cys, C) | TGC, TGT |
| Glutamic acid (Glu, E) | GAA, GAG |
| Glutamine (Gln, Q) | CAA, CAG |
| Glycine (Gly, G) | GGA, GGC, GGG, GGT |
| Histidine (His, H) | CAC, CAT |
| Isoleucine (Ile, I) | ATA, ATC, ATT |
| Leucine (Leu, L) | CTA, CTC, CTG, CTT, TTA, TTG |
| Lysine (Lys, K) | AAA, AAG |
| Methionine (Met, M) | ATG |
| Phenylalanine (Phe, F) | TTC, TTT |
| Proline (Pro, P) | CCA, CCC, CCG, CCT |
| Serine (Ser, S) | AGC, AGT, TCA, TCC, TCG, TCT |
| Threonine (Thr, T) | ACA, ACC, ACG, ACT |
| Tryptophan (Trp, W) | TGG |
| Tyrosine (Tyr, Y) | TAC, TAT |
| Valine (Val, V) | GTA, GTC, GTG, GTT |
| Termination signal (end) | TAA, TAG, TGA |

[0097] An important and well-known feature of the genetic code is its redundancy, whereby, for most of the amino acids used to make proteins, more than one coding nucleotide triplet may be employed (illustrated above). Therefore, a number of different nucleotide sequences may code for a given amino acid sequence. Such nucleotide sequences are considered functionally equivalent since they result in the production of the same amino acid sequence in all organisms (although certain organisms may translate some sequences more efficiently than they do others). Moreover, occasionally, a methylated variant of a purine or pyrimidine may be found in a given nucleotide sequence. Such methylations do not affect the coding relationship between the trinucleotide codon and the corresponding amino acid.

[0098] In making the changes in the amino sequences of polypeptide, the hydropathic index of amino acids may be considered. The importance of the hydropathic amino acid index in conferring interactive biologic function on a protein is generally understood in the art. It is accepted that the relative hydropathic character of the amino acid contributes to the secondary structure of the resultant protein, which in turn defines the interaction of the protein with other molecules, for example, enzymes, substrates, receptors, DNA, antibodies, antigens, and the like. Each amino acid has been assigned a hydropathic index on the basis of their hydrophobicity and charge characteristics these are: isoleucine (+4.5); valine (+4.2); leucine (+3.8); phenylalanine (+2.8); cysteine/cystine (+2.5); methionine (+1.9); alanine (+1.8); glycine (−0.4); threonine (−0.7); serine (−0.8); tryptophane (−0.9); tyrosine (−1.3); proline (−1.6); histidine (−3.2); glutamate (−3.5); glutamine (−3.5); aspartate (<RTI 3.5); asparagine (−3.5); lysine (−3.9); and arginine (−4.5).

[0099] It is known in the art that certain amino acids may be substituted by other amino acids having a similar hydropathic index or score and still result in a protein with similar biological activity, i.e. still obtain a biological functionally equivalent protein.

[0100] As outlined above, amino acid substitutions are generally therefore based on the relative similarity of the amino acid side-chain substituents, for example, their hydrophobicity, hydrophilicity, charge, size, and the like. Exemplary substitutions which take various of the foregoing characteristics into consideration are well-known to those of skill in the art and include: arginine and lysine; glutamate and aspartate; serine and threonine; glutamine and asparagine; and valine, leucine and isoleucine.

[0101] In view of the foregoing, the nucleotide sequence of a DNA or RNA encoding a cell surface antigen nucleic acid (or any portion thereof) can be used to derive the polypeptide amino acid sequence, using the genetic code to translate the DNA or RNA into an amino acid sequence. Likewise, for polypeptide amino acid sequences, corresponding nucleotide sequences that can encode the polypeptide can be deduced from the genetic code (which, because of its redundancy, will produce multiple nucleic acid sequences for any given amino acid sequence). Thus, description and/or disclosure herein of a nucleotide sequence which encodes a polypeptide should be considered to also include description and/or disclosure of the amino acid sequence encoded by the nucleotide sequence. Similarly, description and/or disclosure of a polypeptide amino acid sequence herein should be considered to also include description and/or disclosure of all possible nucleotide sequences that can encode the amino acid sequence.
[0102] Table 1A: Representative Antigens (full-length proteins) of Methanobrevibacter gottschalkii Set 1 (amino acid sequences (SEQ ID NOS 71070-71706) and nucleic acid sequences (SEQ ID NOS 71707-72343))
[0103] Table 1B: Representative Antigens (full-length proteins) of Methanobrevibacter gottschalkii Set 1 (codon-optimized nucleic acid sequences) Left column discloses SEQ ID NOS 72344-72980 and right column discloses SEQ ID NOS 72981-73617.
[0104] Table 2A: Representative Antigens (full-length proteins) of Methanobrevibacter gottschalkii Set 2 (amino acid sequences (SEQ ID NOS 73618-73993) and nucleic acid sequences (SEQ ID NOS 73994-74369))
[0105] Table 2B: Representative Antigens (full-length proteins) of Methanobrevibacter gottschalkii Set 2 (codon-optimized nucleic acid sequences) Left column discloses SEQ ID NOS 74370-74745 and right column discloses SEQ ID NOS 74746-75121.
[0106] Table 3A: Representative Antigens (full-length proteins) of Methanobrevibacter gottschalkii Set 3 (amino acid sequences (SEQ ID NOS 75122-75220) and nucleic acid sequences (SEQ ID NOS 75221-75319)
[0107] Table 3B: Representative Antigens (full-length proteins) of Methanobrevibacter gottschalkii Set 3 (codon-optimized nucleic acid sequences) Left column discloses SEQ ID NOS 75320-75418 and right column discloses SEQ ID NOS 75419-75517.
[0108] Table 4A: Representative Antigens (fragments) of Methanobrevibacter gottschalkii Set 4 (amino acid sequences (SEQ ID NOS 75518-76049) and nucleic acid sequences (SEQ ID NOS 76050-76581))
[0109] Table 4B: Representative Antigens (fragments) of Methanobrevibacter gottschalkii Set 4 (codon-optimized nucleic acid sequences) Left column discloses SEQ ID NOS 76582-77112 and right column discloses SEQ ID NOS 77113-77643.
[0110] Table 5A: Representative Antigens (fragments) of Methanobrevibacter gottschalkii Set 5 (amino acid sequences (SEQ ID NOS 77644-77967) and nucleic acid sequences (SEQ ID NOS 77968-78291))
[0111] Table 5B: Representative Antigens (fragments) of Methanobrevibacter gottschalkii Set 5 (codon-optimized nucleic acid sequences) Left column discloses SEQ ID NOS 78292-78615 and right column discloses SEQ ID NOS 78616-78939.
[0112] Table 6A: Representative Antigens (fragments) of Methanobrevibacter gottschalkii Set 6 (amino acid sequences (SEQ ID NOS 78940-79032) and nucleic acid sequences (SEQ ID NOS 79033-79125))
[0113] Table 6B: Representative Antigens (fragments) of Methanobrevibacter gottschalkii Set 6 (codon-optimized nucleic acid sequences) Left column discloses SEQ ID NOS 79126-79218 and right column discloses SEQ ID NOS 79219-79311.
[0114] Table 6C: Representative sequences of the cell surface proteins of Methanobrevibacter ruminantium M1 (GenBank: CP001719.1)
   [0115] See SEQ ID NO. 1 to SEQ ID NO. 2217 for the native nucleic acid sequences. See SEQ ID NO. 2218 to SEQ ID NO. 4434 for the bovine codon-optimized nucleic acid sequences. See SEQ ID NO. 4435 to SEQ ID NO. 6651 for the amino acid sequences.
[0116] Table 6D: Representative sequences of the cell surface proteins of Methanobrevibacter gottschalkii
   [0117] See SEQ ID NO. 6652 to SEQ ID NO. 8451 for the native nucleic acid sequences. See SEQ ID NO. 8452 to SEQ ID NO. 10251 for the bovine codon-optimized nucleic acid sequences. See SEQ ID NO. 10252 to SEQ ID NO. 12051 for the amino acid sequences.
[0118] Table 6E: Representative mtrE sequences of methanogens
   [0119] See SEQ ID NO. 12100 to SEQ ID NO. 12147 for the nucleic acid sequences. See SEQ ID NO. 12052 to SEQ ID NO. 12099 for the amino acid sequences.

TABLE 6F
Genes and Bos taurus codon-optimized nucleic acid sequence of the genes

| | | Bos taurus optimized nucleic acid |
|---|---|---|
| Name | Species | sequence (SEQ ID NO) |
| WP_004031278.1 | Methanobacterium formicicum | SEQ ID NO: 16969 |
| WP_012956721.1 | Methanobrevibacter ruminantium | SEQ ID NO: 16970 |
| WP_019264904.1 | Methanobrevibacter smithii | SEQ ID NO: 16971 |
| WP_016359091.1 | Methanobrevibacter sp. AbM4 | SEQ ID NO: 16972 |
| WP_011033493.1 | Methanosarcina mazei | SEQ ID NO: 16973 |
| mru0143 | Methanobrevibacter ruminantium | SEQ ID NO: 16974 |
| mru0842 | Methanobrevibacter ruminantium | SEQ ID NO: 16975 |
| mru2048 | Methanobrevibacter ruminantium | SEQ ID NO: 16976 |
| mru1222 | Methanobrevibacter ruminantium | SEQ ID NO: 16977 |
| mru2047 | Methanobrevibacter ruminantium | SEQ ID NO: 16978 |

*The vaccine compositions of the present disclosure may comprise a polypeptides or a fragment thereof encoded by any one of the nucleic acids above.

TABLE 6G
Exemplary structural/functional groups of representative cell surface proteins
This table contains SEQ ID NOs of amino acid sequences of proteins; or SEQ ID NOs of nucleic acid
sequences that encode the proteins that belong to the indicated structural and/or functional groups.
(1) Adhesin-like proteins (SEQ ID NOs)

| | | | | | | | | | | | | |
|---|---|---|---|---|---|---|---|---|---|---|---|---|
| 4438 | 4449 | 4453 | 4454 | 4465 | 4472 | 4482 | 4498 | 4506 | 4510 | 4511 | 4513 | 4516 |
| | 4517 | 4518 | 4519 | 4520 | 4524 | 4577 | 4594 | 4618 | 4656 | 4679 | 4689 | 4747 |
| | 4751 | 4752 | 4760 | 4761 | 4765 | 4772 | 4850 | 4851 | 4852 | 4883 | 4884 | 4922 |
| | 4926 | 5137 | 5156 | 5160 | 5205 | 5208 | 5244 | 5257 | 5261 | 5272 | 5275 | 5276 |
| | 5329 | 5335 | 5395 | 5396 | 5403 | 5409 | 5410 | 5411 | 5412 | 5509 | 5510 | 5521 |
| | 5556 | 5563 | 5639 | 5642 | 5654 | 5679 | 5753 | 5774 | 5790 | 5808 | 5818 | 5819 |
| | 5848 | 5849 | 5856 | 5897 | 5929 | 5930 | 5931 | 5932 | 5938 | 5945 | 6036 | 6038 |
| | 6082 | 6083 | 6158 | 6230 | 6387 | 6403 | 6428 | 6475 | 6480 | 6481 | 6484 | 6485 |
| | 6486 | 6487 | 6491 | 6522 | 6555 | 6556 | 6566 | 6579 | 6610 | 6621 | 6628 | 10279 |
| | 10280 | 10281 | 10282 | 10336 | 10337 | 10341 | 10342 | 10357 | 10369 | 10514 | 10522 | 10539 |
| | 10540 | 10591 | 10613 | 10614 | 10616 | 10617 | 10618 | 10627 | 10637 | 10638 | 10639 | 10640 |
| | 10665 | 10671 | 10677 | 10697 | 10723 | 10731 | 10810 | 10935 | 11091 | 11311 | 11331 | 11528 |
| | 11594 | 11595 | 11596 | 11646 | 11902 | 11903 | 11904 | 11909 | 11961 | 11987 | 16974 | 16975 |
| | 16976 | 16977 | 16774 | 16777 | 16780 | 16784 | 16785 | 16786 | 16787 | 16789 | 16791 | 16792 |
| | 16793 | 16794 | 16795 | 16797 | 16799 | 16800 | 16801 | 16802 | 16803 | 16804 | 16805 | 16806 |
| | 16807 | 16808 | 16857 | 16861 | 16863 | 16864 | 16865 | 16868 | 16869 | 16871 | 16872 | 53218 |
| | 53219 | 53220 | 53221 | 53222 | 53223 | 53224 | 53225 | 53226 | 53227 | 53228 | 53229 | 53230 |
| | 53231 | 53232 | 53233 | 53234 | 53235 | 53236 | 53237 | 53238 | 53239 | 53240 | 53241 | 53242 |
| | 53250 | 53251 | 53252 | 53253 | 53254 | 53255 | 53256 | 53257 | 53258 | 53259 | 53260 | 53261 |
| | 53262 | 53263 | 53264 | 53265 | 53266 | 53267 | 53268 | 53269 | 53270 | 53271 | 53272 | 53273 |
| | 53274 | 53275 | 53276 | 53277 | 53278 | 53279 | 53280 | 53281 | 53282 | 53283 | 53284 | 53285 |
| | 53286 | 53287 | 53288 | 53289 | 53290 | 53291 | 53292 | 53293 | 53294 | 53295 | 53296 | 53297 |
| | 53298 | 53299 | 53300 | 53301 | 53302 | 53303 | 53304 | 53305 | 53306 | 53307 | 53308 | 53309 |
| | 53310 | 53311 | 53312 | 53313 | 53314 | 53315 | 53316 | 53317 | 53318 | 53319 | 53320 | 53321 |
| | 53322 | 53323 | 53324 | 53325 | 53326 | 53327 | 53328 | 53329 | 53330 | 53331 | 53332 | 53333 |
| | 53334 | 53335 | 53336 | 53337 | 53338 | 53339 | 53340 | 53341 | 53342 | 53343 | 53344 | 53345 |
| | 53346 | 53347 | 53348 | 53349 | 53350 | 53351 | 53352 | 53353 | 53354 | 53355 | 53356 | 53357 |
| | 53358 | 53359 | 53360 | 53361 | 53362 | 53363 | 53364 | 53365 | 53366 | 53367 | 53368 | 53370 |
| | 53371 | 53372 | 53373 | 53374 | 53375 | 53376 | 53377 | 53378 | 53379 | 53380 | 53381 | 53382 |
| | 53383 | 53384 | 53385 | 53386 | 53387 | 53388 | 53389 | 53390 | 53391 | 53392 | 53393 | 53394 |
| | 53395 | 53396 | 53397 | 53398 | 53399 | 53400 | 53401 | 53402 | 53403 | 53406 | 53407 | 53408 |
| | 53409 | 53410 | 53411 | 53412 | 53413 | 53414 | 53415 | 53416 | 53417 | 53418 | 53419 | 53420 |
| | 53421 | 53422 | 53423 | 53424 | 53425 | 53426 | 53427 | 53428 | 53429 | 53430 | 53431 | 53432 |
| | 53433 | 53434 | 53435 | 53436 | 53437 | 53438 | 53439 | 53440 | 53441 | 53442 | 53443 | 53444 |
| | 53445 | 53446 | 53447 | 53448 | 53449 | 53450 | 53451 | 53452 | 53453 | 53454 | 53455 | 53456 |
| | 53457 | 53458 | 53459 | 53460 | 53461 | 53462 | 53463 | 53464 | 53465 | 53466 | 53467 | 53468 |
| | 53477 | 53478 | 53479 | 53480 | 53481 | 53482 | 53483 | 53484 | 53485 | 53486 | 53487 | 53488 |
| | 53489 | 53490 | 53491 | 53492 | 53493 | 53494 | 53495 | 53496 | 53497 | 53498 | 53499 | 53500 |
| | 53501 | 53502 | 53503 | 53504 | 53505 | 53508 | 53509 | 53510 | 53511 | 53512 | 53522 | 53523 |
| | 53524 | 53525 | 53526 | 53527 | 53528 | 53529 | 53530 | 53531 | 53532 | 53533 | 53534 | 53535 |
| | 53536 | 53537 | 53538 | 53539 | 53540 | 53541 | 53542 | 53546 | 53547 | 53548 | 53549 | 53550 |
| | 53551 | 53552 | 53553 | 53554 | 53555 | 53556 | 53557 | 53558 | 53559 | 53560 | 53561 | 53562 |
| | 53563 | 53564 | 53571 | 53572 | 53573 | 53574 | 53575 | 53576 | 53577 | 53578 | 53579 | 53580 |
| | 53581 | 53582 | 53583 | 53584 | 53585 | 53586 | 53587 | 53594 | 53595 | 53596 | 53597 | 53598 |
| | 53599 | 53603 | 53604 | 53605 | 53606 | 53607 | 53608 | 53609 | 53610 | 53611 | 53612 | 53613 |
| | 53614 | 53615 | 53616 | 53617 | 53618 | 53619 | 53620 | 53621 | 53622 | 53623 | 53624 | 53625 |
| | 53626 | 53627 | 53628 | 53629 | 53630 | 53631 | 53632 | 53633 | 53634 | 53635 | 53636 | 53637 |
| | 53638 | 53639 | 53640 | 53641 | 53642 | 53643 | 53644 | 53645 | 53646 | 53647 | 53648 | 53649 |
| | 53657 | 53658 | 53659 | 53660 | 53661 | 53662 | 53663 | 53664 | 53665 | 53666 | 53667 | 53668 |
| | 53669 | 53670 | 53671 | 53672 | 53673 | 53674 | 53675 | 53684 | 53685 | 53694 | 53695 | 53696 |
| | 53697 | 53698 | 53699 | 53700 | 53701 | 53702 | 53703 | 53704 | 53705 | 53706 | 53707 | 53708 |
| | 53709 | 53710 | 53711 | 53712 | 53713 | 53714 | 53715 | 53716 | 53717 | 53718 | 53719 | 53720 |
| | 53721 | 53722 | 53723 | 53724 | 53725 | 53726 | 53727 | 53728 | 53729 | 53730 | 53731 | 53732 |
| | 53733 | 53734 | 53735 | 53736 | 53737 | 53738 | 53739 | 53740 | 53741 | 53742 | 53743 | 53744 |
| | 53745 | 53746 | 53747 | 53748 | 53749 | 53750 | 53751 | 53752 | 53753 | 53754 | 53755 | 53756 |
| | 53757 | 53758 | 53759 | 53760 | 53761 | 53762 | 53763 | 53764 | 53765 | 53766 | 53767 | 53768 |
| | 53769 | 53770 | 53771 | 53772 | 53773 | 53774 | 53775 | 53776 | 53777 | 53778 | 53779 | 53780 |
| | 53781 | 53782 | 53783 | 53784 | 53785 | 53786 | 53787 | 53788 | 53789 | 53790 | 53791 | 53792 |
| | 53793 | 53794 | 53796 | 53797 | 53798 | 53799 | 53800 | 53801 | 53802 | 53803 | 53804 | 53805 |
| | 53806 | 53807 | 53808 | 53809 | 53810 | 53811 | 53812 | 53813 | 53820 | 53821 | 53822 | 53823 |
| | 53824 | 53825 | 53826 | 53827 | 53828 | 53829 | 53830 | 53831 | 53832 | 53833 | 53834 | 53835 |
| | 53836 | 53837 | 53838 | 53839 | 53840 | 53841 | 53842 | 53843 | 53844 | 53845 | 53846 | 53847 |
| | 53848 | 53849 | 53850 | 53851 | 53852 | 53853 | 53854 | 53855 | 53856 | 53857 | 53858 | 53859 |
| | 53860 | 53861 | 53862 | 53866 | 53867 | 53868 | 53869 | 53870 | 53871 | 53872 | 53873 | 53874 |
| | 53875 | 53876 | 53877 | 53878 | 53879 | 53880 | 53906 | 53907 | 53908 | 53909 | 53910 | 53911 |
| | 53916 | 53917 | 53918 | 53919 | 53920 | 53921 | 53922 | 53923 | 53924 | 53925 | 53926 | 53927 |
| | 53928 | 53929 | 53930 | 53931 | 53932 | 53934 | 53935 | 53936 | 53937 | 53938 | 53939 | 53940 |
| | 53941 | 53942 | 53943 | 53944 | 53945 | 53946 | 53947 | 53948 | 53949 | 53950 | 53951 | 53952 |
| | 53953 | 53954 | 53955 | 53956 | 53957 | 53958 | 53959 | 53960 | 53961 | 53962 | 53963 | 53964 |
| | 53965 | 53966 | 53967 | 53968 | 53969 | 53970 | 53972 | 53973 | 53974 | 53976 | 53977 | 53978 |
| | 53979 | 53980 | 53981 | 53982 | 53983 | 53984 | 53986 | 53987 | 53988 | 53989 | 53990 | 54010 |
| | 54011 | 54034 | 54035 | 54036 | 54037 | 54038 | 54039 | 54040 | 54041 | 54042 | 54043 | 54044 |
| | 54045 | 54046 | 54047 | 54048 | 54049 | 54050 | 54051 | 54052 | 54053 | 54054 | 54055 | 54056 |
| | 54057 | 54058 | 54059 | 54060 | 54061 | 54062 | 54063 | 54064 | 54065 | 54066 | 54067 | 54068 |
| | 54069 | 54070 | 54071 | 54072 | 54075 | 54076 | 54077 | 54078 | 54079 | 54081 | 54082 | 54093 |
| | 54099 | 54100 | 54110 | 54111 | 54112 | 54113 | 54114 | 54115 | 54116 | 54117 | 54118 | 54122 |
| | 54132 | 54133 | 54134 | 54135 | 54136 | 54137 | 54138 | 54139 | 54140 | 54149 | 54150 | 54151 |
| | 54152 | 54155 | 54156 | 54188 | 54189 | 54190 | 54191 | 54192 | 54193 | 54194 | 54195 | 54196 |
| | 54197 | 54198 | 54199 | 54200 | 54201 | 54202 | 54203 | 54204 | 54205 | 54222 | 54223 | 54224 |
| | 54225 | 54242 | 54243 | 54247 | 54248 | 54249 | 54250 | 54251 | 54252 | 54253 | 54262 | 54263 |
| | 54264 | 54265 | 54266 | 54267 | 54268 | 54269 | 54270 | 54271 | 54272 | 54283 | 54284 | 54285 |
| | 54286 | 54287 | 54288 | 54289 | 54290 | 54291 | 54292 | 54293 | 54296 | 54297 | 54313 | 54314 |
| | 54315 | 54316 | 54318 | 54328 | 54329 | 54330 | 54331 | 54332 | 54333 | 54334 | 54335 | 54336 |
| | 54337 | 54353 | 54371 | 54372 | 54373 | 54374 | 54375 | 54376 | 54377 | 54378 | 54387 | 54392 |
| | 54393 | 54417 | 54462 | 54463 | 54464 | 54465 | 54466 | 54467 | 54468 | 54469 | 54472 | 54473 |
| | 54474 | 54475 | 54493 | 54494 | 54495 | 54496 | 54497 | 54498 | 54499 | 54500 | 54501 | 54502 |
| | 54503 | 54504 | 54505 | 54506 | 54519 | 54520 | 54521 | 54526 | 54527 | 54542 | 54543 | 54544 |
| | 54545 | 54646 | 54647 | 54648 | 54649 | 54650 | 54651 | 54652 | 54653 | 54654 | 54655 | 54656 |
| | 54657 | 54699 | 54707 | 54708 | 54709 | 54710 | 54711 | 54712 | 54713 | 54716 | 54732 | 54733 |
| | 54734 | 54735 | 54736 | 54737 | 54738 | 54739 | 54740 | 54748 | 54749 | 54750 | 54751 | 54755 |
| | 54756 | 54757 | 54758 | 54773 | 54774 | 54775 | 54826 | 54827 | 54828 | 54829 | 54830 | 54831 |
| | 54832 | 54833 | 54834 | 54835 | 54836 | 54837 | 54838 | 54854 | 54887 | 55009 | 55075 | 55076 |
| | 55077 | 55078 | 55079 | 55080 | 55081 | 55082 | 55083 | 55084 | 55088 | 55089 | 55096 | 55097 |
| | 55102 | 55103 | 55104 | 55105 | 55106 | 55114 | 55115 | 55116 | 55117 | 55118 | 55125 | 55126 |
| | 55127 | 55128 | 55129 | 55130 | 55131 | 55142 | 55161 | 55162 | 55166 | 55167 | 55168 | 55169 |
| | 55188 | 55189 | 55190 | 55191 | 55258 | 55259 | 55260 | 55261 | 55285 | 55286 | 55287 | 55288 |
| | 55290 | 55291 | 55329 | 55370 | 55375 | 55376 | 55462 | 55463 | 55464 | 55465 | 55466 | 55467 |
| | 55468 | 55469 | 55470 | 55471 | 55472 | 55473 | 55725 | 55726 | 55727 | 55732 | 55733 | 55797 |
| | 55798 | 55799 | 55800 | 55805 | 55810 | 55811 | 55812 | 55813 | 55843 | 55844 | 55894 | 55895 |
| | 55896 | 55897 | 55898 | 55899 | 55970 | 55971 | 56160 | 56161 | 56162 | 56163 | 56164 | 56165 |
| | 56166 | 56180 | 56471 | 56472 | 56473 | 56552 | 56553 | 56554 | 56555 | 56591 | 56640 | 56641 |
| | 56668 | 56669 | 56704 | 56705 | 56747 | 56748 | 56757 | 56758 | 56763 | 56764 | 56772 | 56773 |
| | 56774 | 56775 | 56776 | 56777 | 56778 | 56779 | 57110 | 57111 | 57112 | 57144 | 57145 | 57153 |
| | 57154 | 57181 | 57199 | 57200 | 57201 | 57202 | 57206 | 57221 | 57225 | 57250 | 57251 | 57252 |
| | 57265 | 57266 | 57318 | 57319 | 57343 | 57344 | 57345 | 57375 | 57376 | 57381 | 57382 | 57383 |
| | 57384 | 57407 | 57421 | 57422 | 57428 | 57429 | 57448 | 57449 | 57483 | 57484 | 57485 | 57486 |
| | 57529 | 57530 | 57546 | 57619 | 57641 | 57642 | 57643 | 57644 | 57645 | 57689 | 57696 | 57697 |
| | 57814 | 57815 | 57841 | 57842 | 57843 | 57844 | 57848 | 57922 | 58229 | 58230 | 58231 | 58232 |
| | 58266 | 58267 | 58279 | 58280 | 58281 | 58282 | 58283 | 58284 | 58311 | 58312 | 58313 | 58314 |
| | 58315 | 58351 | 58352 | 58353 | 58354 | 58355 | 58356 | 58357 | 58358 | 58578 | 58579 | 58703 |
| | 58704 | 58705 | 58706 | 58707 | 58708 | 58709 | 58740 | 58741 | 58742 | 58743 | 58746 | 58747 |
| | 58752 | 58761 | 58762 | 58768 | 58769 | 58841 | 58842 | 58940 | 58941 | 59909 | 59910 | 60356 |
| | 60357 | 60445 | 60446 | 60468 | 60569 | 60663 | 60664 | 60676 | 60677 | 60751 | 60754 | 60755 |
| | 60784 | 60785 | 60786 | 60787 | 60788 | 60789 | 60790 | 60791 | 60792 | 60814 | 60815 | 60940 |
| | 60941 | 60942 | 60943 | 60944 | 60945 | 60946 | 60947 | 60997 | 60998 | 60999 | 61000 | 61001 |
| | 61002 | 61006 | 61083 | 61093 | 61094 | 61095 | 61131 | 61136 | 61137 | 61138 | 61139 | 61140 |
| | 61141 | 61142 | 61143 | 61162 | 61378 | 61379 | 61380 | 61492 | 61493 | 61494 | 61633 | 61679 |
| | 61680 | 61681 | 61735 | 61736 | 61737 | 61738 | 61778 | 61779 | 61780 | 61911 | 61912 | 61913 |
| | 61914 | 61915 | 61959 | 62019 | 62054 | 62055 | 62060 | 62061 | 62076 | 62077 | 62078 | 62079 |
| | 62080 | 62081 | 62082 | 62083 | 62084 | 62103 | 62104 | 62107 | 62108 | 62137 | 62261 | 62262 |
| | 62263 | 62270 | 62292 | 62293 | 62294 | 62295 | 62311 | 62332 | 62345 | 62384 | 62385 | 62540 |
| | 62541 | 62542 | 62624 | 62625 | 62626 | 62627 | 62645 | 62646 | 62647 | 62648 | 62649 | 62650 |
| | 62651 | 62652 | 62916 | 62917 | 62942 | 62957 | 63054 | 63066 | 63203 | 63204 | 63205 | 63206 |
| | 63207 | 63211 | 63212 | 63213 | 63214 | 63215 | 63497 | 63551 | 63552 | 63553 | 63554 | 53555 |
| | 63556 | 63557 | 63558 | 63632 | 63703 | 63706 | 63724 | 63735 | 63899 | 64177 | 64178 | 64179 |
| | 64180 | 6418 | 64182 | 64183 | 64184 | 64200 | 64216 | 64252 | 64253 | 64254 | 64296 | 64297 |
| | 64298 | 64299 | 64314 | 64337 | 64338 | 64339 | 64340 | 64341 | 64342 | 64343 | 64390 | 64471 |
| | 64515 | 64516 | 64517 | 64528 | 64529 | 64535 | 64536 | 64537 | 64569 | 64570 | 64633 | 64634 |
| | 64635 | 64636 | 64715 | 64716 | 64723 | 64724 | 64732 | 64733 | 64734 | 64739 | 64740 | 64741 |
| | 64742 | 64755 | 64756 | 64776 | 64777 | 64778 | 64779 | 64780 | 64952 | 64953 | 64985 | 65050 |
| | 65051 | 65127 | 65170 | 65320 | 65323 | 65506 | 65507 | 65508 | 65509 | 65510 | 65523 | 65531 |
| | 65571 | 65586 | 65618 | 65642 | 65643 | 65664 | 65736 | 65810 | 65811 | 65812 | 65833 | 65948 |
| | 65949 | 65950 | 65951 | 65952 | 66006 | 66144 | 66145 | 66393 | 66394 | 66396 | 66438 | 66439 |
| | 66458 | 66538 | 66656 | 66670 | 66687 | 66716 | 66839 | 66892 | 66907 | 66908 | 66909 | 66952 |
| | 67160 | 67161 | 67221 | 67281 | 67520 | 67774 | 67775 | 67776 | 67880 | 67924 | 68140 | 68141 |
| | 68284 | 68402 | 68409 | 68421 | 68436 | 68476 | 68482 | 68571 | 68648 | 68649 | 68650 | 68690 |
| | 68695 | 68698 | 68722 | 68723 | 68741 | 68742 | 68743 | 68744 | 68911 | 68989 | 69071 | 69116 |
| | 69124 | 69160 | 69161 | 69162 | 69201 | 69202 | 69203 | 69204 | 69233 | 69278 | 69299 | 69300 |
| | 69301 | 69333 | 69343 | 69344 | 69425 | 69464 | 69508 | 69523 | 69524 | 69574 | 69577 | 69585 |
| | 69603 | 69613 | 69734 | 69839 | 69896 | 69897 | 69958 | 70062 | 70078 | 70081 | 70107 | 70114 |
| | 70142 | 70143 | 70145 | 70154 | 70162 | 70204 | 70214 | 70231 | 70241 | 70249 | 70256 | 70289 |
| | 70316 | 70320 | 70326 | 70334 | 70370 | 70402 | 70444 | 70446 | 70475 | 70500 | 70509 | 70511 |
| | 70519 | 70521 | 70524 | 70537 | 70538 | 70539 | 70543 | 70546 | 70548 | 70558 | 70559 | 70569 |
| | 70576 | 70585 | 70586 | 70587 | 70590 | 70591 | 70599 | 70601 | 70603 | 70613 | 70614 | 70616 |
| | 70617 | 70619 | 70625 | 70631 | 70646 | 70648 | 70649 | 70658 | 70659 | 70666 | 70667 | 70668 |
| | 70669 | 70677 | 70679 | 70692 | 70693 | 70696 | 70707 | 70731 | 70737 | 70741 | 70752 | 70757 |
| | 70768 | 70796 | 70807 | 70808 | 70811 | 70819 | 70820 | 70821 | 70829 | 70837 | 70841 | 70843 |
| | 70851 | 70852 | 70860 | 70865 | 70879 | 70880 | 70881 | 70882 | 70890 | 70891 | 70895 | 70896 |
| | 70905 | 70906 | 70907 | 70918 | 70920 | 70926 | 70931 | 70951 | 70993 | 71009 | 71014 | 71015 |
| | 71017 | 71020 | 71022 | 71031 | 71035 | 71038 | 71055 | 71062 | 71082 | 71083 | 71085 | 71104 |
| | 71105 | 71106 | 71107 | 71116 | 71121 | 71182 | 71186 | 71195 | 71196 | 71214 | 71217 | 71218 |
| | 71219 | 71220 | 71221 | 71226 | 71232 | 71233 | 71234 | 71235 | 71248 | 71251 | 71253 | 71255 |
| | 71262 | 71265 | 71300 | 71343 | 71383 | 71461 | 71470 | 71531 | 71560 | 71561 | 71562 | 71580 |
| | 71653 | 71654 | 71655 | 71658 | 71674 | 71682 | 75524 | 75525 | 75527 | 75544 | 75545 | 75546 |
| | 75547 | 75548 | 75549 | 75550 | 75551 | 75552 | 75553 | 75554 | 75555 | 75566 | 75571 | 75572 |
| | 75615 | 75620 | 75626 | 75627 | 75637 | 75638 | 75639 | 75640 | 75641 | 75642 | 75643 | 75644 |
| | 75645 | 75646 | 75654 | 75658 | 75659 | 75660 | 75661 | 75679 | 75681 | 75682 | 75683 | 75695 |
| | 75698 | 75725 | 75726 | 75727 | 75728 | 75729 | 75730 | 75731 | 75766 | 75798 | 75852 | 75858 |
| | 75859 | 75860 | 75861 | 75862 | 75863 | 75864 | 75865 | 75866 | 75867 | 75868 | 75869 | 75870 |
| | 75871 | 75914 | 75937 | 75938 | 75939 | 75948 | 76002 | 76003 | 76004 | 76006 | 76019 | 76020 |
| | 76021 | 76022 | 76023 | 76024 | 76025 | 76026 | 76030 | | | | | |

(2) ATP-processing proteins (SEQ ID NOs)

| | | | | | | | | | | | | |
|---|---|---|---|---|---|---|---|---|---|---|---|---|
| 5132 | 5619 | 6156 | 6234 | 6293 | 6369 | 10378 | 10839 | 10840 | 11388 | 11452 | 53881 | 53882 |
| | 53883 | 53884 | 53933 | 53991 | 53992 | 53993 | 53994 | 53995 | 54005 | 54006 | 54007 | 54008 |
| | 54009 | 54073 | 54074 | 54172 | 54173 | 54174 | 54212 | 54213 | 54238 | 54239 | 54277 | 54278 |
| | 54279 | 54280 | 54281 | 54282 | 54294 | 54295 | 54298 | 54299 | 54302 | 54303 | 54306 | 54320 |
| | 54321 | 54324 | 54325 | 54369 | 54370 | 54388 | 54389 | 54390 | 54391 | 54394 | 54395 | 54396 |
| | 54397 | 54398 | 54399 | 54400 | 54401 | 54402 | 54403 | 54404 | 54405 | 54406 | 54407 | 54408 |
| | 54409 | 54410 | 54411 | 54412 | 54413 | 54414 | 54415 | 54416 | 54418 | 54419 | 54420 | 54421 |
| | 54422 | 54423 | 54424 | 54425 | 54426 | 54427 | 54428 | 54429 | 54430 | 54431 | 54440 | 54442 |
| | 54443 | 54536 | 54537 | 54844 | 54845 | 55542 | 55559 | 55560 | 55561 | 55562 | 55567 | 55577 |
| | 55615 | 55616 | 55705 | 55724 | 55791 | 55793 | 55795 | 55796 | 55804 | 55806 | 55807 | 55809 |
| | 56212 | 56213 | 56585 | 56586 | 56725 | 56726 | 57045 | 57046 | 57196 | 57207 | 57208 | 57363 |
| | 57364 | 58862 | 58970 | 59114 | 59115 | 60701 | 61682 | 61994 | 61997 | 61998 | 61999 | 62000 |
| | 62001 | 62002 | 62003 | 62008 | 62009 | 62010 | 62014 | 62015 | 62016 | 62017 | 62018 | 62022 |
| | 62117 | 62279 | 62280 | 62281 | 62282 | 62308 | 62318 | 62333 | 62614 | 62615 | 62616 | 62617 |
| | 63506 | 66812 | 66813 | 66814 | 67056 | 67761 | 68729 | 68731 | 69049 | 69050 | 69051 | 69081 |
| | 69082 | 69168 | 69356 | 69595 | 69608 | 69614 | 69640 | 69659 | 69663 | 69665 | 69671 | 69715 |
| | 69718 | 69726 | 69732 | 69735 | 69736 | 69741 | 69745 | 69747 | 69748 | 69781 | 69794 | 69960 |
| | 70169 | 70180 | 70185 | 70350 | 70508 | 70609 | 70726 | 70761 | 70970 | 71047 | 71081 | 71095 |
| | 71097 | 71125 | 71143 | 71149 | 71150 | 71210 | 71237 | 71245 | 71286 | 71305 | 71306 | 71309 |
| | 71310 | 71386 | 71389 | 71394 | 71403 | 71409 | 71445 | 71457 | 71476 | 71493 | 71504 | 71505 |
| | 71507 | 71508 | 71583 | 71584 | 71606 | 71608 | 71684 | 71686 | 71695 | 75573 | 75732 | 75733 |
| | 75889 | | | | | | | | | | | |

(3) Cell wall biosynthesis proteins (SEQ ID NOs)

| | | | |
|---|---|---|---|
| 16876 | 69386 | 69387 | 70804 |

(4) Cofactor biosynthesis proteins (SEQ ID NOs)

| | | | | | | | | | | | | |
|---|---|---|---|---|---|---|---|---|---|---|---|---|
| 55348 | 55349 | 55350 | 56938 | 56939 | 56940 | 57423 | 57424 | 58518 | 58519 | 58520 | 58521 | 65125 |
| | 68706 | 71029 | | | | | | | | | | |

(5) CRISPR proteins (provides methanogens an immunity against viruses) (SEQ ID NOs)

| | |
|---|---|
| 70636 | 71045 |

(6) Energy metabolism proteins (SEQ ID NOs)

| | | | | |
|---|---|---|---|---|
| 58756 | 58757 | 61126 | 61127 | 61128 |

(7) Enzymes (SEQ ID NOs)

| | | | | | | | | | | | | |
|---|---|---|---|---|---|---|---|---|---|---|---|---|
| 4617 | 4774 | 4986 | 6013 | 6559 | 11013 | 11468 | 11485 | 11506 | 11773 | 11845 | 16771 | 53045 |
| | 53046 | 53047 | 53048 | 53049 | 53050 | 53051 | 53052 | 53053 | 53054 | 53055 | 53056 | 53057 |
| | 53058 | 53059 | 53060 | 53061 | 53062 | 53063 | 53064 | 53065 | 53066 | 53067 | 53068 | 53069 |
| | 53070 | 53071 | 53072 | 53073 | 53074 | 53075 | 53076 | 53077 | 53078 | 53079 | 53080 | 53081 |
| | 53082 | 53083 | 53084 | 53085 | 53086 | 53087 | 53088 | 53089 | 53090 | 53091 | 53092 | 53093 |
| | 53094 | 53095 | 53096 | 53097 | 53098 | 53099 | 53100 | 53101 | 53102 | 53103 | 53104 | 53105 |
| | 53106 | 53107 | 53108 | 53109 | 53110 | 53111 | 53112 | 53113 | 53114 | 53115 | 53116 | 53117 |
| | 53118 | 53119 | 53120 | 53121 | 53122 | 53123 | 53124 | 53125 | 53126 | 53127 | 53128 | 53129 |
| | 53130 | 53131 | 53132 | 53133 | 53134 | 53135 | 53136 | 53137 | 53138 | 53139 | 53140 | 53141 |
| | 53142 | 53143 | 53144 | 53145 | 53146 | 53147 | 53148 | 53149 | 53150 | 53151 | 53152 | 53153 |
| | 53154 | 53155 | 53156 | 53157 | 53158 | 53159 | 53160 | 53161 | 53162 | 53163 | 53164 | 53165 |
| | 53166 | 53167 | 53168 | 53169 | 53170 | 53171 | 53172 | 53173 | 53174 | 53175 | 53176 | 53177 |
| | 53178 | 53179 | 53180 | 53181 | 53182 | 53183 | 53184 | 53185 | 53186 | 53187 | 53188 | 53189 |
| | 53190 | 53191 | 53192 | 53193 | 53194 | 53195 | 53196 | 53197 | 53198 | 53199 | 53200 | 53201 |
| | 53202 | 53203 | 53204 | 53205 | 53206 | 53207 | 53208 | 53209 | 53210 | 53211 | 53212 | 53213 |
| | 53214 | 53215 | 53216 | 53217 | 53243 | 53244 | 53245 | 53246 | 53247 | 53248 | 53249 | 53404 |
| | 54379 | 54380 | 54441 | 54517 | 54518 | 54798 | 54799 | 54800 | 54801 | 54807 | 54808 | 54809 |
| | 54810 | 55017 | 55018 | 55019 | 55257 | 55434 | 55694 | 55714 | 55738 | 55767 | 55772 | 55781 |
| | 55782 | 55792 | 55794 | 55808 | 56331 | 56332 | 56333 | 56606 | 56734 | 56735 | 56744 | 56745 |
| | 56746 | 57077 | 57078 | 57120 | 57121 | 57122 | 57173 | 57174 | 57175 | 57176 | 57182 | 57183 |
| | 57184 | 57332 | 57333 | 57430 | 57431 | 57432 | 57433 | 57434 | 57439 | 57440 | 57560 | 57561 |
| | 57599 | 57600 | 57822 | 57823 | 57870 | 57871 | 58169 | 58170 | 58316 | 58436 | 58437 | 58438 |
| | 58439 | 58588 | 58712 | 58713 | 58714 | 58720 | 58721 | 58729 | 58730 | 58731 | 58855 | 58893 |
| | 58894 | 58901 | 58902 | 58909 | 58910 | 58959 | 58960 | 59122 | 59123 | 59124 | 59958 | 59959 |
| | 59960 | 60337 | 60338 | 60339 | 60361 | 60362 | 60363 | 60364 | 60507 | 60508 | 60509 | 60510 |
| | 60511 | 60512 | 60629 | 60630 | 60631 | 60632 | 60633 | 60641 | 60642 | 60643 | 60644 | 60645 |
| | 60646 | 60647 | 60648 | 60649 | 60650 | 60651 | 60652 | 60653 | 60654 | 60655 | 60656 | 60657 |
| | 60658 | 60675 | 60717 | 60718 | 60719 | 60763 | 60764 | 60765 | 60766 | 60896 | 60897 | 60898 |
| | 61029 | 61030 | 61201 | 61202 | 61203 | 61204 | 61205 | 61206 | 61207 | 61208 | 61256 | 61257 |
| | 61258 | 61259 | 61284 | 61285 | 61286 | 61287 | 61288 | 61289 | 61295 | 61383 | 61384 | 61385 |
| | 61386 | 61387 | 61388 | 61389 | 61390 | 61391 | 61392 | 61393 | 61394 | 61395 | 61396 | 61397 |
| | 61398 | 61399 | 61400 | 61401 | 61402 | 61403 | 61404 | 61409 | 61410 | 61411 | 61412 | 61413 |
| | 61414 | 61417 | 61418 | 61419 | 61420 | 61421 | 61422 | 61423 | 61424 | 61425 | 61426 | 61427 |
| | 61428 | 61429 | 61430 | 61431 | 61432 | 61433 | 61434 | 61435 | 61436 | 61437 | 61438 | 61439 |
| | 61440 | 61444 | 61445 | 61446 | 61447 | 61448 | 61449 | 61709 | 61710 | 61711 | 61752 | 61753 |
| | 61754 | 61830 | 61831 | 61832 | 61855 | 61856 | 61924 | 62056 | 62057 | 62085 | 62089 | 62099 |
| | 62110 | 62133 | 62148 | 62208 | 62209 | 62210 | 62211 | 62212 | 62228 | 62389 | 62390 | 62391 |
| | 62392 | 62393 | 62394 | 62395 | 62396 | 62405 | 62406 | 62420 | 62421 | 62422 | 62463 | 62464 |
| | 62465 | 62481 | 62482 | 62483 | 62484 | 62493 | 62494 | 62495 | 62496 | 62497 | 62498 | 62499 |
| | 62509 | 62510 | 62511 | 62512 | 62513 | 62514 | 62518 | 62519 | 62520 | 62521 | 62522 | 62523 |
| | 62524 | 62525 | 62526 | 62527 | 62535 | 62536 | 62537 | 62547 | 62548 | 62549 | 62557 | 62558 |
| | 62559 | 62565 | 62566 | 62567 | 62571 | 62572 | 62573 | 62574 | 62575 | 62576 | 62577 | 62578 |
| | 62579 | 62590 | 62591 | 62641 | 62642 | 62673 | 62674 | 62675 | 62676 | 62677 | 63385 | 63502 |
| | 63564 | 63565 | 63965 | 64067 | 64278 | 64563 | 64589 | 64604 | 64605 | 64606 | 64607 | 64608 |
| | 64626 | 64627 | 64628 | 64629 | 64637 | 64651 | 64660 | 64679 | 64682 | 64687 | 64688 | 64693 |
| | 64750 | 64784 | 64785 | 64786 | 64920 | 64921 | 65076 | 65237 | 65449 | 65479 | 65480 | 65481 |
| | 65499 | 65532 | 65537 | 65589 | 65740 | 65775 | 65776 | 65992 | 65993 | 65994 | 65995 | 65996 |
| | 65997 | 65998 | 66200 | 66201 | 66202 | 66203 | 66204 | 66205 | 66206 | 66207 | 66208 | 66229 |
| | 66230 | 66231 | 66359 | 66477 | 66523 | 66536 | 66561 | 67804 | 67884 | 67885 | 67886 | 67910 |
| | 67911 | 68392 | 68393 | 68394 | 68395 | 68396 | 68412 | 68413 | 68414 | 68661 | 68662 | 68664 |
| | 68665 | 68701 | 68702 | 68719 | 68720 | 68762 | 68763 | 68825 | 68843 | 69060 | 69061 | 69167 |
| | 69210 | 69217 | 69367 | 69368 | 69369 | 69398 | 69422 | 69423 | 69514 | 69556 | 69570 | 69600 |
| | 69616 | 69617 | 69618 | 69623 | 69638 | 69639 | 69677 | 69708 | 69723 | 69956 | 69972 | 70038 |
| | 70128 | 70171 | 70194 | 70284 | 70317 | 70318 | 70351 | 70354 | 70412 | 70413 | 70421 | 70466 |
| | 70608 | 70633 | 70650 | 70651 | 70685 | 70686 | 70714 | 70733 | 70748 | 70758 | 70765 | 70925 |
| | 71026 | 71036 | 71046 | 71058 | 71432 | 71078 | 71094 | 71117 | 71119 | 71131 | 71167 | 71177 |
| | 71187 | 71193 | 71197 | 71200 | 71205 | 71207 | 71212 | 71215 | 71229 | 71230 | 71246 | 71250 |
| | 71254 | 71258 | 71284 | 71293 | 71296 | 71331 | 71333 | 71339 | 71347 | 71350 | 71356 | 71373 |
| | 71375 | 71376 | 71378 | 71379 | 71385 | 71410 | 71417 | 71431 | 71432 | 71434 | 71435 | 71444 |
| | 71447 | 71448 | 71451 | 71458 | 71477 | 71509 | 71517 | 71526 | 71530 | 71538 | 71539 | 71556 |
| | 71566 | 71567 | 71587 | 71602 | 71603 | 71609 | 71611 | 71623 | 71624 | 71625 | 71629 | 71635 |
| | 71637 | 71639 | 71642 | 71643 | 71644 | 71656 | 71678 | 71702 | 71703 | 75778 | 75779 | 75780 |
| | 75781 | 75782 | 75783 | 75784 | 75897 | 75905 | 75906 | 75907 | 75908 | 75909 | 75910 | 75985 |
| | 75998 | | | | | | | | | | | |

(8) Fatty acid synthesis (SEQ ID NOs)

| | |
|---|---|
| 68659 | 68660 |

(9) General metabolism (SEQ ID NOs)

| | | | | | | | | | | | | |
|---|---|---|---|---|---|---|---|---|---|---|---|---|
| 5480 | 5955 | 11908 | 16866 | 16867 | 16874 | 53369 | 53405 | 54450 | 54451 | 54452 | 54453 | 54454 |
| | 54888 | 54889 | 54890 | 54891 | 54892 | 55649 | 56541 | 56542 | 56550 | 56551 | 56556 | 56557 |
| | 56558 | 56559 | 56560 | 56561 | 56562 | 56563 | 56749 | 56750 | 56759 | 56760 | 56761 | 56762 |
| | 56801 | 56802 | 56826 | 56827 | 57308 | 57309 | 57902 | 57903 | 58386 | 58387 | 58388 | 58389 |
| | 58413 | 58414 | 58415 | 58416 | 61231 | 61232 | 61233 | 62215 | 62216 | 62217 | 62223 | 62224 |
| | 62963 | 63030 | 63031 | 63582 | 63916 | 63917 | 63918 | 63919 | 63920 | 63972 | 63973 | 63974 |
| | 64450 | 64451 | 65272 | 65273 | 65539 | 65722 | 65723 | 65724 | 65766 | 65767 | 65786 | 66530 |
| | 66616 | 66655 | 67200 | 67201 | 67253 | 67934 | 67946 | 67947 | 68134 | 68135 | 68306 | 68434 |
| | 68435 | 68669 | 68670 | 68673 | 68682 | 68683 | 68709 | 68759 | 68784 | 68787 | 68840 | 68841 |
| | 69175 | 69176 | 69226 | 69586 | 69591 | 69664 | 69672 | 69690 | 70033 | 70295 | 70310 | 70381 |
| | 70485 | 70486 | 70610 | 70675 | 70921 | 71103 | 71136 | 71168 | 71192 | 71202 | 71324 | 71328 |
| | 71341 | 71374 | 71388 | 71405 | 71419 | 71422 | 71466 | 71471 | 71485 | 71573 | 71613 | 71657 |
| | 71688 | 71691 | 76005 | | | | | | | | | |

(10) Membrane proteins (SEQ ID NOs)

| | | | | | | | | | | | | |
|---|---|---|---|---|---|---|---|---|---|---|---|---|
| 4452 | 4478 | 4481 | 4483 | 4500 | 4505 | 4515 | 4529 | 4547 | 4580 | 4581 | 4584 | 4601 |
| | 4606 | 4621 | 4627 | 4630 | 4657 | 4658 | 4659 | 4664 | 4665 | 4667 | 4668 | 4671 |
| | 4682 | 4712 | 4713 | 4740 | 4749 | 4762 | 4764 | 4790 | 4791 | 4795 | 4809 | 4810 |
| | 4811 | 4812 | 4842 | 4845 | 4848 | 4857 | 4861 | 4866 | 4879 | 4893 | 4903 | 4921 |
| | 4923 | 4924 | 4928 | 4932 | 4942 | 4943 | 4945 | 4948 | 4954 | 4957 | 4975 | 4976 |
| | 4978 | 4980 | 5000 | 5014 | 5029 | 5030 | 5031 | 5035 | 5037 | 5047 | 5055 | 5058 |
| | 5064 | 5067 | 5072 | 5096 | 5103 | 5104 | 5116 | 5119 | 5126 | 5127 | 5139 | 5149 |
| | 5150 | 5151 | 5153 | 5159 | 5169 | 5178 | 5179 | 5180 | 5188 | 5192 | 5193 | 5202 |
| | 5235 | 5238 | 5264 | 5265 | 5266 | 5271 | 5273 | 5310 | 5334 | 5363 | 5373 | 5397 |
| | 5400 | 5401 | 5408 | 5422 | 5433 | 5454 | 5455 | 5460 | 5463 | 5474 | 5487 | 5492 |
| | 5513 | 5517 | 5529 | 5534 | 5549 | 5557 | 5576 | 5624 | 5626 | 5627 | 5628 | 5638 |
| | 5645 | 5651 | 5664 | 5665 | 5666 | 5721 | 5734 | 5754 | 5762 | 5763 | 5768 | 5775 |
| | 5807 | 5817 | 5855 | 5874 | 5883 | 5912 | 5925 | 5966 | 5967 | 5974 | 5982 | 5987 |
| | 6010 | 6017 | 6030 | 6037 | 6039 | 6067 | 6068 | 6073 | 6074 | 6085 | 6086 | 6089 |
| | 6125 | 6126 | 6170 | 6191 | 6217 | 6226 | 6227 | 6235 | 6264 | 6265 | 6266 | 6290 |
| | 6314 | 6316 | 6321 | 6324 | 6332 | 6378 | 6382 | 6384 | 6401 | 6422 | 6423 | 6447 |
| | 6455 | 6476 | 6482 | 6488 | 6489 | 6497 | 6538 | 6540 | 6550 | 6562 | 6568 | 6575 |
| | 6578 | 6588 | 6604 | 6607 | 6612 | 6616 | 6617 | 6634 | 10272 | 10291 | 10306 | 10322 |
| | 10325 | 10329 | 10347 | 10349 | 10350 | 10353 | 10368 | 10373 | 10383 | 10385 | 10391 | 10392 |
| | 10408 | 10432 | 10438 | 10439 | 10443 | 10460 | 10462 | 10465 | 10497 | 10501 | 10502 | 10503 |
| | 10504 | 10510 | 10512 | 10513 | 10515 | 10517 | 10538 | 10543 | 10545 | 10559 | 10564 | 10573 |
| | 10586 | 10626 | 10641 | 10653 | 10667 | 10703 | 10721 | 10727 | 10734 | 10735 | 10736 | 10743 |
| | 10744 | 10745 | 10752 | 10770 | 10792 | 10793 | 10797 | 10799 | 10848 | 10939 | 10940 | 10941 |
| | 10944 | 10945 | 10978 | 10983 | 10984 | 11021 | 11024 | 11041 | 11042 | 11056 | 11057 | 11115 |
| | 11126 | 11137 | 11138 | 11146 | 11158 | 11165 | 11177 | 11183 | 11186 | 11199 | 11217 | 11218 |
| | 11219 | 11233 | 11234 | 11238 | 11247 | 11248 | 11268 | 11272 | 11276 | 11277 | 11301 | 11305 |
| | 11312 | 11322 | 11326 | 11338 | 11351 | 11357 | 11358 | 11365 | 11385 | 11410 | 11428 | 11432 |
| | 11434 | 11457 | 11474 | 11475 | 11476 | 11482 | 11537 | 11561 | 11565 | 11597 | 11599 | 11600 |
| | 11622 | 11623 | 11631 | 11636 | 11637 | 11639 | 11643 | 11647 | 11679 | 11682 | 11683 | 11685 |
| | 11691 | 11692 | 11701 | 11703 | 11709 | 11724 | 11752 | 11753 | 11763 | 11766 | 11778 | 11779 |
| | 11784 | 11803 | 11874 | 11914 | 11916 | 11931 | 11932 | 11935 | 11937 | 11944 | 11954 | 11962 |
| | 11963 | 11967 | 11976 | 12005 | 12010 | 12020 | 12021 | 12031 | 12049 | 53513 | 53514 | 53515 |
| | 53516 | 53517 | 53518 | 53519 | 53520 | 53521 | 53601 | 53602 | 53650 | 53651 | 53652 | 53653 |
| | 53654 | 53655 | 53656 | 53676 | 53677 | 53678 | 53679 | 53680 | 53681 | 53682 | 53683 | 53686 |
| | 53687 | 53688 | 53689 | 53690 | 53691 | 53692 | 53693 | 53795 | 53912 | 53913 | 53914 | 53915 |
| | 53971 | 53975 | 54014 | 54015 | 54016 | 54017 | 54080 | 54083 | 54084 | 54085 | 54086 | 54087 |
| | 54088 | 54089 | 54090 | 54091 | 54092 | 54101 | 54102 | 54103 | 54104 | 54105 | 54106 | 54107 |
| | 54123 | 54124 | 54125 | 54126 | 54127 | 54128 | 54129 | 54130 | 54131 | 54305 | 54447 | 54448 |
| | 54449 | 54470 | 54471 | 54491 | 54492 | 54625 | 54626 | 54627 | 54660 | 54661 | 54662 | 54677 |
| | 54693 | 54694 | 54746 | 54747 | 54761 | 54762 | 54763 | 54764 | 54765 | 54766 | 54767 | 54768 |
| | 54769 | 54770 | 54771 | 54772 | 54776 | 54781 | 54782 | 54783 | 54784 | 54879 | 54880 | 54881 |
| | 55015 | 55016 | 55065 | 55074 | 55090 | 55100 | 55101 | 55110 | 55111 | 55112 | 55113 | 55119 |
| | 55120 | 55121 | 55122 | 55123 | 55124 | 55133 | 55134 | 55135 | 55136 | 55137 | 55138 | 55139 |
| | 55140 | 55141 | 55143 | 55144 | 55145 | 55146 | 55147 | 55148 | 55149 | 55150 | 55151 | 55152 |
| | 55153 | 55154 | 55155 | 55156 | 55157 | 55158 | 55159 | 55160 | 55163 | 55164 | 55165 | 55170 |
| | 55171 | 55172 | 55173 | 55175 | 55176 | 55177 | 55197 | 55198 | 55199 | 55200 | 55201 | 55202 |
| | 55205 | 55206 | 55207 | 55208 | 55209 | 55210 | 55211 | 55212 | 55213 | 55214 | 55215 | 55216 |
| | 55217 | 55218 | 55219 | 55220 | 55221 | 55222 | 55223 | 55224 | 55225 | 55226 | 55227 | 55228 |
| | 55229 | 55230 | 55231 | 55232 | 55233 | 55235 | 55236 | 55237 | 55239 | 55240 | 55241 | 55242 |
| | 55243 | 55244 | 55245 | 55246 | 55247 | 55248 | 55249 | 55250 | 55251 | 55252 | 55253 | 55254 |
| | 55255 | 55256 | 55262 | 55263 | 55264 | 55265 | 55266 | 55267 | 55268 | 55269 | 55270 | 55271 |
| | 55272 | 55273 | 55274 | 55275 | 55276 | 55277 | 55278 | 55280 | 55281 | 55282 | 55283 | 55284 |
| | 55293 | 55294 | 55295 | 55297 | 55298 | 55299 | 55300 | 55301 | 55303 | 55304 | 55305 | 55309 |
| | 55310 | 55312 | 55313 | 55314 | 55315 | 55316 | 55317 | 55318 | 55319 | 55320 | 55321 | 55322 |
| | 55323 | 55324 | 55325 | 55326 | 55327 | 55328 | 55330 | 55331 | 55332 | 55333 | 55334 | 55335 |
| | 55336 | 55337 | 55338 | 55339 | 55340 | 55341 | 55342 | 55343 | 55344 | 55345 | 55346 | 55347 |
| | 55351 | 55352 | 55353 | 55354 | 55355 | 55362 | 55363 | 55364 | 55365 | 55366 | 55367 | 55368 |
| | 55377 | 55378 | 55379 | 55380 | 55381 | 55382 | 55388 | 55391 | 55392 | 55393 | 55394 | 55395 |
| | 55396 | 55397 | 55407 | 55408 | 55409 | 55412 | 55418 | 55419 | 55420 | 55422 | 55424 | 55425 |
| | 55427 | 55428 | 55429 | 55430 | 55431 | 55432 | 55433 | 55435 | 55436 | 55437 | 55438 | 55439 |
| | 55440 | 55441 | 55442 | 55443 | 55444 | 55451 | 55452 | 55453 | 55454 | 55455 | 55456 | 55457 |
| | 55458 | 55460 | 55461 | 55474 | 55475 | 55476 | 55478 | 55479 | 55483 | 55484 | 55485 | 55492 |
| | 55493 | 55496 | 55497 | 55505 | 55506 | 55507 | 55508 | 55509 | 55510 | 55511 | 55513 | 55514 |
| | 55515 | 55516 | 55521 | 55522 | 55523 | 55524 | 55525 | 55529 | 55530 | 55531 | 55532 | 55533 |
| | 55534 | 55535 | 55536 | 55538 | 55539 | 55540 | 55541 | 55543 | 55544 | 55545 | 55548 | 55549 |
| | 55550 | 55551 | 55552 | 55553 | 55554 | 55555 | 55556 | 55557 | 55563 | 55564 | 55568 | 55569 |
| | 55570 | 55571 | 55572 | 55573 | 55574 | 55575 | 55576 | 55578 | 55579 | 55580 | 55581 | 55582 |
| | 55583 | 55584 | 55587 | 55588 | 55589 | 55593 | 55594 | 55595 | 55597 | 55598 | 55600 | 55601 |
| | 55602 | 55603 | 55604 | 55605 | 55606 | 55607 | 55608 | 55609 | 55610 | 55611 | 55612 | 55613 |
| | 55614 | 55617 | 55618 | 55619 | 55620 | 55621 | 55622 | 55623 | 55625 | 55626 | 55627 | 55628 |
| | 55635 | 55639 | 55640 | 55641 | 55642 | 55643 | 55644 | 55645 | 55646 | 55647 | 55648 | 55652 |
| | 55653 | 55656 | 55657 | 55658 | 55659 | 55660 | 55661 | 55662 | 55663 | 55664 | 55665 | 55666 |
| | 55667 | 55668 | 55669 | 55670 | 55671 | 55672 | 55673 | 55674 | 55675 | 55676 | 55677 | 55678 |
| | 55679 | 55680 | 55681 | 55682 | 55683 | 55684 | 55685 | 55686 | 55687 | 55691 | 55692 | 55693 |
| | 55701 | 55702 | 55703 | 55704 | 55706 | 55707 | 55708 | 55709 | 55710 | 55739 | 55740 | 55741 |
| | 55742 | 55743 | 55744 | 55745 | 55746 | 55747 | 55748 | 55749 | 55757 | 55758 | 55759 | 55783 |
| | 55784 | 55830 | 55831 | 55832 | 55969 | 55986 | 55987 | 56001 | 56002 | 56003 | 56004 | 56005 |
| | 56006 | 56007 | 56012 | 56013 | 56014 | 56015 | 56081 | 56082 | 56083 | 56107 | 56108 | 56109 |
| | 56110 | 56111 | 56112 | 56130 | 56131 | 56132 | 56133 | 56134 | 56135 | 56136 | 56153 | 56154 |
| | 56155 | 56156 | 56157 | 56170 | 56171 | 56172 | 56173 | 56184 | 56185 | 56186 | 56187 | 56188 |
| | 56197 | 56198 | 56199 | 56206 | 56207 | 56208 | 56209 | 56210 | 56214 | 56215 | 56216 | 56217 |
| | 56218 | 56221 | 56222 | 56223 | 56224 | 56225 | 56259 | 56260 | 56261 | 56262 | 56271 | 56272 |
| | 56273 | 56274 | 56275 | 56276 | 56277 | 56280 | 56281 | 56282 | 56283 | 56284 | 56288 | 56289 |
| | 56290 | 56295 | 56296 | 56297 | 56298 | 56299 | 56300 | 56301 | 56302 | 56303 | 56307 | 56308 |
| | 56309 | 56310 | 56311 | 56312 | 56313 | 56314 | 56315 | 56316 | 56317 | 56326 | 56327 | 56328 |
| | 56329 | 56330 | 56334 | 56335 | 56336 | 56337 | 56338 | 56339 | 56340 | 56341 | 56347 | 56348 |
| | 56349 | 56350 | 56412 | 56413 | 56414 | 56419 | 56420 | 56421 | 56449 | 56450 | 56451 | 56452 |
| | 56465 | 56466 | 56476 | 56477 | 56478 | 56486 | 56500 | 56501 | 56502 | 56504 | 56505 | 56506 |
| | 56507 | 56525 | 56526 | 56527 | 56528 | 56564 | 56565 | 56566 | 56567 | 56568 | 56569 | 56570 |
| | 56571 | 56576 | 56577 | 56587 | 56588 | 56593 | 56594 | 56595 | 56596 | 56597 | 56598 | 56601 |
| | 56654 | 56655 | 56682 | 56684 | 56685 | 56686 | 56687 | 56688 | 56689 | 56690 | 56691 | 56698 |
| | 56699 | 56710 | 56711 | 56724 | 56736 | 56737 | 56738 | 56739 | 56740 | 56751 | 56752 | 56753 |
| | 56754 | 56768 | 56769 | 56770 | 56771 | 56780 | 56781 | 56806 | 56807 | 56808 | 56830 | 56831 |
| | 56832 | 56848 | 56849 | 56850 | 56866 | 56867 | 56868 | 56903 | 56904 | 56905 | 56947 | 56948 |
| | 56960 | 56961 | 56962 | 56963 | 56996 | 56997 | 56998 | 56999 | 57016 | 57017 | 57018 | 57032 |
| | 57033 | 57034 | 57035 | 57053 | 57054 | 57055 | 57097 | 57098 | 57099 | 57100 | 57101 | 57102 |
| | 57103 | 57104 | 57105 | 57106 | 57113 | 57114 | 57115 | 57116 | 57117 | 57118 | 57119 | 57123 |
| | 57124 | 57125 | 57126 | 57127 | 57128 | 57129 | 57137 | 57138 | 57148 | 57149 | 57150 | 57151 |
| | 57165 | 57166 | 57211 | 57212 | 57294 | 57295 | 57298 | 57299 | 57300 | 57377 | 57378 | 57397 |
| | 57398 | 57402 | 57403 | 57404 | 57405 | 57406 | 57425 | 57426 | 57427 | 57441 | 57442 | 57443 |
| | 57444 | 57450 | 57451 | 57452 | 57453 | 57480 | 57481 | 57482 | 57492 | 57493 | 57497 | 57498 |
| | 57508 | 57509 | 57524 | 57525 | 57550 | 57551 | 57552 | 57553 | 57554 | 57574 | 57575 | 57656 |
| | 57657 | 57658 | 57684 | 57685 | 57698 | 57699 | 57724 | 57725 | 57726 | 57727 | 57795 | 57796 |
| | 57797 | 57798 | 57799 | 57800 | 57801 | 57802 | 57806 | 57807 | 57837 | 57893 | 57894 | 58162 |
| | 58163 | 58164 | 58168 | 58218 | 58222 | 58226 | 58239 | 58240 | 58241 | 58328 | 58329 | 58330 |
| | 58406 | 58407 | 58408 | 58429 | 58430 | 58431 | 58641 | 58642 | 58643 | 58644 | 58645 | 58646 |
| | 58661 | 58701 | 58702 | 58732 | 58733 | 58734 | 58735 | 58736 | 58737 | 58738 | 58739 | 58744 |
| | 58745 | 58758 | 58759 | 58760 | 58763 | 58764 | 58765 | 58766 | 58770 | 58771 | 58772 | 58773 |
| | 58774 | 58775 | 58776 | 58777 | 58778 | 58779 | 58780 | 58781 | 58782 | 58783 | 58784 | 58785 |
| | 58786 | 58787 | 58798 | 58799 | 58800 | 58801 | 58806 | 58807 | 58808 | 58816 | 58817 | 58825 |
| | 58826 | 58853 | 58854 | 58859 | 58860 | 58861 | 58864 | 58865 | 58866 | 58867 | 58868 | 58869 |
| | 58870 | 58871 | 58872 | 58873 | 58878 | 58879 | 58880 | 58881 | 58882 | 58883 | 58884 | 58885 |
| | 58886 | 58887 | 58888 | 58889 | 58890 | 58891 | 58892 | 58895 | 58896 | 58897 | 58898 | 58899 |
| | 58900 | 58903 | 58904 | 58905 | 58906 | 58907 | 58908 | 58918 | 58919 | 58920 | 58921 | 59018 |
| | 59169 | 59170 | 59179 | 59180 | 59184 | 59185 | 59216 | 59217 | 59236 | 59237 | 59244 | 59300 |
| | 59301 | 59333 | 59334 | 59335 | 59336 | 59344 | 59345 | 59367 | 59368 | 59387 | 59388 | 59389 |
| | 59400 | 59401 | 59436 | 59437 | 59438 | 60082 | 60083 | 60084 | 60085 | 60222 | 60268 | 60383 |
| | 60384 | 60385 | 60414 | 60415 | 60416 | 60417 | 60476 | 60477 | 60478 | 60479 | 60491 | 60543 |
| | 60599 | 60600 | 60601 | 60602 | 60662 | 60668 | 60671 | 60672 | 60673 | 60674 | 60678 | 60679 |
| | 60685 | 60694 | 60695 | 60697 | 60698 | 60727 | 60728 | 60729 | 60747 | 60748 | 60749 | 60843 |
| | 60844 | 60875 | 60876 | 60894 | 60895 | 60903 | 60904 | 60908 | 60909 | 60917 | 60918 | 60919 |
| | 60920 | 60921 | 60922 | 60923 | 60924 | 60925 | 60926 | 60927 | 60928 | 60929 | 60930 | 60931 |
| | 60932 | 60933 | 60934 | 60935 | 60936 | 60937 | 60938 | 60939 | 60952 | 60953 | 60954 | 60955 |
| | 60956 | 60957 | 60958 | 60959 | 60960 | 60966 | 60967 | 60968 | 60971 | 60972 | 60973 | 60974 |
| | 60975 | 60976 | 60977 | 60978 | 60979 | 60980 | 60981 | 60982 | 60983 | 60984 | 60985 | 60986 |
| | 60987 | 60988 | 60989 | 60990 | 60994 | 61016 | 61023 | 61027 | 61028 | 61031 | 61099 | 61106 |
| | 61112 | 61113 | 61114 | 61115 | 61116 | 61117 | 61118 | 61119 | 61144 | 61151 | 61152 | 61156 |
| | 61157 | 61158 | 61159 | 61167 | 61168 | 61169 | 61170 | 61171 | 61175 | 61176 | 61177 | 61181 |
| | 61182 | 61183 | 61184 | 61185 | 61186 | 61187 | 61188 | 61190 | 61191 | 61192 | 61193 | 61194 |
| | 61195 | 61196 | 61197 | 61209 | 61210 | 61211 | 61212 | 61213 | 61214 | 61215 | 61216 | 61217 |
| | 61221 | 61222 | 61223 | 61224 | 61225 | 61226 | 61227 | 61228 | 61229 | 61230 | 61234 | 61235 |
| | 61236 | 61237 | 61238 | 61239 | 61250 | 61251 | 61252 | 61253 | 61254 | 61255 | 61263 | 61264 |
| | 61265 | 61266 | 61267 | 61268 | 61269 | 61270 | 61276 | 61279 | 61280 | 61296 | 61315 | 61316 |
| | 61317 | 61328 | 61331 | 61374 | 61375 | 61415 | 61416 | 61456 | 61462 | 61464 | 61474 | 61475 |
| | 61476 | 61477 | 61478 | 61479 | 61480 | 61499 | 61500 | 61501 | 61528 | 61538 | 61590 | 61604 |
| | 61608 | 61630 | 61645 | 61649 | 61650 | 61656 | 61657 | 61658 | 61659 | 61663 | 61664 | 61665 |
| | 61671 | 61690 | 61695 | 61696 | 61697 | 61698 | 61699 | 61700 | 61701 | 61702 | 61716 | 61717 |
| | 61741 | 61742 | 61743 | 61746 | 61747 | 61755 | 61756 | 61757 | 61760 | 61761 | 61762 | 61763 |
| | 61764 | 61771 | 61772 | 61773 | 61781 | 61800 | 61801 | 61802 | 61811 | 61812 | 61813 | 61818 |
| | 61819 | 61820 | 61821 | 61822 | 61829 | 61836 | 61837 | 61838 | 61839 | 61840 | 61841 | 61842 |
| | 61843 | 61862 | 61863 | 61864 | 61865 | 61866 | 61882 | 61895 | 61898 | 61901 | 61902 | 61918 |
| | 61919 | 61920 | 61930 | 61931 | 61935 | 61936 | 61939 | 61940 | 61941 | 61969 | 61970 | 61971 |
| | 61989 | 62004 | 62005 | 62006 | 62007 | 62049 | 62050 | 62051 | 62052 | 62053 | 62058 | 62059 |
| | 62065 | 62066 | 62067 | 62068 | 62072 | 62073 | 62074 | 62086 | 62087 | 62088 | 62090 | 62091 |
| | 62092 | 62094 | 62095 | 62096 | 62097 | 62098 | 62100 | 62106 | 62109 | 62111 | 62112 | 62113 |
| | 62122 | 62128 | 62129 | 62134 | 62135 | 62136 | 62144 | 62145 | 62146 | 62147 | 62155 | 62156 |
| | 62157 | 62231 | 62232 | 62233 | 62234 | 62235 | 62236 | 62237 | 62240 | 62241 | 62242 | 62243 |
| | 62252 | 62265 | 62275 | 62283 | 62284 | 62285 | 62286 | 62287 | 62288 | 62289 | 62298 | 62299 |
| | 62300 | 62301 | 62302 | 62303 | 62325 | 62326 | 62327 | 62334 | 62335 | 62336 | 62337 | 62338 |
| | 62339 | 62340 | 62341 | 62342 | 62343 | 62344 | 62349 | 62350 | 62351 | 62352 | 62353 | 62354 |
| | 62355 | 62356 | 62358 | 62359 | 62360 | 62407 | 62408 | 62409 | 62410 | 62411 | 62412 | 62413 |
| | 62414 | 62415 | 62439 | 62440 | 62441 | 62442 | 62443 | 62448 | 62449 | 62450 | 62451 | 62452 |
| | 62453 | 62454 | 62467 | 62468 | 62469 | 62470 | 62471 | 62472 | 62473 | 62474 | 62475 | 62485 |
| | 62486 | 62487 | 62488 | 62489 | 62490 | 62491 | 62492 | 62500 | 62501 | 62502 | 62503 | 62528 |
| | 62529 | 62538 | 62539 | 62550 | 62551 | 62552 | 62553 | 62554 | 62555 | 62556 | 62583 | 62584 |
| | 62585 | 62586 | 62587 | 62588 | 62589 | 62607 | 62608 | 62609 | 62610 | 62611 | 62620 | 62621 |
| | 62622 | 62628 | 62630 | 62631 | 62632 | 62633 | 62643 | 62660 | 62661 | 62662 | 62663 | 62664 |
| | 62665 | 62684 | 62685 | 62686 | 62687 | 62688 | 62689 | 62690 | 62691 | 62692 | 62693 | 62694 |
| | 62695 | 62696 | 62701 | 62702 | 62703 | 62704 | 62710 | 62711 | 62714 | 62715 | 62716 | 62717 |
| | 62718 | 62719 | 62720 | 62722 | 62723 | 62724 | 62725 | 62726 | 62727 | 62728 | 62729 | 62730 |
| | 62731 | 62732 | 62733 | 62734 | 62735 | 62736 | 62737 | 62741 | 62742 | 62743 | 62744 | 62745 |
| | 62750 | 62751 | 62752 | 62753 | 62754 | 62755 | 62756 | 62757 | 62758 | 62759 | 62760 | 62761 |
| | 62763 | 62764 | 62769 | 62770 | 62775 | 62776 | 62777 | 62780 | 62781 | 62782 | 62783 | 62784 |
| | 62785 | 62786 | 62787 | 62788 | 62789 | 62790 | 62791 | 62792 | 62793 | 62796 | 62797 | 62798 |
| | 62800 | 62801 | 62802 | 62803 | 62804 | 62805 | 62806 | 62807 | 62808 | 62809 | 62810 | 62811 |
| | 62812 | 62813 | 62814 | 62815 | 62816 | 62817 | 62818 | 62819 | 62823 | 62824 | 62825 | 62826 |
| | 62830 | 62831 | 62832 | 62833 | 62834 | 62838 | 62839 | 62840 | 62841 | 62842 | 62843 | 62844 |
| | 62845 | 62846 | 62847 | 62848 | 62849 | 62850 | 62851 | 62852 | 62853 | 62854 | 62855 | 62856 |
| | 62857 | 62858 | 62859 | 62860 | 62865 | 62866 | 62867 | 62868 | 62869 | 62870 | 62871 | 62872 |
| | 62873 | 62874 | 62875 | 62876 | 62877 | 62878 | 62879 | 62883 | 62884 | 62885 | 62886 | 62887 |
| | 62888 | 62889 | 62890 | 62891 | 62892 | 62893 | 62894 | 62895 | 62896 | 62897 | 62898 | 62899 |
| | 62900 | 62901 | 62902 | 62903 | 62905 | 62906 | 62907 | 62911 | 62912 | 62918 | 62919 | 62920 |
| | 52921 | 62922 | 62923 | 62924 | 62925 | 62926 | 62927 | 62928 | 62930 | 62933 | 62934 | 62937 |
| | 62938 | 62939 | 62940 | 62941 | 62947 | 62948 | 62952 | 62956 | 62962 | 62964 | 62966 | 62970 |
| | 62973 | 62974 | 62983 | 62984 | 62985 | 62991 | 62992 | 62993 | 62994 | 62995 | 63009 | 63010 |
| | 63011 | 63015 | 63016 | 63017 | 63019 | 63020 | 63021 | 63022 | 63023 | 63024 | 63027 | 63032 |
| | 63033 | 63034 | 63037 | 63038 | 63039 | 63040 | 63041 | 63042 | 63046 | 63047 | 63048 | 63055 |
| | 63056 | 63057 | 63060 | 63061 | 63062 | 63063 | 63064 | 63065 | 63067 | 63068 | 63069 | 63080 |
| | 63081 | 63082 | 63083 | 63084 | 63087 | 63088 | 63089 | 63090 | 63091 | 63092 | 63093 | 63094 |
| | 63098 | 63099 | 63100 | 63101 | 63102 | 63103 | 63104 | 63105 | 63106 | 63107 | 63108 | 63109 |
| | 63110 | 63111 | 63112 | 63116 | 63123 | 63124 | 63125 | 63126 | 63127 | 63128 | 63134 | 63135 |
| | 63136 | 63137 | 63138 | 63139 | 63146 | 63147 | 63148 | 63149 | 63150 | 63151 | 63161 | 63162 |
| | 63163 | 63167 | 63168 | 63169 | 63170 | 63171 | 63172 | 63173 | 63174 | 63175 | 63198 | 63202 |
| | 63225 | 63226 | 63227 | 63233 | 63234 | 63235 | 63236 | 63237 | 63238 | 63239 | 63240 | 63241 |
| | 63242 | 63243 | 63244 | 63257 | 63258 | 63259 | 63266 | 63267 | 63268 | 63269 | 63270 | 63278 |
| | 63279 | 63280 | 63281 | 63282 | 63288 | 63289 | 63290 | 63291 | 63292 | 63293 | 63297 | 63298 |
| | 63299 | 63300 | 63301 | 63305 | 63306 | 63307 | 63308 | 63309 | 63311 | 63312 | 63313 | 63314 |
| | 63315 | 63316 | 63317 | 63318 | 63319 | 63320 | 63321 | 63322 | 63323 | 63333 | 63334 | 63335 |
| | 63336 | 63337 | 63338 | 63339 | 63340 | 63341 | 63342 | 63343 | 63344 | 63345 | 63346 | 63347 |
| | 63348 | 63349 | 63350 | 63351 | 63352 | 63353 | 63354 | 63355 | 63356 | 63357 | 63358 | 63359 |
| | 63363 | 63364 | 63365 | 63366 | 63367 | 63368 | 63369 | 63370 | 63371 | 63372 | 63373 | 63374 |
| | 63375 | 63376 | 63377 | 63378 | 63379 | 63380 | 63381 | 63382 | 63383 | 63384 | 63386 | 63387 |
| | 63388 | 63389 | 63390 | 63391 | 63392 | 63393 | 63394 | 63395 | 63396 | 63397 | 63398 | 63399 |
| | 63400 | 63401 | 63402 | 63403 | 63411 | 63412 | 63413 | 63414 | 63415 | 63416 | 63417 | 63418 |
| | 63420 | 63421 | 63422 | 63423 | 63424 | 63425 | 63426 | 63431 | 63432 | 63433 | 63442 | 63443 |
| | 63444 | 63445 | 63448 | 63449 | 63450 | 63451 | 63452 | 63453 | 63454 | 63455 | 63456 | 63457 |
| | 63471 | 63475 | 63476 | 63477 | 63478 | 63479 | 63480 | 63481 | 63483 | 63486 | 63487 | 63488 |
| | 63489 | 63490 | 63491 | 63492 | 63493 | 63496 | 63499 | 63503 | 63507 | 63508 | 63509 | 63510 |
| | 63511 | 63512 | 63513 | 63514 | 63515 | 63516 | 63517 | 63518 | 63519 | 63520 | 63524 | 63525 |
| | 63526 | 63527 | 63528 | 63529 | 63530 | 63531 | 63532 | 63533 | 63534 | 63539 | 63540 | 63541 |
| | 63545 | 63546 | 63547 | 63548 | 63549 | 63550 | 63561 | 63562 | 63578 | 63579 | 63580 | 63581 |
| | 63583 | 63584 | 63585 | 63586 | 63590 | 63591 | 63592 | 63593 | 63594 | 63595 | 63596 | 63597 |
| | 63598 | 63604 | 63605 | 63606 | 63607 | 63608 | 63625 | 63626 | 63627 | 63634 | 63635 | 63636 |
| | 63637 | 63638 | 63644 | 63654 | 63655 | 63656 | 63657 | 63660 | 63661 | 63662 | 63663 | 63664 |
| | 63667 | 63669 | 63670 | 63678 | 63679 | 63680 | 63681 | 63682 | 63683 | 63684 | 63687 | 63691 |
| | 63692 | 63693 | 63694 | 63698 | 63699 | 63700 | 63701 | 63702 | 63704 | 63705 | 63710 | 63711 |
| | 63712 | 63713 | 63714 | 63727 | 63728 | 63729 | 63730 | 63744 | 63745 | 63748 | 63757 | 63761 |
| | 63763 | 63775 | 63779 | 63782 | 63783 | 63784 | 63785 | 63787 | 63798 | 63800 | 63803 | 63812 |
| | 63815 | 63816 | 63817 | 63818 | 63819 | 63820 | 63821 | 63822 | 63832 | 63837 | 63838 | 63839 |
| | 63840 | 63842 | 63859 | 63860 | 63861 | 63862 | 63863 | 63864 | 63866 | 63867 | 63868 | 63873 |
| | 63874 | 63875 | 63876 | 63907 | 63908 | 63909 | 63910 | 63914 | 63915 | 63926 | 63927 | 63928 |
| | 63930 | 63931 | 63934 | 63959 | 63960 | 63961 | 63975 | 63976 | 63997 | 63998 | 63999 | 64000 |
| | 64004 | 64042 | 64047 | 64048 | 64049 | 64050 | 64070 | 64078 | 64091 | 64101 | 64125 | 64142 |
| | 64149 | 64150 | 64153 | 64154 | 64155 | 64156 | 64157 | 64158 | 64159 | 64160 | 64161 | 64162 |
| | 64163 | 64164 | 64166 | 64167 | 64168 | 64171 | 64173 | 64174 | 64175 | 64176 | 64186 | 64187 |
| | 64194 | 64195 | 64196 | 64197 | 64198 | 64201 | 64202 | 64203 | 64207 | 64208 | 64212 | 64217 |
| | 64218 | 64219 | 64220 | 64228 | 64229 | 64230 | 64231 | 64235 | 64236 | 64237 | 64238 | 64239 |
| | 64240 | 64241 | 64242 | 64243 | 64247 | 64248 | 64250 | 64251 | 64255 | 64257 | 64258 | 64259 |
| | 64261 | 64262 | 64263 | 64264 | 64267 | 64268 | 64274 | 64277 | 64279 | 64280 | 64288 | 64289 |
| | 64290 | 64293 | 64304 | 64305 | 64306 | 64307 | 64308 | 64309 | 64310 | 64313 | 64315 | 64316 |
| | 64317 | 64321 | 64322 | 64323 | 64324 | 64325 | 64326 | 64327 | 64328 | 64329 | 64330 | 64336 |
| | 64347 | 64349 | 64353 | 64354 | 64355 | 64356 | 64357 | 64358 | 64359 | 64363 | 64365 | 64367 |
| | 64368 | 64369 | 64370 | 64371 | 64372 | 64373 | 64374 | 64375 | 64376 | 64380 | 64381 | 64382 |
| | 64383 | 64385 | 64386 | 64387 | 64388 | 64389 | 64394 | 64395 | 64396 | 64397 | 64398 | 64400 |
| | 64401 | 64402 | 64406 | 64407 | 64408 | 64409 | 64410 | 64411 | 64412 | 64419 | 64420 | 64421 |
| | 64423 | 64424 | 64425 | 64435 | 64441 | 64443 | 64464 | 64465 | 64466 | 64467 | 64468 | 64469 |
| | 64480 | 64489 | 64490 | 64491 | 64495 | 64508 | 64514 | 64545 | 64558 | 64559 | 64565 | 64566 |
| | 64573 | 64575 | 64576 | 64577 | 64583 | 64590 | 64594 | 64595 | 64596 | 64597 | 64609 | 64610 |
| | 64611 | 64612 | 64613 | 64617 | 64618 | 64619 | 64630 | 64631 | 64632 | 64642 | 64655 | 64656 |
| | 64661 | 64662 | 64663 | 64664 | 64665 | 64666 | 64670 | 64671 | 64672 | 64676 | 64677 | 64678 |
| | 64683 | 64684 | 64685 | 64690 | 64691 | 64712 | 64713 | 64717 | 64718 | 64719 | 64729 | 64731 |
| | 64743 | 64744 | 64745 | 64748 | 64749 | 64751 | 64752 | 64753 | 64754 | 64762 | 64763 | 64764 |
| | 64765 | 64766 | 64768 | 64769 | 64770 | 64771 | 64772 | 64773 | 64774 | 64775 | 64783 | 64787 |
| | 64793 | 64798 | 64799 | 64800 | 64801 | 64802 | 64803 | 64804 | 64805 | 64806 | 64817 | 64822 |
| | 64823 | 64824 | 64825 | 64829 | 64831 | 64832 | 64833 | 64852 | 64853 | 64854 | 64866 | 64867 |
| | 64868 | 64884 | 64885 | 64901 | 64902 | 64903 | 64912 | 64913 | 64936 | 64937 | 64938 | 64954 |
| | 64955 | 64956 | 64969 | 64970 | 64972 | 64973 | 64974 | 64975 | 64979 | 64980 | 64981 | 64982 |
| | 64988 | 64990 | 64991 | 64992 | 64993 | 64998 | 64999 | 65000 | 65002 | 65003 | 65004 | 65008 |
| | 65009 | 65010 | 65011 | 65015 | 65016 | 65017 | 65020 | 65021 | 65022 | 65024 | 65025 | 65026 |
| | 65034 | 65035 | 65036 | 65037 | 65038 | 65039 | 65040 | 65041 | 65042 | 65043 | 65044 | 65045 |
| | 65046 | 65047 | 65048 | 65052 | 65053 | 65054 | 65055 | 65056 | 65057 | 65058 | 65059 | 65060 |
| | 65061 | 65062 | 65063 | 65068 | 65069 | 65070 | 65071 | 65072 | 65073 | 65074 | 65077 | 65078 |
| | 65079 | 65080 | 65081 | 65085 | 65086 | 65100 | 65104 | 65105 | 65106 | 65108 | 65109 | 65110 |
| | 65111 | 65112 | 65122 | 65123 | 65124 | 65131 | 65132 | 65133 | 65134 | 65135 | 65137 | 65141 |
| | 65142 | 65144 | 65145 | 65146 | 65147 | 65148 | 65149 | 65154 | 65155 | 65156 | 65157 | 65158 |
| | 65159 | 65162 | 65163 | 65164 | 65165 | 65166 | 65171 | 65172 | 65173 | 65174 | 65175 | 65176 |
| | 65177 | 65178 | 65179 | 65180 | 65181 | 65184 | 65185 | 65186 | 65187 | 65191 | 65192 | 65193 |
| | 65194 | 65195 | 65196 | 65197 | 65198 | 65199 | 65200 | 65202 | 65203 | 65204 | 65205 | 65206 |
| | 65207 | 65208 | 65209 | 65214 | 65215 | 65216 | 65219 | 65220 | 65221 | 65226 | 65227 | 65228 |
| | 65229 | 65231 | 65232 | 65233 | 65234 | 65239 | 65240 | 65241 | 65242 | 65250 | 65251 | 65252 |
| | 65253 | 65254 | 65255 | 65259 | 65260 | 65261 | 65265 | 65266 | 65267 | 65279 | 65280 | 65281 |
| | 65282 | 65284 | 65285 | 65286 | 65287 | 65288 | 65289 | 65290 | 65296 | 65297 | 65298 | 65307 |
| | 65308 | 65309 | 65313 | 65314 | 65317 | 65318 | 65325 | 65326 | 65327 | 65328 | 65330 | 65331 |
| | 65336 | 65337 | 65338 | 65339 | 65340 | 65341 | 65342 | 65343 | 65344 | 65345 | 65346 | 65347 |
| | 65348 | 65349 | 65350 | 65351 | 65352 | 65355 | 65356 | 65359 | 65360 | 65361 | 65362 | 65363 |
| | 65364 | 65365 | 65366 | 65372 | 65374 | 65377 | 65378 | 65383 | 65384 | 65393 | 65394 | 65395 |
| | 65396 | 65397 | 65398 | 65399 | 65400 | 65401 | 65402 | 65403 | 65404 | 65405 | 65410 | 65411 |
| | 65412 | 65413 | 65415 | 65416 | 65420 | 65421 | 65422 | 65423 | 65431 | 65432 | 65433 | 65434 |
| | 65435 | 65436 | 65439 | 65440 | 65442 | 65443 | 65446 | 65447 | 65448 | 65461 | 65462 | 65463 |
| | 65465 | 65466 | 65468 | 65475 | 65476 | 65482 | 65483 | 65484 | 65485 | 65487 | 65490 | 65491 |
| | 65492 | 65493 | 65498 | 65500 | 65504 | 65505 | 65514 | 65515 | 65516 | 65518 | 65524 | 65525 |
| | 65526 | 65527 | 65528 | 65529 | 65533 | 65541 | 65542 | 65543 | 65544 | 65549 | 65551 | 65556 |
| | 65557 | 65558 | 65564 | 65566 | 65567 | 65576 | 65577 | 65580 | 65585 | 65612 | 65613 | 65627 |
| | 65628 | 65629 | 65634 | 65635 | 65636 | 65637 | 65646 | 65647 | 65648 | 65649 | 65650 | 65654 |
| | 65655 | 65657 | 65658 | 65661 | 65662 | 65663 | 65680 | 65681 | 65684 | 65691 | 65692 | 65710 |
| | 65711 | 65716 | 65719 | 65720 | 65721 | 65732 | 65735 | 65742 | 65743 | 65754 | 65755 | 65759 |
| | 65760 | 65764 | 65768 | 65769 | 65770 | 65772 | 65784 | 65787 | 65791 | 65792 | 65793 | 65794 |
| | 65795 | 65796 | 65797 | 65801 | 65802 | 65807 | 65808 | 65809 | 65816 | 65817 | 65818 | 65821 |
| | 65822 | 65823 | 65827 | 65831 | 65832 | 65834 | 65835 | 65836 | 65837 | 65843 | 65844 | 65845 |
| | 65846 | 65847 | 65856 | 65857 | 65858 | 65859 | 65860 | 65861 | 65862 | 65875 | 65883 | 65884 |
| | 65885 | 65886 | 65888 | 65889 | 65890 | 65895 | 65913 | 65914 | 65915 | 65917 | 65919 | 65920 |
| | 65921 | 65922 | 65923 | 65927 | 65930 | 65931 | 65932 | 65935 | 65936 | 65938 | 65939 | 65944 |
| | 65945 | 65946 | 65953 | 65954 | 65955 | 65956 | 65957 | 65958 | 65966 | 65968 | 65970 | 65971 |
| | 65972 | 65973 | 65974 | 65975 | 65976 | 65977 | 65978 | 65979 | 65980 | 65981 | 65982 | 65985 |
| | 65986 | 65987 | 65988 | 65989 | 65990 | 65991 | 65999 | 66000 | 66003 | 66004 | 66005 | 66011 |
| | 66012 | 66017 | 66018 | 66019 | 66020 | 66021 | 66027 | 66028 | 66037 | 66043 | 66044 | 66050 |
| | 66051 | 66052 | 66055 | 66058 | 66083 | 66084 | 66086 | 66087 | 66088 | 66096 | 66103 | 66104 |
| | 66105 | 66106 | 66107 | 66108 | 66109 | 66111 | 66112 | 66113 | 66114 | 66117 | 66118 | 66119 |
| | 66122 | 66123 | 66124 | 66125 | 66126 | 66127 | 66128 | 66129 | 66130 | 66131 | 66132 | 66134 |
| | 66135 | 66136 | 66137 | 66140 | 66141 | 66148 | 66151 | 66152 | 66155 | 66156 | 66157 | 66158 |
| | 66159 | 66160 | 66162 | 66163 | 66164 | 66165 | 66169 | 66182 | 66183 | 66185 | 66188 | 66190 |
| | 66192 | 66193 | 66194 | 66211 | 66225 | 66226 | 66227 | 66232 | 66233 | 66236 | 66237 | 66238 |
| | 66243 | 66246 | 66247 | 66263 | 66267 | 66273 | 66274 | 66279 | 66280 | 66284 | 66285 | 66286 |
| | 66288 | 66293 | 66294 | 66295 | 66296 | 66297 | 66302 | 66303 | 66304 | 66305 | 66306 | 66307 |
| | 66308 | 66309 | 66311 | 66312 | 66313 | 66315 | 66316 | 66317 | 66318 | 66319 | 66320 | 66321 |
| | 66322 | 66323 | 66324 | 66325 | 66326 | 66327 | 66328 | 66329 | 66330 | 66331 | 66333 | 66334 |
| | 66335 | 66336 | 66337 | 66338 | 66339 | 66340 | 66341 | 66342 | 66343 | 66344 | 66345 | 66346 |
| | 66347 | 66348 | 66349 | 66350 | 66351 | 66352 | 66353 | 66354 | 66355 | 66356 | 66357 | 66358 |
| | 66360 | 66361 | 66362 | 66363 | 66364 | 66365 | 66366 | 66367 | 66368 | 66369 | 66372 | 66373 |
| | 66374 | 66375 | 66376 | 66377 | 66378 | 66379 | 66380 | 66381 | 66382 | 66383 | 66384 | 66385 |
| | 66388 | 66392 | 66395 | 66400 | 66403 | 66404 | 66410 | 66411 | 66412 | 66414 | 66415 | 66416 |
| | 66417 | 66418 | 66419 | 66420 | 66421 | 66422 | 66423 | 66424 | 66425 | 66427 | 66428 | 66429 |
| | 66430 | 66431 | 66432 | 66433 | 66434 | 66435 | 66436 | 66437 | 66440 | 66441 | 66442 | 66443 |
| | 66444 | 66445 | 66447 | 66451 | 66452 | 66453 | 66454 | 66455 | 66456 | 66457 | 66459 | 66460 |
| | 66461 | 66462 | 66466 | 66467 | 66468 | 66469 | 66470 | 66471 | 66472 | 66474 | 66475 | 66478 |
| | 66479 | 66481 | 66482 | 66483 | 66484 | 66485 | 66486 | 66487 | 66488 | 66489 | 66494 | 66495 |
| | 66496 | 66497 | 66498 | 66499 | 66502 | 66505 | 66506 | 66507 | 66508 | 66509 | 66513 | 66516 |
| | 66517 | 66519 | 66520 | 66521 | 66522 | 66524 | 66526 | 66527 | 66528 | 66529 | 66533 | 66534 |
| | 66535 | 66541 | 66542 | 66543 | 66544 | 66547 | 66550 | 66555 | 66556 | 66557 | 66559 | 66562 |
| | 66563 | 66564 | 66565 | 66566 | 66568 | 66569 | 66570 | 66571 | 66574 | 66575 | 66576 | 66579 |
| | 66582 | 66583 | 66584 | 66585 | 66586 | 66587 | 66588 | 66589 | 66590 | 66592 | 66593 | 66594 |
| | 66595 | 66596 | 66597 | 66598 | 66599 | 66600 | 66601 | 66602 | 66603 | 66604 | 66605 | 66606 |
| | 66607 | 66608 | 66609 | 66610 | 66612 | 66613 | 66614 | 66615 | 66617 | 66618 | 66619 | 66620 |
| | 66621 | 66624 | 66625 | 66626 | 66627 | 66631 | 66634 | 66639 | 66642 | 66652 | 66657 | 66658 |
| | 66659 | 66665 | 66671 | 66672 | 66673 | 66674 | 66675 | 66676 | 66677 | 66678 | 66679 | 66680 |
| | 66681 | 66682 | 66683 | 66686 | 66688 | 66691 | 66694 | 66695 | 66696 | 66697 | 66698 | 66699 |
| | 66702 | 66703 | 66704 | 66705 | 66706 | 66707 | 66710 | 66711 | 66712 | 66713 | 66714 | 66715 |
| | 66717 | 66720 | 66721 | 66722 | 66727 | 66728 | 66730 | 66731 | 66732 | 66733 | 66734 | 66735 |
| | 66738 | 66742 | 66743 | 66748 | 66749 | 66750 | 66751 | 66752 | 66755 | 66756 | 66757 | 66760 |
| | 66761 | 66764 | 66765 | 66771 | 66772 | 66773 | 66774 | 66775 | 66776 | 66777 | 66778 | 66779 |
| | 66780 | 66781 | 66782 | 66783 | 66785 | 66788 | 66792 | 66793 | 66799 | 66809 | 66817 | 66818 |
| | 66819 | 66820 | 66821 | 66837 | 66838 | 66840 | 66841 | 66842 | 66849 | 66850 | 66851 | 66854 |
| | 66855 | 66856 | 66859 | 66867 | 66868 | 66871 | 66872 | 66879 | 66880 | 66881 | 66882 | 66883 |
| | 66884 | 66885 | 66893 | 66894 | 66895 | 66896 | 66897 | 66898 | 66899 | 66900 | 66902 | 66903 |
| | 66919 | 66920 | 66922 | 66923 | 66924 | 66925 | 66926 | 66927 | 66930 | 66939 | 66941 | 66942 |
| | 66943 | 66946 | 66947 | 66949 | 66953 | 66954 | 66955 | 66956 | 66957 | 66958 | 66959 | 66961 |
| | 66962 | 66963 | 66964 | 66965 | 66966 | 66967 | 66968 | 66972 | 66974 | 66975 | 66976 | 66978 |
| | 66979 | 66980 | 66983 | 66984 | 66991 | 66992 | 66993 | 66994 | 66995 | 66996 | 66997 | 66998 |
| | 67002 | 67003 | 67004 | 67005 | 67006 | 67018 | 67019 | 67023 | 67024 | 67025 | 67029 | 67030 |
| | 67031 | 67032 | 67033 | 67034 | 67035 | 67036 | 67037 | 67038 | 67042 | 67043 | 67045 | 67046 |
| | 67047 | 67059 | 67062 | 67063 | 67070 | 67089 | 67090 | 67091 | 67092 | 67093 | 67098 | 67099 |
| | 67106 | 67112 | 67116 | 67117 | 67121 | 67122 | 67138 | 67142 | 67143 | 67144 | 67145 | 67146 |
| | 67147 | 67150 | 67154 | 67155 | 67156 | 67159 | 67162 | 67165 | 67166 | 67167 | 67168 | 67169 |
| | 67170 | 67172 | 67173 | 67174 | 67178 | 67179 | 67180 | 67181 | 67182 | 67183 | 67184 | 67185 |
| | 67186 | 67187 | 67188 | 67191 | 67193 | 67194 | 67195 | 67196 | 67197 | 67198 | 67199 | 67202 |
| | 67203 | 67204 | 67205 | 67206 | 67207 | 67209 | 67210 | 67211 | 67213 | 67214 | 67215 | 67216 |
| | 67217 | 67218 | 67219 | 67220 | 67222 | 67223 | 67224 | 67225 | 67226 | 67229 | 67230 | 67231 |
| | 67234 | 67235 | 67236 | 67237 | 67238 | 67239 | 67240 | 67241 | 67242 | 67243 | 67244 | 67245 |
| | 67247 | 67248 | 67249 | 67251 | 67252 | 67254 | 67257 | 67258 | 67260 | 67261 | 67262 | 67263 |
| | 67264 | 67265 | 67266 | 67267 | 67268 | 67269 | 67270 | 67271 | 67272 | 67273 | 67274 | 67282 |
| | 67283 | 67284 | 67285 | 67286 | 67290 | 67296 | 67302 | 67305 | 67306 | 67307 | 67317 | 67318 |
| | 67319 | 67320 | 67332 | 67340 | 67344 | 67359 | 67365 | 67366 | 67370 | 67371 | 67372 | 67382 |
| | 67392 | 67393 | 67397 | 67398 | 67399 | 67404 | 67405 | 67406 | 67410 | 67417 | 67421 | 67431 |
| | 67435 | 67436 | 67444 | 67445 | 67446 | 67447 | 67451 | 67455 | 67456 | 67457 | 67458 | 67459 |
| | 67460 | 67461 | 67462 | 67463 | 67464 | 67465 | 67466 | 67467 | 67468 | 67469 | 67470 | 67472 |
| | 67473 | 67474 | 67477 | 67478 | 67482 | 67483 | 67484 | 67485 | 67490 | 67491 | 67492 | 67493 |
| | 67494 | 67501 | 67502 | 67506 | 67507 | 67508 | 67513 | 67514 | 67515 | 67516 | 67517 | 67518 |
| | 67519 | 67521 | 67522 | 67523 | 67524 | 67525 | 67526 | 67527 | 67528 | 67529 | 67530 | 67533 |
| | 67534 | 67535 | 67536 | 67537 | 67538 | 67539 | 67541 | 67543 | 67544 | 67545 | 67546 | 67547 |
| | 67548 | 67550 | 67551 | 67552 | 67553 | 67554 | 67555 | 67559 | 67560 | 67562 | 67563 | 67564 |
| | 67567 | 67570 | 67574 | 67581 | 67583 | 67584 | 67585 | 67587 | 67588 | 67589 | 67590 | 67592 |
| | 67597 | 67598 | 67603 | 67604 | 67605 | 67606 | 67607 | 67608 | 67609 | 67611 | 67614 | 67615 |
| | 67616 | 67617 | 67618 | 67619 | 67620 | 67621 | 67622 | 67626 | 67627 | 67628 | 67629 | 67633 |
| | 67634 | 67635 | 67636 | 67637 | 67638 | 67639 | 67642 | 67646 | 67650 | 67651 | 67655 | 67660 |
| | 67663 | 67673 | 67674 | 67675 | 67676 | 67679 | 67680 | 67681 | 67684 | 67695 | 67708 | 67709 |
| | 67716 | 67717 | 67733 | 67734 | 67736 | 67737 | 67740 | 67741 | 67750 | 67751 | 67758 | 67764 |
| | 67771 | 67779 | 67780 | 67799 | 67813 | 67814 | 67815 | 67816 | 67817 | 67818 | 67825 | 67826 |
| | 67827 | 67830 | 67833 | 67836 | 67837 | 67838 | 67839 | 67840 | 67843 | 67844 | 67850 | 67851 |
| | 67852 | 67853 | 67854 | 67857 | 67858 | 67861 | 67862 | 67866 | 67867 | 67878 | 67879 | 67887 |
| | 67898 | 67899 | 67908 | 67915 | 67916 | 67919 | 67922 | 67923 | 67925 | 67927 | 67928 | 67929 |
| | 67943 | 67948 | 67951 | 67955 | 67964 | 67965 | 67969 | 67970 | 67973 | 67974 | 67975 | 67978 |
| | 67979 | 67980 | 67982 | 67983 | 67984 | 67990 | 67991 | 67992 | 67998 | 68000 | 68001 | 68003 |
| | 68004 | 68005 | 68006 | 68010 | 68019 | 68029 | 68030 | 68033 | 68040 | 68041 | 68042 | 68043 |
| | 68044 | 68045 | 68049 | 68060 | 68063 | 68071 | 68072 | 68078 | 68079 | 68091 | 68092 | 68095 |
| | 68096 | 68097 | 68098 | 68103 | 68104 | 68105 | 68114 | 68115 | 68116 | 68148 | 68149 | 68150 |
| | 68194 | 68195 | 68210 | 68211 | 68212 | 68213 | 68216 | 68219 | 68220 | 68221 | 68238 | 68239 |
| | 68240 | 68241 | 68260 | 68261 | 68262 | 68266 | 68279 | 68289 | 68292 | 68293 | 68298 | 68301 |
| | 68302 | 68303 | 68308 | 68309 | 68312 | 68313 | 68314 | 68315 | 68319 | 68324 | 68325 | 68334 |
| | 68335 | 68340 | 68341 | 68342 | 68346 | 68347 | 68348 | 68358 | 68360 | 68361 | 68366 | 68367 |
| | 68368 | 68376 | 68377 | 68378 | 68379 | 68380 | 68381 | 68384 | 68385 | 68386 | 68391 | 68399 |
| | 68400 | 68401 | 68403 | 68404 | 68410 | 68411 | 68415 | 68416 | 68417 | 68419 | 68422 | 68423 |
| | 68424 | 68428 | 68429 | 68430 | 68437 | 68438 | 68439 | 68440 | 68441 | 68442 | 68443 | 68444 |
| | 68445 | 68446 | 68447 | 68460 | 68465 | 68466 | 68469 | 68470 | 68471 | 68472 | 68473 | 68477 |
| | 68478 | 68480 | 68481 | 68483 | 68484 | 68485 | 68486 | 68487 | 68488 | 68489 | 68493 | 68494 |
| | 68496 | 68497 | 68498 | 68499 | 68503 | 68504 | 68505 | 68506 | 68507 | 68508 | 68509 | 68512 |
| | 68513 | 68514 | 68515 | 68516 | 68517 | 68525 | 68536 | 68537 | 68538 | 68542 | 68543 | 68547 |
| | 68548 | 68549 | 68550 | 68567 | 68572 | 68573 | 68594 | 68595 | 68603 | 68604 | 68611 | 68629 |
| | 68632 | 68633 | 68634 | 68642 | 68644 | 68645 | 68646 | 68647 | 68652 | 68653 | 68654 | 68655 |
| | 68656 | 68657 | 68663 | 68668 | 68674 | 68676 | 68677 | 68680 | 68681 | 68684 | 68685 | 68686 |
| | 68687 | 68688 | 68689 | 68691 | 68692 | 68696 | 68697 | 68699 | 68700 | 68703 | 68704 | 68705 |
| | 68707 | 68708 | 68713 | 68714 | 68715 | 68716 | 68717 | 68718 | 68726 | 68728 | 68730 | 68738 |
| | 68745 | 68746 | 68747 | 68750 | 68753 | 68754 | 68764 | 68765 | 68766 | 68767 | 68768 | 68770 |
| | 68771 | 68772 | 68775 | 68776 | 68777 | 68781 | 68782 | 68783 | 68785 | 68786 | 68788 | 68789 |
| | 68790 | 68791 | 68792 | 68793 | 68796 | 68797 | 68798 | 68799 | 68800 | 68801 | 68802 | 68804 |
| | 68805 | 68806 | 68807 | 68808 | 68809 | 68812 | 68813 | 68814 | 68815 | 68816 | 68817 | 68818 |
| | 68819 | 68820 | 68821 | 68822 | 68823 | 68824 | 68826 | 68827 | 68828 | 68832 | 68834 | 68835 |
| | 68836 | 68846 | 68847 | 68848 | 68851 | 68852 | 68853 | 68854 | 68855 | 68859 | 68860 | 68861 |
| | 68862 | 68868 | 68869 | 68873 | 68880 | 68881 | 68882 | 68883 | 68884 | 68885 | 68886 | 68887 |
| | 68890 | 68891 | 68892 | 68893 | 68894 | 68895 | 68896 | 68897 | 68900 | 68901 | 68902 | 68903 |
| | 68905 | 68906 | 68907 | 68908 | 68909 | 68910 | 68912 | 68913 | 68914 | 68915 | 68917 | 68918 |
| | 68920 | 68921 | 68922 | 68925 | 68926 | 68930 | 68931 | 68932 | 68933 | 68937 | 68940 | 68941 |
| | 68943 | 68944 | 68945 | 68946 | 68952 | 68956 | 68967 | 68968 | 68970 | 68971 | 68975 | 68976 |
| | 68979 | 68984 | 68987 | 68988 | 68992 | 68993 | 69005 | 69006 | 69012 | 69013 | 69014 | 69016 |
| | 69022 | 69023 | 69025 | 69026 | 69027 | 69028 | 69029 | 69032 | 69038 | 69039 | 69042 | 69044 |
| | 69045 | 69047 | 69052 | 69054 | 69055 | 69062 | 69063 | 69065 | 69066 | 69069 | 69070 | 69074 |
| | 69075 | 69076 | 69077 | 69083 | 69084 | 69086 | 69087 | 69088 | 69089 | 69090 | 69093 | 69094 |
| | 69096 | 69097 | 69098 | 69099 | 69105 | 69106 | 69115 | 69126 | 69133 | 69137 | 69138 | 69139 |
| | 69143 | 69144 | 69146 | 69147 | 69148 | 69149 | 69150 | 69151 | 69153 | 69154 | 69155 | 69156 |
| | 69157 | 69158 | 69159 | 69163 | 69164 | 69169 | 69170 | 69173 | 69174 | 69177 | 69178 | 69181 |
| | 69186 | 69187 | 69188 | 69191 | 69192 | 69193 | 69194 | 69195 | 69196 | 69197 | 69205 | 69207 |
| | 69209 | 69211 | 69213 | 69214 | 69216 | 69223 | 69224 | 69227 | 69228 | 69229 | 69230 | 69231 |
| | 69232 | 69234 | 69235 | 69238 | 69239 | 69240 | 69243 | 69245 | 69246 | 69247 | 69248 | 69249 |
| | 69250 | 69251 | 69252 | 69254 | 69255 | 69256 | 69257 | 69258 | 69259 | 69262 | 69263 | 69268 |
| | 69269 | 69270 | 69271 | 69272 | 69273 | 69275 | 69276 | 69277 | 69279 | 69280 | 69281 | 69282 |
| | 69284 | 69289 | 69291 | 69292 | 69293 | 69296 | 69298 | 69302 | 69306 | 69307 | 69315 | 69316 |
| | 69317 | 69318 | 69319 | 69323 | 69327 | 69330 | 69331 | 69332 | 69336 | 69337 | 69341 | 69342 |
| | 69345 | 69346 | 69347 | 69348 | 69351 | 69354 | 69355 | 69357 | 69358 | 69359 | 69363 | 69364 |
| | 69365 | 69370 | 69372 | 69373 | 69374 | 69377 | 69378 | 69382 | 69385 | 69388 | 69390 | 69391 |
| | 69393 | 69394 | 69395 | 69396 | 69397 | 69399 | 69401 | 69402 | 69403 | 69404 | 69405 | 69407 |
| | 69408 | 69409 | 69410 | 69411 | 69412 | 69413 | 69414 | 69415 | 69416 | 69417 | 69418 | 69419 |
| | 69420 | 69421 | 69426 | 69427 | 69428 | 69429 | 69431 | 69432 | 69433 | 69434 | 69435 | 69438 |
| | 69442 | 69443 | 69444 | 69445 | 69448 | 69449 | 69461 | 69462 | 69463 | 69465 | 69468 | 69473 |
| | 69474 | 69477 | 69478 | 69479 | 69480 | 69482 | 69483 | 69485 | 69492 | 69493 | 69495 | 69496 |
| | 69503 | 69504 | 69509 | 69512 | 69513 | 69517 | 69518 | 69519 | 69520 | 59521 | 69526 | 69530 |
| | 69531 | 69535 | 69536 | 69538 | 69539 | 69540 | 69543 | 69546 | 69547 | 69548 | 69549 | 69551 |
| | 69552 | 69553 | 69554 | 69555 | 69560 | 69563 | 69564 | 69566 | 69568 | 69569 | 69571 | 69572 |
| | 69573 | 69575 | 69578 | 69579 | 69580 | 69581 | 69587 | 69588 | 69589 | 69590 | 69592 | 69596 |
| | 69597 | 69598 | 69599 | 69604 | 69605 | 69606 | 69607 | 69609 | 69611 | 69619 | 69620 | 69622 |
| | 69624 | 69625 | 69626 | 69627 | 69628 | 69630 | 69631 | 69635 | 69636 | 69641 | 69643 | 69645 |
| | 69646 | 69647 | 69648 | 69649 | 69651 | 69653 | 69657 | 69660 | 69661 | 69662 | 69666 | 69670 |
| | 69673 | 69674 | 69675 | 69676 | 69680 | 69684 | 69685 | 69686 | 69687 | 69689 | 69691 | 69692 |
| | 69693 | 69694 | 69697 | 69698 | 69699 | 69700 | 69701 | 69702 | 69703 | 69704 | 69706 | 69710 |
| | 69711 | 69713 | 69714 | 69716 | 69717 | 69720 | 69721 | 69724 | 69725 | 69727 | 69728 | 69729 |
| | 69730 | 69733 | 69737 | 69738 | 69742 | 69743 | 69746 | 69749 | 69750 | 69751 | 69753 | 69754 |
| | 69755 | 69756 | 69757 | 69758 | 69759 | 69760 | 69762 | 69763 | 69764 | 69765 | 69766 | 69767 |
| | 69768 | 69770 | 69771 | 69772 | 69774 | 69775 | 69776 | 69777 | 69782 | 69783 | 69784 | 69785 |
| | 69786 | 69788 | 69789 | 69790 | 69793 | 69800 | 69801 | 69802 | 69806 | 69807 | 69808 | 69809 |
| | 69811 | 69814 | 69815 | 69821 | 69824 | 69827 | 69833 | 69835 | 69837 | 69838 | 69841 | 69842 |
| | 69844 | 69845 | 69848 | 69851 | 69852 | 69853 | 69855 | 69857 | 69858 | 69865 | 69866 | 69868 |
| | 69869 | 69870 | 69871 | 69872 | 69873 | 69875 | 69879 | 69880 | 69881 | 69884 | 69887 | 69888 |
| | 69890 | 69892 | 69894 | 69898 | 69900 | 69901 | 69904 | 69907 | 69908 | 69909 | 69911 | 69912 |
| | 69914 | 69915 | 69916 | 69917 | 69919 | 69925 | 69926 | 69929 | 69931 | 69933 | 69937 | 69945 |
| | 69946 | 69950 | 69952 | 69959 | 69985 | 69988 | 69989 | 69991 | 69992 | 69993 | 69994 | 69998 |
| | 69999 | 70002 | 70003 | 70004 | 70005 | 70006 | 70009 | 70011 | 70012 | 70013 | 70014 | 70016 |
| | 70017 | 70019 | 70023 | 70026 | 70027 | 70028 | 70029 | 70030 | 70032 | 70034 | 70036 | 70037 |
| | 70042 | 70043 | 70045 | 70046 | 70047 | 70049 | 70051 | 70052 | 70054 | 70055 | 70057 | 70059 |
| | 70061 | 70063 | 70064 | 70065 | 70072 | 70073 | 70075 | 70076 | 70079 | 70080 | 70083 | 70085 |
| | 70086 | 70089 | 70090 | 70091 | 70092 | 70093 | 70094 | 70095 | 70096 | 70098 | 70099 | 70100 |
| | 70102 | 70103 | 70105 | 70106 | 70108 | 70109 | 70110 | 70111 | 70113 | 70115 | 70116 | 70117 |
| | 70118 | 70119 | 70122 | 70127 | 70129 | 70133 | 70134 | 70135 | 70138 | 70139 | 70141 | 70144 |
| | 70147 | 70148 | 70149 | 70150 | 70151 | 70155 | 70159 | 70160 | 70161 | 70163 | 70165 | 70170 |
| | 70174 | 70176 | 70182 | 70187 | 70188 | 70191 | 70192 | 70195 | 70197 | 70198 | 70199 | 70200 |
| | 70201 | 70202 | 70203 | 70205 | 70206 | 70207 | 70208 | 70209 | 70212 | 70213 | 70215 | 70216 |
| | 70217 | 70219 | 70220 | 70221 | 70222 | 70223 | 70224 | 70225 | 70226 | 70229 | 70233 | 70234 |
| | 70235 | 70236 | 70238 | 70239 | 70240 | 70243 | 70244 | 70245 | 70247 | 70248 | 70252 | 70254 |
| | 70255 | 70257 | 70259 | 70260 | 70262 | 70264 | 70266 | 70267 | 70270 | 70271 | 70272 | 70273 |
| | 70274 | 70275 | 70276 | 70277 | 70279 | 70280 | 70281 | 70282 | 70283 | 70286 | 70287 | 70290 |
| | 70291 | 70292 | 70294 | 70296 | 70297 | 70298 | 70299 | 70300 | 70301 | 70303 | 70304 | 70307 |
| | 70308 | 70311 | 70312 | 70313 | 70314 | 70315 | 70319 | 70321 | 70322 | 70328 | 70330 | 70331 |
| | 70335 | 70337 | 70338 | 70342 | 70344 | 70345 | 70347 | 70348 | 70349 | 70352 | 70353 | 70356 |
| | 70357 | 70358 | 70359 | 70360 | 70361 | 70363 | 70364 | 70365 | 70366 | 70367 | 70368 | 70369 |
| | 70373 | 70374 | 70375 | 70376 | 70377 | 70378 | 70380 | 70382 | 70384 | 70385 | 70386 | 70387 |
| | 70390 | 70391 | 70392 | 70393 | 70394 | 70396 | 70399 | 70400 | 70401 | 70409 | 70415 | 70416 |
| | 70417 | 70422 | 70425 | 70429 | 70430 | 70436 | 70443 | 70450 | 70469 | 70473 | 70474 | 70476 |
| | 70477 | 70479 | 70481 | 70483 | 70484 | 70488 | 70489 | 70492 | 70493 | 70494 | 70495 | 70498 |
| | 70501 | 70504 | 70522 | 70526 | 70531 | 70536 | 70555 | 70562 | 70563 | 70564 | 70574 | 70577 |
| | 70579 | 70580 | 70583 | 70593 | 70594 | 70605 | 70611 | 70618 | 70624 | 70630 | 70632 | 70638 |
| | 70639 | 70640 | 70641 | 70642 | 70644 | 70647 | 70656 | 70660 | 70662 | 70663 | 70664 | 70665 |
| | 70676 | 70678 | 70691 | 70701 | 70704 | 70708 | 70709 | 70712 | 70715 | 70717 | 70718 | 70719 |
| | 70720 | 70722 | 70723 | 70727 | 70728 | 70729 | 70730 | 70732 | 70734 | 70738 | 70739 | 70740 |
| | 70743 | 70744 | 70745 | 70746 | 70747 | 70749 | 70750 | 70751 | 70756 | 70759 | 70760 | 70762 |
| | 70766 | 70767 | 70771 | 70772 | 70773 | 70774 | 70775 | 70776 | 70777 | 70779 | 70780 | 70781 |
| | 70782 | 70783 | 70785 | 70786 | 70787 | 70788 | 70789 | 70790 | 70791 | 70792 | 70793 | 70794 |
| | 70795 | 70797 | 70798 | 70799 | 70800 | 70802 | 70803 | 70805 | 70806 | 70809 | 70812 | 70813 |
| | 70814 | 70815 | 70816 | 70818 | 70822 | 70824 | 70825 | 70827 | 70828 | 70833 | 70834 | 70835 |
| | 70836 | 70838 | 70840 | 70844 | 70845 | 70846 | 70847 | 70848 | 70849 | 70853 | 70854 | 70855 |
| | 70856 | 70857 | 70858 | 70859 | 70861 | 70862 | 70863 | 70864 | 70866 | 70867 | 70868 | 70869 |
| | 70874 | 70875 | 70877 | 70878 | 70883 | 70884 | 70885 | 70886 | 70888 | 70889 | 70892 | 70897 |
| | 70898 | 70899 | 70901 | 70902 | 70903 | 70904 | 70909 | 70910 | 70911 | 70912 | 70913 | 70915 |
| | 70917 | 70919 | 70922 | 70923 | 70927 | 70930 | 70932 | 70934 | 70935 | 70937 | 70938 | 70939 |
| | 70940 | 70941 | 70942 | 70943 | 70944 | 70946 | 70947 | 70949 | 70950 | 70952 | 70953 | 70955 |
| | 70956 | 70957 | 70958 | 70960 | 70961 | 70962 | 70963 | 70964 | 70965 | 70966 | 70967 | 70968 |
| | 70969 | 70971 | 70972 | 70975 | 70976 | 70977 | 70978 | 70979 | 70981 | 70982 | 70983 | 70984 |
| | 70985 | 70986 | 70987 | 70988 | 70989 | 70990 | 70991 | 70995 | 70996 | 70998 | 70999 | 71000 |
| | 71001 | 71002 | 71003 | 71004 | 71006 | 71007 | 71008 | 71010 | 71011 | 71013 | 71016 | 71018 |
| | 71019 | 71021 | 71023 | 71024 | 71027 | 71033 | 71042 | 71044 | 71051 | 71053 | 71056 | 71057 |
| | 71061 | 71064 | 71065 | 71066 | 71679 | 71070 | 71077 | 71088 | 71093 | 71096 | 71099 | 71100 |
| | 71109 | 71110 | 71111 | 71113 | 71120 | 71123 | 71128 | 71130 | 71132 | 71133 | 71140 | 71145 |
| | 71146 | 71147 | 71148 | 71151 | 71152 | 71154 | 71156 | 71157 | 71159 | 71160 | 71161 | 71162 |
| | 71163 | 71165 | 71166 | 71170 | 71173 | 71174 | 71175 | 71176 | 71179 | 71180 | 71181 | 71183 |
| | 71185 | 71194 | 71198 | 71199 | 71203 | 71204 | 71206 | 71213 | 71225 | 71236 | 71241 | 71249 |
| | 71257 | 71261 | 71263 | 71266 | 71267 | 71268 | 71271 | 71272 | 71273 | 71276 | 71280 | 71285 |
| | 71291 | 71292 | 71294 | 71295 | 71313 | 71344 | 71345 | 71346 | 71348 | 71349 | 71352 | 71353 |
| | 71354 | 71361 | 71362 | 71367 | 71368 | 71371 | 71372 | 71391 | 71396 | 71398 | 71399 | 71404 |
| | 71406 | 71408 | 71412 | 71415 | 71418 | 71421 | 71428 | 71429 | 71430 | 71438 | 71439 | 71440 |
| | 71442 | 71443 | 71449 | 71450 | 71453 | 71454 | 71459 | 71460 | 71462 | 71464 | 71467 | 71472 |
| | 71480 | 71482 | 71483 | 71486 | 71488 | 71489 | 71492 | 71495 | 71498 | 71500 | 71502 | 71506 |
| | 71512 | 71513 | 71514 | 71516 | 71534 | 71540 | 71542 | 71543 | 71544 | 71547 | 71548 | 71551 |
| | 71563 | 71564 | 71565 | 71569 | 71570 | 71572 | 71574 | 71575 | 71577 | 71578 | 71579 | 71581 |
| | 71588 | 71591 | 71592 | 71594 | 71595 | 71596 | 71597 | 71598 | 71600 | 71604 | 71617 | 71618 |
| | 71620 | 71621 | 71626 | 71627 | 71630 | 71631 | 71632 | 71636 | 71648 | 71662 | 71664 | 71666 |
| | 71667 | 71668 | 71669 | 71670 | 71672 | 71673 | 71675 | 71676 | 71677 | 71679 | 71689 | 71692 |
| | 71699 | 71700 | 71701 | 71705 | 71706 | 75529 | 75539 | 75540 | 75542 | 75543 | 75557 | 75560 |
| | 75561 | 75562 | 75570 | 75576 | 75577 | 75578 | 75582 | 75586 | 75587 | 75588 | 75589 | 75592 |
| | 75593 | 75594 | 75595 | 75596 | 75600 | 75611 | 75612 | 75613 | 75614 | 75616 | 75619 | 75628 |
| | 75629 | 75630 | 75631 | 75653 | 75669 | 75680 | 75690 | 75694 | 75699 | 75700 | 75705 | 75706 |
| | 75743 | 75767 | 75768 | 75772 | 75773 | 75774 | 75775 | 75776 | 75777 | 75787 | 75788 | 75791 |
| | 75807 | 75808 | 75812 | 75814 | 75816 | 75818 | 75819 | 75827 | 75828 | 75829 | 75830 | 75837 |
| | 75838 | 75839 | 75840 | 75841 | 75843 | 75844 | 75848 | 75849 | 75850 | 75851 | 75853 | 75872 |
| | 75880 | 75885 | 75886 | 75888 | 75891 | 75892 | 75893 | 75901 | 75902 | 75903 | 75904 | 75917 |
| | 75923 | 75924 | 75925 | 75926 | 75928 | 75940 | 75941 | 75943 | 75945 | 75946 | 75947 | 75952 |
| | 75957 | 75958 | 75960 | 75961 | 75962 | 75963 | 75964 | 75969 | 75970 | 75978 | 75979 | 75980 |
| | 75981 | 75982 | 75983 | 75984 | 75986 | 75987 | 75992 | 76011 | 76013 | 76015 | 76016 | 76017 |
| | 76018 | 76027 | 76028 | 76029 | 76033 | 76035 | 76044 | 76045 | 76046 | 76047 | 76048 | |

(11) Metal-binding proteins (SEQ ID NOs)

| | | | | | | | | | | | | |
|---|---|---|---|---|---|---|---|---|---|---|---|---|
| 4825 | 4936 | 4973 | 5174 | 5220 | 5224 | 5382 | 6020 | 6050 | 6142 | 6317 | 6337 | 6468 |
| | 6605 | 10463 | 10856 | 10857 | 10862 | 10885 | 11032 | 11034 | 11431 | 11869 | 11994 | 12018 |
| | 16978 | 16769 | 16778 | 16779 | 16781 | 16782 | 16783 | 16858 | 16862 | 16873 | 16877 | 16878 |
| | 16879 | 16880 | 54097 | 54098 | 54143 | 54144 | 54145 | 54146 | 54147 | 54148 | 54153 | 54154 |
| | 54157 | 54158 | 54159 | 54160 | 54161 | 54162 | 54163 | 54164 | 54165 | 54166 | 54167 | 54168 |
| | 54169 | 54170 | 54171 | 54175 | 54176 | 54177 | 54178 | 54179 | 54180 | 54181 | 54182 | 54183 |
| | 54184 | 54185 | 54186 | 54187 | 54209 | 54210 | 54211 | 54214 | 54215 | 54216 | 54217 | 54218 |
| | 54219 | 54226 | 54227 | 54228 | 54229 | 54230 | 54231 | 54232 | 54233 | 54234 | 54235 | 54236 |
| | 54237 | 54240 | 54241 | 54244 | 54245 | 54246 | 54307 | 54308 | 54455 | 54456 | 54457 | 54458 |
| | 54459 | 54460 | 54511 | 54512 | 54513 | 54514 | 54665 | 54666 | 54667 | 54802 | 55005 | 55480 |
| | 55566 | 55630 | 55631 | 55632 | 55842 | 56663 | 56664 | 56700 | 56701 | 56702 | 56703 | 56731 |
| | 56732 | 56733 | 56815 | 56816 | 56828 | 56829 | 57141 | 57142 | 57143 | 57159 | 57160 | 57161 |
| | 57162 | 57213 | 57214 | 58180 | 58181 | 58262 | 58263 | 58264 | 58265 | 58268 | 58269 | 58270 |
| | 58271 | 58299 | 58300 | 58301 | 58302 | 58305 | 58306 | 58307 | 58308 | 58317 | 58318 | 58319 |
| | 58320 | 58394 | 58395 | 58396 | 58397 | 58458 | 58459 | 58460 | 58461 | 58544 | 58545 | 58546 |
| | 58547 | 59096 | 59097 | 59098 | 59099 | 59100 | 60610 | 60611 | 60612 | 60613 | 60614 | 61600 |
| | 61601 | 62043 | 62044 | 62045 | 62166 | 62167 | 62367 | 62368 | 62369 | 62370 | 62438 | 63120 |
| | 63121 | 63122 | 63179 | 63180 | 63277 | 63629 | 63630 | 63631 | 64185 | 64350 | 64351 | 64352 |
| | 65143 | 65188 | 65225 | 65324 | 65545 | 65559 | 65581 | 65582 | 65591 | 65592 | 65607 | 65828 |
| | 65829 | 65830 | 65841 | 65842 | 65848 | 65849 | 65850 | 65865 | 65918 | 65964 | 65983 | 65984 |
| | 66007 | 66008 | 66059 | 66060 | 66061 | 66062 | 66066 | 66075 | 66076 | 66077 | 66078 | 66079 |
| | 66092 | 66093 | 66094 | 66095 | 66097 | 66098 | 66177 | 66184 | 66386 | 66387 | 66532 | 66560 |
| | 66567 | 66646 | 66647 | 67110 | 67111 | 67212 | 67540 | 67586 | 67692 | 67950 | 67987 | 68345 |
| | 68510 | 68511 | 68535 | 68592 | 68593 | 68671 | 68672 | 69056 | 69057 | 69104 | 69182 | 69183 |
| | 69253 | 69265 | 69266 | 69267 | 69557 | 69558 | 69612 | 69632 | 69744 | 69797 | 69798 | 69863 |
| | 69944 | 69971 | 70020 | 70021 | 70041 | 70070 | 70104 | 70156 | 70346 | 70371 | 70427 | 70442 |
| | 70447 | 70448 | 70449 | 70451 | 70453 | 70455 | 70458 | 70459 | 70463 | 70465 | 70467 | 70468 |
| | 70470 | 70471 | 70487 | 70490 | 70491 | 70497 | 70506 | 70507 | 70510 | 70514 | 70530 | 70535 |
| | 70540 | 70554 | 70556 | 70557 | 70561 | 70626 | 70653 | 70873 | 71012 | 71054 | 71067 | 71072 |
| | 71086 | 71153 | 71320 | 71321 | 71325 | 71329 | 71332 | 71334 | 71357 | 71359 | 71364 | 71365 |
| | 71366 | 71420 | 71441 | 71456 | 71499 | 71601 | 71610 | 71622 | 71647 | 71685 | 71697 | 75590 |
| | 75753 | 75754 | 75755 | 75762 | 75785 | 75786 | 75999 | 76000 | 76001 | 76042 | | |

(12) Methanogenesis proteins (SEQ ID NOs)

| | | | | | | | | | | | | |
|---|---|---|---|---|---|---|---|---|---|---|---|---|
| 5833 | 5835 | 5836 | 5837 | 5838 | 5839 | 5840 | 5841 | 5842 | 5843 | 5844 | 6360 | 6432 |
| | 6436 | 6437 | 6438 | 6439 | 6440 | 6441 | 6442 | 6443 | 6444 | 6445 | 10474 | 10475 |
| | 10476 | 10477 | 10478 | 10479 | 10480 | 10481 | 10482 | 10483 | 10484 | 10485 | 11511 | 11549 |
| | 11554 | 11555 | 11556 | 11557 | 11558 | 11559 | 11560 | 11562 | 16859 | 54741 | 54742 | 54743 |
| | 54744 | 54745 | 54786 | 54787 | 54788 | 54789 | 54790 | 54871 | 54872 | 54873 | 54874 | 54875 |
| | 56843 | 56844 | 57209 | 57210 | 57215 | 57216 | 57217 | 57218 | 57219 | 57220 | 57230 | 57231 |
| | 57232 | 57233 | 57234 | 57235 | 57267 | 57268 | 57269 | 57270 | 57271 | 57272 | 57273 | 57274 |
| | 57275 | 57276 | 57277 | 57346 | 57347 | 57348 | 57349 | 57350 | 57351 | 57365 | 57366 | 57367 |
| | 57368 | 57416 | 57417 | 57418 | 57461 | 57462 | 57463 | 57464 | 57499 | 57500 | 57501 | 57510 |
| | 57511 | 57512 | 57706 | 57707 | 57708 | 57721 | 57722 | 57723 | 57734 | 57735 | 57736 | 57737 |
| | 57738 | 57739 | 57979 | 57980 | 57981 | 57982 | 57983 | 57984 | 57998 | 57999 | 58000 | 58001 |
| | 58002 | 58003 | 58011 | 58012 | 58013 | 58017 | 58018 | 58019 | 58023 | 58024 | 58025 | 58029 |
| | 58030 | 58031 | 58035 | 58036 | 58037 | 58047 | 58048 | 58049 | 58065 | 58066 | 58067 | 58077 |
| | 58078 | 58079 | 58080 | 58081 | 58082 | 58104 | 58105 | 58106 | 58107 | 58108 | 58109 | 58113 |
| | 58114 | 58115 | 58119 | 58120 | 58121 | 58144 | 58145 | 58146 | 58185 | 58186 | 58187 | 58188 |
| | 58189 | 58190 | 58191 | 58192 | 58193 | 58194 | 58195 | 58196 | 58200 | 58201 | 58202 | 58203 |
| | 58204 | 58205 | 58206 | 58209 | 58210 | 58211 | 58212 | 58213 | 58214 | 58242 | 58243 | 58244 |
| | 58245 | 58246 | 58843 | 58844 | 58845 | 58846 | 59842 | 59843 | 59844 | 59845 | 59846 | 59847 |
| | 60615 | 60616 | 60617 | 60618 | 60624 | 60625 | 60626 | 60627 | 60628 | 60634 | 60635 | 60636 |
| | 60637 | 60659 | 61096 | 61097 | 61098 | 61240 | 61241 | 61242 | 61243 | 61511 | 61531 | 61532 |
| | 61533 | 61534 | 61712 | 61713 | 61714 | 61715 | 61790 | 61793 | 61796 | 61806 | 61833 | 61846 |
| | 61851 | 61854 | 61857 | 61871 | 61874 | 61883 | 61888 | 61891 | 61925 | 61944 | 61945 | 61956 |
| | 61962 | 62778 | 62779 | 63283 | 63284 | 63844 | 63845 | 63846 | 63851 | 63903 | 63911 | 63924 |
| | 63925 | 63929 | 63932 | 63933 | 63935 | 63936 | 63937 | 63938 | 63939 | 63940 | 63941 | 63942 |
| | 63943 | 63944 | 63945 | 63949 | 63951 | 63955 | 63956 | 63957 | 63958 | 63962 | 63966 | 63967 |
| | 63968 | 63977 | 63981 | 63982 | 63983 | 63984 | 63985 | 63986 | 64041 | 64141 | 64165 | 65295 |
| | 65303 | 65305 | 65310 | 65315 | 65316 | 65329 | 65334 | 65467 | 65469 | 65486 | 65503 | 65511 |
| | 65517 | 65519 | 65530 | 65534 | 65538 | 65540 | 65546 | 65550 | 65656 | 65880 | 66628 | 67044 |
| | 67561 | 67566 | 67568 | 67569 | 67571 | 67572 | 67575 | 67578 | 67580 | 67582 | 67669 | 67670 |
| | 67682 | 67683 | 67694 | 67700 | 67711 | 67712 | 67718 | 67719 | 67720 | 67723 | 67724 | 67729 |
| | 67732 | 67735 | 67738 | 67739 | 67742 | 67743 | 67754 | 67755 | 67756 | 67757 | 67783 | 67784 |
| | 67789 | 67790 | 67795 | 67796 | 67802 | 67803 | 67805 | 67806 | 67809 | 67810 | 67811 | 67812 |
| | 67821 | 67822 | 67823 | 67824 | 67831 | 67832 | 67841 | 67842 | 67845 | 67846 | 67863 | 68637 |
| | 68712 | 68721 | 68732 | 68733 | 68734 | 68735 | 68736 | 68737 | 68739 | 68740 | 68748 | 68749 |
| | 68751 | 68752 | 68755 | 68757 | 68758 | 68760 | 68761 | 68769 | 68856 | 58857 | 68871 | 68874 |
| | 68878 | 68916 | 69112 | 69113 | 69114 | 69140 | 69145 | 69215 | 69244 | 69290 | 69297 | 69303 |
| | 69310 | 69329 | 69335 | 69338 | 69350 | 69360 | 69361 | 69366 | 69389 | 69392 | 69406 | 69439 |
| | 69455 | 69469 | 69475 | 69476 | 69481 | 69484 | 69489 | 69491 | 69494 | 69497 | 69498 | 69500 |
| | 69501 | 69502 | 69505 | 69506 | 69525 | 69527 | 69534 | 69582 | 69920 | 69924 | 69934 | 69939 |
| | 69940 | 69941 | 69942 | 69943 | 69948 | 69949 | 69951 | 69953 | 69954 | 69961 | 69962 | 69964 |
| | 69967 | 69968 | 69970 | 69973 | 69974 | 69975 | 69977 | 69978 | 69979 | 69980 | 69981 | 69982 |
| | 69983 | 69986 | 69987 | 69990 | 69995 | 69997 | 70022 | 70040 | 70048 | 70056 | 70068 | 70074 |
| | 70097 | 70112 | 70124 | 70146 | 70153 | 70175 | 70193 | 70261 | 70309 | 70339 | 70343 | 70355 |
| | 70389 | 70395 | 70408 | 70428 | 70452 | 70457 | 70464 | 70520 | 70523 | 70529 | 70534 | 70544 |
| | 70547 | 70550 | 70553 | 70560 | 70565 | 70566 | 70573 | 70578 | 70581 | 70584 | 70588 | 70592 |
| | 70595 | 70597 | 70598 | 70600 | 70606 | 70607 | 70670 | 70687 | 70689 | 70695 | 70697 | 70699 |
| | 70702 | 70703 | 70705 | 70706 | 70711 | 70713 | 70736 | 70769 | 70770 | 70870 | 70945 | 71358 |
| | 71336 | 71337 | 71358 | 71527 | 75913 | | | | | | | |

(13) Methanogenesis Mtr proteins (SEQ ID NOs)

| | | | | | | | | | | | | |
|---|---|---|---|---|---|---|---|---|---|---|---|---|
| 6349 | 6350 | 6351 | 6352 | 6353 | 6354 | 11495 | 11496 | 11498 | 11499 | 11500 | 65965 | 66149 |
| | 66150 | 66166 | 66173 | 66174 | 66948 | 67048 | 67049 | 67153 | 67192 | 67246 | 67443 | 67479 |
| | 67480 | 67481 | 67486 | 67489 | 67495 | 67500 | 67512 | 67542 | 67601 | 68002 | 70323 | 70324 |
| | 70332 | 70333 | 70397 | 70398 | 70671 | 70673 | 70680 | 70688 | 70690 | 70710 | 70980 | 71521 |
| | 71282 | 71282 | 71503 | 71518 | 71519 | 71520 | 71521 | 71522 | 71523 | 71524 | 71651 | 75911 |

(14) Methanogenesis MtrE proteins (SEQ ID NOs)

| | | | | | | | | | | | | |
|---|---|---|---|---|---|---|---|---|---|---|---|---|
| 6355 | 11501 | 12052 | 12053 | 12054 | 12055 | 12056 | 12057 | 12058 | 12059 | 12060 | 12061 | 12062 |
| | 12063 | 12064 | 12065 | 12066 | 12067 | 12068 | 12069 | 12070 | 12071 | 12072 | 12073 | 12074 |
| | 12075 | 12076 | 12077 | 12078 | 12079 | 12080 | 12081 | 12082 | 12083 | 12084 | 12085 | 12086 |
| | 12087 | 12088 | 12089 | 12090 | 12091 | 12092 | 12093 | 12094 | 12095 | 12096 | 12097 | 12098 |
| | 12099 | 16969 | 16970 | 16971 | 16972 | 16973 | 64574 | 65049 | 65136 | 65190 | 65201 | 65238 |
| | 65294 | 65312 | 65962 | 65963 | 66049 | 66091 | 66635 | 66636 | 66808 | 71525 | 75912 | |

(15) Phage related (SEQ ID NOs)

| | | | | | | | |
|---|---|---|---|---|---|---|---|
| 4742 | 4744 | 4745 | 4750 | 57399 | 57400 | 57401 | 69072 |

(16) Proteolysis (SEQ ID NOs)

| | | | | | | | | | | | | |
|---|---|---|---|---|---|---|---|---|---|---|---|---|
| 4466 | 4564 | 4672 | 4754 | 5032 | 5120 | 5314 | 5461 | 5560 | 5678 | 5695 | 5744 | 5936 |
| | 6069 | 6109 | 6130 | 6600 | 10411 | 10525 | 10580 | 10737 | 11111 | 11232 | 11426 | 11638 |
| | 11652 | 11798 | 16770 | 16788 | 16790 | 53469 | 53470 | 53471 | 53472 | 53473 | 53474 | 53475 |
| | 53476 | 53506 | 53507 | 53814 | 53815 | 53816 | 53817 | 53818 | 53819 | 53863 | 53864 | 53865 |
| | 53885 | 53886 | 53887 | 53888 | 53889 | 53890 | 53891 | 53892 | 53893 | 53894 | 53895 | 53896 |
| | 53897 | 53898 | 53899 | 53900 | 53901 | 53902 | 53903 | 53904 | 53905 | 53996 | 53997 | 53998 |
| | 53999 | 54000 | 54001 | 54002 | 54003 | 54004 | 54012 | 54013 | 54022 | 54023 | 54024 | 54025 |
| | 54026 | 54027 | 54028 | 54029 | 54030 | 54031 | 54032 | 54033 | 54141 | 54254 | 54300 | 54301 |
| | 54322 | 54323 | 55371 | 55372 | 55373 | 55374 | 55500 | 56158 | 56159 | 57152 | 57223 | 57224 |
| | 57359 | 57410 | 57411 | 57412 | 57885 | 57886 | 57887 | 57888 | 57889 | 58584 | 58585 | 60294 |
| | 60295 | 60296 | 60297 | 60690 | 60691 | 60692 | 60693 | 60773 | 60774 | 60775 | 60776 | 60777 |
| | 60778 | 60779 | 60845 | 60874 | 61622 | 61623 | 61909 | 61910 | 61934 | 61976 | 61979 | 61982 |
| | 61983 | 61990 | 62063 | 62064 | 62093 | 62105 | 62165 | 62175 | 62176 | 62183 | 62189 | 62190 |
| | 62191 | 62192 | 62193 | 62196 | 62197 | 62202 | 62203 | 62204 | 62213 | 62214 | 62222 | 62227 |
| | 62229 | 62230 | 62255 | 62256 | 62361 | 62362 | 62386 | 62433 | 62434 | 62436 | 62437 | 62444 |
| | 62445 | 62446 | 62447 | 62944 | 62945 | 62946 | 63152 | 63153 | 63467 | 63950 | 64060 | 64061 |
| | 64062 | 64063 | 64064 | 64065 | 64066 | 64204 | 64205 | 64206 | 64265 | 64270 | 64272 | 64273 |
| | 64294 | 64295 | 64331 | 64332 | 64333 | 64379 | 64391 | 64392 | 64393 | 64403 | 64404 | 64405 |
| | 64413 | 64414 | 64415 | 64427 | 64428 | 64429 | 64436 | 64437 | 64438 | 64452 | 64453 | 64454 |
| | 64458 | 64459 | 64460 | 64473 | 64474 | 64475 | 64482 | 64483 | 64484 | 64488 | 64506 | 64511 |
| | 64513 | 64520 | 64521 | 64522 | 64564 | 64591 | 64592 | 64593 | 64598 | 64599 | 64600 | 64620 |
| | 64621 | 64622 | 64643 | 64644 | 64645 | 64646 | 64647 | 64648 | 64652 | 64653 | 64654 | 64667 |
| | 64668 | 64669 | 64699 | 64700 | 64701 | 64720 | 64929 | 64930 | 64957 | 64958 | 64959 | 65012 |
| | 65013 | 65014 | 65120 | 65121 | 65138 | 65139 | 65140 | 65277 | 65278 | 65283 | 65301 | 65302 |
| | 65357 | 65358 | 65367 | 65368 | 65379 | 65380 | 65381 | 65382 | 65385 | 65386 | 65387 | 65388 |
| | 65389 | 65390 | 65391 | 65406 | 65407 | 65408 | 65409 | 65418 | 65419 | 65424 | 65425 | 65426 |
| | 65427 | 65429 | 65430 | 65437 | 65438 | 65444 | 65445 | 65450 | 65451 | 65453 | 65454 | 65455 |
| | 65456 | 65457 | 65458 | 65459 | 65460 | 65470 | 65565 | 65788 | 65789 | 65790 | 65798 | 65799 |
| | 65800 | 65813 | 65814 | 65815 | 65874 | 65891 | 65892 | 66033 | 66034 | 66038 | 66133 | 66161 |
| | 66171 | 66172 | 66191 | 66212 | 66228 | 66239 | 66240 | 66264 | 66700 | 66886 | 66887 | 66888 |
| | 67060 | 67061 | 67325 | 67326 | 67327 | 67531 | 67532 | 67666 | 67667 | 67705 | 67706 | 67707 |
| | 67807 | 67808 | 67855 | 67856 | 67859 | 67860 | 67936 | 67995 | 68017 | 68018 | 68022 | 68023 |
| | 68076 | 68077 | 68110 | 68111 | 68112 | 68113 | 68131 | 68132 | 68142 | 68143 | 68146 | 68147 |
| | 68166 | 68167 | 68168 | 68169 | 68170 | 68171 | 68176 | 68177 | 68182 | 68183 | 68186 | 68187 |
| | 68196 | 68197 | 68202 | 68203 | 68204 | 68205 | 68214 | 68215 | 68222 | 68223 | 68226 | 68227 |
| | 68228 | 68229 | 68230 | 68231 | 68242 | 68243 | 68244 | 68245 | 68250 | 68251 | 68254 | 68255 |
| | 68269 | 68270 | 68271 | 68272 | 68273 | 68274 | 68326 | 68327 | 68328 | 68329 | 68362 | 68373 |
| | 68374 | 68418 | 68602 | 68628 | 68635 | 68636 | 68643 | 68675 | 69127 | 69128 | 69129 | 69179 |
| | 69180 | 69199 | 69200 | 69236 | 69237 | 69328 | 69446 | 69447 | 69593 | 69787 | 69862 | 69882 |
| | 69883 | 70035 | 70157 | 70184 | 70288 | 70340 | 70379 | 70383 | 70411 | 70461 | 70462 | 70533 |
| | 70654 | 70655 | 70894 | 71084 | 71135 | 71142 | 71188 | 71211 | 71269 | 71390 | 71411 | 71437 |
| | 71497 | 71576 | 71582 | 71634 | 75526 | 75584 | 75585 | 75621 | 75622 | 75623 | 75636 | 75701 |
| | 75835 | 75836 | 75890 | 75990 | 75991 | | | | | | | |

(17) Transcription regulation (SEQ ID NOs)

| | | | | |
|---|---|---|---|---|
| 54777 | 54778 | 54779 | 54780 | 70620 |

(18) Ribosomal (SEQ ID NOs)

| | | | | | | | | | | | |
|---|---|---|---|---|---|---|---|---|---|---|---|
| 61896 | 61897 | 62721 | 66723 | 66724 | 66725 | 66726 | 66729 | 67400 | 71216 | 71355 | 71652 |

(19) Substrate binding (SEQ ID NOs)

16860

(20) Transcription (SEQ ID NOs)

| | | | | | | | | | | | | |
|---|---|---|---|---|---|---|---|---|---|---|---|---|
| 57620 | 57621 | 59813 | 65150 | 65151 | 65152 | 68305 | 68658 | 69018 | 69019 | 69020 | 70177 | 70179 |
| | 70285 | 70621 | 70622 | 71134 | 71231 | 71360 | 71427 | 71607 | 71646 | | | |

(21) Transport (SEQ ID NOs)

| | | | | | | | | | | | | |
|---|---|---|---|---|---|---|---|---|---|---|---|---|
| 4437 | 4442 | 4450 | 4451 | 4480 | 4503 | 4527 | 4550 | 4573 | 4574 | 4575 | 4632 | 4634 |
| | 4635 | 4640 | 4641 | 4649 | 4650 | 4673 | 4685 | 4686 | 4699 | 4717 | 4763 | 4766 |
| | 4786 | 4792 | 4800 | 4813 | 4839 | 4840 | 4841 | 4900 | 4915 | 4929 | 4930 | 4967 |
| | 4970 | 4972 | 4974 | 4991 | 4992 | 5003 | 5004 | 5040 | 5042 | 5049 | 5069 | 5092 |
| | 5093 | 5129 | 5130 | 5138 | 5157 | 5222 | 5241 | 5254 | 5260 | 5308 | 5316 | 5317 |
| | 5318 | 5383 | 5419 | 5426 | 5435 | 5503 | 5514 | 5515 | 5516 | 5623 | 5633 | 5634 |
| | 5653 | 5717 | 5757 | 5764 | 5765 | 5772 | 5802 | 5805 | 5815 | 5860 | 5869 | 5871 |
| | 5888 | 5942 | 5954 | 5956 | 6029 | 6044 | 6048 | 6049 | 6059 | 6060 | 6090 | 6134 |
| | 6140 | 6141 | 6145 | 6153 | 6154 | 6167 | 6183 | 6197 | 6208 | 6209 | 6218 | 6221 |
| | 6272 | 6273 | 6312 | 6377 | 6385 | 6400 | 6416 | 6452 | 6456 | 6477 | 6478 | 6479 |
| | 6483 | 6608 | 6609 | 6629 | 6638 | 6640 | 6650 | 10256 | 10271 | 10275 | 10276 | 10284 |
| | 10295 | 10296 | 10302 | 10303 | 10343 | 10352 | 10354 | 10355 | 10365 | 10380 | 10381 | 10405 |
| | 10406 | 10407 | 10409 | 10425 | 10496 | 10499 | 10516 | 10527 | 10528 | 10578 | 10623 | 10624 |
| | 10625 | 10629 | 10630 | 10648 | 10651 | 10652 | 10655 | 10656 | 10657 | 10663 | 10701 | 10718 |
| | 10728 | 10738 | 10753 | 10841 | 10842 | 10845 | 10847 | 10850 | 10851 | 10854 | 10855 | 10863 |
| | 10864 | 10870 | 10905 | 10932 | 10976 | 11054 | 11073 | 11083 | 11095 | 11121 | 11124 | 11134 |
| | 11140 | 11141 | 11142 | 11159 | 11205 | 11214 | 11215 | 11227 | 11274 | 11329 | 11341 | 11342 |
| | 11343 | 11355 | 11371 | 11421 | 11433 | 11469 | 11470 | 11513 | 11514 | 11530 | 11544 | 11564 |
| | 11572 | 11574 | 11575 | 11583 | 11626 | 11671 | 11677 | 11680 | 11681 | 11684 | 11705 | 11725 |
| | 11742 | 11751 | 11787 | 11813 | 11817 | 11839 | 11912 | 11980 | 11991 | 12007 | 12013 | 12017 |
| | 12019 | 16772 | 16773 | 16775 | 16776 | 16796 | 16798 | 16870 | 16875 | 53543 | 53544 | 53545 |
| | 53565 | 53566 | 53567 | 53568 | 53569 | 53570 | 53588 | 53589 | 53590 | 53591 | 53592 | 53593 |
| | 53600 | 53985 | 54018 | 54019 | 54020 | 54021 | 54094 | 54095 | 54096 | 54119 | 54120 | 54121 |
| | 54142 | 54206 | 54207 | 54208 | 54220 | 54221 | 54255 | 54256 | 54257 | 54258 | 54259 | 54260 |
| | 54261 | 54273 | 54274 | 54275 | 54276 | 54304 | 54309 | 54310 | 54311 | 54312 | 54317 | 54319 |
| | 54326 | 54327 | 54338 | 54339 | 54340 | 54341 | 54342 | 54343 | 54344 | 54345 | 54346 | 54347 |
| | 54348 | 54349 | 54350 | 54351 | 54352 | 54354 | 54355 | 54356 | 54357 | 54358 | 54359 | 54360 |
| | 54361 | 54362 | 54363 | 54364 | 54365 | 54366 | 54367 | 54368 | 54381 | 54382 | 54383 | 54384 |
| | 54385 | 54386 | 54432 | 54433 | 54434 | 54435 | 54436 | 54437 | 54438 | 54439 | 54444 | 54445 |
| | 54446 | 54461 | 54476 | 54477 | 54507 | 54508 | 54509 | 54510 | 54515 | 54516 | 54522 | 54523 |
| | 54524 | 54525 | 54528 | 54529 | 54530 | 54531 | 54532 | 54533 | 54534 | 54535 | 54538 | 54539 |
| | 54540 | 54541 | 54546 | 54547 | 54548 | 54549 | 54550 | 54551 | 54552 | 54553 | 54554 | 54555 |
| | 54556 | 54557 | 54558 | 54559 | 54560 | 54561 | 54562 | 54563 | 54564 | 54565 | 54566 | 54567 |
| | 54568 | 54569 | 54570 | 54571 | 54572 | 54573 | 54574 | 54575 | 54576 | 54577 | 54578 | 54579 |
| | 54580 | 54581 | 54582 | 54583 | 54584 | 54585 | 54586 | 54587 | 54588 | 54589 | 54590 | 54591 |
| | 54592 | 54593 | 54594 | 54595 | 54596 | 54597 | 54598 | 54599 | 54600 | 54601 | 54602 | 54603 |
| | 54604 | 54605 | 54606 | 54607 | 54608 | 54609 | 54610 | 54611 | 54612 | 54613 | 54614 | 54615 |
| | 54616 | 54617 | 54618 | 54619 | 54620 | 54621 | 54622 | 54623 | 54624 | 54628 | 54629 | 54630 |
| | 54631 | 54632 | 54633 | 54634 | 54635 | 54636 | 54637 | 54638 | 54639 | 54640 | 54641 | 54642 |
| | 54643 | 54644 | 54645 | 54658 | 54659 | 54663 | 54664 | 54668 | 54669 | 54670 | 54671 | 54672 |
| | 54673 | 54674 | 54675 | 54676 | 54678 | 54679 | 54680 | 54681 | 54682 | 54683 | 54684 | 54685 |
| | 54686 | 54687 | 54688 | 54689 | 54690 | 54691 | 54692 | 54695 | 54696 | 5469 | 54698 | 54700 |
| | 54701 | 54702 | 54703 | 54704 | 54705 | 54714 | 54715 | 54717 | 54718 | 54719 | 54720 | 54721 |
| | 54722 | 54723 | 54724 | 54725 | 54726 | 54727 | 54728 | 54729 | 54730 | 54731 | 54752 | 54753 |
| | 54754 | 54759 | 54760 | 54785 | 54795 | 54796 | 54797 | 54803 | 54804 | 54805 | 54806 | 54815 |
| | 54816 | 54817 | 54841 | 54842 | 54843 | 54846 | 54847 | 54848 | 54849 | 54850 | 54851 | 54852 |
| | 54853 | 54855 | 54856 | 54857 | 54858 | 54859 | 54860 | 54861 | 54862 | 54863 | 54864 | 54865 |
| | 54866 | 54867 | 54868 | 54869 | 54870 | 54876 | 54877 | 54878 | 54882 | 54883 | 54884 | 54885 |
| | 54886 | 54893 | 54894 | 54895 | 54896 | 54897 | 54898 | 54899 | 54900 | 54901 | 54902 | 54903 |
| | 54904 | 54905 | 54906 | 54907 | 54908 | 54909 | 54910 | 54911 | 54912 | 54913 | 54914 | 54915 |
| | 54916 | 54917 | 54918 | 54919 | 54920 | 54921 | 54922 | 54923 | 54924 | 54925 | 54926 | 54927 |
| | 54928 | 54929 | 54930 | 54931 | 54932 | 54933 | 54934 | 54935 | 54936 | 54937 | 54938 | 54939 |
| | 54940 | 54941 | 54942 | 54943 | 54944 | 54945 | 54946 | 54947 | 54948 | 54949 | 54950 | 54951 |
| | 54952 | 54953 | 54954 | 54955 | 54956 | 54957 | 54958 | 54959 | 54960 | 54961 | 54962 | 54963 |
| | 54964 | 54965 | 54966 | 54967 | 54968 | 54969 | 54970 | 54971 | 54972 | 54973 | 54974 | 54975 |
| | 54976 | 54977 | 54978 | 54979 | 54980 | 54981 | 54982 | 54983 | 54984 | 54985 | 54986 | 54987 |
| | 54988 | 54989 | 54990 | 54991 | 54992 | 54993 | 54994 | 54995 | 54996 | 54997 | 54998 | 54999 |
| | 55000 | 55001 | 55002 | 55003 | 55004 | 55006 | 55007 | 55008 | 55010 | 55011 | 55012 | 55013 |
| | 55014 | 55020 | 55021 | 55022 | 55023 | 55024 | 55025 | 55026 | 55027 | 55028 | 55029 | 55030 |
| | 55031 | 55032 | 55033 | 55034 | 55035 | 55036 | 55037 | 55038 | 55039 | 55040 | 55041 | 55042 |
| | 55043 | 55044 | 55045 | 55046 | 55047 | 55048 | 55049 | 55050 | 55051 | 55052 | 55053 | 55054 |
| | 55055 | 55056 | 55057 | 55058 | 55059 | 55060 | 55061 | 55062 | 55063 | 55064 | 55066 | 55067 |
| | 55068 | 55069 | 55070 | 55071 | 55072 | 55073 | 55085 | 55086 | 55087 | 55091 | 55092 | 55093 |
| | 55094 | 55095 | 55098 | 55099 | 55107 | 55108 | 55109 | 55132 | 55174 | 55178 | 55179 | 55180 |
| | 55181 | 55182 | 55192 | 55193 | 55194 | 55195 | 55196 | 55203 | 55204 | 55234 | 55238 | 55279 |
| | 55289 | 55292 | 55296 | 55302 | 55306 | 55307 | 55308 | 55311 | 55356 | 55357 | 55358 | 55359 |
| | 55360 | 55361 | 55369 | 55389 | 55390 | 55398 | 55399 | 55400 | 55401 | 55402 | 55403 | 55404 |
| | 55405 | 55406 | 55410 | 55411 | 55413 | 55414 | 55415 | 55416 | 55417 | 55421 | 55423 | 55426 |
| | 55445 | 55446 | 55447 | 55448 | 55449 | 55450 | 55459 | 55477 | 55481 | 55482 | 55486 | 55487 |
| | 55488 | 55489 | 55490 | 55491 | 55494 | 55495 | 55498 | 55499 | 55501 | 55502 | 55503 | 55504 |
| | 55512 | 55517 | 55518 | 55519 | 55520 | 55526 | 55527 | 55528 | 55537 | 55546 | 55547 | 55558 |
| | 55565 | 55585 | 55586 | 55590 | 55591 | 55592 | 55596 | 55599 | 55624 | 55629 | 55633 | 55634 |
| | 55636 | 55637 | 55638 | 55650 | 55651 | 55654 | 55655 | 55688 | 55689 | 55690 | 55695 | 55696 |
| | 55697 | 55698 | 55699 | 55700 | 55711 | 55712 | 55713 | 55715 | 55716 | 55717 | 55718 | 55719 |
| | 55720 | 55721 | 55722 | 55723 | 55728 | 55729 | 55730 | 55731 | 55734 | 55735 | 55736 | 55737 |
| | 55750 | 55751 | 55752 | 55753 | 55754 | 55755 | 55756 | 55760 | 55761 | 55762 | 55763 | 55764 |
| | 55765 | 55766 | 55768 | 55769 | 55770 | 55771 | 55773 | 55774 | 55775 | 55776 | 55777 | 55778 |
| | 55779 | 55780 | 55785 | 55786 | 55787 | 55788 | 55789 | 55790 | 55801 | 55802 | 55803 | 55814 |
| | 55815 | 55816 | 55817 | 55818 | 55819 | 55820 | 55821 | 55822 | 55823 | 55824 | 55825 | 55826 |
| | 55827 | 55828 | 55829 | 55833 | 55834 | 55835 | 55836 | 55837 | 55838 | 55839 | 55840 | 55841 |
| | 55845 | 55846 | 55847 | 55848 | 55849 | 55850 | 55851 | 55852 | 55853 | 55854 | 55855 | 55856 |
| | 55857 | 55858 | 55859 | 55860 | 55861 | 55862 | 55863 | 55864 | 55865 | 55866 | 55867 | 55868 |
| | 55869 | 55870 | 55871 | 55872 | 55873 | 55874 | 55875 | 55876 | 55877 | 55878 | 55879 | 55880 |
| | 55881 | 55882 | 55883 | 55884 | 55885 | 55886 | 55887 | 55888 | 55889 | 55890 | 55891 | 55892 |
| | 55893 | 55900 | 55901 | 55902 | 55903 | 55904 | 55905 | 55906 | 55907 | 55908 | 55909 | 55910 |
| | 55911 | 55912 | 55913 | 55914 | 55915 | 55916 | 55917 | 55918 | 55919 | 55920 | 55921 | 55922 |
| | 55923 | 55924 | 55925 | 55926 | 55927 | 55928 | 55929 | 55930 | 55931 | 55932 | 55938 | 55939 |
| | 55940 | 55941 | 55942 | 55943 | 55944 | 55945 | 55946 | 55947 | 55948 | 55949 | 55950 | 55951 |
| | 55952 | 55953 | 55954 | 55955 | 55956 | 55957 | 55958 | 55959 | 55960 | 55961 | 55962 | 55963 |
| | 55964 | 55965 | 55966 | 55967 | 55968 | 55972 | 55973 | 55974 | 55975 | 55976 | 55977 | 55978 |
| | 55979 | 55980 | 55981 | 55982 | 55983 | 55984 | 55985 | 55988 | 55989 | 55990 | 55991 | 55992 |
| | 55993 | 55994 | 55995 | 55996 | 55997 | 55998 | 55999 | 56000 | 56008 | 56009 | 56010 | 56011 |
| | 56016 | 56017 | 56018 | 56019 | 56020 | 56021 | 56022 | 56023 | 56024 | 56025 | 56026 | 56027 |
| | 56028 | 56029 | 56030 | 56031 | 56032 | 56033 | 56034 | 56035 | 56036 | 56037 | 56038 | 56039 |
| | 56040 | 56041 | 56042 | 56043 | 56044 | 56045 | 56046 | 56047 | 56048 | 56049 | 56050 | 56051 |
| | 56052 | 56053 | 56054 | 56055 | 56056 | 56057 | 56058 | 56059 | 56060 | 56061 | 56062 | 56063 |
| | 56064 | 56065 | 56066 | 56067 | 56068 | 56069 | 56070 | 56071 | 56072 | 56073 | 56074 | 56075 |
| | 56076 | 56077 | 56078 | 56079 | 56080 | 56084 | 56085 | 56086 | 56087 | 56088 | 56089 | 56090 |
| | 56091 | 56092 | 56093 | 56094 | 56095 | 56096 | 56097 | 56098 | 56099 | 56100 | 56101 | 56102 |
| | 56103 | 56104 | 56105 | 56106 | 56113 | 56114 | 56115 | 56116 | 56117 | 56118 | 56119 | 56120 |
| | 56121 | 56122 | 56123 | 56124 | 56125 | 56126 | 56127 | 56128 | 56129 | 56137 | 56138 | 56139 |
| | 56140 | 56141 | 56142 | 56143 | 56144 | 56145 | 56146 | 56147 | 56148 | 56149 | 56150 | 56151 |
| | 56152 | 56167 | 56168 | 56169 | 56174 | 56175 | 56176 | 56177 | 56178 | 56179 | 56181 | 56182 |
| | 56183 | 56189 | 56190 | 56191 | 56192 | 56193 | 56194 | 56195 | 56196 | 56200 | 56201 | 56202 |
| | 56203 | 56204 | 56205 | 56211 | 56219 | 56220 | 56226 | 56227 | 56228 | 56229 | 56230 | 56231 |
| | 56232 | 56233 | 56234 | 56235 | 56236 | 56237 | 56238 | 56239 | 56240 | 56241 | 56242 | 56243 |
| | 56244 | 56245 | 56246 | 56247 | 56248 | 56249 | 56250 | 56251 | 56252 | 56253 | 56254 | 56255 |
| | 56256 | 56257 | 56258 | 56263 | 56264 | 56265 | 56266 | 56267 | 56268 | 56269 | 56270 | 56278 |
| | 56279 | 56285 | 56286 | 56287 | 56291 | 56292 | 56293 | 56294 | 56304 | 56305 | 56306 | 56318 |
| | 56319 | 56320 | 56321 | 56322 | 56323 | 56324 | 56325 | 56342 | 56343 | 56344 | 56351 | 56352 |
| | 56353 | 56354 | 56355 | 56356 | 56357 | 56358 | 56359 | 56360 | 56361 | 56362 | 56363 | 56364 |
| | 56365 | 56366 | 56367 | 56368 | 56369 | 56370 | 56371 | 56372 | 56373 | 56374 | 56375 | 56376 |
| | 56377 | 56378 | 56379 | 56380 | 56381 | 56382 | 56383 | 56384 | 56385 | 56386 | 56387 | 56388 |
| | 56389 | 56390 | 56391 | 56392 | 56393 | 56394 | 56395 | 56396 | 56397 | 56398 | 56399 | 56400 |
| | 56401 | 56402 | 56403 | 56404 | 56405 | 56406 | 56407 | 56408 | 56409 | 56410 | 56411 | 56415 |
| | 56416 | 56417 | 56418 | 56422 | 56423 | 56424 | 56425 | 56426 | 56427 | 56428 | 56429 | 56430 |
| | 56431 | 56432 | 56433 | 56434 | 56435 | 56436 | 56437 | 56440 | 56441 | 56442 | 56443 | 56444 |
| | 56445 | 56446 | 56447 | 56448 | 56455 | 56456 | 56457 | 56458 | 56459 | 56462 | 56463 | 56464 |
| | 56467 | 56468 | 56469 | 56470 | 56474 | 56475 | 56479 | 56480 | 56481 | 56482 | 56483 | 56484 |
| | 56485 | 56487 | 56488 | 56489 | 56490 | 56491 | 56492 | 56493 | 56494 | 56495 | 56496 | 56497 |
| | 56498 | 56499 | 56503 | 56508 | 56509 | 56510 | 56511 | 56512 | 56513 | 56514 | 56515 | 56516 |
| | 56517 | 56518 | 56519 | 56520 | 56521 | 56522 | 56523 | 56524 | 56529 | 56530 | 56531 | 56532 |
| | 56533 | 56534 | 56535 | 56536 | 56537 | 56538 | 56539 | 56540 | 56543 | 56544 | 56545 | 56546 |
| | 56547 | 56548 | 56549 | 56572 | 56573 | 56574 | 56575 | 56578 | 56579 | 56580 | 56581 | 56582 |
| | 56583 | 56584 | 56589 | 56590 | 56592 | 56602 | 56603 | 56604 | 56605 | 56607 | 56608 | 56609 |
| | 56610 | 56611 | 56612 | 56613 | 56614 | 56615 | 56616 | 56617 | 56618 | 56619 | 56620 | 56621 |
| | 56622 | 56623 | 56624 | 56625 | 56626 | 56627 | 56628 | 56629 | 56630 | 56631 | 56632 | 56633 |
| | 56634 | 56635 | 56636 | 56637 | 56638 | 56639 | 56642 | 56643 | 56644 | 56645 | 56646 | 56647 |
| | 56648 | 56649 | 56650 | 56651 | 56652 | 56653 | 56658 | 56659 | 56660 | 56661 | 56662 | 56665 |
| | 56666 | 56667 | 56670 | 56671 | 56672 | 56673 | 56674 | 56675 | 56676 | 56677 | 56678 | 56679 |
| | 56683 | 56692 | 56693 | 56694 | 56695 | 56696 | 56697 | 56706 | 56707 | 56708 | 56709 | 56712 |
| | 56713 | 56714 | 56715 | 56716 | 56717 | 56727 | 56728 | 56729 | 56730 | 56741 | 56742 | 56743 |
| | 56765 | 56766 | 56767 | 56782 | 56783 | 56784 | 56785 | 56786 | 56787 | 56788 | 56798 | 56799 |
| | 56800 | 56803 | 56804 | 56805 | 56809 | 56810 | 56811 | 56812 | 56813 | 56814 | 56817 | 56818 |
| | 56819 | 56820 | 56821 | 56822 | 56823 | 56824 | 56825 | 56833 | 56834 | 56835 | 56836 | 56837 |
| | 56838 | 56839 | 56840 | 56841 | 56842 | 56845 | 56846 | 56847 | 56851 | 56852 | 56853 | 56854 |
| | 56855 | 56856 | 56857 | 56858 | 56859 | 56860 | 56861 | 56862 | 56863 | 56864 | 56865 | 56869 |
| | 56870 | 56871 | 56872 | 56873 | 56874 | 56875 | 56876 | 56877 | 56878 | 56879 | 56880 | 56881 |
| | 56882 | 56883 | 56884 | 56885 | 56886 | 56887 | 56888 | 56889 | 56890 | 56891 | 56892 | 56893 |
| | 56894 | 56895 | 56896 | 56897 | 56898 | 56899 | 56900 | 56901 | 56902 | 56906 | 56907 | 56908 |
| | 56909 | 56910 | 56911 | 56912 | 56913 | 56914 | 56915 | 56916 | 56917 | 56918 | 56919 | 56920 |
| | 56921 | 56922 | 56923 | 56924 | 56925 | 56926 | 56927 | 56928 | 56929 | 56930 | 56931 | 56932 |
| | 56933 | 56934 | 56935 | 56936 | 56937 | 56941 | 56942 | 56943 | 56944 | 56945 | 56946 | 56949 |
| | 56950 | 56951 | 56952 | 56953 | 56954 | 56955 | 56956 | 56957 | 56958 | 56959 | 56964 | 56965 |
| | 56966 | 56967 | 56968 | 56969 | 56970 | 56971 | 56972 | 56973 | 56974 | 56975 | 56976 | 56977 |
| | 56978 | 56979 | 56980 | 56981 | 56982 | 56983 | 56984 | 56985 | 56986 | 56987 | 56988 | 56993 |
| | 56994 | 56995 | 57000 | 57001 | 57002 | 57003 | 57004 | 57005 | 57006 | 57007 | 57008 | 57009 |
| | 57010 | 57011 | 57012 | 57013 | 57014 | 57015 | 57019 | 57020 | 57021 | 57022 | 57023 | 57024 |
| | 57025 | 57026 | 57027 | 57028 | 57029 | 57030 | 57031 | 57036 | 57037 | 57038 | 57039 | 57040 |
| | 57041 | 57042 | 57043 | 57044 | 57047 | 57048 | 57049 | 57050 | 57051 | 57052 | 57056 | 57057 |
| | 57058 | 57059 | 57060 | 57061 | 57062 | 57063 | 57064 | 57065 | 57066 | 57067 | 57068 | 57069 |
| | 57070 | 57071 | 57072 | 57073 | 57074 | 57075 | 57076 | 57079 | 57080 | 57081 | 57082 | 57083 |
| | 57084 | 57085 | 57086 | 57087 | 57088 | 57089 | 57090 | 57091 | 57092 | 57093 | 57094 | 57095 |
| | 57096 | 57107 | 57108 | 57109 | 57130 | 57131 | 57132 | 57133 | 57134 | 57135 | 57136 | 57139 |
| | 57140 | 57146 | 57147 | 57155 | 57156 | 57157 | 57158 | 57163 | 57164 | 57167 | 57168 | 57169 |
| | 57170 | 57171 | 57172 | 57177 | 57178 | 57179 | 57180 | 57185 | 57186 | 57187 | 57188 | 57189 |
| | 57190 | 57191 | 57192 | 57193 | 57194 | 57195 | 57197 | 57198 | 57203 | 57204 | 57205 | 57222 |
| | 57226 | 57227 | 57228 | 57229 | 57236 | 57237 | 57238 | 57239 | 57240 | 57241 | 57242 | 57243 |
| | 57244 | 57245 | 57246 | 57247 | 57248 | 57249 | 57253 | 57254 | 57255 | 57256 | 57257 | 57258 |
| | 57259 | 57260 | 57261 | 57262 | 57263 | 57264 | 57278 | 57279 | 57280 | 57281 | 57286 | 57287 |
| | 57288 | 57289 | 57290 | 57291 | 57292 | 57293 | 57296 | 57297 | 57301 | 57302 | 57303 | 57304 |
| | 57305 | 57306 | 57307 | 57310 | 57311 | 57312 | 57313 | 57314 | 57315 | 57316 | 57317 | 57322 |
| | 57323 | 57324 | 57325 | 57326 | 57327 | 57328 | 57329 | 57330 | 57331 | 57334 | 57335 | 57336 |
| | 57337 | 57338 | 57339 | 57340 | 57341 | 57342 | 57352 | 57353 | 57354 | 57355 | 57356 | 57357 |
| | 57358 | 57369 | 57370 | 57371 | 57372 | 57373 | 57374 | 57408 | 57409 | 57413 | 57414 | 57415 |
| | 57435 | 57436 | 57437 | 57438 | 57445 | 57446 | 57447 | 57454 | 57455 | 57456 | 57457 | 57458 |
| | 57459 | 57460 | 57465 | 57466 | 57467 | 57468 | 57469 | 57470 | 57471 | 57472 | 57473 | 57474 |
| | 57475 | 57476 | 57477 | 57478 | 57479 | 57487 | 57488 | 57489 | 57490 | 57491 | 57494 | 57495 |
| | 57496 | 57505 | 57506 | 57507 | 57513 | 57514 | 57515 | 57516 | 57517 | 57518 | 57519 | 57520 |
| | 57521 | 57522 | 57523 | 57526 | 57527 | 57528 | 57531 | 57532 | 57533 | 57534 | 57535 | 57536 |
| | 57537 | 57538 | 57539 | 57540 | 57541 | 57542 | 57543 | 57544 | 57545 | 57547 | 57548 | 57549 |
| | 57555 | 57556 | 57557 | 57558 | 57559 | 57562 | 57563 | 57564 | 57565 | 57566 | 57567 | 57568 |
| | 57569 | 57570 | 57571 | 57572 | 57573 | 57576 | 57577 | 57578 | 57579 | 57580 | 57581 | 57582 |
| | 57583 | 57584 | 57585 | 57586 | 57587 | 57588 | 57589 | 57590 | 57591 | 57592 | 57593 | 57594 |
| | 57595 | 57596 | 57597 | 57598 | 57601 | 57602 | 57603 | 57604 | 57605 | 57606 | 57607 | 57608 |
| | 57609 | 57610 | 57611 | 57612 | 57613 | 57614 | 57615 | 57616 | 57617 | 57618 | 57622 | 57623 |
| | 57624 | 57625 | 57626 | 57627 | 57628 | 57629 | 57630 | 57631 | 57632 | 57633 | 57634 | 57635 |
| | 57636 | 57637 | 57638 | 57639 | 57640 | 57646 | 57647 | 57648 | 57649 | 57650 | 57653 | 57654 |
| | 57655 | 57659 | 57660 | 57661 | 57662 | 57663 | 57664 | 57665 | 57666 | 57667 | 57668 | 57669 |
| | 57670 | 57671 | 57672 | 57673 | 57674 | 57675 | 57676 | 57677 | 57678 | 57679 | 57680 | 57681 |
| | 57682 | 57683 | 57686 | 57687 | 57688 | 57690 | 57691 | 57692 | 57693 | 57694 | 57695 | 57700 |
| | 57701 | 57702 | 57703 | 57704 | 57705 | 57709 | 57710 | 57711 | 57712 | 57713 | 57714 | 57715 |
| | 57716 | 57717 | 57718 | 57719 | 57720 | 57728 | 57729 | 57730 | 57731 | 57740 | 57741 | 57742 |
| | 57743 | 57744 | 57745 | 57746 | 57747 | 57748 | 57749 | 57750 | 57751 | 57752 | 57753 | 57754 |
| | 57755 | 57756 | 57757 | 57758 | 57759 | 57760 | 57763 | 57764 | 57765 | 57766 | 57767 | 57768 |
| | 57769 | 57770 | 57771 | 57772 | 57773 | 57774 | 57775 | 57776 | 57777 | 57778 | 57779 | 57780 |
| | 57781 | 57782 | 57783 | 57784 | 57785 | 57786 | 57787 | 57788 | 57789 | 57790 | 57791 | 57792 |
| | 57793 | 57794 | 57803 | 57804 | 57805 | 57808 | 57809 | 57810 | 57811 | 57812 | 57813 | 57816 |
| | 57817 | 57818 | 57819 | 57820 | 57821 | 57824 | 57825 | 57826 | 57827 | 57828 | 57829 | 57830 |
| | 57834 | 57835 | 57836 | 57838 | 57839 | 57840 | 57845 | 57846 | 57847 | 57849 | 57850 | 57851 |
| | 57852 | 57853 | 57854 | 57855 | 57856 | 57857 | 57858 | 57859 | 57860 | 57861 | 57862 | 57863 |
| | 57864 | 57865 | 57866 | 57867 | 57868 | 57869 | 57872 | 57873 | 57874 | 57875 | 57876 | 57877 |
| | 57878 | 57879 | 57880 | 57881 | 57882 | 57883 | 57884 | 57890 | 57891 | 57892 | 57895 | 57896 |
| | 57897 | 57898 | 57899 | 57900 | 57901 | 57904 | 57905 | 57906 | 57907 | 57908 | 57909 | 57910 |
| | 57911 | 57912 | 57913 | 57914 | 57915 | 57916 | 57917 | 57918 | 57919 | 57920 | 57921 | 57923 |
| | 57924 | 57925 | 57926 | 57927 | 57928 | 57929 | 57930 | 57931 | 57932 | 57933 | 57934 | 57935 |
| | 57936 | 57937 | 57938 | 57939 | 57940 | 57941 | 57942 | 57943 | 57944 | 57945 | 57946 | 57947 |
| | 57948 | 57949 | 57950 | 57951 | 57952 | 57953 | 57954 | 57955 | 57956 | 57957 | 57958 | 57959 |
| | 57960 | 57961 | 57962 | 57963 | 57964 | 57965 | 57966 | 57967 | 57968 | 57969 | 57970 | 57971 |
| | 57972 | 57973 | 57974 | 57975 | 57976 | 57977 | 57978 | 57985 | 57986 | 57987 | 57988 | 57989 |
| | 57990 | 57991 | 57992 | 57993 | 57994 | 57995 | 57996 | 57997 | 58004 | 58005 | 58006 | 58007 |
| | 58008 | 58009 | 58010 | 58014 | 58015 | 58016 | 58020 | 58021 | 58022 | 58026 | 58027 | 58028 |
| | 58032 | 58033 | 58034 | 58038 | 58039 | 58040 | 58041 | 58042 | 58043 | 58044 | 58045 | 58046 |
| | 58050 | 58051 | 58052 | 58053 | 58054 | 58055 | 58056 | 58057 | 58058 | 58059 | 58060 | 58061 |
| | 58062 | 58063 | 58064 | 58068 | 58069 | 58070 | 58071 | 58072 | 58073 | 58074 | 58075 | 58076 |
| | 58083 | 58084 | 58085 | 58086 | 58087 | 58088 | 58089 | 58090 | 58091 | 58092 | 58093 | 58094 |
| | 58095 | 58096 | 58097 | 58098 | 58099 | 58100 | 58101 | 58102 | 58103 | 58110 | 58111 | 58112 |
| | 58116 | 58117 | 58118 | 58122 | 58123 | 58124 | 58125 | 58126 | 58127 | 58128 | 58129 | 58130 |
| | 58131 | 58132 | 58133 | 58134 | 58135 | 58136 | 58137 | 58138 | 58139 | 58140 | 58141 | 58142 |
| | 58143 | 58147 | 58148 | 58149 | 58150 | 58151 | 58152 | 58153 | 58154 | 58155 | 58156 | 58157 |
| | 58158 | 58159 | 58160 | 58161 | 58165 | 58166 | 58167 | 58171 | 58172 | 58173 | 58174 | 58175 |
| | 58176 | 58177 | 58178 | 58179 | 58182 | 58183 | 58184 | 58197 | 58198 | 58199 | 58215 | 58216 |
| | 58217 | 58219 | 58220 | 58221 | 58223 | 58224 | 58225 | 58227 | 58228 | 58233 | 58234 | 58235 |
| | 58236 | 58237 | 58238 | 58247 | 58248 | 58249 | 58250 | 58251 | 58252 | 58253 | 58254 | 58255 |
| | 58256 | 58257 | 58258 | 58259 | 58260 | 58261 | 58272 | 58273 | 58274 | 58275 | 58276 | 58277 |
| | 58278 | 58285 | 58286 | 58287 | 58288 | 58289 | 58290 | 58291 | 58292 | 58293 | 58294 | 58295 |
| | 58296 | 58297 | 58298 | 58309 | 58310 | 58321 | 58322 | 58323 | 58324 | 58325 | 58326 | 58327 |
| | 58331 | 58332 | 58333 | 58334 | 58335 | 58336 | 58337 | 58338 | 58339 | 58340 | 58341 | 58342 |
| | 58343 | 58344 | 58345 | 58346 | 58347 | 58348 | 58349 | 58350 | 58359 | 58360 | 58361 | 58362 |
| | 58363 | 58364 | 58365 | 58366 | 58367 | 58368 | 58369 | 58370 | 58371 | 58372 | 58373 | 58374 |
| | 58375 | 58376 | 58377 | 58378 | 58379 | 58380 | 58381 | 58382 | 58383 | 58384 | 58385 | 58390 |
| | 58391 | 58392 | 58393 | 58398 | 58399 | 58400 | 58401 | 58402 | 58403 | 58404 | 58405 | 58409 |
| | 58410 | 58411 | 58412 | 58417 | 58418 | 58419 | 58420 | 58421 | 58422 | 58423 | 58424 | 58425 |
| | 58426 | 58427 | 58428 | 58432 | 58433 | 58434 | 58435 | 58440 | 58441 | 58442 | 58443 | 58444 |
| | 58445 | 58446 | 58447 | 58448 | 58449 | 58450 | 58451 | 58452 | 58453 | 58454 | 58455 | 58456 |
| | 58457 | 58462 | 58463 | 58464 | 58465 | 58466 | 58467 | 58468 | 58469 | 58470 | 58471 | 58472 |
| | 58473 | 58474 | 58475 | 58476 | 58477 | 58478 | 58479 | 58480 | 58481 | 58482 | 58483 | 58484 |
| | 58485 | 58486 | 58487 | 58488 | 58489 | 58490 | 58491 | 58492 | 58493 | 58494 | 58495 | 58496 |
| | 58497 | 58498 | 58499 | 58500 | 58501 | 58502 | 58503 | 58504 | 58505 | 58506 | 58507 | 58508 |
| | 58509 | 58510 | 58511 | 58512 | 58513 | 58514 | 58515 | 58516 | 58517 | 58522 | 58523 | 58524 |
| | 58525 | 58526 | 58527 | 58528 | 58529 | 58530 | 58531 | 58532 | 58533 | 58534 | 58535 | 58536 |
| | 58537 | 58538 | 58539 | 58540 | 58541 | 58542 | 58543 | 58548 | 58549 | 58550 | 58551 | 58552 |
| | 58553 | 58554 | 58555 | 58556 | 58557 | 58558 | 58559 | 58560 | 58561 | 58562 | 58563 | 58564 |
| | 58565 | 58566 | 58567 | 58568 | 58569 | 58570 | 58571 | 58572 | 58573 | 58574 | 58575 | 58576 |
| | 58577 | 58580 | 58581 | 58582 | 58583 | 58586 | 58587 | 58589 | 58590 | 58591 | 58592 | 58593 |
| | 58594 | 58595 | 58596 | 58597 | 58598 | 58599 | 58600 | 58601 | 58602 | 58603 | 58604 | 58605 |
| | 58606 | 58607 | 58608 | 58609 | 58610 | 58611 | 58612 | 58613 | 58614 | 58615 | 58616 | 58617 |
| | 58618 | 58619 | 58620 | 58621 | 58622 | 58623 | 58624 | 58625 | 58626 | 58627 | 58628 | 58629 |
| | 58630 | 58631 | 58632 | 58633 | 58634 | 58635 | 58636 | 58637 | 58638 | 58639 | 58640 | 58647 |
| | 58648 | 58649 | 58650 | 58651 | 58652 | 58653 | 58654 | 58655 | 58656 | 58657 | 58658 | 58659 |
| | 58660 | 58662 | 58663 | 58664 | 58665 | 58666 | 58667 | 58668 | 58669 | 58670 | 58671 | 58672 |
| | 58673 | 58674 | 58675 | 58676 | 58677 | 58678 | 58679 | 58680 | 58681 | 58682 | 58683 | 58684 |
| | 58685 | 58686 | 58687 | 58688 | 58689 | 58690 | 58691 | 58692 | 58693 | 58694 | 58695 | 58696 |
| | 58697 | 58698 | 58699 | 58700 | 58710 | 58711 | 58715 | 58716 | 58717 | 58718 | 58719 | 58722 |
| | 58723 | 58724 | 58725 | 58726 | 58727 | 58728 | 58748 | 58749 | 58750 | 58751 | 58753 | 58754 |
| | 58755 | 58767 | 58788 | 58789 | 58790 | 58791 | 58792 | 58793 | 58794 | 58795 | 58796 | 58797 |
| | 58802 | 58803 | 58804 | 58805 | 58809 | 58810 | 58811 | 58812 | 58813 | 58814 | 58815 | 58818 |
| | 58819 | 58820 | 58821 | 58822 | 58823 | 58824 | 58827 | 58828 | 58829 | 58830 | 58831 | 58832 |
| | 58833 | 58834 | 58835 | 58836 | 58837 | 58838 | 58839 | 58840 | 58847 | 58848 | 58849 | 58850 |
| | 58851 | 58852 | 58856 | 58857 | 58858 | 58863 | 58874 | 58875 | 58876 | 58877 | 58911 | 58912 |
| | 58913 | 58914 | 58915 | 58916 | 58917 | 58922 | 58923 | 58924 | 58925 | 58926 | 58927 | 58928 |
| | 58929 | 58930 | 58931 | 58932 | 58933 | 58934 | 58935 | 58936 | 58937 | 58938 | 58939 | 58942 |
| | 58943 | 58944 | 58945 | 58946 | 58947 | 58948 | 58949 | 58950 | 58951 | 58952 | 58953 | 58954 |
| | 58955 | 58956 | 58957 | 58958 | 58961 | 58962 | 58963 | 58964 | 58965 | 58966 | 58967 | 58968 |
| | 58969 | 58971 | 58972 | 58973 | 58974 | 58975 | 58976 | 58977 | 58978 | 58979 | 58980 | 58981 |
| | 58982 | 58983 | 58984 | 58985 | 58986 | 58987 | 58988 | 58989 | 58990 | 58991 | 58992 | 58993 |
| | 58994 | 58995 | 58996 | 58997 | 58998 | 58999 | 59000 | 59001 | 59002 | 59003 | 59004 | 59005 |
| | 59006 | 59007 | 59011 | 59012 | 59013 | 59014 | 59015 | 59016 | 59017 | 59019 | 59020 | 59021 |
| | 59022 | 59023 | 59024 | 59025 | 59026 | 59027 | 59028 | 59029 | 59030 | 59031 | 59032 | 59033 |
| | 59034 | 59035 | 59036 | 59037 | 59038 | 59039 | 59040 | 59041 | 59042 | 59043 | 59044 | 59045 |
| | 59046 | 59047 | 59048 | 59049 | 59050 | 59051 | 59052 | 59053 | 59054 | 59055 | 59056 | 59057 |
| | 59058 | 59059 | 59060 | 59061 | 59062 | 59063 | 59064 | 59065 | 59066 | 59067 | 59068 | 59069 |
| | 59070 | 59071 | 59072 | 59073 | 59074 | 59075 | 59076 | 59077 | 59078 | 59079 | 59080 | 59081 |
| | 59082 | 59083 | 59084 | 59085 | 59086 | 59087 | 59088 | 59089 | 59090 | 59091 | 59092 | 59093 |
| | 59094 | 59095 | 59101 | 59102 | 59103 | 59104 | 59105 | 59106 | 59107 | 59108 | 59109 | 59110 |
| | 59111 | 59112 | 59113 | 59116 | 59117 | 59118 | 59119 | 59120 | 59121 | 59125 | 59126 | 59127 |
| | 59128 | 59129 | 59130 | 59131 | 59132 | 59133 | 59134 | 59135 | 59136 | 59137 | 59138 | 59139 |
| | 59140 | 59141 | 59142 | 59143 | 59144 | 59145 | 59146 | 59147 | 59148 | 59149 | 59150 | 59151 |
| | 59152 | 59153 | 59154 | 59155 | 59156 | 59157 | 59158 | 59159 | 59160 | 59161 | 59162 | 59163 |
| | 59164 | 59165 | 59166 | 59167 | 59168 | 59171 | 59172 | 59173 | 59174 | 59175 | 59176 | 59177 |
| | 59178 | 59181 | 59182 | 59183 | 59186 | 59187 | 59188 | 59189 | 59190 | 59191 | 59192 | 59193 |
| | 59194 | 59195 | 59196 | 59197 | 59198 | 59199 | 59200 | 59201 | 59202 | 59203 | 59204 | 59205 |
| | 59206 | 59207 | 59208 | 59209 | 59210 | 59211 | 59212 | 59213 | 59214 | 59215 | 59218 | 59219 |
| | 59220 | 59221 | 59222 | 59223 | 59224 | 59225 | 59226 | 59227 | 59228 | 59229 | 59230 | 59231 |
| | 59232 | 59233 | 59234 | 59235 | 59238 | 59239 | 59240 | 59241 | 59242 | 59243 | 59245 | 59246 |
| | 59247 | 59248 | 59249 | 59250 | 59251 | 59252 | 59253 | 59254 | 59255 | 59256 | 59257 | 59258 |
| | 59259 | 59260 | 59261 | 59262 | 59263 | 59264 | 59265 | 59266 | 59267 | 59268 | 59269 | 59270 |
| | 59271 | 59272 | 59273 | 59274 | 59275 | 59276 | 59277 | 59278 | 59279 | 59280 | 59281 | 59282 |
| | 59283 | 59284 | 59285 | 59286 | 59287 | 59288 | 59289 | 59290 | 59291 | 59292 | 59293 | 59294 |
| | 59295 | 59296 | 59297 | 59298 | 59299 | 59302 | 59303 | 59304 | 59305 | 59306 | 59307 | 59308 |
| | 59309 | 59310 | 59311 | 59312 | 59313 | 59314 | 59315 | 59316 | 59317 | 59318 | 59319 | 59320 |
| | 59321 | 59322 | 59323 | 59324 | 59325 | 59326 | 59327 | 59328 | 59329 | 59330 | 59331 | 59332 |
| | 59337 | 59338 | 59339 | 59340 | 59341 | 59342 | 59343 | 59346 | 59347 | 59348 | 59349 | 59350 |
| | 59351 | 59352 | 59353 | 59354 | 59355 | 59356 | 59357 | 59358 | 59359 | 59360 | 59361 | 59362 |
| | 59363 | 59364 | 59365 | 59366 | 59369 | 59370 | 59371 | 59372 | 59373 | 59374 | 59375 | 59376 |
| | 59377 | 59378 | 59379 | 59380 | 59381 | 59382 | 59383 | 59384 | 59385 | 59386 | 59393 | 59394 |
| | 59395 | 59396 | 59397 | 59398 | 59399 | 59402 | 59403 | 59404 | 59405 | 59406 | 59407 | 59408 |
| | 59409 | 59410 | 59411 | 59412 | 59413 | 59414 | 59415 | 59416 | 59417 | 59418 | 59419 | 59420 |
| | 59421 | 59422 | 59423 | 59424 | 59425 | 59426 | 59427 | 59428 | 59429 | 59430 | 59431 | 59432 |
| | 59433 | 59434 | 59435 | 59439 | 59440 | 59441 | 59442 | 59443 | 59444 | 59445 | 59446 | 59447 |
| | 59448 | 59449 | 59450 | 59451 | 59452 | 59453 | 59454 | 59455 | 59456 | 59457 | 59458 | 59459 |
| | 59460 | 59461 | 59462 | 59463 | 59464 | 59465 | 59466 | 59467 | 59468 | 59469 | 59470 | 59471 |
| | 59472 | 59473 | 59474 | 59475 | 59476 | 59477 | 59478 | 59479 | 59480 | 59481 | 59482 | 59483 |
| | 59484 | 59485 | 59486 | 59487 | 59488 | 59489 | 59490 | 59491 | 59492 | 59493 | 59494 | 59495 |
| | 59496 | 59497 | 59498 | 59499 | 59500 | 59501 | 59502 | 59503 | 59504 | 59505 | 59506 | 59507 |
| | 59508 | 59509 | 59510 | 59511 | 59512 | 59513 | 59514 | 59515 | 59516 | 59517 | 59518 | 59519 |
| | 59520 | 59521 | 59522 | 59523 | 59524 | 59525 | 59526 | 59527 | 59528 | 59529 | 59530 | 59531 |
| | 59532 | 59533 | 59534 | 59535 | 59536 | 59537 | 59538 | 59539 | 59540 | 59541 | 59542 | 59543 |
| | 59544 | 59545 | 59546 | 59547 | 59548 | 59549 | 59550 | 59551 | 59552 | 59553 | 59554 | 59555 |
| | 59556 | 59557 | 59558 | 59559 | 59560 | 59561 | 59562 | 59563 | 59564 | 59565 | 59566 | 59567 |
| | 59568 | 59569 | 59570 | 59571 | 59572 | 59573 | 59574 | 59575 | 59576 | 59577 | 59578 | 59579 |
| | 59580 | 59581 | 59582 | 59583 | 59584 | 59585 | 59586 | 59587 | 59588 | 59589 | 59590 | 59591 |
| | 59592 | 59593 | 59594 | 59595 | 59596 | 59597 | 59598 | 59599 | 59600 | 59601 | 59602 | 59603 |
| | 59604 | 59605 | 59606 | 59607 | 59608 | 59609 | 59610 | 59611 | 59612 | 59613 | 59614 | 59615 |
| | 59616 | 59617 | 59618 | 59619 | 59620 | 59621 | 59622 | 59623 | 59624 | 59625 | 59626 | 59627 |
| | 59628 | 59629 | 59630 | 59631 | 59632 | 59633 | 59634 | 59635 | 59636 | 59637 | 59638 | 59639 |
| | 59640 | 59641 | 59642 | 59643 | 59644 | 59645 | 59646 | 59647 | 59648 | 59649 | 59650 | 59651 |
| | 59652 | 59653 | 59654 | 59655 | 59656 | 59657 | 59658 | 59659 | 59660 | 59661 | 59662 | 59663 |
| | 59664 | 59665 | 59666 | 59667 | 59668 | 59669 | 59670 | 59671 | 59672 | 59673 | 59674 | 59675 |
| | 59676 | 59677 | 59678 | 59679 | 59680 | 59681 | 59682 | 59683 | 59684 | 59685 | 59686 | 59687 |
| | 59688 | 59689 | 59690 | 59691 | 59692 | 59693 | 59694 | 59695 | 59696 | 59697 | 59698 | 59699 |
| | 59700 | 59701 | 59702 | 59703 | 59704 | 59705 | 59706 | 59707 | 59708 | 59709 | 59710 | 59711 |
| | 59712 | 59713 | 59714 | 59715 | 59716 | 59717 | 59718 | 59719 | 59720 | 59721 | 59722 | 59723 |
| | 59724 | 59725 | 59726 | 59727 | 59728 | 59729 | 59730 | 59731 | 59732 | 59733 | 59734 | 59735 |
| | 59736 | 59737 | 59738 | 59739 | 59740 | 59741 | 59742 | 59743 | 59744 | 59745 | 59746 | 59747 |
| | 59748 | 59749 | 59750 | 59751 | 59752 | 59753 | 59754 | 59755 | 59756 | 59757 | 59758 | 59759 |
| | 59760 | 59761 | 59762 | 59763 | 59764 | 59765 | 59766 | 59767 | 59768 | 59769 | 59770 | 59771 |
| | 59772 | 59773 | 59774 | 59775 | 59776 | 59777 | 59778 | 59779 | 59780 | 59781 | 59782 | 59783 |
| | 59784 | 59785 | 59786 | 59787 | 59788 | 59789 | 59790 | 59791 | 59792 | 59793 | 59794 | 59795 |
| | 59796 | 59797 | 59798 | 59799 | 59800 | 59801 | 59802 | 59803 | 59804 | 59805 | 59806 | 59807 |
| | 59808 | 59809 | 59810 | 59811 | 59812 | 59814 | 59815 | 59816 | 59817 | 59818 | 59819 | 59820 |
| | 59821 | 59822 | 59823 | 59824 | 59825 | 59826 | 59827 | 59828 | 59829 | 59830 | 59831 | 59832 |
| | 59833 | 59834 | 59835 | 59836 | 59837 | 59838 | 59839 | 59840 | 59841 | 59848 | 59849 | 59850 |
| | 59851 | 59852 | 59853 | 59854 | 59855 | 59856 | 59857 | 59858 | 59859 | 59860 | 59861 | 59862 |
| | 59863 | 59864 | 59865 | 59866 | 59867 | 59868 | 59869 | 59870 | 59871 | 59872 | 59873 | 59874 |
| | 59875 | 59876 | 59877 | 59878 | 59879 | 59880 | 59881 | 59882 | 59883 | 59884 | 59885 | 59886 |
| | 59887 | 59888 | 59889 | 59890 | 59891 | 59892 | 59893 | 59894 | 59895 | 59896 | 59897 | 59898 |
| | 59899 | 59900 | 59901 | 59902 | 59903 | 59904 | 59905 | 59906 | 59907 | 59908 | 59911 | 59912 |
| | 59913 | 59914 | 59915 | 59916 | 59917 | 59918 | 59919 | 59920 | 59921 | 59922 | 59923 | 59924 |
| | 59925 | 59926 | 59927 | 59928 | 59929 | 59930 | 59931 | 59932 | 59933 | 59934 | 59935 | 59936 |
| | 59937 | 59938 | 59939 | 59940 | 59941 | 59942 | 59943 | 59944 | 59945 | 59946 | 59947 | 59948 |
| | 59949 | 59950 | 59951 | 59952 | 59953 | 59954 | 59955 | 59956 | 59957 | 59961 | 59962 | 59963 |
| | 59964 | 59965 | 59966 | 59967 | 59968 | 59969 | 59970 | 59971 | 59972 | 59973 | 59974 | 59975 |
| | 59976 | 59977 | 59978 | 59979 | 59980 | 59981 | 59982 | 59983 | 59984 | 59985 | 59986 | 59987 |
| | 59988 | 59989 | 59990 | 59991 | 59992 | 59993 | 59994 | 59995 | 59996 | 59997 | 59998 | 59999 |
| | 60000 | 60001 | 60002 | 60003 | 60004 | 60005 | 60006 | 60007 | 60008 | 60009 | 60010 | 60011 |
| | 60012 | 60013 | 60014 | 60015 | 60016 | 60017 | 60018 | 60019 | 60020 | 60021 | 60022 | 60023 |
| | 60024 | 60025 | 60026 | 60027 | 60028 | 60029 | 60030 | 60031 | 60032 | 60033 | 60034 | 60035 |
| | 60036 | 60037 | 60038 | 60039 | 60040 | 60041 | 60042 | 60043 | 60044 | 60045 | 60046 | 60047 |
| | 60048 | 60049 | 60050 | 60051 | 60052 | 60053 | 60054 | 60055 | 60056 | 60057 | 60058 | 60059 |
| | 60060 | 60061 | 60062 | 60063 | 60064 | 60065 | 60066 | 60067 | 60068 | 60069 | 60070 | 60071 |
| | 60072 | 60073 | 60074 | 60075 | 60076 | 60077 | 60078 | 60079 | 60080 | 60081 | 60086 | 60087 |
| | 60088 | 60089 | 60090 | 60091 | 60092 | 60093 | 60094 | 60095 | 60096 | 60097 | 60098 | 60099 |
| | 60100 | 60101 | 60102 | 60103 | 60104 | 60105 | 60106 | 60107 | 60108 | 60109 | 60110 | 60111 |
| | 60112 | 60113 | 60114 | 60115 | 60116 | 60117 | 60118 | 60119 | 60120 | 60121 | 60122 | 60123 |
| | 60124 | 60125 | 60126 | 60127 | 60128 | 60129 | 60130 | 60131 | 60132 | 60133 | 60134 | 60135 |
| | 60136 | 60137 | 60138 | 60139 | 60140 | 60141 | 60142 | 60143 | 60144 | 60145 | 60146 | 60147 |
| | 60148 | 60149 | 60150 | 60151 | 60152 | 60153 | 60154 | 60155 | 60156 | 60157 | 60158 | 60159 |
| | 60160 | 60161 | 60162 | 60163 | 60164 | 60165 | 60166 | 60167 | 60168 | 60169 | 60170 | 60171 |
| | 60172 | 60173 | 60174 | 60175 | 60176 | 60177 | 60178 | 60179 | 60180 | 60181 | 60182 | 60183 |
| | 60184 | 60185 | 60186 | 60187 | 60188 | 60189 | 60190 | 60191 | 60192 | 60193 | 60194 | 60195 |
| | 60196 | 60197 | 60198 | 60199 | 60200 | 60201 | 60202 | 60203 | 60204 | 60205 | 60206 | 60207 |
| | 60208 | 60209 | 60210 | 60211 | 60212 | 60213 | 60214 | 60215 | 60216 | 60217 | 60218 | 60219 |
| | 60220 | 60221 | 60223 | 60224 | 60225 | 60226 | 60227 | 60228 | 60229 | 60230 | 60231 | 60232 |
| | 60233 | 60234 | 60235 | 60236 | 60237 | 60238 | 60239 | 60240 | 60241 | 60242 | 60243 | 60244 |
| | 60245 | 60246 | 60247 | 60248 | 60249 | 60250 | 60251 | 60252 | 60253 | 60254 | 60255 | 60256 |
| | 60257 | 60258 | 60259 | 60260 | 60261 | 60262 | 60263 | 60264 | 60265 | 60266 | 60267 | 60269 |
| | 60270 | 60271 | 60272 | 60273 | 60274 | 60275 | 60276 | 60277 | 60278 | 60279 | 60280 | 60281 |
| | 60282 | 60283 | 60284 | 60285 | 60286 | 60287 | 60288 | 60289 | 60290 | 60291 | 60292 | 60293 |
| | 60298 | 60299 | 60300 | 60301 | 60302 | 60303 | 60304 | 60305 | 60306 | 60307 | 60308 | 60309 |
| | 60310 | 60311 | 60312 | 60313 | 60314 | 60315 | 60316 | 60317 | 60318 | 60319 | 60320 | 60321 |
| | 60322 | 60323 | 60324 | 60325 | 60326 | 60327 | 60328 | 60329 | 60330 | 60333 | 60334 | 60335 |
| | 60336 | 60340 | 60341 | 60342 | 60343 | 60344 | 60345 | 60346 | 60347 | 60348 | 60349 | 60350 |
| | 60351 | 60352 | 60353 | 60354 | 60355 | 60358 | 60359 | 60360 | 60365 | 60366 | 60367 | 60368 |
| | 60369 | 60370 | 60371 | 60372 | 60373 | 60374 | 60375 | 60376 | 60377 | 60378 | 60379 | 60380 |
| | 60381 | 60382 | 60386 | 60387 | 60388 | 60392 | 60393 | 60394 | 60395 | 60396 | 60397 | 60398 |
| | 60399 | 60400 | 60401 | 60402 | 60403 | 60404 | 60405 | 60406 | 60407 | 60408 | 60409 | 60410 |
| | 60411 | 60412 | 60413 | 60418 | 60419 | 60420 | 60421 | 60422 | 60423 | 60424 | 60425 | 60426 |
| | 60427 | 60428 | 60429 | 60430 | 60431 | 60432 | 60433 | 60434 | 60435 | 60436 | 60437 | 60438 |
| | 60439 | 60440 | 60441 | 60442 | 60443 | 60444 | 60447 | 60448 | 60449 | 60450 | 60451 | 60452 |
| | 60453 | 60454 | 60455 | 60456 | 60457 | 60458 | 60459 | 60460 | 60469 | 60470 | 60471 | 60472 |
| | 60473 | 60474 | 60475 | 60480 | 60481 | 60482 | 60483 | 60484 | 60485 | 60486 | 60487 | 60488 |
| | 60489 | 60490 | 60492 | 60493 | 60494 | 60495 | 60496 | 60497 | 60498 | 60499 | 60500 | 60501 |
| | 60502 | 60503 | 60504 | 60505 | 60506 | 60513 | 60514 | 60515 | 60516 | 60517 | 60518 | 60519 |
| | 60520 | 60521 | 60522 | 60523 | 60524 | 60525 | 60526 | 60527 | 60528 | 60529 | 60530 | 60531 |
| | 60532 | 60533 | 60534 | 60535 | 60536 | 60537 | 60538 | 60539 | 60540 | 60541 | 60542 | 60544 |
| | 60545 | 60546 | 60547 | 60548 | 60549 | 60550 | 60551 | 60552 | 60553 | 60554 | 60555 | 60556 |
| | 60557 | 60558 | 60559 | 60560 | 60561 | 60562 | 60563 | 60564 | 60565 | 60566 | 60567 | 60568 |
| | 60570 | 60571 | 60572 | 60573 | 60574 | 60575 | 60576 | 60577 | 60578 | 60579 | 60580 | 60581 |
| | 60582 | 60583 | 60584 | 60585 | 60586 | 60587 | 60588 | 60589 | 60590 | 60591 | 60592 | 60593 |
| | 60594 | 60595 | 60596 | 60597 | 60598 | 60603 | 60604 | 60605 | 60606 | 60607 | 60608 | 60609 |
| | 60619 | 60620 | 60621 | 60622 | 60623 | 60638 | 60639 | 60640 | 60660 | 60661 | 60665 | 60666 |
| | 60667 | 60669 | 60670 | 60680 | 60681 | 60682 | 60683 | 60684 | 60686 | 60687 | 60688 | 60689 |
| | 60696 | 60699 | 60700 | 60702 | 60703 | 60704 | 60705 | 60706 | 60707 | 60708 | 60709 | 60710 |
| | 60711 | 60712 | 60713 | 60714 | 60715 | 60716 | 60720 | 60721 | 60722 | 60723 | 60724 | 60725 |
| | 60726 | 60730 | 60731 | 60732 | 60733 | 60734 | 60735 | 60736 | 60737 | 60738 | 60739 | 60740 |
| | 60741 | 60742 | 60743 | 60744 | 60745 | 60746 | 60750 | 60752 | 60753 | 60756 | 60757 | 60758 |
| | 60759 | 60760 | 60761 | 60762 | 60767 | 60768 | 60769 | 60770 | 60771 | 60772 | 60780 | 60781 |
| | 60782 | 60783 | 60793 | 60794 | 60795 | 60796 | 60797 | 60798 | 60799 | 60800 | 60801 | 60802 |
| | 60803 | 60804 | 60805 | 60806 | 60807 | 60808 | 60809 | 60810 | 60811 | 60812 | 60813 | 60816 |
| | 60817 | 60818 | 60819 | 60820 | 60821 | 60822 | 60823 | 60824 | 60825 | 60826 | 60827 | 60828 |
| | 60829 | 60830 | 60831 | 60832 | 60833 | 60834 | 60835 | 60836 | 60837 | 60838 | 60839 | 60840 |
| | 60841 | 60842 | 60846 | 60847 | 60848 | 60849 | 60850 | 60851 | 60852 | 60853 | 60854 | 60855 |
| | 60856 | 60857 | 60858 | 60859 | 60860 | 60861 | 60862 | 60863 | 60864 | 60865 | 60866 | 60867 |
| | 60868 | 60869 | 60870 | 60871 | 60872 | 60873 | 60877 | 60878 | 60879 | 60880 | 60881 | 60882 |
| | 60883 | 60884 | 60885 | 60886 | 60887 | 60888 | 60889 | 60890 | 60891 | 60892 | 60893 | 60899 |
| | 60900 | 60901 | 60902 | 60905 | 60906 | 60907 | 60910 | 60911 | 60912 | 60913 | 60914 | 60915 |
| | 60916 | 60948 | 60949 | 60950 | 60951 | 60961 | 60962 | 60963 | 60964 | 60965 | 60969 | 60970 |
| | 60991 | 60992 | 60993 | 60995 | 60996 | 61003 | 61004 | 61005 | 61007 | 61008 | 61009 | 61010 |
| | 61011 | 61012 | 61013 | 61014 | 61015 | 61017 | 61018 | 61019 | 61020 | 61021 | 61022 | 61024 |
| | 61025 | 61026 | 61032 | 61033 | 61034 | 61035 | 61036 | 61037 | 61038 | 61039 | 61040 | 61041 |
| | 61042 | 61043 | 61044 | 61045 | 61046 | 61047 | 61048 | 61049 | 61050 | 61051 | 61052 | 61053 |
| | 61054 | 61055 | 61056 | 61057 | 61058 | 61059 | 61060 | 61061 | 61062 | 61063 | 61064 | 61065 |
| | 61066 | 61067 | 61068 | 61069 | 61070 | 61071 | 61072 | 61073 | 61074 | 61075 | 61076 | 61077 |
| | 61078 | 61079 | 61080 | 61081 | 61082 | 61084 | 61085 | 61086 | 61087 | 61088 | 61089 | 61090 |
| | 61091 | 61092 | 61100 | 61101 | 61102 | 61103 | 61104 | 61105 | 61107 | 61108 | 61109 | 61110 |
| | 61111 | 61122 | 61123 | 61124 | 61125 | 61132 | 61133 | 61134 | 61135 | 61145 | 61146 | 61147 |
| | 61148 | 61149 | 61150 | 61153 | 61154 | 61155 | 61160 | 61161 | 61163 | 61164 | 61165 | 61166 |
| | 61172 | 61173 | 61174 | 61178 | 61179 | 61180 | 61189 | 61198 | 61199 | 61200 | 61218 | 61219 |
| | 61220 | 61244 | 61245 | 61246 | 61247 | 61248 | 61249 | 61260 | 61261 | 61262 | 61271 | 61272 |
| | 61273 | 61274 | 61275 | 61277 | 61278 | 61281 | 61282 | 61283 | 61290 | 61291 | 61292 | 61293 |
| | 61294 | 61297 | 61298 | 61299 | 61300 | 61301 | 61302 | 61303 | 61304 | 61305 | 61306 | 61307 |
| | 61308 | 61309 | 61310 | 61311 | 61312 | 61313 | 61314 | 61318 | 61319 | 61320 | 61321 | 61322 |
| | 61323 | 61324 | 61325 | 61326 | 61327 | 61329 | 61330 | 61332 | 61333 | 61334 | 61335 | 61336 |
| | 61337 | 61338 | 61339 | 61340 | 61341 | 61342 | 61343 | 61344 | 61345 | 61346 | 61347 | 61348 |
| | 61349 | 61350 | 61351 | 61352 | 61353 | 61354 | 61355 | 61356 | 61357 | 61358 | 61359 | 61360 |
| | 61361 | 61362 | 61363 | 61364 | 61365 | 61366 | 61367 | 61368 | 61369 | 61370 | 61371 | 61372 |
| | 61373 | 61376 | 61377 | 61381 | 61382 | 61405 | 61406 | 61407 | 61408 | 61441 | 61442 | 61443 |
| | 61450 | 61451 | 61452 | 61453 | 61454 | 61455 | 61457 | 61458 | 61459 | 61460 | 61461 | 61463 |
| | 61465 | 61466 | 61467 | 61468 | 61469 | 61470 | 61471 | 61472 | 61473 | 61481 | 61482 | 61483 |
| | 61484 | 61485 | 61488 | 61489 | 61490 | 61491 | 61495 | 61496 | 61497 | 61498 | 61502 | 61503 |
| | 61504 | 61505 | 61506 | 61507 | 61508 | 61509 | 61510 | 61512 | 61513 | 61514 | 61515 | 61516 |
| | 61517 | 61518 | 61519 | 61520 | 61521 | 61522 | 61523 | 61524 | 61525 | 61526 | 61527 | 61529 |
| | 61530 | 61535 | 61536 | 61537 | 61539 | 61540 | 61541 | 61542 | 61543 | 61544 | 61545 | 61546 |
| | 61547 | 61548 | 61549 | 61550 | 61551 | 61552 | 61553 | 61554 | 61555 | 61556 | 61557 | 61558 |
| | 61559 | 61560 | 61561 | 61562 | 61563 | 61564 | 61565 | 61566 | 61567 | 61568 | 61569 | 61570 |
| | 61571 | 61572 | 61573 | 61574 | 61575 | 61576 | 61577 | 61578 | 61579 | 61580 | 61581 | 61582 |
| | 61583 | 61584 | 61585 | 61586 | 61587 | 61588 | 61589 | 61591 | 61592 | 61593 | 61594 | 61595 |
| | 61596 | 61597 | 61598 | 61599 | 61602 | 61603 | 61605 | 61606 | 61607 | 61609 | 61610 | 61611 |
| | 61612 | 61613 | 61614 | 61615 | 61616 | 61617 | 61618 | 61619 | 61620 | 61621 | 61624 | 61625 |
| | 61626 | 61627 | 61628 | 61629 | 61631 | 61632 | 61634 | 61635 | 61636 | 61637 | 61638 | 61639 |
| | 61640 | 61641 | 61642 | 61643 | 61644 | 61646 | 61647 | 61648 | 61651 | 61652 | 61653 | 61654 |
| | 61655 | 61660 | 61661 | 61662 | 61666 | 61667 | 61668 | 61669 | 61670 | 61672 | 61673 | 61674 |
| | 61675 | 61676 | 61677 | 61678 | 61683 | 61684 | 61685 | 61686 | 61687 | 61688 | 61689 | 61691 |
| | 61692 | 61693 | 61694 | 61703 | 61704 | 61705 | 61706 | 61707 | 61708 | 61718 | 61719 | 61720 |
| | 61721 | 61722 | 61723 | 61724 | 61725 | 61726 | 61727 | 61728 | 61729 | 61730 | 61731 | 61732 |
| | 61733 | 61734 | 61739 | 61740 | 61744 | 61745 | 61748 | 61749 | 61758 | 61759 | 61765 | 61766 |
| | 61767 | 61768 | 61769 | 61770 | 61774 | 61775 | 61782 | 61783 | 61784 | 61785 | 61786 | 61787 |
| | 61788 | 61789 | 61791 | 61792 | 61794 | 61795 | 61797 | 61798 | 61799 | 61803 | 61804 | 61805 |
| | 61807 | 61808 | 61809 | 61810 | 61814 | 61815 | 61816 | 61817 | 61823 | 61824 | 61825 | 61826 |
| | 61827 | 61828 | 61834 | 61835 | 61844 | 61845 | 61847 | 61848 | 61849 | 61850 | 61852 | 61853 |
| | 61858 | 61859 | 61860 | 61861 | 61867 | 61868 | 61869 | 61870 | 61872 | 61873 | 61875 | 61876 |
| | 61877 | 61878 | 61879 | 61880 | 61881 | 61884 | 61885 | 61886 | 61887 | 61889 | 61890 | 61892 |
| | 61893 | 61894 | 61899 | 61900 | 61903 | 61904 | 61905 | 61906 | 61907 | 61908 | 61916 | 61917 |
| | 61921 | 61922 | 61923 | 61932 | 61933 | 61937 | 61938 | 61942 | 61943 | 61946 | 61947 | 61948 |
| | 61949 | 61950 | 61951 | 61952 | 61953 | 61954 | 61955 | 61957 | 61958 | 61960 | 61961 | 61963 |
| | 61964 | 61965 | 61966 | 61967 | 61968 | 61972 | 61973 | 61974 | 61975 | 61977 | 61978 | 61980 |
| | 61981 | 61984 | 61985 | 61986 | 61987 | 1988 | 61991 | 61992 | 61993 | 61995 | 61996 | 52011 |
| | 62012 | 62013 | 62020 | 62021 | 62023 | 62024 | 62025 | 62026 | 62027 | 62028 | 62029 | 62030 |
| | 62031 | 62032 | 62033 | 62034 | 62035 | 62036 | 62037 | 62038 | 62039 | 62040 | 62041 | 62042 |
| | 62046 | 62047 | 62048 | 62062 | 62069 | 62070 | 62071 | 62075 | 62101 | 62102 | 62114 | 62115 |
| | 62116 | 62118 | 62119 | 62120 | 62121 | 62123 | 62124 | 62125 | 62126 | 62127 | 62130 | 62131 |
| | 62132 | 62138 | 62139 | 62140 | 62141 | 62142 | 62143 | 62149 | 62150 | 62151 | 62152 | 62153 |
| | 62154 | 62158 | 62159 | 62160 | 62161 | 62162 | 62163 | 62164 | 62170 | 62171 | 62172 | 62173 |
| | 62174 | 62177 | 62178 | 62179 | 62180 | 62181 | 62182 | 62184 | 62185 | 62186 | 62187 | 62188 |
| | 62194 | 62195 | 62198 | 62199 | 62200 | 62201 | 62205 | 62206 | 62207 | 62225 | 62226 | 62238 |
| | 62239 | 62244 | 62245 | 62246 | 62247 | 62248 | 62249 | 62250 | 62251 | 62253 | 62254 | 62264 |
| | 62266 | 62267 | 62268 | 62269 | 62271 | 62272 | 62273 | 62274 | 62276 | 62277 | 62278 | 62290 |
| | 62291 | 62296 | 62297 | 62304 | 62305 | 62306 | 62307 | 62309 | 62310 | 62312 | 62313 | 62314 |
| | 62315 | 62316 | 62317 | 62319 | 62320 | 62321 | 62322 | 62323 | 62324 | 62328 | 62329 | 62330 |
| | 62331 | 62346 | 62347 | 62348 | 62357 | 62363 | 62364 | 62365 | 62366 | 62371 | 62372 | 62373 |
| | 62374 | 62375 | 62376 | 62377 | 62378 | 62379 | 62380 | 62381 | 62382 | 62383 | 62387 | 62388 |
| | 62397 | 62398 | 62399 | 62400 | 62401 | 62402 | 62403 | 62404 | 62416 | 62417 | 62418 | 62419 |
| | 62423 | 62424 | 62425 | 62426 | 62427 | 62428 | 62429 | 62430 | 62431 | 62432 | 62435 | 62455 |
| | 62456 | 62457 | 62458 | 62459 | 62460 | 62461 | 62462 | 62466 | 62476 | 62477 | 62478 | 62479 |
| | 62480 | 62504 | 62505 | 62506 | 62507 | 62508 | 62515 | 62516 | 62517 | 62530 | 62531 | 62532 |
| | 62533 | 62534 | 62543 | 62544 | 62545 | 62546 | 62560 | 62561 | 62562 | 62563 | 62564 | 62568 |
| | 62569 | 62570 | 62580 | 62581 | 62582 | 62592 | 62593 | 62594 | 62595 | 62596 | 62597 | 62598 |
| | 62599 | 62600 | 62601 | 62602 | 62603 | 62604 | 62605 | 62606 | 62612 | 62613 | 62618 | 62619 |
| | 62623 | 62629 | 62634 | 62635 | 62636 | 62637 | 62638 | 62639 | 62640 | 62644 | 62653 | 62654 |
| | 62655 | 62656 | 62657 | 62658 | 62659 | 62666 | 62667 | 62668 | 62669 | 62670 | 62671 | 62672 |
| | 62678 | 62679 | 62680 | 62681 | 62682 | 62683 | 62697 | 62698 | 62699 | 62700 | 62705 | 62706 |
| | 62707 | 62708 | 62709 | 62712 | 62713 | 62738 | 62739 | 62740 | 62746 | 62747 | 62748 | 62749 |
| | 62762 | 62765 | 62766 | 62767 | 62768 | 62771 | 62772 | 62773 | 62774 | 62794 | 62795 | 62799 |
| | 62820 | 62821 | 62822 | 62827 | 62828 | 62829 | 62835 | 62836 | 62837 | 62861 | 62862 | 62863 |
| | 62864 | 62880 | 62881 | 62882 | 62904 | 62908 | 62909 | 62910 | 62913 | 62914 | 62915 | 62929 |
| | 62931 | 62932 | 62935 | 62936 | 62943 | 62949 | 62950 | 62951 | 62953 | 62954 | 62955 | 62958 |
| | 62959 | 62960 | 62961 | 62965 | 62967 | 62968 | 62969 | 62971 | 62972 | 62975 | 62976 | 62977 |
| | 62978 | 62979 | 62980 | 62981 | 62982 | 62986 | 62987 | 62988 | 62989 | 62990 | 62996 | 62997 |
| | 62998 | 62999 | 63000 | 63001 | 63002 | 63003 | 63004 | 63005 | 63006 | 63007 | 63008 | 63018 |
| | 63025 | 63026 | 63028 | 63029 | 63035 | 63036 | 63043 | 63044 | 63045 | 63049 | 63050 | 63051 |
| | 63052 | 63053 | 63058 | 63059 | 63070 | 63071 | 63072 | 63073 | 63085 | 63086 | 63095 | 63096 |
| | 63097 | 63113 | 63114 | 63115 | 63117 | 63118 | 63119 | 63129 | 63130 | 63131 | 63132 | 63133 |
| | 63140 | 63141 | 63142 | 63143 | 63144 | 63145 | 63154 | 63155 | 63156 | 63157 | 63158 | 63159 |
| | 63160 | 63164 | 63165 | 63166 | 63176 | 63177 | 63178 | 63181 | 63182 | 63183 | 63184 | 63185 |
| | 63186 | 63187 | 63188 | 63189 | 63190 | 63191 | 63192 | 63193 | 63194 | 63195 | 63196 | 63197 |
| | 63199 | 63200 | 63201 | 63208 | 63209 | 63210 | 63216 | 63217 | 63218 | 63219 | 63220 | 63221 |
| | 63222 | 63223 | 63224 | 63228 | 63229 | 63230 | 63231 | 63232 | 63245 | 63246 | 63247 | 63248 |
| | 63249 | 63250 | 63251 | 63252 | 63253 | 63254 | 63255 | 63256 | 63260 | 63261 | 63262 | 63263 |
| | 63264 | 63265 | 63271 | 63272 | 63273 | 63274 | 63275 | 63276 | 63285 | 63286 | 63287 | 63294 |
| | 63295 | 63296 | 63302 | 63303 | 63304 | 63310 | 63324 | 63325 | 63326 | 63327 | 63328 | 63329 |
| | 63330 | 63331 | 63332 | 63360 | 63361 | 63362 | 63404 | 63405 | 63406 | 63407 | 63408 | 63409 |
| | 63410 | 63419 | 63427 | 63428 | 63429 | 63430 | 63434 | 63435 | 63436 | 63437 | 63438 | 63439 |
| | 63440 | 63441 | 63446 | 63447 | 63458 | 63459 | 63460 | 63461 | 63462 | 63463 | 63464 | 63465 |
| | 63466 | 63468 | 63469 | 63470 | 63472 | 63473 | 63474 | 63482 | 63484 | 63485 | 63494 | 63495 |
| | 63498 | 63500 | 63501 | 63504 | 63505 | 63521 | 63522 | 63523 | 63535 | 63536 | 63537 | 63538 |
| | 63542 | 63543 | 63544 | 63559 | 63560 | 63563 | 63566 | 63567 | 63568 | 63569 | 63570 | 63571 |
| | 63572 | 63573 | 63574 | 63575 | 63576 | 63577 | 63587 | 63588 | 63589 | 63599 | 63600 | 63601 |
| | 63602 | 63603 | 63609 | 63610 | 63611 | 63612 | 63613 | 63614 | 63615 | 63616 | 63617 | 63618 |
| | 63619 | 63620 | 63621 | 63622 | 63623 | 63624 | 63628 | 63633 | 63639 | 63640 | 63641 | 63642 |
| | 63643 | 63645 | 63646 | 63647 | 63648 | 63649 | 63650 | 63651 | 63652 | 63653 | 63658 | 63659 |
| | 63665 | 63666 | 63668 | 63671 | 63672 | 63673 | 63674 | 63675 | 63676 | 63677 | 63685 | 63686 |
| | 63688 | 63689 | 63690 | 63695 | 63696 | 63697 | 63707 | 63708 | 63709 | 63715 | 63716 | 63717 |
| | 63718 | 63719 | 63720 | 63721 | 63722 | 63723 | 63725 | 63726 | 63731 | 63732 | 63733 | 63734 |
| | 63736 | 63737 | 63738 | 63739 | 63740 | 63741 | 63742 | 63743 | 63746 | 63747 | 63749 | 63750 |
| | 63751 | 63752 | 63753 | 63754 | 63755 | 63756 | 63758 | 63759 | 63760 | 63762 | 63764 | 63765 |
| | 63766 | 63767 | 63768 | 63769 | 63770 | 63771 | 63772 | 63773 | 63774 | 63776 | 63777 | 63778 |
| | 63780 | 63781 | 63786 | 63788 | 63789 | 63790 | 63791 | 63792 | 63793 | 63794 | 63795 | 63796 |
| | 63797 | 63799 | 63801 | 63802 | 63804 | 63805 | 63806 | 63807 | 63808 | 63809 | 63810 | 63811 |
| | 63813 | 63814 | 63823 | 63824 | 63825 | 63826 | 63827 | 63828 | 63829 | 63830 | 63831 | 63833 |
| | 63834 | 63835 | 63836 | 63841 | 63843 | 63847 | 63848 | 63849 | 63850 | 63852 | 63853 | 63854 |
| | 63855 | 63856 | 63857 | 63858 | 63865 | 63869 | 63870 | 63871 | 63872 | 63877 | 63878 | 63879 |
| | 63880 | 63881 | 63882 | 63883 | 63884 | 63885 | 63886 | 63887 | 63888 | 63889 | 63890 | 63891 |
| | 63892 | 63893 | 63894 | 63895 | 63896 | 63897 | 63898 | 63900 | 63901 | 63902 | 63904 | 63905 |
| | 63906 | 63912 | 63913 | 63921 | 63922 | 63923 | 63946 | 63947 | 63948 | 63952 | 63953 | 53954 |
| | 63963 | 63964 | 63969 | 63970 | 63971 | 63978 | 63979 | 63980 | 63987 | 63988 | 63989 | 63990 |
| | 63991 | 63992 | 63993 | 63994 | 63995 | 63996 | 64001 | 64002 | 64003 | 64005 | 64006 | 64007 |
| | 64008 | 64009 | 64010 | 64011 | 64012 | 64013 | 64014 | 64015 | 64016 | 64017 | 64018 | 64019 |
| | 64020 | 64021 | 64022 | 64023 | 64024 | 64025 | 64026 | 64027 | 64028 | 64029 | 64030 | 64031 |
| | 64032 | 64033 | 64034 | 64035 | 64036 | 64037 | 64038 | 64039 | 64040 | 64043 | 64044 | 64045 |
| | 64046 | 64051 | 64052 | 64053 | 64054 | 64055 | 64056 | 64057 | 64058 | 64059 | 64068 | 64069 |
| | 64071 | 64072 | 64073 | 64074 | 64075 | 64076 | 64077 | 64079 | 64080 | 64081 | 64082 | 64083 |
| | 64084 | 64085 | 64086 | 64087 | 64088 | 64089 | 64090 | 64092 | 64093 | 64094 | 64095 | 64096 |
| | 64097 | 64098 | 64099 | 64100 | 64102 | 64103 | 64104 | 64105 | 64106 | 64107 | 64108 | 64109 |
| | 64110 | 64111 | 64112 | 64113 | 64114 | 64115 | 64116 | 64117 | 64118 | 64119 | 64120 | 64121 |
| | 64122 | 64123 | 64124 | 64126 | 64127 | 64128 | 64129 | 64130 | 64131 | 64132 | 64133 | 64134 |
| | 64135 | 64136 | 64137 | 64138 | 64139 | 64140 | 64143 | 64144 | 64145 | 64146 | 64147 | 64148 |
| | 64151 | 64152 | 64169 | 64170 | 64172 | 64188 | 64189 | 64190 | 64191 | 64192 | 64193 | 64199 |
| | 64209 | 64210 | 64211 | 64213 | 64214 | 64215 | 64221 | 64222 | 64223 | 64224 | 64225 | 64226 |
| | 64227 | 64232 | 64244 | 64245 | 64246 | 64249 | 64256 | 64260 | 64266 | 64269 | 64271 | 64275 |
| | 64276 | 64281 | 64282 | 64283 | 64284 | 64285 | 64286 | 64287 | 64291 | 64292 | 64300 | 64301 |
| | 64302 | 64303 | 64311 | 64312 | 64318 | 64319 | 64320 | 64334 | 64335 | 64344 | 64345 | 64346 |
| | 64348 | 64360 | 64361 | 64362 | 64364 | 64366 | 64377 | 64378 | 64384 | 64399 | 64416 | 64417 |
| | 64418 | 64422 | 64426 | 64430 | 64431 | 64432 | 64433 | 64434 | 64439 | 64440 | 64442 | 64444 |
| | 64445 | 64446 | 64447 | 64448 | 64449 | 64455 | 64456 | 64457 | 64461 | 64462 | 64463 | 64470 |
| | 64472 | 64476 | 64477 | 64478 | 64479 | 64481 | 64485 | 64486 | 64487 | 64492 | 64493 | 64494 |
| | 64496 | 64497 | 64498 | 64499 | 64500 | 64501 | 64502 | 64503 | 64504 | 64505 | 64507 | 64509 |
| | 64510 | 64512 | 64518 | 64519 | 64523 | 64524 | 64525 | 64526 | 64527 | 64530 | 64531 | 64532 |
| | 64533 | 64534 | 64538 | 64539 | 64540 | 64541 | 64542 | 64543 | 64544 | 64546 | 64547 | 64548 |
| | 64549 | 64550 | 64551 | 64552 | 64553 | 64554 | 64555 | 64556 | 64557 | 64560 | 64561 | 64562 |
| | 64567 | 64568 | 64571 | 64572 | 64578 | 64579 | 64580 | 64581 | 64582 | 64584 | 64585 | 64586 |
| | 64587 | 64588 | 64601 | 64602 | 64603 | 64614 | 64615 | 64616 | 64623 | 64624 | 64625 | 64638 |
| | 64639 | 64640 | 64641 | 64649 | 64650 | 64657 | 64658 | 64659 | 64673 | 64674 | 64675 | 64680 |
| | 64681 | 64686 | 64689 | 64692 | 64694 | 64695 | 64696 | 64697 | 64698 | 64702 | 64703 | 64704 |
| | 64705 | 64706 | 64707 | 64708 | 64709 | 64710 | 64711 | 64714 | 64721 | 64722 | 64725 | 64726 |
| | 64727 | 64728 | 64730 | 64735 | 64746 | 64747 | 64757 | 64758 | 64759 | 64761 | 64767 | 64781 |
| | 64782 | 64788 | 64789 | 64790 | 64791 | 64792 | 64794 | 64795 | 64796 | 64797 | 64807 | 64808 |
| | 64809 | 64810 | 64811 | 64812 | 64813 | 64814 | 64815 | 64816 | 64818 | 64819 | 64820 | 64821 |
| | 64826 | 64827 | 64828 | 64830 | 64834 | 64835 | 64836 | 64837 | 64838 | 64839 | 64840 | 64841 |
| | 64842 | 64843 | 64844 | 64845 | 64846 | 64847 | 64848 | 64849 | 64850 | 64851 | 64855 | 64856 |
| | 64857 | 64858 | 64859 | 64860 | 64861 | 64862 | 64863 | 64864 | 64865 | 64869 | 64870 | 64871 |
| | 64872 | 64873 | 64874 | 64875 | 64876 | 64877 | 64878 | 64879 | 64880 | 64881 | 64882 | 54883 |
| | 64886 | 64887 | 64888 | 64889 | 64890 | 64891 | 64892 | 64893 | 64894 | 64895 | 64896 | 64897 |
| | 64898 | 64899 | 64900 | 64904 | 64905 | 64906 | 64907 | 64908 | 64909 | 64910 | 64911 | 64914 |
| | 64915 | 64916 | 64917 | 64918 | 64919 | 64922 | 64923 | 64924 | 64925 | 64926 | 64927 | 64928 |
| | 64931 | 64932 | 64933 | 64934 | 64935 | 64939 | 64940 | 64941 | 64942 | 64943 | 64944 | 64945 |
| | 64946 | 64947 | 64948 | 64949 | 64950 | 64951 | 64960 | 64961 | 64962 | 64963 | 64964 | 64965 |
| | 64966 | 64967 | 64968 | 64971 | 64976 | 64977 | 64978 | 64983 | 64984 | 64986 | 64987 | 64989 |
| | 64994 | 64995 | 64996 | 64997 | 65001 | 65005 | 65006 | 65007 | 65018 | 65019 | 65023 | 65027 |
| | 65028 | 65029 | 65030 | 65031 | 65032 | 65033 | 65064 | 65065 | 65066 | 65067 | 65075 | 65082 |
| | 65083 | 65084 | 65087 | 65088 | 65089 | 65090 | 65091 | 65092 | 65093 | 65094 | 65095 | 65096 |
| | 65097 | 65098 | 65099 | 65101 | 65102 | 65103 | 65107 | 65113 | 65114 | 65115 | 65116 | 65117 |
| | 65118 | 65119 | 65126 | 65128 | 65129 | 65130 | 65153 | 65160 | 65161 | 65167 | 65168 | 65169 |
| | 65182 | 65183 | 65189 | 65210 | 65211 | 65212 | 65213 | 65222 | 65223 | 65224 | 65230 | 65235 |
| | 65236 | 65243 | 65244 | 65245 | 65246 | 65247 | 65248 | 65249 | 65256 | 65257 | 65258 | 65262 |
| | 65263 | 65264 | 65268 | 65269 | 65270 | 65271 | 65274 | 65275 | 65276 | 65291 | 65292 | 65293 |
| | 65299 | 65300 | 65304 | 65306 | 65311 | 65319 | 65321 | 65322 | 65332 | 65333 | 65335 | 65369 |
| | 65370 | 65371 | 65373 | 65375 | 65376 | 65392 | 65414 | 65417 | 65428 | 65441 | 65452 | 65464 |
| | 65473 | 65474 | 65477 | 65478 | 65488 | 65489 | 65494 | 65495 | 65496 | 65497 | 65501 | 65502 |
| | 65512 | 65513 | 65520 | 65521 | 65522 | 65535 | 65536 | 65547 | 65548 | 65552 | 65553 | 65554 |
| | 65555 | 65560 | 65561 | 65562 | 65563 | 65568 | 65569 | 65570 | 65572 | 65573 | 65574 | 65575 |
| | 65578 | 65579 | 65583 | 65584 | 65587 | 65588 | 65590 | 65593 | 65594 | 65595 | 65596 | 65597 |
| | 65598 | 65599 | 65600 | 65601 | 65602 | 65603 | 65604 | 65605 | 65606 | 65608 | 65609 | 65610 |
| | 65611 | 65614 | 65615 | 65616 | 65617 | 65619 | 65620 | 65621 | 65622 | 65623 | 65624 | 65625 |
| | 65626 | 65630 | 65631 | 65632 | 65633 | 65640 | 65641 | 65644 | 65645 | 65659 | 65660 | 65665 |
| | 65666 | 65667 | 65668 | 65669 | 65670 | 65671 | 65672 | 65673 | 65674 | 65675 | 65676 | 65677 |
| | 65678 | 65679 | 65682 | 65683 | 65685 | 65686 | 65687 | 65688 | 65689 | 65690 | 65693 | 65694 |
| | 65695 | 65696 | 65699 | 65700 | 65701 | 65702 | 65703 | 65704 | 65705 | 65706 | 65707 | 65708 |
| | 65709 | 65712 | 65713 | 65714 | 65715 | 65717 | 65718 | 65725 | 65726 | 65727 | 65728 | 65729 |
| | 65730 | 65731 | 65733 | 65734 | 65737 | 65739 | 65741 | 65744 | 65745 | 65746 | 65747 | 65748 |
| | 65749 | 65750 | 65751 | 65752 | 65753 | 65756 | 65757 | 65758 | 65761 | 65762 | 65763 | 65765 |
| | 65771 | 65773 | 65774 | 65777 | 65778 | 65779 | 65780 | 65781 | 65782 | 65783 | 65785 | 65803 |
| | 65804 | 65805 | 65806 | 65819 | 65820 | 65824 | 65825 | 65826 | 65838 | 65839 | 65840 | 65851 |
| | 65852 | 65853 | 65854 | 65855 | 65863 | 65864 | 65866 | 65867 | 65868 | 65869 | 65870 | 65871 |
| | 65872 | 65873 | 65876 | 65877 | 65878 | 65879 | 65881 | 65882 | 65887 | 65893 | 65894 | 65896 |
| | 65897 | 65898 | 65899 | 65900 | 65901 | 65902 | 65903 | 65904 | 65905 | 65906 | 65907 | 65908 |
| | 65909 | 65910 | 65911 | 65912 | 65916 | 65924 | 65925 | 65926 | 65928 | 65929 | 65933 | 65934 |
| | 65937 | 65940 | 65941 | 65942 | 65943 | 65947 | 65959 | 55960 | 65961 | 65967 | 65969 | 66001 |
| | 66002 | 66013 | 66014 | 66015 | 66016 | 66022 | 66023 | 66024 | 66025 | 66026 | 66029 | 66030 |
| | 66031 | 66032 | 66035 | 66036 | 66039 | 66040 | 66041 | 66042 | 66045 | 66046 | 66047 | 66048 |
| | 66053 | 66054 | 66063 | 66064 | 66065 | 66067 | 66068 | 66069 | 66070 | 66071 | 66072 | 66073 |
| | 66074 | 66080 | 66081 | 66082 | 66085 | 66089 | 66090 | 66099 | 66100 | 66101 | 66102 | 66115 |
| | 66116 | 66120 | 66121 | 66138 | 66139 | 66142 | 66143 | 66146 | 66147 | 66153 | 66154 | 66167 |
| | 66168 | 66175 | 66176 | 66178 | 66179 | 66180 | 66181 | 66186 | 66187 | 66189 | 66195 | 66196 |
| | 66197 | 66198 | 66199 | 66209 | 66210 | 66213 | 66214 | 66215 | 66216 | 66217 | 66218 | 66219 |
| | 66220 | 66221 | 66222 | 66223 | 66224 | 66234 | 66235 | 66241 | 66242 | 66244 | 66245 | 66248 |
| | 66249 | 66250 | 66251 | 66252 | 66253 | 66254 | 66255 | 66256 | 66257 | 66258 | 66259 | 66265 |
| | 66266 | 66268 | 66269 | 66270 | 66271 | 66272 | 66275 | 66276 | 66277 | 66278 | 66281 | 66282 |
| | 66283 | 66287 | 66289 | 66290 | 66298 | 66299 | 66310 | 66314 | 66332 | 66370 | 66371 | 66389 |
| | 66390 | 66391 | 66397 | 66398 | 66399 | 66401 | 66402 | 66405 | 66406 | 66407 | 66408 | 66409 |
| | 66413 | 66426 | 66446 | 66448 | 66449 | 66450 | 66463 | 66464 | 66465 | 66473 | 66476 | 66480 |
| | 66490 | 66491 | 66492 | 66493 | 66500 | 66501 | 66503 | 66504 | 66510 | 66511 | 66512 | 66514 |
| | 66515 | 66518 | 66525 | 66531 | 66537 | 66539 | 66540 | 66545 | 66546 | 66548 | 66549 | 66551 |
| | 66552 | 66553 | 66554 | 66558 | 66572 | 66573 | 66577 | 66578 | 66580 | 66581 | 66591 | 66611 |
| | 66622 | 66623 | 66629 | 66630 | 66632 | 66633 | 66637 | 66638 | 66640 | 66641 | 66643 | 66644 |
| | 66645 | 66648 | 66649 | 66650 | 66651 | 66653 | 66654 | 66660 | 66661 | 66662 | 66663 | 66664 |
| | 66666 | 66667 | 66668 | 66669 | 66684 | 66685 | 66689 | 66690 | 66692 | 66693 | 66701 | 66708 |
| | 66709 | 66718 | 66719 | 66736 | 66737 | 66744 | 66745 | 66746 | 66747 | 66753 | 66754 | 66758 |
| | 66759 | 66762 | 66763 | 66766 | 66767 | 66768 | 66769 | 66770 | 66786 | 66787 | 66789 | 66790 |
| | 66791 | 66794 | 66795 | 66796 | 66797 | 66798 | 66800 | 66801 | 66802 | 66803 | 66804 | 66805 |
| | 66806 | 66807 | 66810 | 66811 | 66815 | 66816 | 66822 | 66823 | 66824 | 66825 | 66826 | 66827 |
| | 66828 | 66829 | 66830 | 66831 | 66832 | 66833 | 66834 | 66835 | 66836 | 66843 | 66844 | 66845 |
| | 66846 | 66847 | 66848 | 66852 | 66853 | 66857 | 66858 | 66860 | 66861 | 66862 | 66863 | 66864 |
| | 66865 | 66866 | 66869 | 66870 | 66873 | 66874 | 66875 | 66876 | 66877 | 66878 | 66889 | 66890 |
| | 66891 | 66901 | 66904 | 66905 | 66906 | 66910 | 66911 | 66914 | 66915 | 66916 | 66917 | 66918 |
| | 66921 | 66928 | 66929 | 66931 | 66932 | 66933 | 66937 | 66938 | 66940 | 66944 | 66945 | 66950 |
| | 66951 | 66960 | 66969 | 66970 | 66971 | 66973 | 66977 | 66981 | 66982 | 66985 | 66986 | 66987 |
| | 66988 | 66989 | 66990 | 66999 | 67000 | 67001 | 67007 | 67008 | 67009 | 67010 | 67011 | 67012 |
| | 67013 | 67014 | 67015 | 67016 | 67017 | 67020 | 67021 | 67022 | 67026 | 67027 | 67028 | 67039 |
| | 67040 | 67041 | 67050 | 67051 | 67052 | 67053 | 67054 | 67055 | 67057 | 67058 | 67064 | 67065 |
| | 67066 | 67067 | 67068 | 67069 | 67071 | 67072 | 67073 | 67074 | 67075 | 67076 | 67077 | 67078 |
| | 67079 | 67080 | 67081 | 67082 | 67083 | 67084 | 67085 | 67086 | 67087 | 67088 | 67094 | 67095 |
| | 67096 | 67097 | 67100 | 6710 | 67102 | 67103 | 67104 | 67105 | 67107 | 67108 | 67109 | 67113 |
| | 67114 | 67115 | 67118 | 67119 | 67120 | 67123 | 67124 | 67125 | 67126 | 67127 | 67128 | 67129 |
| | 67130 | 67131 | 67132 | 67133 | 67134 | 67135 | 67136 | 67137 | 67139 | 67140 | 67141 | 67148 |
| | 67149 | 67151 | 67152 | 67157 | 67158 | 67163 | 67164 | 67171 | 67175 | 67176 | 67177 | 67189 |
| | 67190 | 67208 | 67227 | 67228 | 67232 | 67233 | 67250 | 67255 | 67256 | 67259 | 67275 | 67276 |
| | 67277 | 67278 | 67279 | 67280 | 67287 | 67288 | 67289 | 67291 | 67292 | 67293 | 67294 | 67295 |
| | 67297 | 67298 | 67299 | 67300 | 67301 | 67303 | 67304 | 67308 | 67309 | 67310 | 67311 | 67312 |
| | 67313 | 67314 | 67315 | 67316 | 67321 | 67322 | 67323 | 67324 | 67328 | 67329 | 67330 | 67331 |
| | 67333 | 67334 | 67335 | 67336 | 67337 | 67338 | 67339 | 67341 | 67342 | 67343 | 67345 | 67346 |
| | 67347 | 67348 | 67349 | 67350 | 67351 | 67352 | 67353 | 67354 | 67355 | 67356 | 67357 | 67358 |
| | 67360 | 67361 | 67362 | 67363 | 67364 | 67367 | 67368 | 67369 | 67373 | 67374 | 67375 | 67376 |
| | 67377 | 67378 | 67379 | 67380 | 67381 | 67383 | 67384 | 67385 | 67386 | 67387 | 67388 | 67389 |
| | 67390 | 67391 | 67394 | 67395 | 67396 | 67401 | 67402 | 67403 | 67407 | 67408 | 67409 | 67411 |
| | 67412 | 67413 | 67414 | 67415 | 67416 | 67418 | 67419 | 67420 | 67422 | 67423 | 67424 | 67425 |
| | 67426 | 67427 | 67428 | 67429 | 67430 | 67432 | 67433 | 67434 | 67437 | 67438 | 67439 | 67440 |
| | 67441 | 67442 | 67448 | 67449 | 67450 | 67452 | 67453 | 67454 | 57471 | 67475 | 67476 | 67487 |
| | 67488 | 67496 | 67497 | 67498 | 67499 | 67503 | 67504 | 67505 | 67509 | 67510 | 67511 | 67549 |
| | 67556 | 67557 | 67558 | 67573 | 67576 | 67577 | 67579 | 67591 | 67593 | 67594 | 67595 | 67596 |
| | 67599 | 67600 | 67602 | 67610 | 67612 | 67613 | 67623 | 67624 | 67625 | 67630 | 67631 | 67632 |
| | 67640 | 67641 | 67643 | 67644 | 67645 | 67647 | 67648 | 67649 | 67652 | 67653 | 67654 | 67656 |
| | 67657 | 67658 | 67659 | 67661 | 67662 | 67664 | 67665 | 67668 | 67671 | 67672 | 67677 | 67678 |
| | 67685 | 67686 | 67687 | 67688 | 67689 | 67690 | 67691 | 67693 | 67696 | 67697 | 67698 | 67699 |
| | 67701 | 67702 | 67703 | 67704 | 67710 | 67713 | 67714 | 67715 | 67721 | 67722 | 67725 | 67726 |
| | 67727 | 67728 | 67730 | 67731 | 67744 | 67745 | 67746 | 67747 | 67748 | 67749 | 67752 | 67753 |
| | 67759 | 67760 | 67762 | 67763 | 67765 | 67766 | 67767 | 67768 | 67769 | 67770 | 67772 | 67773 |
| | 67777 | 67778 | 67781 | 67782 | 67785 | 67786 | 67787 | 67788 | 67791 | 67792 | 67793 | 67794 |
| | 67797 | 67798 | 67800 | 67801 | 67819 | 67820 | 67828 | 67829 | 67834 | 67835 | 67847 | 67848 |
| | 67849 | 67864 | 67865 | 67868 | 67869 | 67870 | 67871 | 67872 | 67873 | 67874 | 67875 | 67876 |
| | 67877 | 67881 | 67882 | 67883 | 67888 | 67889 | 67890 | 67891 | 67892 | 67893 | 67894 | 67895 |
| | 67896 | 67897 | 67900 | 67901 | 67902 | 67903 | 67904 | 67905 | 67906 | 67907 | 67909 | 67912 |
| | 67913 | 67914 | 67917 | 67918 | 67920 | 67921 | 67926 | 67930 | 67931 | 67932 | 67933 | 67935 |
| | 67937 | 67938 | 67939 | 67940 | 67941 | 67942 | 67944 | 67945 | 67953 | 67954 | 67956 | 67957 |
| | 67958 | 67959 | 67960 | 67961 | 67962 | 67963 | 67967 | 67968 | 67971 | 67972 | 67976 | 67977 |
| | 67981 | 67985 | 67986 | 67988 | 67989 | 67993 | 67994 | 67996 | 67997 | 67999 | 68007 | 68008 |
| | 68009 | 68011 | 68012 | 68013 | 68014 | 68015 | 68016 | 68020 | 68021 | 68024 | 68025 | 68026 |
| | 68027 | 68028 | 68031 | 68032 | 68034 | 68035 | 68036 | 68037 | 68038 | 68039 | 68046 | 68047 |
| | 68048 | 68050 | 68051 | 68052 | 68053 | 68054 | 68055 | 68056 | 68057 | 68058 | 68059 | 68061 |
| | 68062 | 68064 | 68065 | 68066 | 68067 | 68068 | 68069 | 68070 | 68073 | 68074 | 68075 | 68080 |
| | 68081 | 68082 | 68083 | 68084 | 68085 | 68086 | 68087 | 68088 | 68089 | 68090 | 68093 | 68094 |
| | 68099 | 68100 | 68101 | 68102 | 68106 | 68107 | 68108 | 68109 | 68117 | 68118 | 68119 | 68120 |
| | 68121 | 68122 | 68123 | 68124 | 68125 | 68126 | 68127 | 68128 | 68129 | 68130 | 68133 | 68136 |
| | 68137 | 68138 | 68139 | 68144 | 68145 | 68151 | 68152 | 68153 | 68154 | 68155 | 68156 | 68157 |
| | 68158 | 68159 | 68160 | 68161 | 68162 | 68163 | 68164 | 68165 | 68172 | 68173 | 68174 | 68175 |
| | 68178 | 68179 | 68180 | 68181 | 68184 | 68185 | 68188 | 68189 | 68190 | 68191 | 68192 | 68193 |
| | 68198 | 68199 | 68200 | 68201 | 68206 | 68207 | 68208 | 68209 | 68217 | 68218 | 68224 | 68225 |
| | 68232 | 68233 | 68234 | 68235 | 68236 | 68237 | 68246 | 68247 | 68248 | 68249 | 68252 | 68253 |
| | 68256 | 68257 | 68258 | 68259 | 68263 | 68264 | 68265 | 68267 | 68268 | 68275 | 68276 | 68277 |
| | 68278 | 68280 | 68281 | 68282 | 68283 | 68285 | 68286 | 68287 | 68288 | 68290 | 68291 | 68294 |
| | 68295 | 68296 | 68297 | 68299 | 68300 | 68304 | 68307 | 68310 | 68311 | 68316 | 68317 | 68318 |
| | 68320 | 68321 | 68322 | 68323 | 68330 | 68331 | 68332 | 68333 | 68336 | 68337 | 68338 | 68339 |
| | 68343 | 68344 | 68349 | 68350 | 68351 | 68352 | 68353 | 68354 | 68355 | 68356 | 68357 | 68359 |
| | 68363 | 68364 | 68365 | 68369 | 68370 | 68371 | 68372 | 68375 | 68382 | 68383 | 68387 | 68388 |
| | 68389 | 68390 | 68397 | 68398 | 68405 | 68406 | 68407 | 68408 | 68420 | 68425 | 68426 | 68427 |
| | 68431 | 68432 | 68433 | 68448 | 68449 | 68450 | 68451 | 68452 | 68453 | 68454 | 68455 | 68456 |
| | 68457 | 68458 | 68459 | 68461 | 68462 | 68463 | 68464 | 68467 | 68468 | 68474 | 68475 | 68479 |
| | 68490 | 68491 | 68492 | 68495 | 68500 | 68501 | 68502 | 68518 | 68519 | 68520 | 68521 | 68522 |
| | 68523 | 68524 | 68526 | 68527 | 68528 | 68529 | 68530 | 68531 | 68532 | 68533 | 68534 | 68539 |
| | 68540 | 68541 | 68544 | 68545 | 68546 | 68551 | 68552 | 68553 | 68554 | 68555 | 68556 | 68557 |
| | 68559 | 68560 | 68561 | 68562 | 68563 | 68564 | 68565 | 68566 | 68568 | 68569 | 68570 | 68574 |
| | 68575 | 68576 | 68577 | 68578 | 68579 | 68580 | 68581 | 68582 | 68583 | 68584 | 68585 | 68586 |
| | 68587 | 68588 | 68589 | 68590 | 68591 | 68596 | 68597 | 68598 | 68599 | 68600 | 68601 | 68605 |
| | 68606 | 68607 | 68608 | 68609 | 68610 | 68612 | 68613 | 68614 | 68615 | 68616 | 68617 | 68618 |
| | 68619 | 68620 | 68621 | 68622 | 68623 | 68624 | 68625 | 68626 | 68627 | 68630 | 68631 | 68638 |
| | 68639 | 68640 | 68641 | 68651 | 68666 | 68667 | 68678 | 68679 | 68693 | 68694 | 68710 | 68711 |
| | 68724 | 68725 | 68727 | 68756 | 68773 | 68774 | 68778 | 68779 | 68780 | 68794 | 68795 | 68803 |
| | 68810 | 68811 | 68829 | 68830 | 68831 | 68837 | 68838 | 68839 | 68842 | 68844 | 68845 | 68849 |
| | 68850 | 68858 | 68863 | 68864 | 68865 | 68866 | 68867 | 68870 | 68872 | 68875 | 68876 | 68877 |
| | 68879 | 68888 | 68889 | 68898 | 68899 | 68904 | 68919 | 68923 | 68924 | 68927 | 68928 | 68929 |
| | 68936 | 68938 | 68939 | 68942 | 68947 | 68948 | 68949 | 68950 | 68951 | 68953 | 68954 | 68955 |
| | 68957 | 68958 | 68959 | 68960 | 68961 | 68962 | 68963 | 68964 | 68965 | 68966 | 68969 | 68972 |
| | 68973 | 68974 | 68977 | 68978 | 68980 | 68981 | 68982 | 68983 | 68985 | 68986 | 68990 | 68991 |
| | 68994 | 68995 | 68996 | 68997 | 68998 | 68999 | 69000 | 69001 | 69002 | 69003 | 69004 | 69007 |
| | 69008 | 69009 | 69010 | 69011 | 69015 | 69017 | 69021 | 69030 | 69031 | 69033 | 69034 | 69035 |
| | 69036 | 69037 | 69040 | 69041 | 69043 | 69046 | 69048 | 69053 | 69058 | 69064 | 69073 | 69078 |
| | 69079 | 69080 | 69085 | 69091 | 69092 | 69095 | 69100 | 69101 | 69102 | 69103 | 69107 | 69108 |
| | 69109 | 69110 | 69111 | 69117 | 69120 | 69121 | 69125 | 69130 | 69131 | 69132 | 69134 | 69135 |
| | 69136 | 69141 | 69142 | 69152 | 69184 | 69185 | 69189 | 69190 | 69198 | 69206 | 69208 | 69218 |
| | 69219 | 69220 | 69221 | 69222 | 69225 | 69260 | 69261 | 69274 | 69283 | 69285 | 69286 | 69287 |
| | 69288 | 69294 | 69295 | 69304 | 69305 | 69308 | 69309 | 69311 | 69312 | 69313 | 69314 | 69320 |
| | 69321 | 69322 | 69325 | 69326 | 69334 | 69349 | 69352 | 69353 | 69362 | 69371 | 69375 | 69376 |
| | 69379 | 69380 | 69381 | 69383 | 69384 | 69400 | 69424 | 69430 | 69436 | 69437 | 69440 | 69441 |
| | 69450 | 69451 | 69452 | 69453 | 69454 | 69456 | 69457 | 69458 | 69459 | 69460 | 69466 | 69467 |
| | 69470 | 69471 | 69472 | 69486 | 69487 | 69488 | 69490 | 69499 | 69507 | 69510 | 69511 | 69515 |
| | 69516 | 69522 | 69528 | 69529 | 69532 | 69533 | 69537 | 69541 | 69542 | 69544 | 69545 | 69550 |
| | 69559 | 69561 | 69562 | 69565 | 69567 | 69583 | 69584 | 69594 | 69601 | 69610 | 69615 | 69621 |
| | 69629 | 69633 | 69634 | 69637 | 69642 | 69644 | 69650 | 69652 | 69654 | 69655 | 69656 | 69658 |
| | 69667 | 69668 | 69678 | 69679 | 69681 | 69682 | 69683 | 69688 | 69695 | 69696 | 69705 | 69707 |
| | 69709 | 69712 | 69719 | 69722 | 69731 | 69739 | 69740 | 69761 | 69769 | 69773 | 69778 | 69779 |
| | 69780 | 69791 | 69792 | 69795 | 69796 | 69799 | 69803 | 69804 | 69805 | 69810 | 69812 | 69813 |
| | 69816 | 69817 | 69818 | 69819 | 69820 | 69822 | 69823 | 69825 | 69826 | 69828 | 69829 | 69830 |
| | 69831 | 69832 | 69834 | 69836 | 69840 | 69843 | 69846 | 69847 | 69849 | 69850 | 69854 | 69856 |
| | 69859 | 69860 | 69861 | 69864 | 69867 | 69874 | 69876 | 69877 | 69878 | 69885 | 69886 | 69889 |
| | 69891 | 69893 | 69895 | 69899 | 69903 | 69905 | 69906 | 69910 | 69913 | 69918 | 69921 | 69922 |
| | 69923 | 69927 | 69928 | 69930 | 69932 | 69935 | 69936 | 69938 | 69947 | 69957 | 69965 | 69966 |
| | 69969 | 69976 | 69996 | 70000 | 70001 | 70007 | 70008 | 70010 | 70015 | 70024 | 70025 | 70031 |
| | 70039 | 70044 | 70050 | 70053 | 70058 | 70060 | 70069 | 70082 | 70084 | 70087 | 70088 | 70101 |
| | 70120 | 70121 | 70123 | 70125 | 70126 | 70130 | 70131 | 70136 | 70137 | 70152 | 70164 | 70166 |
| | 70167 | 70168 | 70172 | 70183 | 70186 | 70189 | 70196 | 70210 | 70211 | 70218 | 70227 | 70228 |
| | 70230 | 70232 | 70237 | 70242 | 70246 | 70250 | 70251 | 70253 | 70258 | 70263 | 70265 | 70268 |
| | 70269 | 70278 | 70302 | 70305 | 70306 | 70325 | 70327 | 70329 | 70336 | 70341 | 70362 | 70372 |
| | 70388 | 70403 | 70404 | 70405 | 70406 | 70407 | 70410 | 70418 | 70419 | 70420 | 70423 | 70424 |
| | 70426 | 70431 | 70432 | 70433 | 70434 | 70435 | 70437 | 70438 | 70439 | 70440 | 70441 | 70445 |
| | 70456 | 70460 | 70472 | 70478 | 70480 | 70482 | 70499 | 70502 | 70503 | 70505 | 70512 | 70513 |
| | 70515 | 70516 | 70517 | 70518 | 70525 | 70527 | 70528 | 70532 | 70541 | 70542 | 70545 | 70549 |
| | 70551 | 70552 | 70567 | 70568 | 70570 | 70571 | 70572 | 70575 | 70582 | 70589 | 70596 | 70602 |
| | 70604 | 70612 | 70615 | 70623 | 70627 | 70628 | 70629 | 70634 | 70635 | 70637 | 70643 | 70645 |
| | 70652 | 70661 | 70672 | 70674 | 70681 | 70682 | 70683 | 70694 | 70700 | 70721 | 70724 | 70725 |
| | 70735 | 70742 | 70753 | 70754 | 70755 | 70763 | 70764 | 70778 | 70784 | 70801 | 70810 | 70817 |
| | 70823 | 70826 | 70831 | 70832 | 70842 | 70850 | 70871 | 70872 | 70887 | 70893 | 70900 | 70908 |
| | 70914 | 70916 | 70924 | 70928 | 70929 | 70933 | 70936 | 70948 | 70954 | 70959 | 70973 | 70974 |
| | 70992 | 70994 | 70997 | 71005 | 71028 | 71030 | 71032 | 71034 | 71037 | 71039 | 71040 | 71041 |
| | 71043 | 71048 | 71049 | 71050 | 71052 | 71059 | 71060 | 71063 | 71469 | 71124 | 71694 | 71189 |
| | 71071 | 71076 | 71079 | 71080 | 71087 | 71089 | 71090 | 71091 | 71092 | 71108 | 71112 | 71114 |
| | 71115 | 71118 | 71124 | 71126 | 71127 | 71137 | 71138 | 71139 | 71141 | 71144 | 71155 | 71158 |
| | 71164 | 71169 | 71172 | 71184 | 71189 | 71190 | 71191 | 71209 | 71222 | 71223 | 71224 | 71227 |
| | 71228 | 71238 | 71239 | 71240 | 71242 | 71243 | 71244 | 71247 | 71256 | 71260 | 71264 | 71270 |
| | 71277 | 71307 | 71308 | 71311 | 71312 | 71314 | 71315 | 71316 | 71317 | 71318 | 71319 | 71322 |
| | 71323 | 71326 | 71327 | 71330 | 71335 | 71342 | 71351 | 71370 | 71377 | 71381 | 71384 | 71387 |
| | 71393 | 71395 | 71397 | 71400 | 71401 | 71402 | 71407 | 71423 | 71425 | 71426 | 71433 | 71452 |
| | 71469 | 71473 | 71474 | 71475 | 71479 | 71481 | 71490 | 71491 | 71496 | 71501 | 71510 | 71511 |
| | 71528 | 71529 | 71532 | 71536 | 71537 | 71541 | 71545 | 71546 | 71549 | 71550 | 71552 | 71553 |
| | 71554 | 71555 | 71557 | 71558 | 71571 | 71585 | 71586 | 71589 | 71590 | 71593 | 71599 | 71605 |
| | 71612 | 71615 | 71616 | 71628 | 71633 | 71638 | 71640 | 71641 | 71660 | 71681 | 71683 | 71690 |
| | 71694 | 71696 | 71698 | 75518 | 75519 | 75520 | 75521 | 75522 | 75523 | 75528 | 75530 | 75531 |
| | 75532 | 75533 | 75534 | 75535 | 75536 | 75537 | 75538 | 75556 | 75558 | 75559 | 75563 | 75564 |
| | 75565 | 75567 | 75568 | 75569 | 75574 | 75575 | 75579 | 75580 | 75581 | 75583 | 75591 | 75597 |
| | 75598 | 75599 | 75607 | 75608 | 75609 | 75610 | 75617 | 75618 | 75624 | 75625 | 75633 | 75634 |
| | 75635 | 75647 | 75648 | 75649 | 75650 | 75651 | 75652 | 75655 | 75656 | 75657 | 75662 | 75663 |
| | 75664 | 75665 | 75666 | 75667 | 75668 | 75670 | 75671 | 75672 | 75673 | 75674 | 75675 | 75676 |
| | 75677 | 75678 | 75684 | 75685 | 75686 | 75687 | 75688 | 75689 | 75691 | 75692 | 75693 | 75696 |
| | 75697 | 75702 | 75703 | 75704 | 75734 | 75735 | 75736 | 75737 | 75738 | 75739 | 75740 | 75741 |
| | 75742 | 75744 | 75745 | 75746 | 75747 | 75748 | 75749 | 75750 | 75751 | 75752 | 75756 | 75757 |
| | 75758 | 75759 | 75760 | 75761 | 75763 | 75765 | 75769 | 75770 | 75771 | 75789 | 75790 | 75792 |
| | 75793 | 75794 | 75795 | 75796 | 75799 | 75800 | 75802 | 75803 | 75804 | 75805 | 75806 | 75809 |
| | 75810 | 75811 | 75813 | 75820 | 75821 | 75822 | 75831 | 75832 | 75833 | 75834 | 75845 | 75846 |
| | 75847 | 75857 | 75873 | 75874 | 75875 | 75876 | 75877 | 75878 | 75879 | 75881 | 75882 | 75883 |
| | 75884 | 75887 | 75894 | 75895 | 75896 | 75898 | 75899 | 75900 | 75915 | 75918 | 75919 | 75920 |
| | 75921 | 75922 | 75927 | 75929 | 75930 | 75931 | 75932 | 75933 | 75934 | 75935 | 75944 | 75949 |
| | 75950 | 75951 | 75953 | 75954 | 75955 | 75956 | 75959 | 75965 | 75966 | 75967 | 75968 | 75971 |
| | 75972 | 75973 | 75975 | 75976 | 75977 | 75988 | 75989 | 75993 | 75994 | 75995 | 75996 | 75997 |
| | 76008 | 76009 | 76010 | 76031 | 76032 | 76034 | 76037 | 76038 | 76039 | 76040 | 76041 | 76043 |

(22) Protein whose gene expression changes in response to lauric acid stress (SEQ ID NOs)

| | | | | | | | | | | | | |
|---|---|---|---|---|---|---|---|---|---|---|---|---|
| 4449 | 4453 | 4454 | 4465 | 4503 | 4518 | 4594 | 4617 | 4618 | 4634 | 4635 | 4665 | 4679 |
| | 4685 | 4686 | 4742 | 4744 | 4745 | 4747 | 4749 | 4750 | 4751 | 4760 | 4761 | 4763 |
| | 4765 | 4766 | 4772 | 4786 | 4850 | 4972 | 4973 | 5120 | 5396 | 5556 | 5695 | 5815 |
| | 5840 | 5842 | 5849 | 5897 | 5932 | 5938 | 5942 | 6013 | 6049 | 6082 | 6140 | 6141 |
| | 6142 | 6158 | 6208 | 6218 | 6293 | 6350 | 6468 | 6475 | 6481 | 6522 | 6579 | 10271 |
| | 10275 | 10276 | 10280 | 10281 | 10295 | 10296 | 10357 | 10369 | 10476 | 10478 | 10498 | 10514 |
| | 10516 | 10539 | 10540 | 10580 | 10614 | 10618 | 10638 | 10640 | 10656 | 10657 | 10677 | 10723 |
| | 10731 | 10745 | 10752 | 10855 | 10862 | 10863 | 10864 | 10905 | 11057 | 11091 | 11238 | 11311 |
| | 11343 | 11452 | 11496 | 11594 | 11622 | 11623 | 11682 | 11684 | 11839 | 11904 | 11987 | 12018 |
| | 12019 | 16769 | 16770 | 16771 | 16772 | 16773 | 16774 | 16775 | 16776 | 16777 | 16780 | 16782 |
| | 16783 | 16784 | 16785 | 16786 | 16787 | 16788 | 16789 | 16790 | 16791 | 16792 | 16793 | 16794 |
| | 16795 | 16799 | 16800 | 16801 | 16802 | 16803 | 16804 | 16805 | 16806 | 16807 | 16808 | 71282 |
| | 71076 | 71079 | 71080 | 71081 | 71083 | 71084 | 71089 | 71090 | 71116 | 71121 | 71157 | 71159 |
| | 71171 | 71177 | 71182 | 71184 | 71195 | 71196 | 71211 | 71218 | 71221 | 71233 | 71235 | 71243 |
| | 71244 | 71245 | 71253 | 71262 | 71265 | 71273 | 71276 | 71282 | 71287 | 71293 | 71317 | 71319 |
| | 71323 | 71325 | 71326 | 71327 | 71335 | 71360 | 71372 | 71383 | 71413 | 71440 | 71445 | 71461 |
| | 71463 | 71475 | 71476 | 71494 | 71505 | 71508 | 71520 | 71560 | 71569 | 71570 | 71591 | 71593 |
| | 71602 | 71628 | 71641 | 71650 | 71655 | 71682 | 71697 | 71698 | 75518 | 75519 | 75520 | 75521 |
| | 75522 | 75523 | 75525 | 75526 | 75530 | 75531 | 75532 | 75566 | 75571 | 75572 | 75601 | 75602 |
| | 75603 | 75604 | 75605 | 75606 | 75615 | 75617 | 75618 | 75626 | 75627 | 75636 | 75639 | 75646 |
| | 75659 | 75661 | 75671 | 75672 | 75673 | 75674 | 75675 | 75682 | 75695 | 75698 | 75706 | 75750 |
| | 75751 | 75752 | 75755 | 75756 | 75757 | 75758 | 75759 | 75760 | 75763 | 75791 | 75798 | 75839 |
| | 75852 | 75877 | 75878 | 75879 | 75937 | 75943 | 75957 | 75959 | 75996 | 75997 | 76004 | 76030 |
| | 76042 | 76043 | | | | | | | | | | |

[0120] Included in all nucleic acid sequences disclosed herein are DNA nucleic acid molecules, RNA nucleic acid molecules (e.g., thymidine replaced with uridine), nucleic acid molecules encoding orthologs of the encoded proteins, as well as DNA or RNA nucleic acid sequences or any variant thereof (a structural variant or a chemical variant (e.g., chemically modified nucleotide)) comprising a nucleic acid sequence having at least 80%, 81%, 82%, 83%, 84%, 85%, 86%, 87%, 88%, 89%, 90%, 91%, 92%, 93%, 94%, 95%, 96%, 97%, 98%, 99%, 99.5%, or more identity across their full length with the nucleic acid sequence of any SEQ ID NO presented herein, or a portion thereof. Such nucleic acid molecules can have a function of the full-length nucleic acid (e.g., for the intended function of inducing an immune response) as described further herein.

[0121] Included in all amino acid sequences disclosed herein are amino acid sequences or any variant thereof (a structural variant or a chemical variant) comprising an amino acid sequence having at least 80%, 81%, 82%, 83%, 84%, 85%, 86%, 87%, 88%, 89%, 90%, 91%, 92%, 93%, 94%, 95%, 96%, 97%, 98%, 99%, 99.5%, or more identity across their full length with the amino acid sequence of any SEQ ID NO listed in presented herein, or a portion thereof. Such polypeptides can have a function of the full-length polypeptide (e.g., for the intended function of inducing an immune response) as described further herein.

### Homology

[0122] Function-conservative variants are those in which a given amino acid residue in a protein or enzyme has been changed without altering the overall conformation and function of the polypeptide, including, but not limited to, replacement of an amino acid with one having similar properties (such as, for example, polarity, hydrogen bonding potential, acidic, basic, hydrophobic, aromatic, and the like). Amino acids other than those indicated as conserved may differ in a protein so that the percent protein or amino acid sequence similarity between any two proteins of similar function may vary and may be, for example, from 70% to 99% as determined according to an alignment scheme such as by the Cluster Method, wherein similarity is based on the MEGALIGN algorithm. A function-conservative variant also includes a polypeptide which has at least 60% amino acid identity as determined by BLAST or FASTA algorithms, preferably at least 75%, more preferably at least 85%, still preferably at least 90%, and even more preferably at least 95%, and which has the same or substantially similar properties or functions as the native or parent protein to which it is compared.

[0123] Homology, as used herein, refers to nucleotide sequence similarity between two regions of the same nucleic acid strand or between regions of two different nucleic acid strands. When a nucleotide residue position in both regions is occupied by the same nucleotide residue, then the regions are homologous at that position. A first region is homologous to a second region if at least one nucleotide residue position of each region is occupied by the same residue. Homology between two regions is expressed in terms of the proportion of nucleotide residue positions of the two regions that are occupied by the same nucleotide residue. By way of example, a region having the nucleotide sequence 5′-ATTGCC-3′ and a region having the nucleotide sequence 5′-TATGGC-3′ share 50% homology. Preferably, the first region comprises a first portion and the second region comprises a second portion, whereby, at least about 50%, and preferably at least about 75%, at least about 90%, or at least about 95% of the nucleotide residue positions of each of the portions are occupied by the same nucleotide residue. More preferably, all nucleotide residue positions of each of the portions are occupied by the same nucleotide residue.

[0124] For nucleic acids, the term “substantial homology” indicates that two nucleic acids, or designated sequences thereof, when optimally aligned and compared, are identical, with appropriate nucleotide insertions or deletions, in at least about 80% of the nucleotides, usually at least about 81%, 82%, 83%, 84%, 85%, 86%, 87%, 88%, 89%, 90%, 91%, 92%, 93%, 94%, 95%, 96%, or more of the nucleotides, and more preferably at least about 97%, 98%, 99% or more of the nucleotides. Alternatively, substantial homology exists when the segments will hybridize under selective hybridization conditions, to the complement of the strand.

[0125] The percent identity between two sequences is a function of the number of identical positions shared by the sequences (i.e., % identity=#of identical positions/total #of positions×100), taking into account the number of gaps, and the length of each gap, which need to be introduced for optimal alignment of the two sequences. The comparison of sequences and determination of percent identity between two sequences can be accomplished using a mathematical algorithm, as described in the non-limiting examples below.

[0126] The percent identity between two nucleotide sequences can be determined using the GAP program in the GCG software package (available on the world wide web at the GCG company website), using a NWSgapdna. CMP matrix and a gap weight of 40, 50, 60, 70, or 80 and a length weight of 1, 2, 3, 4, 5, or 6. The percent identity between two nucleotide or amino acid sequences can also be determined using the algorithm of E. Meyers and W. Miller (CABIOS, 4:11 17 (1989)) which has been incorporated into the ALIGN program (version 2.0), using a PAM120 weight residue table, a gap length penalty of 12 and a gap penalty of 4. In addition, the percent identity between two amino acid sequences can be determined using the Needleman and Wunsch (J. Mol. Biol. (48):444 453 (1970)) algorithm which has been incorporated into the GAP program in the GCG software package (available on the world wide web at the GCG company website), using either a Blosum 62 matrix or a PAM250 matrix, and a gap weight of 16, 14, 12, 10, 8, 6, or 4 and a length weight of 1, 2, 3, 4, 5, or 6.

[0127] The nucleic acid and protein sequences of the present invention can further be used as a “query sequence” to perform a search against public databases to, for example, identify related sequences. Such searches can be performed using the NBLAST and XBLAST programs (version 2.0) of Altschul, et al. (1990) J. Mol. Biol. 215:403 10. BLAST nucleotide searches can be performed with the NBLAST program, score=100, wordlength=12 to obtain nucleotide sequences homologous to the nucleic acid molecules of the present invention. BLAST protein searches can be performed with the XBLAST program, score=50, wordlength=3 to obtain amino acid sequences homologous to the protein molecules of the present invention. To obtain gapped alignments for comparison purposes, Gapped BLAST can be utilized as described in Altschul et al., (1997) Nucleic Acids Res. 25(17):3389 3402. When utilizing BLAST and Gapped BLAST programs, the default parameters of the respective programs (e.g., XBLAST and NBLAST) can be used (available on the world wide web at the NCBI website).

### Codon Optimization

[0128] In preferred embodiments, the nucleic acid (e.g., DNA or RNA) vaccines of the present disclosure comprise those that are codon-optimized for expression in a host cell or a subject.

[0129] Many organisms display a bias for use of particular codons to code for insertion of a particular amino acid in a growing peptide chain. Codon preference or codon bias, differences in codon usage between organisms, is afforded by degeneracy of the genetic code, and is well documented among many organisms. Codon bias often correlates with the efficiency of translation of messenger RNA (mRNA), which is in turn believed to be dependent on, inter alia, the properties of the codons being translated and the availability of particular transfer RNA (tRNA) molecules. The predominance of selected tRNAs in a cell is generally a reflection of the codons used most frequently in peptide synthesis. Accordingly, genes can be tailored for optimal gene expression in a given organism based on codon optimization.

[0130] Given the large number of gene sequences available for a wide variety of animal, plant and microbial species, it is possible to calculate the relative frequencies of codon usage. Codon usage tables are readily available, for example, at the “Codon Usage Database,” available World Wide Web at kazusa.or.jp/codon/, and these tables can be adapted in a number of ways. See Nakamura, Y., et al. “Codon usage tabulated from the international DNA sequence databases: status for the year 2000” Nucl. Acids Res. 28:292 (2000). In preferred embodiments, codon tables from the following website are used: World Wide Web at kazusa.or.jp/codon/.

[0131] Accordingly, the term “codon-optimized” encompasses any modification of the nucleic acid sequence to comprise at least one codon that is more frequently used in a given host cell or subject. The term “codon-optimized” is not intended to mean that all codons in the nucleic acid are optimized for expression in a given host cell or subject.

Polypeptide and/or Peptide Vaccines

[0132] In certain aspects, provided herein are vaccines that utilize peptides and/or polypeptides that comprise the sequence of at least one cell surface protein of at least one methanogen, or any portion thereof. Such peptides and/or polypeptides can be chemically synthesized, or produced using an expression vector (e.g., bacteria, yeast, insect cells, mammalian cells) or in vitro translated, e.g., via methods described herein and/or those known in the art.

[0133] The polypeptide and/or peptide vaccines of the present disclosure may comprise a single peptide or a single polypeptide. Alternatively, the polypeptide and/or peptide vaccines of the present disclosure may comprise a mixture of various peptides and/or polypeptides that target at least 1, 2, 3, 4, 5, 6, 7, 8, 9, 10, 11, 12, 13, 14, 15, 16, 17, 18, 19, or 20 cell surface protein of at least 1, 2, 3, 4, 5, 6, 7, 8, 9, 10, 11, 12, 13, 14, 15, 16, 17, 18, 19, or 20 methanogens.

[0134] In some embodiments, the polypeptide and/or peptide vaccine of the present disclosure comprises at least two different fragments of the same protein. In some embodiments, the polypeptide and/or peptide vaccine comprises at least two different fragments and/or two different polypeptides of different proteins. In some embodiments, the polypeptide and/or peptide vaccine comprises multiple fragments and/or polypeptides of different proteins of different methanogens. In some embodiments, the polypeptide and/or peptide vaccine comprises multiple fragments and/or polypeptides of different proteins of the same methanogen.

[0135] In some embodiments, the polypeptide(s)/peptide(s) concentration in a vaccine composition is from about 0.001 mg to about 500 mg per mL. In some embodiments, the concentration of the polypeptide(s)/peptide(s) in a vaccine composition is from about 0.01 mg to about 50 mg per mL. In some embodiments, the concentration range may be between about 0.1 mg and about 5 mg per mL.

[0136] In some embodiments, the polypeptide(s)/peptide(s) concentration in a vaccine composition is at least about 0.5, 1, 1.5, 2, 2.5, 3, 3.5, 4, 4.5, 5, 5.5, 6, 6.5, 7, 7.5, 8, 8.5, 9, 9.5, 10, 10.5, 11, 11.5, 12, 12.5, 13, 13.5, 14, 14.5, 15, 15.5, 16, 16.5, 17, 17.5, 18, 18.5, 19, 19.5, 20, 20.5, 21, 21.5, 22, 22.5, 23, 23.5, 24, 24.5, 25, 25.5, 26, 26.5, 27, 27.5, 28, 28.5, 29, 29.5, 30, 30.5, 31, 31.5, 32, 32.5, 33, 33.5, 34, 34.5, 35, 35.5, 36, 36.5, 37, 37.5, 38, 38.5, 39, 39.5, 40, 40.5, 41, 41.5, 42, 42.5, 43, 43.5, 44, 44.5, 45, 45.5, 46, 46.5, 47, 47.5, 48, 48.5, 49, 49.5, or 50 mg per mL.

[0137] The polypeptide and/or peptide vaccines of the present disclosure may be administered in a pharmaceutical composition described herein. The protein vaccines of the present disclosure may be administered with an adjuvant and/or other agents that enhance immune response. Multiple dosings of the protein vaccine is contemplated herein as described.

Production of Polypeptides and/or Peptides

[0138] Methanogen proteins can be produced by recombinant DNA techniques. For example, a nucleic acid molecule encoding the protein is cloned into an expression vector, the expression vector is introduced into a host cell (as described above), and the methanogen protein is expressed in the host cell. The methanogen protein can then be isolated from the cells by an appropriate purification scheme using standard protein purification techniques. Alternative to recombinant expression, a methanogen protein, polypeptide, or peptide can be synthesized chemically using standard peptide synthesis techniques. Accordingly, the amino acid sequences disclosed herein will enable those of skill in the art to produce polypeptides corresponding peptide sequences and sequence variants thereof. Such polypeptides can be produced in host cells by expression of polynucleotides encoding the peptide sequence, frequently as part of a larger polypeptide. A host cell for expression can be any prokaryotic or eukaryotic cell. For example, protein can be expressed in bacterial cells such as E. coli, insect cells (e.g., SF9, SF21, etc.), yeast (e.g., Saccharomyces cerevisiae, Pichia pastoris, etc.) or mammalian cells (such as Fao hepatoma cells, primary hepatocytes, Chinese hamster ovary cells (CHO), COS cells, etc.). Other suitable host cells are known to those skilled in the art. Alternatively, such peptides can be synthesized by chemical methods. Methods for expression of heterologous proteins in recombinant hosts, chemical synthesis of polypeptides, and in vitro translation are well known in the art and are described further in Maniatis et al. Molecular Cloning: A Laboratory Manual (1989), 2nd Ed., Cold Spring Harbor, N.Y.; Berger and Kimmel, Methods in Enzymology, Volume 152, Guide to Molecular Cloning Techniques (1987), Academic Press, Inc., San Diego, Calif.; Merrifield, J. (1969) J. Am. Chem. Soc. 91:501; Chaiken I. M. (1981) CRC Crit. Rev. Biochem. 11: 255; Kaiser et al. (1989) Science 243:187; Merrifield, B. (1986) Science 232:342; Kent, S. B. H. (1988) Annu. Rev. Biochem. 57:957; and Offord, R. E. (1980) Semisynthetic Proteins, Wiley Publishing, which are incorporated herein by reference).

[0139] Peptides can be produced, typically by direct chemical synthesis. Peptides can be produced as modified peptides, with nonpeptide moieties attached by covalent linkage to the N-terminus and/or C-terminus. In certain preferred embodiments, either the carboxy-terminus or the amino-terminus, or both, are chemically modified. The most common modifications of the terminal amino and carboxyl groups are acetylation and amidation, respectively. Amino-terminal modifications such as acylation (e.g., acetylation) or alkylation (e.g., methylation) and carboxy-terminal-modifications such as amidation, as well as other terminal modifications, including cyclization, can be incorporated into various embodiments of the invention. Certain amino-terminal and/or carboxy-terminal modifications and/or peptide extensions to the core sequence can provide advantageous physical, chemical, biochemical, and pharmacological properties, such as: enhanced stability, increased potency and/or efficacy, resistance to serum proteases, desirable pharmacokinetic properties, and others.

### Pharmaceutical Composition

[0140] Vaccines, antibodies, milk, animal feed, agents (e.g., an agent that reduces methane production in a subject, a probiotic bacterial strain, etc.), or other compositions of the present disclosure may be in a pharmaceutical composition, and thus further comprise at least one excipient and/or carrier described herein or those known in the art.

[0141] The vaccine, antibody, milk, animal feed, or agent of the present disclosure (e.g., polypeptide and/or peptide vaccines) may comprise at least one excipient that (1) increases stability; (2) permits the sustained or delayed release (e.g., from a depot formulation); and/or (3) alters the biodistribution (e.g., target to specific tissues or cell types). In addition to traditional excipients such as any and all solvents, dispersion media, diluents, or other liquid vehicles, dispersion or suspension aids, surface active agents, isotonic agents, thickening or emulsifying agents, preservatives, excipients of the present disclosure include, without limitation, lipidoids, liposomes, lipid nanoparticles, polymers, lipoplexes, core-shell nanoparticles, peptides, proteins, hyaluronidase, nanoparticle mimics, and combinations thereof.

[0142] Formulations of the pharmaceutical compositions described herein may be prepared by any method known or hereafter developed in the art of pharmacology. In general, such preparatory methods include the step of associating the active ingredient with an excipient and/or one or more other accessory ingredients.

[0143] A pharmaceutical composition in accordance with the present disclosure may be prepared, packaged, and/or sold in bulk, as a single unit dose, and/or as a plurality of single unit doses. As used herein, a “unit dose” refers to a discrete amount of the pharmaceutical composition comprising a predetermined amount of the active ingredient (e.g., the vaccine). The amount of the active ingredient may be generally equal to the dosage of the active ingredient which would be administered to a subject and/or a convenient fraction of such a dosage such as, for example, one-half or one-third of such a dosage.

[0144] Relative amounts of the active ingredient, the pharmaceutically acceptable excipient, and/or any additional ingredients in a pharmaceutical composition in accordance with the present disclosure may vary, depending upon the identity, size, and/or condition of the subject being treated and further depending upon the route by which the composition is to be administered. For example, the composition may comprise between 0.01% and 99% (w/w) of the active ingredient. By way of example, the composition may comprise between 0.01% and 100%, e.g., between 0.05 and 50%, between 0.1-30%, between 5-80%, at least 80% (w/w) active ingredient.

[0145] Pharmaceutical compositions may comprise a pharmaceutically acceptable excipient, which, as used herein, includes, but is not limited to, any and all solvents, dispersion media, diluents, or other liquid vehicles, dispersion or suspension aids, surface active agents, isotonic agents, thickening or emulsifying agents, preservatives, and the like, as suited to the particular dosage form desired. Various excipients for formulating pharmaceutical compositions and techniques for preparing the composition are known in the art (see Remington: The Science and Practice of Pharmacy, 21^{st} Edition, A. R. Gennaro, Lippincott, Williams & Wilkins, Baltimore, MD, 2006; incorporated herein by reference in its entirety). The use of a conventional excipient medium may be contemplated within the scope of the present disclosure, except insofar as any conventional excipient medium may be incompatible with a substance or its derivatives, such as by producing any undesirable biological effect or otherwise interacting in a deleterious manner with any other component(s) of the pharmaceutical composition.

[0146] Pharmaceutically acceptable excipients used in the manufacture of pharmaceutical compositions include, but are not limited to, inert diluents, surface active agents and/or emulsifiers, preservatives, buffering agents, lubricating agents, and/or oils. Such excipients may optionally be included in the pharmaceutical formulations of the invention.

### Controlled/Sustained Release

[0147] In some embodiments, the compositions or agents of the present invention can be formulated for controlled release and/or targeted delivery. As used herein, “controlled release” refers to a pharmaceutical composition or compound release profile that conforms to a particular pattern of release to effect a specific outcome.

[0148] In some embodiments, the compositions or agents may be encapsulated into a delivery agent described herein and/or known in the art for controlled release and/or targeted delivery. As used herein, the term “encapsulate” means to enclose, surround or encase. As it relates to the formulation of the compounds of the invention, encapsulation may be substantial, complete or partial. The term “substantially encapsulated” means that at least greater than 50, 60, 70, 80, 85, 90, 95, 96, 97, 98, 99, 99.9, 99.9 or greater than 99.999% of the pharmaceutical composition or compound of the invention may be enclosed, surrounded or encased within the delivery agent. “Partially encapsulation” means that less than 10, 10, 20, 30, 40 50 or less of the pharmaceutical composition or compound of the invention may be enclosed, surrounded or encased within the delivery agent. Advantageously, encapsulation may be determined by measuring the escape or the activity of the pharmaceutical composition or compound of the invention using fluorescence and/or electron micrograph. For example, at least 1, 5, 10, 20, 30, 40, 50, 60, 70, 80, 85, 90, 95, 96, 97, 98, 99, 99.9, 99.99 or greater than 99.99% of the pharmaceutical composition or compound of the invention are encapsulated in the delivery agent.

[0149] In some embodiments, the controlled release formulation may include, but is not limited to, tri-block co-polymers. As a non-limiting example, the formulation may include two different types of tri-block co-polymers (International Pub. No. WO2012131104 and WO2012131106; the contents of each of which is herein incorporated by reference in its entirety).

### Excipients

[0150] Vaccines, antibodies, milk, animal feed, agents (e.g., an agent that reduces methane production in a subject, a probiotic bacterial strain, etc.), or other compositions of the present disclosure may comprise at least one excipient and/or carrier described herein or those known in the art (e.g., a pharmaceutically acceptable excipient and/or carrier).

[0151] A pharmaceutically acceptable excipient, which, as used herein, includes, but is not limited to, any and all solvents, dispersion media, diluents, or other liquid vehicles, dispersion or suspension aids, surface active agents, isotonic agents, thickening or emulsifying agents, preservatives, solid binders, lubricants, flavoring agents, stabilizers, antioxidants, osmolality adjusting agents, pH adjusting agents and the like, as suited to the particular dosage form desired.

[0152] In some embodiments, one or more excipients or accessory ingredients may make up greater than 50% of the total mass or volume of a pharmaceutical composition. In some embodiments, the one or more excipients or accessory ingredients may make up at least about 50%, 60%, 70%, 80%, 90%, or more of a pharmaceutical convention.

[0153] Various excipients for formulating pharmaceutical compositions and techniques for preparing the composition are known in the art (see Remington: The Science and Practice of Pharmacy, 21^{st} Edition, A. R. Gennaro (Lippincott, Williams & Wilkins, Baltimore, MD, 2006; incorporated herein by reference in its entirety).

[0154] In some embodiments, a pharmaceutically acceptable excipient may be at least 95%, at least 96%, at least 97%, at least 98%, at least 99%, or 100% pure. In some embodiments, an excipient is approved for use for humans and for veterinary use. In some embodiments, an excipient may be approved by United States Food and Drug Administration. In some embodiments, an excipient may be of pharmaceutical grade. In some embodiments, an excipient may meet the standards of the United States Pharmacopoeia (USP), the European Pharmacopoeia (EP), the British Pharmacopoeia, and/or the International Pharmacopoeia.

[0155] Pharmaceutically acceptable excipients used in the manufacture of pharmaceutical compositions include, but are not limited to, inert diluents, dispersing and/or granulating agents, surface active agents and/or emulsifiers, disintegrating agents, binding agents, preservatives, buffering agents, lubricating agents, and/or oils. Such excipients may optionally be included in pharmaceutical compositions. The composition may also include excipients such as cocoa butter and suppository waxes, coloring agents, coating agents, sweetening, flavoring, and/or perfuming agents.

[0156] Exemplary diluents include, but are not limited to, calcium carbonate, sodium carbonate, calcium phosphate, dicalcium phosphate, calcium sulfate, calcium hydrogen phosphate, sodium phosphate lactose, sucrose, cellulose, microcrystalline cellulose, kaolin, mannitol, sorbitol, inositol, sodium chloride, dry starch, cornstarch, powdered sugar, etc., and/or combinations thereof.

[0157] Exemplary granulating and/or dispersing agents include, but are not limited to, potato starch, corn starch, tapioca starch, sodium starch glycolate, clays, alginic acid, guar gum, citrus pulp, agar, bentonite, cellulose and wood products, natural sponge, cation-exchange resins, calcium carbonate, silicates, sodium carbonate, cross-linked poly(vinyl-pyrrolidone) (crospovidone), sodium carboxymethyl starch (sodium starch glycolate), carboxymethyl cellulose, cross-linked sodium carboxymethyl cellulose (croscarmellose), methylcellulose, pregelatinized starch (starch 1500), microcrystalline starch, water insoluble starch, calcium carboxymethyl cellulose, magnesium aluminum silicate (VEEGUM®), sodium lauryl sulfate, quaternary ammonium compounds, etc., and/or combinations thereof.

[0158] Exemplary surface active agents and/or emulsifiers include, but are not limited to, natural emulsifiers (e.g. acacia, agar, alginic acid, sodium alginate, tragacanth, chondrux, cholesterol, xanthan, pectin, gelatin, egg yolk, casein, wool fat, cholesterol, wax, and lecithin), colloidal clays (e.g. bentonite [aluminum silicate] and VEEGUM® [magnesium aluminum silicate]), long chain amino acid derivatives, high molecular weight alcohols (e.g. stearyl alcohol, cetyl alcohol, oleyl alcohol, triacetin monostearate, ethylene glycol distearate, glyceryl monostearate, and propylene glycol monostearate, polyvinyl alcohol), carbomers (e.g. carboxy polymethylene, polyacrylic acid, acrylic acid polymer, and carboxyvinyl polymer), carrageenan, cellulosic derivatives (e.g. carboxymethylcellulose sodium, powdered cellulose, hydroxymethyl cellulose, hydroxypropyl cellulose, hydroxypropyl methylcellulose, methylcellulose), sorbitan fatty acid esters (e.g. polyoxyethylene sorbitan monolaurate [TWEEN®20], polyoxyethylene sorbitan [TWEEN®60], polyoxyethylene sorbitan monooleate [TWEEN®80], sorbitan monopalmitate [SPAN®40], sorbitan monostearate [SPAN®60], sorbitan tristearate [SPAN®65], glyceryl monooleate, sorbitan monooleate [SPAN®80]), polyoxyethylene esters (e.g. polyoxyethylene monostearate [MYRJ®45], polyoxyethylene hydrogenated castor oil, polyethoxylated castor oil, polyoxymethylene stearate, and SOLUTOL®), sucrose fatty acid esters, polyethylene glycol fatty acid esters (e.g. CREMOPHOR®), polyoxyethylene ethers, (e.g. polyoxyethylene lauryl ether [BRU®30]), poly(vinyl-pyrrolidone), diethylene glycol monolaurate, triethanolamine oleate, sodium oleate, potassium oleate, ethyl oleate, oleic acid, ethyl laurate, sodium lauryl sulfate, PLUORINC®F 68, POLOXAMER®188, cetrimonium bromide, cetylpyridinium chloride, benzalkonium chloride, docusate sodium, etc. and/or combinations thereof.

[0159] Exemplary binding agents include, but are not limited to, starch (e.g. cornstarch and starch paste); gelatin; sugars (e.g. sucrose, glucose, dextrose, dextrin, molasses, lactose, lactitol, mannitol); amino acids (e.g., glycine); natural and synthetic gums (e.g. acacia, sodium alginate, extract of Irish moss, panwar gum, ghatti gum, mucilage of isapol husks, carboxymethylcellulose, methylcellulose, ethylcellulose, hydroxyethylcellulose, hydroxypropyl cellulose, hydroxypropyl methylcellulose, microcrystalline cellulose, cellulose acetate, poly(vinyl-pyrrolidone), magnesium aluminum silicate (VEEGUM®), and larch arabogalactan); alginates; polyethylene oxide; polyethylene glycol; inorganic calcium salts; silicic acid; polymethacrylates; waxes; water; alcohol; etc.; and/or combinations thereof.

[0160] Exemplary preservatives may include, but are not limited to, antioxidants, chelating agents, antimicrobial preservatives, antifungal preservatives, alcohol preservatives, acidic preservatives, and/or other preservatives. Oxidation is a potential degradation pathway for many compounds. In order to prevent oxidation, antioxidants can be added to the formulation. Exemplary antioxidants include, but are not limited to, alpha tocopherol, ascorbic acid, acorbyl palmitate, benzyl alcohol, butylated hydroxyanisole, EDTA, m-cresol, methionine, butylated hydroxytoluene, monothioglycerol, potassium metabisulfite, propionic acid, propyl gallate, sodium ascorbate, sodium bisulfite, sodium metabisulfite, thioglycerol and/or sodium sulfite. Exemplary chelating agents include ethylenediaminetetraacetic acid (EDTA), citric acid monohydrate, disodium edetate, dipotassium edetate, edetic acid, fumaric acid, malic acid, phosphoric acid, sodium edetate, tartaric acid, and/or trisodium edetate. Exemplary antimicrobial preservatives include, but are not limited to, benzalkonium chloride, benzethonium chloride, benzyl alcohol, bronopol, cetrimide, cetylpyridinium chloride, chlorhexidine, chlorobutanol, chlorocresol, chloroxylenol, cresol, ethyl alcohol, glycerin, hexetidine, imidurea, phenol, phenoxyethanol, phenylethyl alcohol, phenylmercuric nitrate, propylene glycol, and/or thimerosal. Exemplary antifungal preservatives include, but are not limited to, butyl paraben, methyl paraben, ethyl paraben, propyl paraben, benzoic acid, hydroxybenzoic acid, potassium benzoate, potassium sorbate, sodium benzoate, sodium propionate, and/or sorbic acid. Exemplary alcohol preservatives include, but are not limited to, ethanol, polyethylene glycol, phenol, phenolic compounds, bisphenol, chlorobutanol, hydroxybenzoate, and/or phenylethyl alcohol. Exemplary acidic preservatives include, but are not limited to, vitamin A, vitamin C, vitamin E, beta-carotene, citric acid, acetic acid, dehydroacetic acid, ascorbic acid, sorbic acid, and/or phytic acid. Other preservatives include, but are not limited to, tocopherol, tocopherol acetate, deteroxime mesylate, cetrimide, butylated hydroxyanisol (BHA), butylated hydroxytoluened (BHT), ethylenediamine, sodium lauryl sulfate (SLS), sodium lauryl ether sulfate (SLES), sodium bisulfite, sodium metabisulfite, potassium sulfite, potassium metabisulfite, GLYDANT PLUS®, PHENONIP®, methylparaben, GERMALL®115, GERMABEN®, NEOLONE™, KATHON™, and/or EUXYL®.

[0161] In some embodiments, the pH of the vaccine solutions are maintained between pH 5 and pH 8 to improve stability. Exemplary buffers to control pH may include, but are not limited to sodium phosphate, sodium citrate, sodium succinate, histidine (or histidine-HCl), sodium carbonate, and/or sodium malate. In another embodiment, the exemplary buffers listed above may be used with additional monovalent counterions (including, but not limited to potassium). Divalent cations may also be used as buffer counterions.

[0162] Exemplary buffering agents may also include, but are not limited to, citrate buffer solutions, acetate buffer solutions, phosphate buffer solutions, ammonium chloride, calcium carbonate, calcium chloride, calcium citrate, calcium glubionate, calcium gluceptate, calcium gluconate, D-gluconic acid, calcium glycerophosphate, calcium lactate, propanoic acid, calcium levulinate, pentanoic acid, dibasic calcium phosphate, phosphoric acid, tribasic calcium phosphate, calcium hydroxide phosphate, potassium acetate, potassium chloride, potassium gluconate, potassium mixtures, dibasic potassium phosphate, monobasic potassium phosphate, potassium phosphate mixtures, sodium acetate, sodium bicarbonate, sodium chloride, sodium citrate, sodium lactate, dibasic sodium phosphate, monobasic sodium phosphate, sodium phosphate mixtures, tromethamine, magnesium hydroxide, aluminum hydroxide, alginic acid, pyrogen-free water, isotonic saline, Ringer's solution, ethyl alcohol, etc., and/or combinations thereof.

[0163] Exemplary lubricating agents include, but are not limited to, magnesium stearate, calcium stearate, stearic acid, silica, talc, malt, glyceryl behanate, hydrogenated vegetable oils, polyethylene glycol, sodium benzoate, sodium acetate, sodium chloride, leucine, magnesium lauryl sulfate, sodium lauryl sulfate, etc., and/or combinations thereof.

[0164] Exemplary oils include, but are not limited to, almond, apricot kernel, avocado, babassu, bergamot, black current seed, borage, cade, camomile, canola, caraway, carnauba, castor, cinnamon, cocoa butter, coconut, cod liver, coffee, corn, cotton seed, emu, eucalyptus, evening primrose, fish, flaxseed, geraniol, gourd, grape seed, hazel nut, hyssop, isopropyl myristate, jojoba, kukui nut, lavandin, lavender, lemon, litsea cubeba, macademia nut, mallow, mango seed, meadowfoam seed, mink, nutmeg, olive, orange, orange roughy, palm, palm kernel, peach kernel, peanut, poppy seed, pumpkin seed, rapeseed, rice bran, rosemary, safflower, sandalwood, sasquana, savoury, sea buckthorn, sesame, shea butter, silicone, soybean, sunflower, tea tree, thistle, tsubaki, vetiver, walnut, and wheat germ oils. Exemplary oils include, but are not limited to, butyl stearate, caprylic triglyceride, capric triglyceride, cyclomethicone, diethyl sebacate, dimethicone 360, isopropyl myristate, mineral oil, octyldodecanol, oleyl alcohol, silicone oil, and/or combinations thereof.

[0165] Excipients such as cocoa butter and suppository waxes, coloring agents, coating agents, sweetening, flavoring, and/or perfuming agents can be present in the composition.

[0166] Exemplary additives include physiologically biocompatible buffers (e.g., trimethylamine hydrochloride), addition of chelants (such as, for example, DTPA or DTPA-bisamide) or calcium chelate complexes (as for example calcium DTPA, CaNaDTPA-bisamide), or, optionally, additions of calcium or sodium salts (for example, calcium chloride, calcium ascorbate, calcium gluconate or calcium lactate). In addition, antioxidants and suspending agents can be used.

### Cryoprotectants

[0167] In some embodiments, the lipid nanoparticles and/or pharmaceutical compositions of the disclosure are refrigerated or frozen for storage and/or shipment (e.g., being stored at a temperature of 4° C. or lower, such as a temperature between about −150° C. and about 0° C. or between about −80° C. and about −20° C. (e.g., about −5° C., −10° C., −15° C., −20° C., −25° C., −30° C., −40° C., −50° C., −60° C., −70° C., −80° C., −90° C., −130° C. or −150° C.). For example, the pharmaceutical composition comprising one or more lipid nanoparticles is a solution or solid (e.g., via lyophilization) that is refrigerated for storage and/or shipment at, for example, about −20° C., −30° C., −40° C., −50° C., −60° C., −70° C., or −80° C. In certain embodiments, the disclosure also relates to a method of increasing stability of the lipid nanoparticles and by storing the lipid nanoparticles and/or pharmaceutical compositions thereof at a temperature of 4° C. or lower, such as a temperature between about −150° C. and about 0° C. or between about −80° C. and about −20° C., e.g., about −5° C., −10° C., −15° C., −20° C., −25° C., −30° C., −40° C., −50° C., −60° C., −70° C., −80° C., −90° C., −130° C. or −150° C.).

[0168] In some embodiments, vaccine formulations may comprise cryoprotectants. As used herein, there term “cryoprotectant” refers to one or more agent that when combined with a given substance, helps to reduce or eliminate damage to that substance that occurs upon freezing. In some embodiments, cryoprotectants are combined with vaccines in order to stabilize them during freezing. Frozen storage of vaccines between −20° C. and −80° C. may be advantageous for long term (e.g., 36 months) storage. In some embodiments, cryoprotectants are included in vaccine formulations through freeze/thaw cycles and under frozen storage conditions. Cryoprotectants of the present invention may include, but are not limited to sucrose, trehalose, lactose, glycerol, dextrose, raffinose and/or mannitol. Trehalose is listed by the Food and Drug Administration as being generally regarded as safe (GRAS) and is commonly used in commercial pharmaceutical formulations.

### Inactive Ingredients

[0169] In some embodiments, vaccine formulations may comprise at least one excipient which is an inactive ingredient. As used herein, the term “inactive ingredient” refers to one or more inactive agents included in formulations. Exemplary non-exhaustive lists of inactive ingredients and the routes of administration the inactive ingredients may be formulated in are described in Tables 7-8.

TABLE 7
Exemplary inactive ingredients

| Inactive Ingredient | Route of Administration |
|---|---|
| Alpha-Terpineol | Topical |
| Alpha-Tocopherol | Intravenous; Topical |
| Alpha-Tocopherol Acetate, DI- | Topical |
| Alpha-Tocopherol, DI- | Intravenous; Topical |
| 1,2,6-Hexanetriol | Topical |
| 1,2-Dimyristoyl-Sn-Glycero-3-(Phospho-S- | Intravenous; Infusion (IV) |
| (1-Glycerol)) | |
| 1,2-Dimyristoyl-Sn-Glycero-3- | Intravenous; Infusion (IV) |
| Phosphocholine | |
| 1,2-Dioleoyl-Sn-Glycero-3-Phosphocholine | Epidural |
| 1,2-Dipalmitoyl-Sn-Glycero-3-(Phospho- | Epidural |
| Rac-(1-Glycerol)) | |
| 1,2-Distearoyl-Sn-Glycero-3-(Phospho-Rac- | Intravenous |
| (1-Glycerol)) | |
| 1,2-Distearoyl-Sn-Glycero-3-Phosphocholine | Intravenous |
| 1-O-Tolylbiguanide | Topical |

TABLE 8
Exemplary inactive ingredients

| Route of Administration | Inactive Ingredient |
|---|---|
| Intrathecal (AN, CNBLK) | Acetone Sodium Bisulfite; Citric Acid; Hydrochloric Acid; Sodium |
| | Chloride; Sodium Hydroxide; Sodium Metabisulfite |
| Infiltration (AN) | Acetic Acid; Acetone Sodium Bisulfite; Ascorbic Acid; Benzyl |
| | Alcohol; Calcium Chloride; Carbon Dioxide; Chlorobutanol; Citric |
| | Acid; Citric Acid Monohydrate; Edetate Calcium Disodium; Edetate |
| | Disodium; Hydrochloric Acid; Hydrochloric Acid, Diluted; Lactic Acid; |
| | Methylparaben; Monothioglycerol; Nitrogen; Potassium Chloride; |
| | Potassium Metabisulfite; Potassium Phosphate, Monobasic; |
| | Propylparaben; Sodium Bisulfite; Sodium Carbonate; Sodium Chlorate; |
| | Sodium Chloride; Sodium Citrate; Sodium Hydroxide; Sodium Lactate; |
| | Sodium Metabisulfite; Sodium Phosphate, Dibasic, Heptahydrate |
| Sympathetic NBLK (AN) | Hydrochloric Acid; Sodium Chloride; Sodium Hydroxide |
| Auricular (Otic) | Acetic Acid; Aluminum Acetate; Aluminum Sulfate Anhydrous; |
| | Benzalkonium Chloride; Benzethonium Chloride; Benzyl Alcohol; |
| | Boric Acid; Calcium Carbonate; Cetyl Alcohol; Chlorobutanol; |
| | Chloroxylenol; Citric Acid; Creatinine; Cupric Sulfate; Cupric Sulfate |
| | Anhydrous; Edetate Disodium; Edetic Acid; Glycerin; Glyceryl |
| | Stearate; Hydrochloric Acid; Hydrocortisone; Hydroxyethyl Cellulose; |
| | Isopropyl Myristate; Lactic Acid; Lecithin, Hydrogenated; |
| | Methylparaben; Mineral Oil; Petrolatum; Petrolatum, White; |
| | Phenylethyl Alcohol; Polyoxyl 40 Stearate; Polyoxyl Stearate; |
| | Polysorbate 20; Polysorbate 80; Polyvinyl Alcohol; Potassium |
| | Metabisulfite; Potassium Phosphate, Monobasic; Povidone K901; |
| | Povidones; Propylene Glycol; Propylene Glycol Diacetate; |
| | Propylparaben; Sodium Acetate; Sodium Bisulfite; Sodium Borate; |
| | Sodium Chloride; Sodium Citrate; Sodium Hydroxide; Sodium |
| | Phosphate, Dibasic, Anhydrous; Sodium Phosphate, Dibasic, |
| | I Teptahydrate; Sodium Phosphate, Monobasic, Anhydrous; Sodium |

In Table 8, “AN” means anesthetic, “CNBLK” means cervical nerve block, “NBLK” means nerve block, and “IV” means intravenous.

### Naked Delivery

[0170] The compositions or agents of the present invention may be delivered to a subject naked or in saline. The naked compositions or agents may be administered to a subject using routes of administration known in the art and described herein.

### Administration

[0171] Vaccines, antibodies, milk, animal feed, agents (e.g., an agent that reduces methane production in a subject, a probiotic bacterial strain, a small molecule inhibitor, etc.), or other compositions of the present disclosure (e.g., those reducing methane production in a subject) may be administered to a subject by any route which results in a therapeutically effective outcome. These include, but are not limited to, enteral (into the intestine), gastroenteral, epidural (into the dura matter), oral (by way of the mouth), transdermal, peridural, intracerebral (into the cerebrum), intracerebroventricular (into the cerebral ventricles), epicutaneous (application onto the skin), intradermal, (into the skin itself), subcutaneous (under the skin), nasal administration (through the nose), intravenous (into a vein), intravenous bolus, intravenous drip, intraarterial (into an artery), intramuscular (into a muscle), intracardiac (into the heart), intraosseous infusion (into the bone marrow), intrathecal (into the spinal canal), intraperitoneal, (infusion or injection into the peritoneum), intravesical infusion, intravitreal, (through the eye), intracavernous injection (into a pathologic cavity) intracavitary (into the base of the penis), intravaginal administration, intrauterine, extra-amniotic administration, transdermal (diffusion through the intact skin for systemic distribution), transmucosal (diffusion through a mucous membrane), transvaginal, insufflation (snorting), sublingual, sublabial, enema, eye drops (onto the conjunctiva), in ear drops, auricular (in or by way of the ear), buccal (directed toward the cheek), conjunctival, cutaneous, dental (to a tooth or teeth), electro-osmosis, endocervical, endosinusial, endotracheal, extracorporeal, hemodialysis, infiltration, interstitial, intra-abdominal, intra-amniotic, intra-articular, intrabiliary, intrabronchial, intrabursal, intracartilaginous (within a cartilage), intracaudal (within the cauda equine), intracisternal (within the cisterna magna cerebellomedularis), intracorneal (within the cornea), dental intracornal, intracoronary (within the coronary arteries), intracorporus cavernosum (within the dilatable spaces of the corporus cavernosa of the penis), intradiscal (within a disc), intraductal (within a duct of a gland), intraduodenal (within the duodenum), intradural (within or beneath the dura), intraepidermal (to the epidermis), intraesophageal (to the esophagus), intragastric (within the stomach), intragingival (within the gingivae), intraileal (within the distal portion of the small intestine), intralesional (within or introduced directly to a localized lesion), intraluminal (within a lumen of a tube), intralymphatic (within the lymph), intramedullary (within the marrow cavity of a bone), intrameningeal (within the meninges), intraocular (within the eye), intraovarian (within the ovary), intrapericardial (within the pericardium), intrapleural (within the pleura), intraprostatic (within the prostate gland), intrapulmonary (within the lungs or its bronchi), intrasinal (within the nasal or periorbital sinuses), intraspinal (within the vertebral column), intrasynovial (within the synovial cavity of a joint), intratendinous (within a tendon), intratesticular (within the testicle), intrathecal (within the cerebrospinal fluid at any level of the cerebrospinal axis), intrathoracic (within the thorax), intratubular (within the tubules of an organ), intratumor (within a tumor), intratympanic (within the auras media), intravascular (within a vessel or vessels), intraventricular (within a ventricle), iontophoresis (by means of electric current where ions of soluble salts migrate into the tissues of the body), irrigation (to bathe or flush open wounds or body cavities), laryngeal (directly upon the larynx), nasogastric (through the nose and into the stomach), occlusive dressing technique, ophthalmic (to the external eye), oropharyngeal (directly to the mouth and pharynx), parenteral, percutaneous, periarticular, peridural, perineural, periodontal, rectal, respiratory (within the respiratory tract by inhaling orally or nasally for local or systemic effect), retrobulbar (behind the pons or behind the eyeball), intramyocardial (entering the myocardium), soft tissue, subarachnoid, subconjunctival, submucosal, transplacental (through or across the placenta), transtracheal (through the wall of the trachea), transtympanic (across or through the tympanic cavity), ureteral (to the ureter), urethral (to the urethra), vaginal, caudal block, diagnostic, nerve block, biliary perfusion, cardiac perfusion, photopheresis or spinal. In specific embodiments, compositions may be administered in a way which allows them cross the blood-brain barrier, vascular barrier, or other epithelial barrier.

[0172] Non-limiting routes of administration for the compositions or agents of the present disclosure are described below.

### Parenteral and Injectable Administration

[0173] Liquid dosage forms for parenteral administration include, but are not limited to, pharmaceutically acceptable emulsions, microemulsions, solutions, suspensions, syrups, and/or elixirs. In addition to active ingredients, liquid dosage forms may comprise inert diluents commonly used in the art such as, for example, water or other solvents, solubilizing agents and emulsifiers such as ethyl alcohol, isopropyl alcohol, ethyl carbonate, ethyl acetate, benzyl alcohol, benzyl benzoate, propylene glycol, 1,3-butylene glycol, dimethylformamide, oils (in particular, cottonseed, groundnut, corn, germ, olive, castor, and sesame oils), glycerol, tetrahydrofurfuryl alcohol, polyethylene glycols and fatty acid esters of sorbitan, and mixtures thereof. Besides inert diluents, oral compositions can include adjuvants such as wetting agents, emulsifying and suspending agents, sweetening, flavoring, and/or perfuming agents. In certain embodiments for parenteral administration, compositions are mixed with solubilizing agents such as CREMOPHOR®, alcohols, oils, modified oils, glycols, polysorbates, cyclodextrins, polymers, and/or combinations thereof.

[0174] A pharmaceutical composition for parenteral administration may comprise at least one inactive ingredient. A non-exhaustive list of inactive ingredients for use in pharmaceutical compositions for parenteral administration includes hydrochloric acid, mannitol, nitrogen, sodium acetate, sodium chloride and sodium hydroxide. Injectable preparations, for example, sterile injectable aqueous or oleaginous suspensions may be formulated according to the known art using suitable dispersing agents, wetting agents, and/or suspending agents. Sterile injectable preparations may be sterile injectable solutions, suspensions, and/or emulsions in nontoxic parenterally acceptable diluents and/or solvents, for example, as a solution in 1,3-butanediol. Among the acceptable vehicles and solvents that may be employed are water, Ringer's solution, U.S. P., and isotonic sodium chloride solution. Sterile, fixed oils are conventionally employed as a solvent or suspending medium. For this purpose any bland fixed oil can be employed including synthetic mono- or diglycerides. Fatty acids such as oleic acid can be used in the preparation of injectables. The sterile formulation may also comprise adjuvants such as local anesthetics, preservatives and buffering agents.

[0175] Injectable formulations can be sterilized, for example, by filtration through a bacterial-retaining filter, and/or by incorporating sterilizing agents in the form of sterile solid compositions which can be dissolved or dispersed in sterile water or other sterile injectable medium prior to use.

[0176] Injectable formulations may be for direct injection into a region of a tissue, organ and/or subject. As a non-limiting example, a tissue, organ and/or subject may be directly injected a formulation by intramyocardial injection into the ischemic region. (See e.g., Zangi et al. Nature Biotechnology 2013; the contents of which are herein incorporated by reference in its entirety).

[0177] In order to prolong the effect of an active ingredient, it is often desirable to slow the absorption of the active ingredient from subcutaneous or intramuscular injection. This may be accomplished by the use of a liquid suspension of crystalline or amorphous material with poor water solubility. The rate of absorption of the drug then depends upon its rate of dissolution which, in turn, may depend upon crystal size and crystalline form. Alternatively, delayed absorption of a parenterally administered drug form is accomplished by dissolving or suspending the drug in an oil vehicle. Injectable depot forms are made by forming microencapsule matrices of the drug in biodegradable polymers such as polylactide-polyglycolide. Depending upon the ratio of drug to polymer and the nature of the particular polymer employed, the rate of drug release can be controlled. Examples of other biodegradable polymers include poly(orthoesters) and poly(anhydrides). Depot injectable formulations are prepared by entrapping the drug in liposomes or microemulsions which are compatible with body tissues.

### Rectal and Vaginal Administration

[0178] Compositions for rectal or vaginal (e.g., transvaginal) administration are typically suppositories which can be prepared by mixing compositions with suitable non-irritating excipients such as cocoa butter, polyethylene glycol or a suppository wax which are solid at ambient temperature but liquid at body temperature and therefore melt in the rectum or vaginal cavity and release the active ingredient.

[0179] As a non-limiting example, the formulations for rectal and/or vaginal administration may be prepared by mixing the drug with a suitable non-irritating excipient that is solid at ordinary temperatures but liquid at the rectal temperature and will therefore melt in the rectum and/or vagina to release the drug. Such materials include cocoa butter and polyethylene glycols.

[0180] A pharmaceutical composition for rectal administration may comprise at least one inactive ingredient. A non-exhaustive list of inactive ingredients for use in pharmaceutical compositions for rectal administration includes alcohol, alcohol, dehydrated, aluminum subacetate, anhydrous citric acid, aniseed oil, ascorbic acid, ascorbyl palmitate, balsam peru, benzoic acid, benzyl alcohol, bismuth subgallate, butylated hydroxyanisole, butylated hydroxytoluene, butylparaben, caramel, carbomer 934, carbomer 934p, carboxypolymethylene, cerasynt-se, cetyl alcohol, cocoa butter, coconut oil, hydrogenated, coconut oil/palm kernel oil glycerides, hydrogenated, cola nitida seed extract, d&c yellow no. 10, dichlorodifluoromethane, dichlorotetrafluoroethane, dimethyldioctadecylammonium bentonite, edetate calcium disodium, edetate disodium, edetic acid, epilactose, ethylenediamine, fat, edible, fat, hard, fd&c blue no. 1, fd&c green no. 3, fd&c yellow no. 6, flavor fig 827118, flavor raspberry pfc-8407, fructose, galactose, glycerin, glyceryl palmitate, glyceryl stearate, glyceryl stearate/peg stearate, glyceryl stearate/peg-40 stearate, glycine, hydrocarbon, hydrochloric acid, hydrogenated palm oil, hypromelloses, lactose, lanolin, lecithin, light mineral oil, magnesium aluminum silicate, magnesium aluminum silicate hydrate, methylparaben, nitrogen, palm kernel oil, paraffin, petrolatum, white, polyethylene glycol 1000, polyethylene glycol 1540, polyethylene glycol 3350, polyethylene glycol 400, polyethylene glycol 4000, polyethylene glycol 6000, polyethylene glycol 8000, polysorbate 60, polysorbate 80, potassium acetate, potassium metabisulfite, propylene glycol, propylparaben, saccharin sodium, saccharin sodium anhydrous, silicon dioxide, colloidal, simethicone, sodium benzoate, sodium carbonate, sodium chloride, sodium citrate, sodium hydroxide, sodium metabisulfite, sorbitan monooleate, sorbitan sesquioleate, sorbitol, sorbitol solution, starch, steareth-10, steareth-40, sucrose, tagatose, d-, tartaric acid, dl-, trolamine, tromethamine, vegetable oil glyceride, hydrogenated, vegetable oil, hydrogenated, wax, emulsifying, white wax, xanthan gum and zinc oxide.

[0181] A pharmaceutical composition for vaginal administration may comprise at least one inactive ingredient. Any or none of the inactive ingredients used may have been approved by the US Food and Drug Administration (FDA). A non-exhaustive list of inactive ingredients for use in pharmaceutical compositions for vaginal administration includes adipic acid, alcohol, denatured, allantoin, anhydrous lactose, apricot kernel oil peg-6 esters, barium sulfate, beeswax, bentonite, benzoic acid, benzyl alcohol, butylated hydroxyanisole, butylated hydroxytoluene, calcium lactate, carbomer 934, carbomer 934p, cellulose, microcrystalline, ceteth-20, cetostearyl alcohol, cetyl alcohol, cetyl esters wax, cetyl palmitate, cholesterol, choleth, citric acid, citric acid monohydrate, coconut oil/palm kernel oil glycerides, hydrogenated, crospovidone, edetate disodium, ethylcelluloses, ethylene-vinyl acetate copolymer (28% vinyl acetate), ethylene-vinyl acetate copolymer (9% vinylacetate), fatty alcohols, fd&c yellow no. 5, gelatin, glutamic acid, dl-, glycerin, glyceryl isostearate, glyceryl monostearate, glyceryl stearate, guar gum, high density polyethylene, hydrogel polymer, hydrogenated palm oil, hypromellose 2208 (15000 mpa·s), hypromelloses, isopropyl myristate, lactic acid, lactic acid, dl-, lactose, lactose monohydrate, lactose, hydrous, lanolin, lanolin anhydrous, lecithin, lecithin, soybean, light mineral oil, magnesium aluminum silicate, magnesium aluminum silicate hydrate, magnesium stearate, methyl stearate, methylparaben, microcrystalline wax, mineral oil, nitric acid, octyldodecanol, peanut oil, peg 6-32 stearate/glycol stearate, peg-100 stearate, peg-120 glyceryl stearate, peg-2 stearate, peg-5 oleate, pegoxol 7 stearate, petrolatum, white, phenylmercuric acetate, phospholipon 90g, phosphoric acid, piperazine hexahydrate, poly(dimethylsiloxane/methylvinylsiloxane/methylhydrogensiloxane) dimethylvinyl or dimethylhydroxy or trimethyl endblocked, polycarbophil, polyester, polyethylene glycol 1000, polyethylene glycol 3350, polyethylene glycol 400, polyethylene glycol 4000, polyethylene glycol 6000, polyethylene glycol 8000, polyglyceryl-3 oleate, polyglyceryl-4 oleate, polyoxyl palmitate, polysorbate 20, polysorbate 60, polysorbate 80, polyurethane, potassium alum, potassium hydroxide, povidone k29/32, povidones, promulgen d, propylene glycol, propylene glycol monopalmitostearate, propylparaben, quaternium-15 cis-form, silicon dioxide, silicon dioxide, colloidal, silicone, sodium bicarbonate, sodium citrate, sodium hydroxide, sodium lauryl sulfate, sodium metabisulfite, sodium phosphate, dibasic, anhydrous, sodium phosphate, monobasic, anhydrous, sorbic acid, sorbitan monostearate, sorbitol, sorbitol solution, spermaceti, stannous 2-ethylhexanoate, starch, starch 1500, pregelatinized, starch, corn, stearamidoethyl diethylamine, stearic acid, stearyl alcohol, tartaric acid, dl-, tert-butylhydroquinone, tetrapropyl orthosilicate, trolamine, urea, vegetable oil, hydrogenated, wecobee fs, white ceresin wax and white wax.

### Oral Administration

[0182] Liquid dosage forms for oral administration include, but are not limited to, pharmaceutically acceptable emulsions, microemulsions, solutions, suspensions, syrups, and/or elixirs. In addition to active ingredients, liquid dosage forms may comprise inert diluents and/or excipients commonly used in the art such as, for example, water or other solvents, solubilizing agents and emulsifiers such as ethyl alcohol, isopropyl alcohol, ethyl carbonate, ethyl acetate, benzyl alcohol, benzyl benzoate, propylene glycol, 1,3-butylene glycol, dimethylformamide, oils (in particular, cottonseed, groundnut, corn, germ, olive, castor, and sesame oils), glycerol, tetrahydrofurfuryl alcohol, polyethylene glycols and fatty acid esters of sorbitan, and mixtures thereof. Besides inert diluents, oral compositions can include adjuvants such as wetting agents, emulsifying and suspending agents, sweetening, flavoring, and/or perfuming agents. In certain embodiments for parenteral administration, compositions are mixed with solubilizing agents such as CREMOPHOR®, alcohols, oils, modified oils, glycols, polysorbates, cyclodextrins, polymers, and/or combinations thereof.

[0183] Syrups and elixirs can be formulated with sweetening agents, for example glycerol, propylene glycol, sorbitol, glucose or sucrose. Such formulations can also contain a demulcent, a preservative and flavoring and coloring agents. The pharmaceutical compositions can be in the form of a sterile injectable aqueous or oleaginous suspension. This suspension can be formulated according to the known art using those suitable dispersing or wetting agents and suspending agents that have been mentioned above. The sterile injectable preparation can also be a sterile injectable solution or suspension in a non-toxic parentally acceptable diluent or solvent, for example as a solution in 1,3-butanediol. Among the acceptable vehicles and solvents that can be employed are water, Ringer's solution and isotonic sodium chloride solution. In addition, sterile, fixed oils are conventionally employed as a solvent or suspending medium. For this purpose, any bland fixed oil can be employed including synthetic mono- or diglycerides. In addition, fatty acids such as oleic acid find use in the preparation of injectables.

[0184] Suspensions for oral dosage may contain the active materials in a mixture with excipients suitable for the manufacture of aqueous suspensions. Such excipients may be suspending agents, as a non-limiting example the suspending agents may be sodium carboxymethylcellulose, methylcellulose, hydropropyl-methylcellulose, sodium alginate, polyvinylpyrrolidone, gum tragacanth and gum acacia; dispersing or wetting agents can be a naturally-occurring phosphatide, for example, lecithin, or condensation products of an alkylene oxide with fatty acids, for example polyoxyethylene stearate; or condensation products of ethylene oxide with long chain aliphatic alcohols, for example heptadecaethyleneoxycetanol, or condensation products of ethylene oxide with partial esters derived from fatty acids and a hexitol such as polyoxyethylene sorbitol monooleate, or condensation products of ethylene oxide with partial esters derived from fatty acids and hexitol anhydrides, for example polyethylene sorbitan monooleate. The aqueous suspensions may also contain one or more preservatives, for example ethyl, or n-propyl p-hydroxybenzoate, one or more coloring agents, one or more flavoring agents, and one or more sweetening agents, such as sucrose or saccharin.

[0185] Oily suspensions for oral dosage can be formulated by suspending the active ingredients in a vegetable oil, for example arachis oil, olive oil, sesame oil or coconut oil, or in a mineral oil such as liquid paraffin. The oily suspensions can contain a thickening agent, for example beeswax, hard paraffin or cetyl alcohol. Sweetening agents and flavoring agents can be added to provide palatable oral preparations. These compositions can be preserved by the addition of an anti-oxidant such as ascorbic acid.

[0186] The oral dosage may also be in the form of oil-in-water emulsions. The oily phase can be a vegetable oil or a mineral oil or mixtures of these. Suitable emulsifying agents can be naturally-occurring gums, for example gum acacia or gum tragacanth, naturally-occurring phosphatides, for example soy bean, lecithin, and esters or partial esters derived from fatty acids and hexitol, anhydrides, for example sorbitan monooleate, and condensation products of the said partial esters with ethylene oxide, for example polyoxyethylene sorbitan monooleate. The emulsions may also contain sweetening and flavoring agents.

[0187] Solid dosage forms for oral administration include capsules, tablets, pills, powders, and granules. In such solid dosage forms, an active ingredient is mixed with at least one inert, pharmaceutically acceptable excipient such as sodium citrate or dicalcium phosphate and/or fillers or extenders (e.g. starches, lactose, sucrose, glucose, mannitol, and silicic acid), binders (e.g. carboxymethylcellulose, alginates, gelatin, polyvinylpyrrolidinone, sucrose, and acacia), humectants (e.g. glycerol), disintegrating agents (e.g. agar, calcium carbonate, potato or tapioca starch, alginic acid, certain silicates, and sodium carbonate), solution retarding agents (e.g. paraffin), absorption accelerators (e.g. quaternary ammonium compounds), wetting agents (e.g. cetyl alcohol and glycerol monostearate), absorbents (e.g. kaolin and bentonite clay), and lubricants (e.g. talc, calcium stearate, magnesium stearate, solid polyethylene glycols, sodium lauryl sulfate), and mixtures thereof. In the case of capsules, tablets and pills, the dosage form may comprise buffering agents. The solid dosage forms may also dissolve once they come in contact with liquid such as, but not limited to, salvia and bile.

[0188] Compositions intended for oral use can be prepared according to any method known to the art for the manufacture of pharmaceutical compositions and such compositions can contain one or more such sweetening agents, flavoring agents, coloring agents or preservative agents in order to provide pharmaceutically elegant and palatable preparations.

[0189] Solid dosage forms may be uncoated or they can be coated by known techniques. In some cases such coatings can be prepared by known techniques to delay disintegration and absorption in the gastrointestinal tract and thereby provide a sustained action over a longer period. For example, a time delay material such as glyceryl monosterate or glyceryl distearate can be employed.

[0190] Formulations for oral use can also be presented as hard gelatin capsules wherein the active ingredient is mixed with an inert solid diluent, for example, calcium carbonate, calcium phosphate or kaolin, or as soft gelatin capsules wherein the active ingredient is mixed with water or an oil medium, for example peanut oil, liquid paraffin or olive oil.

[0191] Dosage forms for oral delivery may also be chewable. The chewable dosages forms may be sustained release formulations such as, but not limited to, the sustained release compositions described in International Publication No WO2013082470 and US Publication No US20130142876, each of which is herein incorporated by reference in its entirety. The chewable dosage forms may comprise amphipathic lipids such as, but not limited to, those described in International Publication No WO2013082470 and US Publication No US20130142876, each of which is herein incorporated by reference in its entirety.

### Topical or Transdermal Administration

[0192] As described herein, compositions of the present disclosure may be formulated for administration transdermally. The skin may be an ideal target site for delivery as it is readily accessible. Gene expression may be restricted not only to the skin, potentially avoiding nonspecific toxicity, but also to specific layers and cell types within the skin.

[0193] The site of cutaneous expression of the delivered compositions will depend on the route of delivery. Two routes are commonly considered to deliver compositions to the skin: (ii) intradermal injection; and (iii) systemic delivery (e.g. for treatment of dermatologic diseases that affect both cutaneous and extracutaneous regions). Compositions can be delivered to the skin by several different approaches known in the art.

[0194] In some embodiments, the invention provides for the compositions or agents to be delivered in more than one injection.

[0195] In some embodiments, before transdermal administration at least one area of tissue, such as skin, may be subjected to a device and/or solution which may increase permeability. In one embodiment, the tissue may be subjected to an abrasion device to increase the permeability of the skin (see U.S. Patent Publication No. 20080275468, herein incorporated by reference in its entirety). In another embodiment, the tissue may be subjected to an ultrasound enhancement device. An ultrasound enhancement device may include, but is not limited to, the devices described in U.S. Publication No. 20040236268 and U.S. Pat. Nos. 6,491,657 and 6,234,990; each of which are herein incorporated by reference in their entireties. Methods of enhancing the permeability of tissue are described in U.S. Publication Nos. 20040171980 and 20040236268 and U.S. Pat. No. 6,190,315; each of which are herein incorporated by reference in their entireties.

[0196] In some embodiments, a device may be used to increase permeability of tissue before delivering formulations of compositions described herein. The permeability of skin may be measured by methods known in the art and/or described in U.S. Pat. No. 6,190,315, herein incorporated by reference in its entirety. As a non-limiting example, a formulation may be delivered by the drug delivery methods described in U.S. Pat. No. 6,190,315, herein incorporated by reference in its entirety.

[0197] In another non-limiting example tissue may be treated with a eutectic mixture of local anesthetics (EMLA) cream before, during and/or after the tissue may be subjected to a device which may increase permeability. Katz et al. (Anesth Analg (2004); 98:371-76; herein incorporated by reference in its entirety) showed that using the EMLA cream in combination with a low energy, an onset of superficial cutaneous analgesia was seen as fast as 5 minutes after a pretreatment with a low energy ultrasound.

[0198] In some embodiments, enhancers may be applied to the tissue before, during, and/or after the tissue has been treated to increase permeability. Enhancers include, but are not limited to, transport enhancers, physical enhancers, and cavitation enhancers. Non-limiting examples of enhancers are described in U.S. Pat. No. 6,190,315, herein incorporated by reference in its entirety.

[0199] In some embodiments, a device may be used to increase permeability of tissue before delivering formulations of compositions described herein, which may further contain a substance that invokes an immune response. In another non-limiting example, a formulation containing a substance to invoke an immune response may be delivered by the methods described in U.S. Publication Nos. 20040171980 and 20040236268; each of which are herein incorporated by reference in their entireties.

[0200] Dosage forms for transdermal administration of a composition may include ointments, pastes, creams, lotions, gels, powders, solutions, sprays, inhalants and/or patches. Generally, an active ingredient is admixed under sterile conditions with a pharmaceutically acceptable excipient and/or any needed preservatives and/or buffers as may be required.

[0201] Additionally, the compositions of the present disclosure contemplates the use of transdermal patches, which often have the added advantage of providing controlled delivery of a compound to the body. Such dosage forms may be prepared, for example, by dissolving and/or dispensing the compound in the proper medium. Alternatively or additionally, rate may be controlled by either providing a rate controlling membrane and/or by dispersing the compound in a polymer matrix and/or gel.

[0202] A pharmaceutical composition for transdermal administration may comprise at least one inactive ingredient. A non-exhaustive list of inactive ingredients for use in pharmaceutical compositions for transdermal administration includes acrylates copolymer, acrylic acid-isooctyl acrylate copolymer, acrylic adhesive 788, adcote 72a103, aerotex resin 3730, alcohol, alcohol, dehydrated, aluminum polyester, bentonite, butylated hydroxytoluene, butylene glycol, butyric acid, caprylic/capric triglyceride, carbomer 1342, carbomer 940, carbomer 980, carrageenan, cetylpyridinium chloride, citric acid, crospovidone, daubert 1-5 pestr (matte) 164z, diethylene glycol monoethyl ether, diethylhexyl phthalate, dimethicone copolyol, dimethicone mdx4-4210, dimethicone medical fluid 360, dimethylaminoethyl methacrylate-butyl methacrylate-methyl methacrylate copolymer, dipropylene glycol, duro-tak 280-2516, duro-tak 387-2516, duro-tak 80-1196, duro-tak 87-2070, duro-tak 87-2194, duro-tak 87-2287, duro-tak 87-2296, duro-tak 87-2888, duro-tak 87-2979, edetate disodium, ethyl acetate, ethyl oleate, ethylcelluloses, ethylene vinyl acetate copolymer, ethylene-propylene copolymer, fatty acid esters, gelva 737, glycerin, glyceryl laurate, glyceryl oleate, heptane, high density polyethylene, hydrochloric acid, hydrogenated polybutene 635-690, hydroxyethyl cellulose, hydroxypropyl cellulose, isopropyl myristate, isopropyl palmitate, lactose, lanolin anhydrous, lauryl lactate, lecithin, levulinic acid, light mineral oil, medical adhesive modified s-15, methyl alcohol, methyl laurate, mineral oil, nitrogen, octisalate, octyldodecanol, oleic acid, oleyl alcohol, oleyl oleate, pentadecalactone, petrolatum, white, polacrilin, polyacrylic acid (250000 mw), polybutene (1400 mw), polyester, polyester polyamine copolymer, polyester rayon, polyethylene terephthalates, polyisobutylene, polyisobutylene (1100000 mw), polyisobutylene (35000 mw), polyisobutylene 178-236, polyisobutylene 241-294, polyisobutylene 35-39, polyisobutylene low molecular weight, polyisobutylene medium molecular weight, polyisobutylene/polybutene adhesive, polypropylene, polyvinyl acetate, polyvinyl alcohol, polyvinyl chloride, polyvinyl chloride-polyvinyl acetate copolymer, polyvinylpyridine, povidone k29/32, povidones, propylene glycol, propylene glycol monolaurate, ra-2397, ra-3011, silicon, silicon dioxide, colloidal, silicone, silicone adhesive 4102, silicone adhesive 4502, silicone adhesive bio-psa q7-4201, silicone adhesive bio-psa q7-4301, silicone/polyester film strip, sodium chloride, sodium citrate, sodium hydroxide, sorbitan monooleate, stearalkonium hectorite/propylene carbonate, titanium dioxide, triacetin, trolamine, tromethamine, union 76 amsco-res 6038 and viscose/cotton.

[0203] A pharmaceutical composition for intradermal administration may comprise at least one inactive ingredient. A non-exhaustive list of inactive ingredients for use in pharmaceutical compositions for intradermal administration includes benzalkonium chloride, benzyl alcohol, carboxymethylcellulose sodium, creatinine, edetate disodium, glycerin, hydrochloric acid, metacresol, methylparaben, phenol, polysorbate 80, protamine sulfate, sodium acetate, sodium bisulfite, sodium chloride, sodium hydroxide, sodium phosphate, sodium phosphate, dibasic, sodium phosphate, dibasic, heptahydrate, sodium phosphate, monobasic, anhydrous and zinc chloride.

### Depot Administration

[0204] As described herein, in some embodiments, the composition is formulated in depots for extended release. Generally, a specific organ or tissue (a “target tissue”) is targeted for administration.

[0205] In some aspects, the compositions or agents are spatially retained within or proximal to a target tissue. Provided are method of providing a composition to a target tissue of a mammalian subject by contacting the target tissue (which contains one or more target cells) with the composition under conditions such that the composition is substantially retained in the target tissue, meaning that at least 10, 20, 30, 40, 50, 60, 70, 80, 85, 90, 95, 96, 97, 98, 99, 99.9, 99.99 or greater than 99.99% of the composition is retained in the target tissue.

[0206] Aspects of the invention are directed to methods of providing a composition to a target tissue of a subject, by contacting the target tissue (comprising one or more target cells) with the composition under conditions such that the composition is substantially retained in the target tissue.

[0207] In some embodiments, the compositions may be retained near target tissue using a small disposable drug reservoir, patch pump or osmotic pump. Non-limiting examples of patch pumps include those manufactured and/or sold by BD® (Franklin Lakes, NJ), Insulet Corporation (Bedford, MA), SteadyMed Therapeutics (San Francisco, CA), Medtronic (Minneapolis, MN) (e.g., MiniMed), UniLife (York, PA), Valeritas (Bridgewater, NJ), and SpringLeaf Therapeutics (Boston, MA). A non-limiting example of an osmotic pump include those manufactured by DURECT® (Cupertino, CA) (e.g., DUROS® and ALZET®).

### Pulmonary Administration

[0208] A pharmaceutical composition may be prepared, packaged, and/or sold in a formulation suitable for pulmonary administration via the buccal cavity. Such a formulation may comprise dry particles which comprise the active ingredient and which have a diameter in the range from about 0.5 nm to about 7 nm or from about 1 nm to about 6 nm. Such compositions are suitably in the form of dry powders for administration using a device comprising a dry powder reservoir to which a stream of propellant may be directed to disperse the powder and/or using a self propelling solvent/powder dispensing container such as a device comprising the active ingredient dissolved and/or suspended in a low-boiling propellant in a sealed container. Such powders comprise particles wherein at least 98% of the particles by weight have a diameter greater than 0.5 nm and at least 95% of the particles by number have a diameter less than 7 nm. Alternatively, at least 95% of the particles by weight have a diameter greater than 1 nm and at least 90% of the particles by number have a diameter less than 6 nm. Dry powder compositions may include a solid fine powder diluent such as sugar and are conveniently provided in a unit dose form.

[0209] Low boiling propellants generally include liquid propellants having a boiling point of below 65° F. at atmospheric pressure. Generally the propellant may constitute 50% to 99.9% (w/w) of the composition, and active ingredient may constitute 0.1% to 20% (w/w) of the composition. A propellant may further comprise additional ingredients such as a liquid non-ionic and/or solid anionic surfactant and/or a solid diluent (which may have a particle size of the same order as particles comprising the active ingredient). As a non-limiting example, the compositions described herein may be formulated for pulmonary delivery by the methods described in U.S. Pat. No. 8,257,685; herein incorporated by reference in its entirety.

[0210] Pharmaceutical compositions formulated for pulmonary delivery may provide an active ingredient in the form of droplets of a solution and/or suspension. Such formulations may be prepared, packaged, and/or sold as aqueous and/or dilute alcoholic solutions and/or suspensions, optionally sterile, comprising active ingredient, and may conveniently be administered using any nebulization and/or atomization device. Such formulations may further comprise one or more additional ingredients including, but not limited to, a flavoring agent such as saccharin sodium, a volatile oil, a buffering agent, a surface active agent, and/or a preservative such as methylhydroxybenzoate. Droplets provided by this route of administration may have an average diameter in the range from about 0.1 nm to about 200 nm.

[0211] The compositions and formulations provided herein which may be used for pulmonary delivery may further comprise one or more surfactants. Suitable surfactants or surfactant components for enhancing the uptake of the compositions of the invention include synthetic and natural as well as full and truncated forms of surfactant protein A, surfactant protein B, surfactant protein C, surfactant protein D and surfactant Protein E, di-saturated phosphatidylcholine (other than dipalmitoyl), dipalmitoylphosphatidylcholine, phosphatidylcholine, phosphatidylglycerol, phosphatidylinositol, phosphatidylethanolamine, phosphatidylserine; phosphatidic acid, ubiquinones, lysophosphatidylethanolamine, lysophosphatidylcholine, palmitoyl-lysophosphatidylcholine, dehydroepiandrosterone, dolichols, sulfatidic acid, glycerol-3-phosphate, dihydroxyacetone phosphate, glycerol, glycero-3-phosphocholine, dihydroxyacetone, palmitate, cytidine diphosphate (CDP) diacylglycerol, CDP choline, choline, choline phosphate; as well as natural and artificial lamellar bodies which are the natural carrier vehicles for the components of surfactant, omega-3 fatty acids, polyenic acid, polyenoic acid, lecithin, palmitinic acid, non-ionic block copolymers of ethylene or propylene oxides, polyoxypropylene, monomeric and polymeric, polyoxyethylene, monomelic and polymeric, poly(vinyl amine) with dextran and/or alkanoyl side chains, Brij 35, Triton X-100 and synthetic surfactants ALEC, Exosurf, Survan and Atovaquone, among others. These surfactants can be used either as single or part of a multiple component surfactant in a formulation, or as covalently bound to a component of a pharmaceutical composition herein.

### Intranasal, Nasal and Buccal Administration

[0212] Formulations described herein as being useful for pulmonary delivery are useful for intranasal delivery of a pharmaceutical composition. Another formulation suitable for intranasal administration is a coarse powder comprising the active ingredient and having an average particle from about 0.2μιη to 500μιη. Such a formulation is administered in the manner in which snuff is taken, i.e. by rapid inhalation through the nasal passage from a container of the powder held close to the nose.

[0213] Formulations suitable for nasal administration may, for example, comprise from about as little as 0.1% (w/w) and as much as 100% (w/w) of active ingredient, and may comprise one or more of the additional ingredients described herein. A pharmaceutical composition may be prepared, packaged, and/or sold in a formulation suitable for buccal administration. Such formulations may, for example, be in the form of tablets and/or lozenges made using conventional methods and may, for example, 0.10% to 20% (w/w) active ingredient, the balance comprising an orally dissolvable and/or degradable composition and, optionally, one or more of the additional ingredients described herein. Alternately, formulations suitable for buccal administration may comprise a powder and/or an aerosolized and/or atomized solution and/or suspension comprising active ingredient. Such powdered, aerosolized, and/or aerosolized formulations, when dispersed, may have an average particle and/or droplet size in the range from about 0.1 nm to about 200 nm, and may further comprise one or more of any additional ingredients described herein.

[0214] A pharmaceutical composition for inhalation (respiratory) administration may comprise at least one inactive ingredient. A non-exhaustive list of inactive ingredients for use in pharmaceutical compositions for inhalation (respiratory) administration includes acetone sodium bisulfite, acetylcysteine, alcohol, alcohol, dehydrated, ammonia, apaflurane, ascorbic acid, benzalkonium chloride, calcium carbonate, carbon dioxide, cetylpyridinium chloride, chlorobutanol, citric acid, d&c yellow no. 10, dichlorodifluoromethane, dichlorotetrafluoroethane, edetate disodium, edetate sodium, fd&c yellow no. 6, fluorochlorohydrocarbons, gelatin, glycerin, glycine, hydrochloric acid, hydrochloric acid, diluted, lactose, lactose monohydrate, lecithin, lecithin, hydrogenated soy, lecithin, soybean, lysine monohydrate, mannitol, menthol, methylparaben, nitric acid, nitrogen, norflurane, oleic acid, polyethylene glycol 1000, povidone k25, propylene glycol, propylparaben, saccharin, saccharin sodium, silicon dioxide, colloidal, sodium bisulfate, sodium bisulfite, sodium chloride, sodium citrate, sodium hydroxide, sodium lauryl sulfate, sodium metabisulfite, sodium sulfate anhydrous, sodium sulfite, sorbitan trioleate, sulfuric acid, thymol, titanium dioxide, trichloromonofluoromethane, tromethamine and zinc oxide.

[0215] A pharmaceutical composition for nasal administration may comprise at least one inactive ingredient. Any or none of the inactive ingredients used may have been approved by the US Food and Drug Administration (FDA). A non-exhaustive list of inactive ingredients for use in pharmaceutical compositions for nasal administration includes acetic acid, alcohol, dehydrated, allyl .alpha.-ionone, anhydrous dextrose, anhydrous trisodium citrate, benzalkonium chloride, benzethonium chloride, benzyl alcohol, butylated hydroxyanisole, butylated hydroxytoluene, caffeine, carbon dioxide, carboxymethylcellulose sodium, cellulose, microcrystalline, chlorobutanol, citric acid, citric acid monohydrate, dextrose, dichlorodifluoromethane, dichlorotetrafluoroethane, edetate disodium, glycerin, glycerol ester of hydrogenated rosin, hydrochloric acid, hypromellose 2910 (15000 mpa·s), methylcelluloses, methylparaben, nitrogen, norflurane, oleic acid, petrolatum, white, phenylethyl alcohol, polyethylene glycol 3350, polyethylene glycol 400, polyoxyl 400 stearate, polysorbate 20, polysorbate 80, potassium phosphate, monobasic, potassium sorbate, propylene glycol, propylparaben, sodium acetate, sodium chloride, sodium citrate, sodium hydroxide, sodium phosphate, sodium phosphate, dibasic, sodium phosphate, dibasic, anhydrous, sodium phosphate, dibasic, dihydrate, sodium phosphate, dibasic, dodecahydrate, sodium phosphate, dibasic, heptahydrate, sodium phosphate, monobasic, anhydrous, sodium phosphate, monobasic, dihydrate, sorbitan trioleate, sorbitol, sorbitol solution, sucralose, sulfuric acid, trichloromonofluoromethane and trisodium citrate dihydrate.

### Ophthalmic and Auricular (Otic) Administration

[0216] A pharmaceutical composition may be prepared, packaged, and/or sold in a formulation suitable for delivery to and/or around the eye and/or delivery to the ear (e.g., auricular (otic) administration). Non-limiting examples of route of administration for delivery to and/or around the eye include retrobulbar, conjuctival, intracorneal, intraocular, intravitreal, ophthlamic and subconjuctiva. Such formulations may, for example, be in the form of eye drops or ear drops including, for example, a 0.1/1.0% (w/w) solution and/or suspension of the active ingredient in an aqueous or oily liquid excipient. Such drops may further comprise buffering agents, salts, and/or one or more other of any additional ingredients described herein. Other ophthalmically-administrable formulations which are useful include those which comprise the active ingredient in microcrystalline form and/or in a liposomal preparation. Ear drops and/or eye drops are contemplated as being within the scope of this invention. A multilayer thin film device may be prepared to contain a pharmaceutical composition for delivery to the eye and/or surrounding tissue.

[0217] A pharmaceutical composition for ophthalmic administration may comprise at least one inactive ingredient. Any or none of the inactive ingredients used may have been approved by the US Food and Drug Administration (FDA). A non-exhaustive list of inactive ingredients for use in pharmaceutical compositions for ophthalmic administration includes acetic acid, alcohol, alcohol, dehydrated, alginic acid, amerchol-cab, ammonium hydroxide, anhydrous trisodium citrate, antipyrine, benzalkonium chloride, benzethonium chloride, benzododecinium bromide, boric acid, caffeine, calcium chloride, carbomer 1342, carbomer 934p, carbomer 940, carbomer homopolymer type b (allyl pentaerythritol crosslinked), carboxymethylcellulose sodium, castor oil, cetyl alcohol, chlorobutanol, chlorobutanol, anhydrous, cholesterol, citric acid, citric acid monohydrate, creatinine, diethanolamine, diethylhexyl phthalate, divinylbenzene styrene copolymer, edetate disodium, edetate disodium anhydrous, edetate sodium, ethylene vinyl acetate copolymer, gellan gum (low acyl), glycerin, glyceryl stearate, high density polyethylene, hydrocarbon gel, plasticized, hydrochloric acid, hydrochloric acid, diluted, hydroxyethyl cellulose, hydroxypropyl methylcellulose 2906, hypromellose 2910 (15000 mpa·s), hypromelloses, jelene, lanolin, lanolin alcohols, lanolin anhydrous, lanolin nonionic derivatives, lauralkonium chloride, lauroyl sarcosine, light mineral oil, magnesium chloride, mannitol, methylcellulose (4000 mpa·s), methylcelluloses, methylparaben, mineral oil, nitric acid, nitrogen, nonoxynol-9, octoxynol-40, octylphenol polymethylene, petrolatum, petrolatum, white, phenylethyl alcohol, phenylmercuric acetate, phenylmercuric nitrate, phosphoric acid, polidronium chloride, poloxamer 188, poloxamer 407, polycarbophil, polyethylene glycol 300, polyethylene glycol 400, polyethylene glycol 8000, polyoxyethylene-polyoxypropylene 1800, polyoxyl 35 castor oil, polyoxyl 40 hydrogenated castor oil, polyoxyl 40 stearate, polypropylene glycol, polysorbate 20, polysorbate 60, polysorbate 80, polyvinyl alcohol, potassium acetate, potassium chloride, potassium phosphate, monobasic, potassium sorbate, povidone k29/32, povidone k30, povidone k90, povidones, propylene glycol, propylparaben, soda ash, sodium acetate, sodium bisulfate, sodium bisulfite, sodium borate, sodium borate decahydrate, sodium carbonate, sodium carbonate monohydrate, sodium chloride, sodium citrate, sodium hydroxide, sodium metabisulfite, sodium nitrate, sodium phosphate, sodium phosphate dihydrate, sodium phosphate, dibasic, sodium phosphate, dibasic, anhydrous, sodium phosphate, dibasic, dihydrate, sodium phosphate, dibasic, heptahydrate, sodium phosphate, monobasic, sodium phosphate, monobasic, anhydrous, sodium phosphate, monobasic, dihydrate, sodium phosphate, monobasic, monohydrate, sodium sulfate, sodium sulfate anhydrous, sodium sulfate decahydrate, sodium sulfite, sodium thiosulfate, sorbic acid, sorbitan monolaurate, sorbitol, sorbitol solution, stabilized oxychloro complex, sulfuric acid, thimerosal, titanium dioxide, tocophersolan, trisodium citrate dihydrate, triton 720, tromethamine, tyloxapol and zinc chloride.

[0218] A pharmaceutical composition for retrobulbar administration may comprise at least one inactive ingredient. A non-exhaustive list of inactive ingredients for use in pharmaceutical compositions for retrobulbar administration includes hydrochloric acid and sodium hydroxide.

[0219] A pharmaceutical composition for intraocular administration may comprise at least one inactive ingredient. A non-exhaustive list of inactive ingredients for use in pharmaceutical compositions for intraocular administration includes benzalkonium chloride, calcium chloride, citric acid monohydrate, hydrochloric acid, magnesium chloride, polyvinyl alcohol, potassium chloride, sodium acetate, sodium chloride, sodium citrate and sodium hydroxide.

[0220] A pharmaceutical composition for intravitreal administration may comprise at least one inactive ingredient. A non-exhaustive list of inactive ingredients for use in pharmaceutical compositions for intravitreal administration includes calcium chloride, carboxymethylcellulose sodium, cellulose, microcrystalline, hyaluronate sodium, hydrochloric acid, magnesium chloride, magnesium stearate, polysorbate 80, polyvinyl alcohol, potassium chloride, sodium acetate, sodium bicarbonate, sodium carbonate, sodium chloride, sodium hydroxide, sodium phosphate dibasic heptahydrate, sodium phosphate monobasic monohydrate and trisodium citrate dehydrate.

[0221] A pharmaceutical composition for subconjunctival administration may comprise at least one inactive ingredient. A non-exhaustive list of inactive ingredients for use in pharmaceutical compositions for subconjunctival administration includes benzyl alcohol, hydrochloric acid and sodium hydroxide.

[0222] A pharmaceutical composition for auricular administration may comprise at least one inactive ingredient. A non-exhaustive list of inactive ingredients for use in pharmaceutical compositions for auricular administration includes acetic acid, aluminum acetate, aluminum sulfate anhydrous, benzalkonium chloride, benzethonium chloride, benzyl alcohol, boric acid, calcium carbonate, cetyl alcohol, chlorobutanol, chloroxylenol, citric acid, creatinine, cupric sulfate, cupric sulfate anhydrous, edetate disodium, edetic acid, glycerin, glyceryl stearate, hydrochloric acid, hydrocortisone, hydroxyethyl cellulose, isopropyl myristate, lactic acid, lecithin, hydrogenated, methylparaben, mineral oil, petrolatum, petrolatum, white, phenylethyl alcohol, polyoxyl 40 stearate, polyoxyl stearate, polysorbate 20, polysorbate 80, polyvinyl alcohol, potassium metabisulfite, potassium phosphate, monobasic, povidone k90f, povidones, propylene glycol, propylene glycol diacetate, propylparaben, sodium acetate, sodium bisulfite, sodium borate, sodium chloride, sodium citrate, sodium hydroxide, sodium phosphate, dibasic, anhydrous, sodium phosphate, dibasic, heptahydrate, sodium phosphate, monobasic, anhydrous, sodium sulfite, sulfuric acid and thimerosal.

### Dosing

[0223] Provided herein are methods comprising administering a vaccine composition to a subject. The specific dose level for any particular subject will depend upon a variety of factors including the species, the activity of the specific compound employed; the specific composition employed; the age, body weight, general health, sex, and diet of the subject; the time of administration, route of administration, and rate of excretion of the specific compound employed; drugs used in combination or coincidental with the specific compound employed; and like factors well known in the arts. Compositions in accordance with the present disclosure are typically formulated in dosage unit form for ease of administration and uniformity of dosage. It will be understood, however, that the total daily usage of the compositions of the present disclosure may be decided by the attending administrator within the scope of sound judgment.

[0224] In certain embodiments, compositions in accordance with the present disclosure may be administered at dosage levels sufficient to deliver from about 0.0001 mg/kg to about 100 mg/kg, from about 0.001 mg/kg to about 0.05 mg/kg, from about 0.005 mg/kg to about 0.05 mg/kg, from about 0.001 mg/kg to about 0.005 mg/kg, from about 0.05 mg/kg to about 0.5 mg/kg, from about 0.01 mg/kg to about 50 mg/kg, from about 0.1 mg/kg to about 40 mg/kg, from about 0.5 mg/kg to about 30 mg/kg, from about 0.01 mg/kg to about 10 mg/kg, from about 0.1 mg/kg to about 10 mg/kg, from about 1 mg/kg to about 25 mg/kg, from about 0.1 mg/kg to about 250 mg/kg, or any range in between or any value in between, of subject body weight per day, one or more times a day, to obtain the desired therapeutic, diagnostic, prophylactic, or imaging effect.

[0225] In some embodiments, compositions in accordance with the present disclosure may be administered at dosage levels sufficient to deliver from about 0.001 mg to about 500 mg of polypeptide(s) and/or peptide(s), or any range in between or any value in between. In some embodiments, compositions may be administered at dosage levels sufficient to deliver from about 0.01 to about 50 mg, or any range in between or any value in between. For example, in some embodiments, the range may be between about 0.1 and about 5 mg, or any range in between or any value in between, e.g., between about 0.1 and about 2 mg, or any range in between or any value in between.

[0226] The desired dosage may be delivered three times a day, two times a day, once a day, every other day, every third day, every week, every two weeks, every three weeks, or every four weeks. In certain embodiments, the desired dosage may be delivered using multiple administrations (e.g., two, three, four, five, six, seven, eight, nine, ten, eleven, twelve, thirteen, fourteen, twenty, thirty, forty, or more administrations). When multiple administrations are employed, split dosing regimens such as those described herein may be used.

[0227] In some embodiments, an animal is administered with a prime (initial dose), followed by a boost (second dose) at least about 1, 1.5, 2, 2.5, 3, 3.5, or 4 weeks after the prime. In some embodiments, at least one additional dose is given after the boost, optionally after about 1, 2, 3, 4, 5, 6, 7, 8, 9, 10, 11, 12, 13, 14, 15, 16, 17, 18, 19, 20, 21, 22, 23, 24, 25, 26, 27, 28, 29, 30, 31, 32, 33, 34, 35, or 36 months after the boost. In some embodiments, the at least one additional dose is repeated every 1, 2, 3, 4, 5, 6, 7, 8, 9, 10, 11, 12, 13, 14, 15, 16, 17, 18, 19, 20, 21, 22, 23, 24, 25, 26, 27, 28, 29, 30, 31, 32, 33, 34, 35, or 36 months. In preferred embodiments, an animal is administered with a prime, followed by a boost about 2 or 3 weeks after the prime. In yet other preferred embodiments, an animal is administered with (a) a prime, (b) a boost about 2 or 3 weeks after the prime, and (c) at least one additional dose every 3, 4, 5, or 6 months. Each dose in the dosing schedule may comprise the same or different amount of the vaccine composition.

[0228] According to the present disclosure, the compositions of the present disclosure may be administered in split-dose regimens. As used herein, a “split dose” is the division of single unit dose or total daily dose into two or more doses, e.g, two or more administrations of the single unit dose. As used herein, a “single unit dose” is a dose of any therapeutic administered in one dose/at one time/single route/single point of contact, i.e., single administration event. As used herein, a “total daily dose” is an amount given or prescribed in 24 hr period. It may be administered as a single unit dose. In some embodiments, the compositions of the present disclosure are administered to a subject in split doses. The compositions may be formulated in buffer only or in a formulation described herein.

### Dosage Forms

[0229] Vaccines, antibodies, milk, animal feed, agents (e.g., an agent that reduces methane production in a subject, a probiotic bacterial strain, etc.), or other compositions of the present disclosure may be formulated into a dosage form described herein, such as an intranasal, intratracheal, or injectable (e.g., intravenous, intraocular, intravitreal, intramuscular, intracardiac, intraperitoneal, subcutaneous).

### Liquid Dosage Forms

[0230] Liquid dosage forms for parenteral administration include, but are not limited to, pharmaceutically acceptable emulsions, microemulsions, solutions, suspensions, syrups, and/or elixirs. In addition to active ingredients, liquid dosage forms may comprise inert diluents commonly used in the art including, but not limited to, water or other solvents, solubilizing agents and emulsifiers such as ethyl alcohol, isopropyl alcohol, ethyl carbonate, ethyl acetate, benzyl alcohol, benzyl benzoate, propylene glycol, 1,3-butylene glycol, dimethylformamide, oils (in particular, cottonseed, groundnut, corn, germ, olive, castor, and sesame oils), glycerol, tetrahydrofurfuryl alcohol, polyethylene glycols and fatty acid esters of sorbitan, and mixtures thereof. In certain embodiments for parenteral administration, compositions may be mixed with solubilizing agents such as CREMOPHOR®, alcohols, oils, modified oils, glycols, polysorbates, cyclodextrins, polymers, and/or combinations thereof.

### Injectable

[0231] Injectable preparations, for example, sterile injectable aqueous or oleaginous suspensions may be formulated according to the known art and may include suitable dispersing agents, wetting agents, and/or suspending agents. Sterile injectable preparations may be sterile injectable solutions, suspensions, and/or emulsions in nontoxic parenterally acceptable diluents and/or solvents, for example, a solution in 1,3-butanediol. Among the acceptable vehicles and solvents that may be employed include, but are not limited to, water, Ringer's solution, U.S. P., and isotonic sodium chloride solution. Sterile, fixed oils are conventionally employed as a solvent or suspending medium. For this purpose any bland fixed oil can be employed including synthetic mono- or diglycerides. Fatty acids such as oleic acid can be used in the preparation of injectables. Injectable formulations can be sterilized, for example, by filtration through a bacterial-retaining filter, and/or by incorporating sterilizing agents in the form of sterile solid compositions which can be dissolved or dispersed in sterile water or other sterile injectable medium prior to use.

[0232] In order to prolong the effect of an active ingredient, it may be desirable to slow the absorption of the active ingredient from subcutaneous or intramuscular injection. This may be accomplished by the use of a liquid suspension of crystalline or amorphous material with poor water solubility. The rate of absorption of the compositions then depends upon its rate of dissolution which, in turn, may depend upon crystal size and crystalline form. Alternatively, delayed absorption of a parenterally administered compositions may be accomplished by dissolving or suspending the compositions in an oil vehicle. Injectable depot forms are made by forming microencapsule matrices of the compositions in biodegradable polymers such as polylactide-polyglycolide. Depending upon the ratio of compositions to polymer and the nature of the particular polymer employed, the rate of a compound release can be controlled. Examples of other biodegradable polymers include, but are not limited to, poly(orthoesters) and poly(anhydrides). Depot injectable formulations may be prepared by entrapping the compositions in liposomes or microemulsions which are compatible with body tissues.

### Pulmonary Formulation

[0233] Formulations described herein as being useful for pulmonary delivery may also be used for intranasal delivery of a pharmaceutical composition. Another formulation suitable for intranasal administration may be a coarse powder comprising the active ingredient and having an average particle from about 0.2μιη to 500μιη. Such a formulation may be administered in the manner in which snuff is taken, i.e. by rapid inhalation through the nasal passage from a container of the powder held close to the nose.

[0234] Formulations suitable for nasal administration may, for example, comprise from about as little as 0.1% (w/w) and as much as 100% (w/w) of active ingredient, and may comprise one or more of the additional ingredients described herein. A pharmaceutical composition may be prepared, packaged, and/or sold in a formulation suitable for buccal administration. Such formulations may, for example, be in the form of tablets and/or lozenges made using conventional methods, and may, for example, contain about 0.1% to 20% (w/w) active ingredient, where the balance may comprise an orally dissolvable and/or degradable composition and, optionally, one or more of the additional ingredients described herein. Alternately, formulations suitable for buccal administration may comprise a powder and/or an aerosolized and/or atomized solution and/or suspension comprising active ingredient. Such powdered, aerosolized, and/or aerosolized formulations, when dispersed, may have an average particle and/or droplet size in the range from about 0.1 nm to about 200 nm, and may further comprise one or more of any additional ingredients described herein.

[0235] General considerations in the formulation and/or manufacture of pharmaceutical agents may be found, for example, in Remington: The Science and Practice of Pharmacy 21^{st} ed., Lippincott Williams & Wilkins, 2005 (incorporated herein by reference in its entirety).

### Coatings or Shells

[0236] Solid dosage forms of tablets, dragees, capsules, pills, and granules can be prepared with coatings and shells such as enteric coatings and other coatings well known in the pharmaceutical formulating art. They may optionally comprise opacifying agents and can be of a composition that they release the active ingredient(s) only, or preferentially, in a certain part of the intestinal tract, optionally, in a delayed manner. Examples of embedding compositions which can be used include polymeric substances and waxes. Solid compositions of a similar type may be employed as fillers in soft and hard-filled gelatin capsules using such excipients as lactose or milk sugar as well as high molecular weight polyethylene glycols and the like.

### Multi-Dose and Repeat-Dose Administration

[0237] In some embodiments, vaccines, antibodies, milk, animal feed, agents (e.g., an agent that reduces methane production in a subject, a probiotic bacterial strain, a small molecule inhibitor, etc.), or other compositions of the present disclosure may be administered in two or more doses (referred to herein as “multi-dose administration”). Such doses may comprise the same components or may comprise components not included in a previous dose. Such doses may comprise the same mass and/or volume of components or an altered mass and/or volume of components in comparison to a previous dose. In some embodiments, multi-dose administration may comprise repeat-dose administration. As used herein, the term “repeat-dose administration” refers to two or more doses administered consecutively or within a regimen of repeat doses comprising same or different components. In some embodiments, the repeat dose may comprise substantially the same components provided at substantially the same mass and/or volume. In other embodiments, the repeat dose may comprise different components (e.g., different adjuvant for a vaccine composition).

### Adjuvant

[0238] Adjuvants or immune potentiators, may also be administered with or in combination with one or more vaccine composition of the present disclosure.

[0239] The term “adjuvant” refers to an agent that when administered in conjunction with or as part of a composition described herein augments, enhances, and/or boosts the immune response to a methanogen, but when the agent is administered alone does not generate an immune response. In some embodiments, the adjuvant generates an immune response to a methanogen and does not produce an allergy or other adverse reaction. Adjuvants can enhance an immune response by several mechanisms including, e.g., lymphocyte recruitment, stimulation of B and/or T cells, and stimulation of macrophages.

[0240] In some embodiments, an adjuvant acts as a co-signal to prime T-cells and/or B-cells and/or NK cells as to the existence of the cell surface protein of a methanogen in a vaccine composition of the present disclosure.

[0241] Advantages of adjuvants include the enhancement of the immunogenicity of antigens, modification of the nature of the immune response, the reduction of the antigen amount needed for a successful immunization, the reduction of the frequency of booster immunizations needed and an improved immune response in elderly and immunocompromised vaccines. These may be co-administered by any route, e.g., intramusculary, subcutaneous, IV or intradermal injections.

[0242] Adjuvants useful in the present invention may include, but are not limited to, natural or synthetic. They may be organic or inorganic.

[0243] When a vaccine or immunogenic composition of the invention comprises adjuvants or is administered together with one or more adjuvants, the adjuvants that can be used include, but are not limited to, mineral salt adjuvants or mineral salt gel adjuvants, particulate adjuvants, microparticulate adjuvants, mucosal adjuvants, and immunostimulatory adjuvants. Examples of adjuvants include, but are not limited to, aluminum salts (alum) (such as aluminum hydroxide, aluminum phosphate, and aluminum sulfate), 3 De-O-acylated monophosphoryl lipid A (MPL) (see GB 2220211), MF59 (Novartis), AS03 (Glaxo SmithKline), AS04 (Glaxo SmithKline), polysorbate 80 (Tween 80; ICL Americas, Inc.), imidazopyridine compounds (see International Application No. PCT/US2007/064857, published as International Publication No. WO2007/109812), imidazoquinoxaline compounds (see International Application No. PCT/US2007/064858, published as International Publication No. WO2007/109813) and saponins, such as QS21 (see Kensil et al, in Vaccine Design: The Subunit and Adjuvant Approach (eds. Powell & Newman, Plenum Press, NY, 1995); U.S. Pat. No. 5,057,540). In some embodiments, the adjuvant is Freund's adjuvant (complete or incomplete). Other adjuvants are oil in water emulsions (such as squalene or peanut oil), optionally in combination with immune stimulants, such as monophosphoryl lipid A (see Stoute et al, N. Engl. J. Med. 336, 86-91 (1997)).

[0244] Adjuvants may be selected from any of the classes (1) mineral salts, e.g., aluminium hydroxide and aluminium or calcium phosphate gels; (2) emulsions including: oil emulsions and surfactant based formulations, e.g., microfluidised detergent stabilised oil-in-water emulsion, purified saponin, oil-in-water emulsion, stabilised water-in-oil emulsion; (3) particulate adjuvants, e.g., virosomes (unilamellar liposomal vehicles incorporating influenza haemagglutinin), structured complex of saponins and lipids, polylactide co-glycolide (PLG); (4) microbial derivatives; (5) endogenous human immunomodulators; and/or (6) inert vehicles, such as gold particles; (7) microorganism derived adjuvants; (8) tensoactive compunds; (9) carbohydrates; or combinations thereof.

[0245] Other adjuvants which may be utilized in the vaccines of the present disclosure include any of those listed on the web-based vaccine adjuvant database, Vaxjo; World Wide Web at violinet.org/vaxjo/ and described in for example Sayers, et al., J. Biomedicine and Biotechnology, volume 2012 (2012), Article ID 831486, 13 pages, the content of which is incorporated herein by reference in its entirety.

[0246] Selection of appropriate adjuvants will be evident to one of ordinary skill in the art. Specific adjuvants may include, without limitation, cationic liposome-DNA complex JVRS-100, aluminum hydroxide vaccine adjuvant, aluminum phosphate vaccine adjuvant, aluminum potassium sulfate adjuvant, alhydrogel, ISCOM(s)™, Freund's complete adjuvant, Freund's incomplete adjuvant, CpG DNA Vaccine Adjuvant, Cholera toxin, Cholera toxin B subunit, Liposomes, Saponin Vaccine Adjuvant, DDA Adjuvant, Squalene-based Adjuvants, Etx B subunit Adjuvant, IL-12 Vaccine Adjuvant, LTK63 Vaccine Mutant Adjuvant, TiterMax Gold Adjuvant, Ribi Vaccine Adjuvant, Montanide ISA 720 Adjuvant, Corynebacterium-derb/ed P40 Vaccine Adjuvant, MPL™ Adjuvant, AS04, AS02, Lipopolysaccharide Vaccine Adjuvant, Muramyl Dipeptide Adjuvant, CRL1005, Killed Corynebacterium parvum Vaccine Adjuvant, Montanide ISA 51, Bordetella pertussis component Vaccine Adjuvant, Cationic Liposomal Vaccine Adjuvant, Adamantylamide Dipeptide Vaccine Adjuvant, Arlacel A, VSA-3 Adjuvant, Aluminum vaccine adjuvant, Polygen Vaccine Adjuvant, Adjumer™, Algal Glucan, Bay R1005, Theramide®, Stearyl Tyrosine, Specol, Algammulin, Avridine®, Calcium Phosphate Gel, CTA1-DD gene fusion protein, DOC/Alum Complex, Gamma Inulin, Gerbu Adjuvant, GM-CSF, GMDP, Recombinant hlFN-gamma/Interferon-g, Interleukin-\ddot{ι}β, Interleukin-2, Interleukin-7, Sclavo peptide, Rehydragel LV, Rehydragel HPA, Loxoribine, MF59, MTP-PE Liposomes, Murametide, Murapalmitine, D-Murapalmitine, NAGO, Non-Ionic Surfactant Vesicles, PMMA, Protein Cochleates, QS-21, SPT (Antigen Formulation), nanoemulsion vaccine adjuvant, AS03, Quil-A vaccine adjuvant, RC529 vaccine adjuvant, LTR192G Vaccine Adjuvant, E. coli heat-labile toxin, LT, amorphous aluminum hydroxyphosphate sulfate adjuvant, Calcium phosphate vaccine adjuvant, Montanide Incomplete Seppic Adjuvant, Imiquimod, Resiquimod, AF03, Flagellin, Poly(LC), ISCOMATRIX®, Abisco-100 vaccine adjuvant, Albumin-heparin microparticles vaccine adjuvant, AS-2 vaccine adjuvant, B7-2 vaccine adjuvant, DHEA vaccine adjuvant, Immunoliposomes Containing Antibodies to Costimulatory Molecules, SAF-1, Sendai Proteoliposomes, Sendai-containing Lipid Matrices, Threonyl muramyl dipeptide (TMDP), Ty Particles vaccine adjuvant, Bupivacaine vaccine adjuvant, DL-PGL (Polyester poly (DL-lactide-co-glycolide)) vaccine adjuvant, IL-15 vaccine adjuvant, LTK72 vaccine adjuvant, MPL-SE vaccine adjuvant, non-toxic mutant E1 12K of Cholera Toxin mCT-E1 12K, and/or Matrix-S.

[0247] In some embodiments, the at least one adjuvant comprises oil emulsions, e.g., comprising at least (a) mineral oil lipid and (b) aqueous phase (e.g., Freund's complete adjuvant, Freund's incomplete adjuvant, Montanide ISA series (e.g., ISA70, ISA61, ISA206, ISA50), squaline-based emulsion, (e.g., MF59 and/or AS03), saponins, (e.g., Quil-A, Spikoside, QS21, or ISCOMs, e.g., ISCOPREP 703), aluminum salts (e.g., aluminum hydroxide, aluminum phosphate, and potassium aluminum sulfate), also known to a skilled artisan as ‘alum’, (e.g., Imject Alum), dextran sulfate, chitosan thermogel, (e.g., monophosphoryl lipid A), Carbol, PLGA, MDP, CpG ODN, cytokine-based adjuvants such as IL-12 and/or GM-CSF, a lipid nanoparticle/cationic liposome adjuvant, an immune stimulating complex, or any combination of two or more thereof. In preferred embodiments, the at least one adjuvant comprises Freund's complete adjuvant and/or Freund's incomplete adjuvant. See Spickler and Roth (2003) J Vet Intern Med, 17:273-281, which is incorporated herein by reference.

[0248] In some embodiments, the at least one adjuvant comprises Emulsigen-D, Emulsigen, Emulsigen-P, and/or Polygen (MVP adjuvant, Omaha, NE). In some embodiments, the at least one adjuvant comprises ENABL 06 (HuvePharma, Peachtree City, GA). In some embodiments, the at least one adjuvant comprises Montainde ISA 201 and/or Montanide Gel 02 (Seppic Inc., New Jersey).

[0249] Other adjuvants which may be co-administered with the vaccine compositions of the invention include, but are not limited to interferons, TNF-alpha, TNF-beta, chemokines such as CCL21, eotaxin, HMGB1, SA100-8alpha, GCSF, GMCSF, granulysin, lactoferrin, ovalbumin, CD-40L, CD28 agonists, PD-1, soluble PD1, L1 or L2, or interleukins such as IL-1, IL-2, IL-4, IL-6, IL-7, IL-10, IL-12, IL-13, IL-21, IL-23, IL-15, IL-17, and IL-18.

[0250] In some embodiments, the adjuvant comprises Glucopyranosyl Lipid Adjuvant (GLA), CpG oligodeoxynucleotides (e.g., Class A or B), poly(LC), aluminum hydroxide, or Pam3CSK4.

[0251] In some embodiments, the adjuvant comprises: (a) (±)—N-(3-aminopropyl)-N,N-dimethyl-2,3-bis(syn-9-tetradeceneyloxy)-1-propanaminium bromide (GAP-DMORIE) and a neutral lipid; (b) a cytokine; (c) mono-phosphoryl lipid A and trehalosedicorynomycolateAF (MPL+TDM); (d) a solubilized mono-phosphoryl lipid A formulation; and/or (e) CRL1005/BAK.

[0252] In some embodiments, the neutral lipid in (a) comprises (a) 1,2-dioleoyl-sn-glycero-3-phosphoethanolamine (DOPE); (b) 1,2-diphytanoyl-sn-glycero-3-phosphoethanolamine (DPyPE); and/or (c) 1,2-dimyristoyl-glycer-3-phosphoethanolamine (DMPE).

[0253] In some embodiments, the adjuvant comprises saponin, Montanide ISA61, a chitosan thermogel, a lipid nanoparticle/cationic liposome adjuvant, or any combination thereof. In preferred embodiments, the adjuvant comprises Montanide ISA61.

### Antibody

[0254] Unless otherwise specified here within, the terms “antibody” and “antibodies” broadly encompass naturally-occurring forms of antibodies (e.g. IgG, IgA, IgM, IgE); and recombinant antibodies, such as single-chain antibodies, chimeric antibodies, and multi-specific antibodies, as well as fragments and derivatives of all of the foregoing, which fragments and derivatives have at least an antigenic binding site. Antibody derivatives may comprise a protein or chemical moiety conjugated to an antibody.

[0255] The term “antibody” as used herein also includes an “antigen-binding portion” of an antibody (or simply “antibody portion”). The term “antigen-binding portion”, as used herein, refers to one or more fragments of an antibody that retain the ability to specifically bind to an antigen (e.g., at least one cell surface protein or fragment thereof of at least one methanogen). It has been shown that the antigen-binding function of an antibody can be performed by fragments of a full-length antibody. Examples of binding fragments encompassed within the term “antigen-binding portion” of an antibody include (i) a Fab fragment, a monovalent fragment consisting of the VL, VH, CL and CH1 domains; (ii) a F(ab′)₂ fragment, a bivalent fragment comprising two Fab fragments linked by a disulfide bridge at the hinge region; (iii) a Fd fragment consisting of the VH and CH1 domains; (iv) a Fv fragment consisting of the VL and VH domains of a single arm of an antibody, (v) a dAb fragment (Ward et al., (1989) Nature 341:544-546), which consists of a VH domain; and (vi) an isolated complementarity determining region (CDR). Furthermore, although the two domains of the Fv fragment, VL and VH, are coded for by separate genes, they can be joined, using recombinant methods, by a synthetic linker that enables them to be made as a single protein chain in which the VL and VH regions pair to form monovalent polypeptides (known as single chain Fv (scFv); see e.g., Bird et al. (1988) Science 242:423-426; and Huston et al. (1988) Proc. Natl. Acad. Sci. USA 85:5879-5883; and Osboum et al. 1998, Nature Biotechnology 16: 778). Such single chain antibodies are also intended to be encompassed within the term “antigen-binding portion” of an antibody. Any VH and VL sequences of specific scFv can be linked to immunoglobulin constant region cDNA or genomic sequences, in order to generate expression vectors encoding complete IgG polypeptides or other isotypes (e.g., IgGA). VH and VL can also be used in the generation of Fab, Fv or other fragments of immunoglobulins using either protein chemistry or recombinant DNA technology. Other forms of single chain antibodies, such as diabodies are also encompassed. Diabodies are bivalent, bispecific antibodies in which VH and VL domains are expressed on a single polypeptide chain, but using a linker that is too short to allow for pairing between the two domains on the same chain, thereby forcing the domains to pair with complementary domains of another chain and creating two antigen binding sites (see e.g., Holliger et al. (1993) Proc. Natl. Acad. Sci. U.S.A. 90:6444-6448; Poljak et al. (1994) Structure 2:1121-1123).

[0256] Still further, an antibody or antigen-binding portion thereof may be part of larger immunoadhesion polypeptides, formed by covalent or noncovalent association of the antibody or antibody portion with one or more other proteins or peptides. Examples of such immunoadhesion polypeptides include use of the streptavidin core region to make a tetrameric scFv polypeptide (Kipriyanov et al. (1995) Human Antibodies and Hybridomas 6:93-101) and use of a cysteine residue, biomarker peptide and a C-terminal polyhistidine tag to make bivalent and biotinylated scFv polypeptides (Kipriyanov et al. (1994) Mol. Immunol. 31:1047-1058). Antibody portions, such as Fab and F(ab′)₂ fragments, can be prepared from whole antibodies using conventional techniques, such as papain or pepsin digestion, respectively, of whole antibodies. Moreover, antibodies, antibody portions and immunoadhesion polypeptides can be obtained using standard recombinant DNA techniques, as described herein.

[0257] Antibodies may be polyclonal or monoclonal; xenogeneic, allogeneic, or syngeneic; or modified forms thereof (e.g. chimeric, etc.). Antibodies may also be fully specific to the subject, e.g., the antibodies may be fully ruminant or fully human. The terms “monoclonal antibodies” and “monoclonal antibody composition,” as used herein, refer to a population of antibody polypeptides that contain only one species of an antigen binding site capable of immunoreacting with a particular epitope of an antigen, whereas the term “polyclonal antibodies” and “polyclonal antibody composition” refer to a population of antibody polypeptides that contain multiple species of antigen binding sites capable of interacting with a particular antigen. A monoclonal antibody composition typically displays a single binding affinity for a particular antigen with which it immunoreacts.

[0258] The present disclosure includes a monoclonal antibody that works particularly well in binding and neutralizing at least one methanogen. Upon immunizing a subject population (e.g., of milk-producing subject), the milk comprising the antibody can be screened for antibodies with superior activity (e.g., specific binding, neutralizing at least one methanogen, etc.). The amino acid sequence of such antibodies can be determined (e.g., mass spec-based sequencing, Next Gen Sequencing, or other methods known in the art), their expressing DNA vectors can be synthesized, and monoclonal antibodies can be produced. One or a combination of at least two or more antibodies can be added to the drinking water and/or animal feed, and be given to a subject population.

[0259] Alternatively, such monoclonal antibodies can be generated by immunizing a vehicle animal (e.g., mouse, rabbit, etc.), and hybridomas expressing the animals can be recovered. Standard hybridoma methods for producing antibodies are described in, e.g., Harlow and Lane (eds.), Antibodies: A Laboratory Manual, CSH Press (1988), and CA. Janeway et al. (eds.), Immunobiology, 5^{th} Ed., Garland Publishing, New York, NY (2001)). Antibodies produced by hybridomas can be screened and utilized according to the methods described above and herein.

[0260] In some embodiments, the antibody is a polyclonal antibody. In some embodiments, the antibody is a monoclonal antibody. In some embodiments, the antibody is an IgG or IgA. In some embodiments, the antibody is IgA. The IgA isoform, at least in cattle, may be more stable in the rumen. For example, IgA levels in cattle saliva were reduced by only 40% after 8 h exposure to rumen contents while IgG levels were reduced by 80%.

[0261] In some embodiments, the antibody is lyophilized. In some embodiments, the antibody is in a pharmaceutical composition of the present disclosure or those known in the art. In some embodiments, a composition comprising an antibody further comprises at least one excipient and/or carrier. In some embodiments, the antibody is in the animal feed. In some embodiments, the antibody is in the solid animal feed. In other embodiments, the antibody is in the liquid animal feed. In some embodiments, the antibody is in the drinking water or milk. In preferred embodiments, the antibody is orally consumed by a subject such that the antibody comes in contact with at least one methanogen present in the gut of the subject. In preferred embodiments, oral administration of the antibody reduces the number and/or type of at least one methanogen.

### Methods for Detection of Antibody

[0262] In certain embodiments, an efficacious vaccine produces an antibody titer of greater than 1:40, greater that 1:100, greater than 1:400, greater than 1:1000, greater than 1:2000, greater than 1:3000, greater than 1:4000, greater than 1:500, greater than 1:6000, greater than 1:7500, greater than 1:10000. In some embodiments, the antibody titer is produced or reached by 10 days following vaccination, by 20 days following vaccination, by 30 days following vaccination, by 40 days following vaccination, or by 50 or more days following vaccination. In some embodiments, the titer is produced or reached following a single dose of vaccine administered to the subject. In other embodiments, the titer is produced or reached following multiple doses, e.g., following a first and a second dose (e.g., a repeat dose.).

[0263] In certain aspects, antigen-specific antibodies are measured in units of pg/ml or are measured in units of IU/L (International Units per liter) or mIU/ml (milli International Units per ml). In some embodiments of the invention, an efficacious vaccine produces >0.5 pg/ml, >0.1 pg/ml, >0.2 pg/ml, >0.35 pg/ml, >0.5 pg/ml, >1 pg/ml, >2 pg/ml, >5 pg/ml or >10 pg/ml. In some embodiments, an efficacious vaccine produces >10 mIU/ml, >20 mIU/ml, >50 mIU/ml, >100 mIU/ml, >200 mIU/ml, >500 mIU/ml or >1000 mIU/ml.

[0264] Methods of detecting the presence of antibodies are well known in the art.

[0265] In some embodiments, antibody level or concentration is determined or measured by neutralization assay, e.g., neutralization of at least one methanogen.

[0266] Other exemplary methods include, but are not limited to, immunodiffusion, immunoelectrophoresis, radioimmunoassay (RIA), enzyme-linked immunosorbent assays (ELISAs; including variants such as competitive ELISA, sandwich ELISA, etc.), immunofluorescent assays, Western blotting, immunohistochemical techniques, agglutination, complement assays, high performance liquid chromatography (HPLC), thin layer chromatography (TLC), hyperdiffusion chromatography, and the like (e.g., Basic and Clinical Immunology, Sites and Terr, eds., Appleton and Lange, Norwalk, Conn. pp 217-262, 1991 which is incorporated by reference).

[0267] For example, ELISA and RIA procedures may be conducted such that a desired protein standard (e.g., an extracellular domain of at least one cell surface protein or a fragment thereof of at least one methanogen) is labeled (with a radioisotope such as ¹²⁵I or ³⁵S, or an assayable enzyme, such as horseradish peroxidase or alkaline phosphatase), and is brought into contact with a sample comprising the antibody, whereon the amount of the labeled protein standard bound to the antibody is measured.

[0268] Enzymatic and radiolabeling of a protein and/or the antibodies may be effected by conventional means. Such means will generally include covalent linking of the enzyme to the antigen or the antibody in question, such as by glutaraldehyde, specifically so as not to adversely affect the activity of the enzyme, by which is meant that the enzyme must still be capable of interacting with its substrate, although it is not necessary for all of the enzyme to be active, provided that enough remains active to permit the assay to be effected. Indeed, some techniques for binding enzymes are non-specific (such as using formaldehyde), and will only yield a proportion of active enzyme.

[0269] It may be desirable to immobilize one component of the assay system on a support, thereby allowing other components of the system to be brought into contact with the component and readily removed without laborious and time-consuming labor. It is possible for a second phase to be immobilized away from the first, but one phase is usually sufficient.

[0270] It is possible to immobilize the enzyme itself on a support, but if solid-phase enzyme is required, then this is generally best achieved by binding to antibody and affixing the antibody to a support, models and systems for which are well-known in the art. Simple polyethylene may provide a suitable support.

[0271] Enzymes employable for labeling are not particularly limited, but may be selected from the members of the oxidase group, for example. These catalyze production of hydrogen peroxide by reaction with their substrates, and glucose oxidase is often used for its good stability, ease of availability and cheapness, as well as the ready availability of its substrate (glucose). Activity of the oxidase may be assayed by measuring the concentration of hydrogen peroxide formed after reaction of the enzyme-labeled antibody with the substrate under controlled conditions well-known in the art.

### Milk

[0272] In certain aspects, provided herein are milk and derivatives thereof. Milk produced by vaccinated female subjects (e.g., dairy cows) comprises antibodies that bind at least one cell surface protein or a fragment thereof of at least one methanogen. Such milk can be orally consumed by subjects such that the antibodies therein can come in contact with at least one methanogen present in the gut of the subjects. Upon contact, the antibodies in the milk can neutralize the at least one methanogen and contribute to reducing methane production by the subjects.

[0273] Thus, milk from vaccinated female subject can be used to treat breast-feeding animals, thereby reducing methane production and/or methanogen colonization in young animals. This can be especially important when vaccination of young animals occurs concurrently with weaning.

[0274] In some embodiments, the milk is pasteurized and/or homogenized. In some embodiments, the milk is lyophilized, filtered, concentrated, evaporated, or processed to form dry milk powder (e.g., boiling at low pressure at low temperature). In some embodiments, said processing may allow longer shelf life of the milk/milk product and the antibodies present therein. In some embodiments, the fat content is removed/reduced from the milk. Processing of milk and/or preparation of derivatives of milk are well known in the art.

[0275] Appropriate care is taken to preserve the structural and functional (e.g., binding a methanogen) aspects of the antibodies. For example, in some embodiments, high pressure (˜200 MPa) and low temperature (−4° C.) are used throughout the process as described at least by Kim et al. (2008) Journal of Dairy Science, 91:4176-4182. In other embodiments, milk may be pasteurized at low-temperature of 60° C. for 10 minutes at standard pressure. These conditions may pasteurize milk without significantly altering the antibody function.

[0276] Alternatively, milk can be filtered to remove microorganisms instead of pasteurizing. Microfiltration is a process that replaces pasteurization and produces milk with fewer microorganisms and longer shelf life without a change in the quality of the milk. In this process, cream is separated from the skimmed milk and the skimmed milk is forced through ceramic microfilters that trap 99.9% of microorganisms in the milk (as compared to 99.999% killing of microorganisms in standard high temperature short time pasteurization).

[0277] Ultrafiltration uses finer filters than microfiltration, which allow lactose and water to pass through while retaining fats, calcium and protein. As with microfiltration, the fat may be removed before filtration and added back in afterwards. Ultrafiltered milk is used widely in the industry in cheesemaking.

[0278] Colostrum may similarly be used in the milk embodiments disclosed herein.

### Animal Feed

[0279] Provided herein are animal feeds that are useful in reducing methane production by a subject. Animal feed encompasses any edible consumables that are suitable for consumption by the subject of the present disclosure. Accordingly, animal feed also includes drinking water or other food items that may be consumed by the subject including but not limited to humans, canines, felines, and ruminants.

[0280] Animal feed may be used in combination with or comprise any one of vaccines, antibodies, milk, agents (e.g., an agent that reduces methane production in a subject, a probiotic bacterial strain, a small molecule inhibitor, etc.), or other compositions of the present disclosure (e.g., those reducing methane production in a subject). Animal feed may comprise at least one agent, which reduces the methane production in a subject.

[0281] In some embodiments, the animal feed comprises an antibody that binds at least one cell surface antigen or a fragment thereof of at least one methanogen.

[0282] In some embodiments, the animal feed comprises a composition comprising an antibody that binds at least one cell surface antigen or a fragment thereof of at least one methanogen. For example, the animal feed may comprise milk or derivatives thereof comprising said antibody.

[0283] In some embodiments, the animal feed is liquid (e.g., drinking water, milk). An antibody that binds at least one cell surface antigen or a fragment thereof of at least one methanogen or a composition comprising same may be added to the liquid animal feed (e.g., drinking water) before being given to the subject. In some embodiments, said antibody or a composition comprising same may be added to the drinking water. In other embodiments, the milk or derivatives thereof comprising said antibody may be given directly to the subject, or added to other liquid animal feed (e.g., drinking water).

[0284] In other embodiments, the animal feed is solid. In some such embodiments, the animal feed may comprise hay, straw, silage, compressed and pelleted feeds, oils and mixed rations, and sprouted grains and legumes. An antibody that binds at least one cell surface antigen or a fragment thereof of at least one methanogen or a composition comprising same may be added to the solid animal feed before being given to the subject.

[0285] In some embodiments, an animal feed may comprise fats and fatty acids that further aid in reducing methane production in subjects. Based on a meta-analysis, fat supplementation reduced CH₄ by 3.77% in cattle and 4.30% in sheep per 1% dietary fats. Fat decreases CH₄ production (expressed as g/kg digestible dry matter (DM)) more from sheep than from cattle, which was attributed to the comparatively lower depression of DM digestion together with numerically larger depression of CH₄ production (g/kg DM) by fat in sheep. Among fatty acids, C12:0, C18:3 and other polyunsaturated fatty acids (PUFA) are more potent than saturated fatty acids. The CH₄-suppressing efficacy of fats generally persists, with persistent suppression being noted for 72 days and longer in cattle.

[0286] Fats supplemented up to 6% of the diet (DM) can also improve milk production while appreciably decreasing CH₄ emissions (15%) in cattle, but higher concentrations decreased production efficiency due to a reduction of feed digestion and fermentation. Medium-chain fatty acids (MCFA) and PUFA can lower abundance and metabolic activities of rumen methanogens and change their species composition. PUFA can also directly inhibit protozoa and serve as hydrogen sink through biohydrogenation. Both MCFA and PUFA appear to damage the cell membrane, thereby abolishing the selective permeability of cell membrane, which is required for survival and growth of methanogens and other microbes. The inhibitory effect of fat on methanogenesis is more pronounced in cattle fed concentrate-based diets than in cattle fed forage-based diets. Because C12; and C14:0 is more inhibitory to M. ruminantium at pH 5 than at pH 7, the concentrate level-dependent anti-methanogenic efficacy of MCFA and PUFA is probably attributed to the lower pH associated with high-concentrate diets.

[0287] In some embodiments, the animal feed comprises fat and/or fatty acid. In some embodiments, the animal feed comprises fat and/or fatty acid that is at least about 1%, 2%, 3%, 4%, 5%, or 6% of the diet (e.g., diet based on dry matter).

[0288] Numerous animal feed and feed additives are known in the art. Any agent that reduce methane production in a subject (e.g., small molecule inhibitors, e.g., Table 9, probiotic bacterial strain, etc.; see below) described herein or those known in the art may be used as a feed additive. Certain exemplary feed additives include: berberine, nitrate, eucalyptus oil, alliin, diallyl disulfide (DADS), flavanone glycoside (e.g., neohesperidin, isonaringin, poncirin, hesperidin), 3-nitrooxypropanol, rac-4-Phenylbutane-1,2-diyl dinitrate, 2-(hydroxymethyl)-2-(nitrooxymethyl)-1,3-propanediol, N-ethyl-3-nitro-oxy-propionic sulfonyl amide, 5-nitrooxy-pentanenitrile, 5-nitrooxy-pentane, 3-nitro-oxy-propyl propionate, 1,3-bis-nitrooxypropane, 1,4-bis-nitrooxybutane, 1,5-bis-nitrooxypentane, 3-nitro-oxy-propyl benzoate, 3-nitro-oxy-propyl hexanoate, 3-nitro-oxy-propyl 5-nitro-oxy-hexanoate, benzylnitrate, isosorbid-dinitrate, N-[2-(nitrooxy)ethyl]-3-pyridinecarboxamide, 3-nitrooxy propionic acid, methyl-3-nitrooxy propionate, ethyl-3-nitrooxy propionate, ethyl-4-nitrooxy butanoate, ethyl-3-nitrooxy butanoate, 5-nitrooxy pentanoic acid, ethyl-5-nitrooxy pentanoate, 6-nitrooxy hexanoic acid, ethyl-6-nitrooxy hexanoate, ethyl-4-nitrooxy-cyclohexylcarboxylate, 8-nitrooxy octanoic acid, ethyl-8-nitrooxy octanoate, 11-nitrooxy undecanoic acid, ethyl-11-nitrooxy undecanoate, 5-nitrooxy-pentanoic amide, 5-nitrooxy-N-methyl-pentanoic amide, lauric acid, and haloform (e.g., bromoform, chloroform, iodoform).

Agents that Reduce Methane and/or Hydrogen Production in Ruminants

### Combination Treatment

[0289] Vaccines, antibodies, milk, animal feed, and agents (e.g., an agent that reduces methane production in a subject, a probiotic bacterial strain, etc.) may be administered to a subject in any combination. By “in combination with,” it is not intended to imply that the agents must be administered at the same time and/or formulated for delivery together, although these methods of delivery are within the scope of the present disclosure. Compositions can be administered concurrently with, prior to, or subsequent to, one or more other desired therapeutics or medical procedures. In general, each agent (vaccines, antibodies, milk, animal feed, agents that reduce methane production in a subject) will be administered at a dose and/or on a time schedule determined for that agent. In some embodiments, the present disclosure encompasses the delivery of combinations that may improve immune response against at least one methanogen, and/or reduce methane production by a subject.

[0290] The combinations can conveniently be presented for use in the form of a pharmaceutical formulation and thus pharmaceutical compositions comprising a combination as defined above together with a pharmaceutically acceptable diluent or carrier represent a further aspect of the invention.

[0291] The individual compounds of such combinations can be administered either sequentially or simultaneously in separate or combined pharmaceutical formulations.

[0292] It will further be appreciated that (vaccines, antibodies, milk, animal feed, agents that reduce methane production in a subject) in combination may be administered together in a single composition or administered separately in different compositions. In general, it is expected that agents utilized in combination with be utilized at levels that do not exceed the levels at which they are utilized individually. In some embodiments, the levels utilized in combination will be lower than those utilized individually. In some embodiments, the combinations, each or together may be administered according to the split dosing regimens described herein.

[0293] The term “conjoint” or “combination” administration, as used herein, refers to the administration of two or more agents that aid in reducing methane production in a subject. The different agents comprising the combination may be administered concomitant with, prior to, or following the administration of one or more agents.

[0294] In certain embodiments, combination administration can demonstrate synergisms between the two or more agents resulting in a greater methane reduction in subject than either agent alone.

[0295] Synergistic effects, also known as synergy, refer to the phenomenon where the combined effect of two or more factors or components is greater than the sum of their individual effects. In other words, when these factors or components interact, they create an amplified or enhanced effect that is greater than what would be expected based on their individual contributions.

[0296] In certain cases, the agents may have different modes of action or mechanisms by which they exert their effects, for example targeting different methanogens or different methanogen enzymes. When these agents are combined, their actions can complement each other, targeting different aspects of a problem or working on multiple pathways simultaneously. This complementary action enhances their overall effectiveness, resulting in a better outcome than either agent could achieve alone.

[0297] In certain cases, synergism can significantly enhance the efficacy of the agents involved. For example, the agents may interact in a way that enhances their absorption, distribution, or bioavailability, increasing their effectiveness in treating a particular condition.

[0298] In certain cases, one agent may enhance the effects of the other without contributing much individually. This is known as potentiation. The presence of one agent can increase the uptake, binding affinity, or sensitivity of the other, making it more potent and effective. The combined effect is greater than what would be achieved by either agent on its own.

[0299] In certain cases, one or more agents may have inherent weaknesses or face resistance from target organisms or systems. By combining them with another agent, the synergistic interaction can bypass or counteract these obstacles, leading to a more effective outcome. For example, antibodies generated via vaccination of a first vaccine may face resistance to ruminal proteases, thus, combining with protease inhibitors or one or more additional vaccine towards certain ruminal proteases may reduce the resistance of the first vaccine.

[0300] In certain cases, combining two agents can amplify the positive effects or benefits they provide individually. For example, combining a vaccine for a methanogen with a vaccine towards a separate microorganism that is syntrophic with the methanogen can amplify the positive effects or benefits of the vaccine by further reducing the fitness of the methanogen.

[0301] The level of synergism achieved when combining agents depends on numerous factors and is typically assessed through experimental studies or empirical observations specific to the agents and desired outcomes. Generally, combination of agents can lead to different degrees of synergisms ranging from No synergism to Supra-additive synergism.

[0302] No Synergism: In some cases, the combined effect of two or more agents may simply be additive or even less than additive. This means that the combined effect is equal to the sum of their individual effects or even lower. In such instances, no synergism is observed, and the agents may not interact in a way that amplifies their effects.

[0303] Mild to Moderate Synergism: A common outcome when combining agents is a mild to moderate level of synergism. This implies that the combined effect is greater than the sum of their individual effects, but not dramatically so. The degree of synergism may vary depending on the specific agents and the conditions of their interaction.

[0304] Strong Synergism: In some cases, the combination of agents can lead to a strong synergistic effect. This means that the combined effect is significantly greater than the sum of their individual effects. Strong synergism often results in an amplified and more potent effect, exceeding what would be expected based on the additive effects of the individual agents.

[0305] Supra-additive Synergism: In rare instances, the combined effect of two or more agents can be supra-additive, meaning it surpasses even strong synergism. Supra-additive synergism results in an exceptionally powerful effect that far exceeds the sum of the individual effects. Such cases are usually considered highly beneficial, as they can provide remarkable outcomes in terms of efficacy, efficiency, or other desired parameters.

[0306] Any suitable degree of synergism (%_{Synergism}) can be demonstrated with a combination therapy comprising any two or more compositions or agents of the present disclosure (e.g., a vaccine and another agent), such as an improvement of at least 5, 10, 20, 30, 40, 50, 60, 70, 80, 90, 100, 200, 300, or 400% and/or not more than 10, 20, 30, 40, 50, 60, 70, 80, 90, 100, 200, 300, 400, 500, or 1000%, for example 5-1000%, preferably 10-500%, more preferably 30-300%.

[0307] In certain embodiments, the improvement is measured in the amount of methane reduced when administered a combination therapy as compared to either agent alone, for example %_{Synergism}=Methane_{combo}*(Methane_{vaccine})⁻¹. In certain embodiments, the %_{Synergism} is measured in a herd of at least 10, 20, 30, 40, 50, 60, 70, 80, 90, 100, 500, or 1000 animals and/or not more than 20, 30, 40, 50, 60, 70, 80, 90, 100, 500, 1000, or 2000 animals and the statistical significance, e.g., coefficient of variation of %_{Synergism} within the herd is at least 50, 60, 70, 75, 80, 85, 90, 95, 99, 99.5, or 100%.

[0308] In certain embodiments, the synergism resulting from the combinatorial therapy results in a prolonged efficacy of the treatment as compared to either alone. In certain embodiments, the combinatorial therapy is effective for at least 1, 2, 3, 4, 5, 6, 7, 8, 9, 10, 11, 12, 16, or 20 months and/or not more than 2, 3, 4, 5, 6, 7, 8, 9, 10, 11, 12, 16, 20, or 24 months, for example 1-24 months. In certain embodiments, the length of efficacy of the treatment is at least 5, 10, 20, 30, 40, 50, 60, 70, 80, 90, 100, 200, 300, or 400% and/or not more than 10, 20, 30, 40, 50, 60, 70, 80, 90, 100, 200, 300, 400, 500, or 1000% greater than either agent alone, for example 5-1000%, preferably 10-500%, more preferably 30-300%.

[0309] An exemplary combinatorial therapy includes vaccination with a first vaccine encoding one or more methanogen surface proteins in combination with at least one additional vaccine encoding one or more of different methanogen surface proteins.

[0310] Another exemplary combinatorial therapy includes vaccination with a vaccine encoding one or more methanogen surface proteins in combination with administration of a small molecule inhibitor of methanogenesis. Without wishing to be bound to theory, it is hypothesized that the small molecule inhibitor of methanogenesis may remove the plurality of ruminal methanogens, and antibodies generated from the vaccination prevent new methanogens for colonizing the methanogen-deficient rumen.

[0311] Accordingly, in certain aspects, a vaccine of the present disclosure is administered to a subject conjointly or in a combination with at least one inhibitor of methane production described herein or those known in the art. In some embodiments, the at least one inhibitor is selected from Tables 9-13.

[0312] In some embodiments, the at least one inhibitor is administered to a subject at least 1, 2, 3, 4, 5, 6, 7, 8, 9, 10, 11, 12, 13, 14, 15, 16, 17, 18, 19, 20, 21, 22, 23, 24, 25, 26, 27, 28, 29, 30, 31, 32, 33, 34, 35, 36, 37, 38, 39, 40, 41, 42, 43, 44, 45, 46, 47, 48, 49, or 50 times. In some embodiments, the at least one inhibitor is administered to a subject daily, semiweekly, weekly, biweekly (every 2 weeks), monthly, semiannually, or annually. In some embodiments, the at least one inhibitor is administered to a subject every 1, 2, 3, 4, 5, 6, 7, 8, 9, 10, 11, 12, 13, 14, 15, 16, 17, 18, 19, 20, 21, 22, 23, 24, 25, 26, 27, 28, 29, 30, 31, 32, 33, 34, 35, 36, 37, 38, 39, 40, 41, 42, 43, 44, 45, 46, 47, 48, 49, 50, 51, 52, 53, 54, 55, 56, 57, 58, 59, 60, 61, 62, 63, 64, 65, 66, 67, 68, 69, 70, 71, 72, 73, 74, 75, 76, 77, 78, 79, 80, 81, 82, 83, 84, 85, 86, 87, 88, 89, or 90 days. In some embodiments, the at least one inhibitor is administered to a subject for a duration of at least, about, or no more than 1, 2, 3, 4, 5, 6, 7, 8, 9, 10, 11, 12, 13, 14, 15, 16, 17, 18, 19, 20, 21, 22, 23, 24, 25, 26, 27, 28, 29, 30, 31, 32, 33, 34, 35, 36, 37, 38, 39, 40, 41, 42, 43, 44, 45, 46, 47, 48, 49, or 50 weeks. In some embodiments, the at least one inhibitor is administered to a subject for at least 1 week but no more than 1 month. In some embodiments, the at least one inhibitor is administered to a subject orally, intravenously, intramuscularly, or subcutaneously. In preferred embodiments, the at least one inhibitor is administered to a subject orally. In some embodiments, the at least one inhibitor is administered to a subject as a feed additive.

[0313] In some embodiments, the at least one inhibitor is administered to a subject concomitant with, prior to, or following the vaccination with a vaccine of the present disclosure. In some embodiments, the at least one inhibitor is administered to a subject on the same day as the subject is vaccinated. In some embodiments, a subject is administered with the at least one inhibitor one or more times to reduce the methane production by the subject, and said subject is vaccinated as a maintenance regimen.

[0314] In some embodiments, the at least one inhibitor comprises 3NOP. In some embodiments, a subject is administered at least about or no more than 0.1, 0.2, 0.3, 0.4, 0.5, 0.6, 0.7, 0.8, 0.9, 1, 2, 3, 4, 5, 6, 7, 8, 9, 10, 11, 12, 13, 14, 15, 16, 17, 18, 19, 20, 21, 22, 23, 24, 25, 26, 27, 28, 29, 30, 31, 32, 33, 34, 35, 36, 37, 38, 39, 40, 41, 42, 43, 44, 45, 46, 47, 48, 49, or 50 grams (g) of 3NOP per dose. In some embodiments, 3NOP is administered to a subject every 1, 2, 3, 4, 5, 6, 7, 8, 9, 10, 11, 12, 13, 14, 15, 16, 17, 18, 19, 20, 21, 22, 23, 24, 25, 26, 27, 28, 29, 30, 31, 32, 33, 34, 35, 36, 37, 38, 39, 40, 41, 42, 43, 44, 45, 46, 47, 48, 49, 50, 51, 52, 53, 54, 55, 56, 57, 58, 59, 60, 61, 62, 63, 64, 65, 66, 67, 68, 69, 70, 71, 72, 73, 74, 75, 76, 77, 78, 79, 80, 81, 82, 83, 84, 85, 86, 87, 88, 89, or 90 days.

[0315] In some embodiments, at least about 0.5 g but no more than 25 g of 3NOP is administered to a subject in a given day. In preferred embodiments, about 2.5 g of 3NOP is administered to a subject in a given day. In some embodiments, about 2.5 g of 3NOP is administered to a subject per day for at least 1, 2, 3, 4, 5, 6, 7, 8, 9, 10, 11, 12, 13, 14, 15, 16, 17, 18, 19, 20, 21, 22, 23, 24, 25, 26, 27, 28, 29, or 30 days.

TABLE 9
Exemplary methanogenesis inhibitor

| Chemical | Reference |
|---|---|
| 1,3-bis-nitrooxypropane | US10154981B2 |
| 1,3-bis-nitrooxypropane | US9266814B2 |
| 1,4-bis-nitrooxybutane | US10806706B2 |
| 1,4-bis-nitrooxybutane | US10154981B2 |
| 1,4-bis-nitrooxybutane | US9266814B2 |
| 1,5-bis-nitrooxypentane | US10806706B2 |
| 1,5-bis-nitrooxypentane | US10154981B2 |
| 1,5-bis-nitrooxypentane | US9266814B2 |
| 11-nitrooxy undecanoic acid | US9365489B2 |
| 11-nitrooxy undecanoic acid | US10154981B2 |
| 2 mercaptoethanesulfonate | EP2747181A1 |
| 2-bromoethane sulfonic acid (2-BESA) | EP2747181A1 |
| 2-bromoethane sulphonate | US6251879B1 |
| 2-chloroethanesulfonate | EP2747181A1 |
| 2-nitropropanol | EP2747181A1 |
| 3-nitro-oxy-propyl 5-nitro-oxy-hexanoate | US10154981B2 |
| 3-nitro-oxy-propyl benzoate | US10154981B2 |
| 3-nitro-oxy-propyl hexanoate | US10154981B2 |
| 3-nitro-oxy-propyl propionate | US10154981B2 |
| 3-nitrooxy propionic acid | US9365489B2 |
| 3-nitrooxy propionic acid | US10154981B2 |
| 3-nitrooxy-propyl 5-nitrooxy-hexanoate | US9266814B2 |
| 3-nitrooxy-propyl benzoate | US9266814B2 |
| 3-nitrooxy-propyl hexanoate | US9266814B2 |
| 3-nitrooxy-propyl propionate | US9266814B2 |
| 3-nitrooxypropanol | US10806706B2 |
| 3-nitrooxypropanol | US10154981B2 |
| 3-nitrooxypropanol | US9266814B2 |
| 5-nitrooxy hexanoic acid | US10806706B2 |
| 5-nitrooxy pentanoic acid | US10806706B2 |
| 5-nitrooxy pentanoic acid | US9365489B2 |
| 5-nitrooxy pentanoic acid | US10154981B2 |
| 5-nitrooxy-N-methyl-pentanoic amide | US9365489B2 |
| 5-nitrooxy-N-methyl-pentanoic amide | US10154981B2 |
| 5-nitrooxy-N-pentanoic amide | US9365489B2 |
| 5-nitrooxy-pentane | US10154981B2 |
| 5-nitrooxy-pentane | US9266814B2 |
| 5-nitrooxy-pentanenitrile | US10154981B2 |
| 5-nitrooxy-pentanenitrile | US9266814B2 |
| 5-nitrooxy-pentanoic amide | US10154981B2 |
| 6-nitrooxy hexanoic acid | US9365489B2 |
| 6-nitrooxy hexanoic acid | US10154981B2 |
| 8-nitrooxy octanoic acid | US9365489B2 |
| 8-nitrooxy octanoic acid | US10154981B2 |
| 9-nitrooxynonanol | US10806706B2 |
| abietic acid | US10799544B2 |
| acetylene | EP2747181A1 |
| ajoene | US20220256890A1 |
| Alcaligenes faecalis | US20140072535A1 |
| allicin | US20220256890A1 |
| alliin | US20220256890A1 |
| allylpropyl disulfide | US20220256890A1 |
| Asparagopsis armata | US10881697B2 |
| Bacillus amyloliquefaciens | WO2021211548A1 |
| Bacillus strain 300 (NRRL No. B-50943) | US20210360945A1 |
| Bacillus strain 86 (NRRL No. B-50944) | US20210360945A1 |
| Bacillus, Lactobacillus, Strptocoecus, Candida and Pichia | WO2007072935A1 |
| bambermycin | AU2018229465A1 |
| benzylnitrate | US10154981B2 |
| berberine, nitrate, and eucalyptus oil | US10440975B2 |
| bis-(2-nitrooxyethyl) ether | US9266814B2 |
| bis(2-hydroxyethyl)amine dinitrate | US10806706B2 |
| bromochloromethane | US6251879B1 |
| Bromoforms | US20220175670A1 |
| chloroform | EP2747181A1 |
| Chloroforms | US20220175670A1 |
| Cysteine | US5843498A |
| dehydoabietic acid | US10799544B2 |
| diallyl disulfide | US20180093308A1 |
| diallyl disulphide | US20220256890A1 |
| diallyl trisulfide | US20180093308A1 |
| diallyl trisulfide | US20220256890A1 |
| egg powder from immunizing hens with methane-producing M. stadtmaniae | US7820171B2 |
| methanogens | |
| Eggs laid by hens innoculated with methanogen antigens | US20200121730A1 |
| essential oil | US20180001358A1 |
| ethyl 2 butynoate | EP2747181A1 |
| ethyl propionate | US20180093308A1 |
| ethyl-11-nitrooxy undecanoate | US9365489B2 |
| ethyl-11-nitrooxy undecanoate | US10154981B2 |
| ethyl-3-nitrooxy butanoate | US10154981B2 |
| ethyl-3-nitrooxy propionate | US9365489B2 |
| ethyl-3-nitrooxy propionate | US10154981B2 |
| ethyl-3-nitrooxy-butanoate | US9365489B2 |
| ethyl-4-nitrooxy butanoate | US10154981B2 |
| ethyl-4-nitrooxy-butanoate | US9365489B2 |
| ethyl-4-nitrooxy-cyclohexylcarboxylate | US9365489B2 |
| ethyl-4-nitrooxy-cyclohexylcarboxylate | US10154981B2 |
| ethyl-5-nitrooxy pentanoate | US9365489B2 |
| ethyl-5-nitrooxy pentanoate | US10154981B2 |
| ethyl-6-nitrooxy hexanoate | US9365489B2 |
| ethyl-6-nitrooxy hexanoate | US10154981B2 |
| ethyl-8-nitrooxy octanoate | US9365489B2 |
| ethyl-8-nitrooxy octanoate | US10154981B2 |
| ethylene | EP2747181A1 |
| eugenol | US7763273B2 |
| fluoroacetate | EP2747181A1 |
| fluvastatin | EP2747181A1 |
| halothane | US6251879B1 |
| hesperidin | EP2838376B1 |
| hop acid | US8197863B2 |
| hydrogen peroxide | WO2010071222A1 |
| hydroxycinnamic acid | WO2021038832A1 |
| Impatiens balsamina | NZ562783A |
| Iodoforms | US20220175670A1 |
| isonaringin | EP2838376B1 |
| isopimaric acid | US10799544B2 |
| isosorbid-dinitrate | US10154981B2 |
| isosorbid-dinitrate | US9266814B2 |
| laidlomycin | AU2018229465A1 |
| lasalocid | AU2018229465A1 |
| limonene | US7763273B2 |
| lovastatin | EP2747181A1 |
| lumazine | EP2747181A1 |
| medium and long chain fatty acids | EP2747181A1 |
| Megasphaera sp. & Coprococcus catus | US10961559B2 |
| methyl chloride | EP2747181A1 |
| methyl fluoride | EP2747181A1 |
| methyl-3-nitrooxy propionate | US9365489B2 |
| methyl-3-nitrooxy propionate | US10154981B2 |
| mevastatin | EP2747181A1 |
| Monascus sp. | US20130011384A1 |
| monensin | AU2018229465A1 |
| N-[2-(nitrooxy)ethyl]-3-pyridinecarboxamide | US10154981B2 |
| N-[2-(nitrooxy)ethyl]-3-pyridinecarboxamide | US9266814B2 |
| N-ethyl-3-nitro-oxy-propionic sulfonyl amide | US10154981B2 |
| neoabietic acid | US10799544B2 |
| neohesperidin | EP2838376B1 |
| nitrate | EP2747181A1 |
| nitrite | EP2747181A1 |
| nitroethane | EP2747181A1 |
| palustric acid | US10799544B2 |
| Peroxide source, peroxidase | US20210227850A1 |
| phosphate | EP2747181A1 |
| pimaric acid | US10799544B2 |
| poncirin | EP2838376B1 |
| Propionibacterium | US20120276058A1 |
| propynoic acid | EP2747181A1 |
| protease-resistant bacteriocin | EP1673983A1 |
| R(OC2H4)n(OH); R = C12-15; n = 7 | AU2013288441B2 |
| R1(CH2)nONO2; n = 1-15; R1 = H, C1-C6alkyl, phenyl, —OH, —NH2, —CN, | US10806706B2 |
| —COOH, —O(C═O)R8, —NHC(═O)R8, SO2NHR8, or —ONO2; R8 = C1-C6alkyl, | |
| phenyl, pyridyl; when n is >3 the hydrocarbon chain may be interrupted by —O— or | |
| —NH— | |
| rac-4-Phenylbutane-1,2-diyl dinitrate, 2-(hydroxymethyl)-2-(nitrooxymethyl)-1,3- | US10154981B2 |
| propanediol | |
| red yeast rice | US20140322798A1 |
| s-allyleysteine | US20220256890A1 |
| saponin | US20180001358A1 |
| Saponin & medium chain fatty acid | US10695393B2 |
| sodium bromoethenesulfonate (BES) | EP2747181A1 |
| vinyldithiines | US20220256890A1 |
| ω-nitrooxyC3-10alkane-1-ol | US20210392922A1 |
| [chemical structure] | US9365489B2 |
| [chemical structure] | WO2022103280A1 |
| [chemical structure] | US20160183564A1 |
| [chemical structure] | EP3628169A1 |
| [chemical structure] | US20210163397A1 |
| [chemical structure] | WO2020221805A1 |
| [chemical structure] | AU2018383221A1 |
| [chemical structure] | US20030219467A1 |
| Asparagopsis taxiformis | USPP34607P3 |
| Lauric acid | |

*Each of the references in Table 9 is incorporated herein by reference.

Other exemplary inhibitors of methane production are discussed below.
Probiotics that Reduce Methane Production in Animals

[0316] Probiotics are a class of beneficial active microorganisms or their cultures. Probiotics are useful in reducing CH4 emissions in animals (Table 10). There are many types of probiotics, and different strains have different inhibitory effects on CH4 emissions. For example, the GA03 strain of Acetobacter is more effective at inhibiting CH4 production than other isolated strains. Most probiotics reduce CH4 production by influencing the activities of ruminal microorganisms, with no adverse effects on animals. In addition, probiotics enhance ruminal fermentation.

[0317] Lactic acid bacteria, which have been used as feed additives for a long time, not only reduce CH4 emissions per unit volatile fatty acid (VFA) output, but also improve the fermentation quality and fiber digestibility of silage. In addition, the denitrifying bacterium Bacillus 79R4 could prevent NO-2-N poisoning and microbial ecosystems from impairing fermentation efficiency. Furthermore, Bacillus licheniformis reduces CH4 production and increases feed energy and protein utilization.

TABLE 10
Exemplary probiotic bacteria that reduce methane production

| | | Addition amount; maximum | |
|---|---|---|---|
| Types of probiotics | Inhibitory effect | suppression methane amount | Inhibition mechanism |
| Propionic acid bacillus | [symbol] (Most propionic bacteria) | 100 μL of the propionic acid bacteria | Unknown |
| | [symbol] (P. jenscenii LMGT282 | culture (2 × 10 [symbol] to 4 × 10 [symbol] | |
| | and P. thoenii LMGT2827 or T [symbol] ) | colony forming units), Propioni- | |
| | | bacterium thoenii T159; 20% | |
| Lactic acid bacteria | [symbol] | [symbol] cfu/g fresh weight, Lacto- | Hydrogen consumption |
| | | bacillus plantarum, 8.8 ml/g(72 h) | |
| Acetic acid bacteria | [symbol] | 1% Proteiniphilum acetatigenes | Reduced the number of |
| | | GA [symbol] | methanogens |
| Enterococcus faccium | [symbol] | 0.1%; 2.08 mM/mL | Alters microbial flora |
| SROD | | | |
| Probiotic products | [symbol] | 2 g probiotic products in | Reduce the number of |
| of Ruminococcus | | powder 1.2 ml/g of dry matter | rumen protozoa |
| flavefaciens | | 10 ml probiotic products in liquid; | |
| | | 1.2 ml/g of dry matter | |
| Baccillus licheniformis | [symbol] | 2.5 × 10 [symbol] 2.7 [symbol] | Unknown |
| Saccharomyces | [symbol] ( [symbol] et al., 2019) | — | Affects rumen microbes |
| cerevistae | ( [symbol] et al., 2019) | | |

[symbol]

indicates data missing or illegible when filed

Prebiotics that Reduce Methane Production

[0318] Prebiotics are substances that are not easily digested or absorbed by the host. They selectively stimulate the growth and activity of one or several ruminal microorganisms with a positive effect on ruminal fermentation. Prebiotics suppress ruminal CH4 production in subjects. Prebiotics mainly reduce rumen CH4 production by altering the bacterial community structure, influencing the permeability of the cell walls of methanogenic archaea, and stimulating other bacteria to compete with methanogens for H2 (Table 11).

[0319] The prebiotic chitosan can influence bacterial community structures by altering microbial population compositions, for example, by replacing fibrinolytic enzyme-producing microbes (Firmicutes and Fibrobacteres) with amylolytic enzyme-producing microbes (Bacteroides and Proteus); in turn, reducing CH4 production. Chitosan could influence the ruminal fermentation process by altering VFA distributions and increasing propionic acid concentrations, which reduces CH4 production in turn. However, the reduction in CH4 is associated with the degree of chitosan deacetylation, which could alter the permeability of the methanogen cell wall. In addition, various yeast products could reduce CH4 emissions by stimulating acetic acid-producing bacteria to compete with methanogens or metabolize hydrogen.

TABLE 11
Exemplary prebiotic bacteria that reduce methane production

| | | Addition amount; maximum | |
|---|---|---|---|
| Types of prebiotics | Inhibitory effects | methane suppression amount | Inhibition mechanismi |
| Chitosan | — | 3000 (molecular weights) | (1) Alters microbial |
| | | dry matter; 22.9% | community structure |
| | | ml/day (Tong et al., 2020) | (Tong et al., 2020) |
| | | 2% Chitosan + 21% of crude | (2) Alters fermentation |
| | | glycerin; 53.679% ( [symbol] | pathway ( [symbol] |
| | | [symbol] 2020) | [symbol] |
| | | | [symbol] 2020) |
| | | | (3) Influences |
| | | | methanogenic bacteria |
| | | | cell wall permeability |
| | | | (Zanferari et al., 2018) |
| Yeast products | — | 4 mg/1 g dry matter; [symbol] | Indirect consumption of |
| | | | hydrogen |

[symbol]

indicates data missing or illegible when filed

Other Agents that Reduce Methane in Animals

[0320] Among the CH4 mitigation options, inhibiting the growth or the metabolic activity of methanogens is the most effective approach. Another strategy is to modulate rumen microbiome so that fermentation is shifted toward decreased H₂ production and increased production of reduced VFA (e.g., propionate). Provided herein are exemplary and non-exhaustive descriptions of anti-methanogenic compounds evaluated with a focus on their impact rumen methanogens.

### Coenzyme M Analogs

[0321] Methyl-CoM reductase (Mcr) mediates the final step of all the methanogenesis pathways and CoM (2-mercaptoethanesulfonic acid) is an essential cofactor serving as the methyl group carrier. Mcr reduces methyl-CoM to CH₄. CoM is found in all known methanogens but not in other archaea or bacteria. Several halogenated sulfonated compounds, including 2-bromoethanesulfonate (BES), 2-chloroethanesulfonate (CES), and 3-bromopropanesulfonate (BPS), are structural analogs of CoM, and they can competitively and specifically inhibit Mcr activity, lowering CH₄ production at relatively low concentrations. Different species of methanogens vary in sensitivity to these inhibitors. Of three species tested on BES, Mbb. Ruminantium was the most sensitive, while Methanosarcina mazei was the least sensitive, with Methanomicrobium mobile being intermediate. All three species appeared to be resistant to BPS up to 250 μmol/L in pure cultures. The different sensitivity to these CoM analogs has been attributed to varying ability to uptake these inhibitors into the cells. Methanogens able to synthesize their own CoM are less dependent on external CoM and are thus less sensitive. Mbb. Ruminantium is the only ruminal methanogen that requires CoM synthesized by other methanogens.

Halogenated Aliphatic C₁-C₂ Hydrocarbon

[0322] Halogenated aliphatic compounds with 1 or 2 carbons, such as chloroform, bromochloromethane (BCM), bromoform, bromodichloromethane, dibromochloromethane, carbon tetrachloride, trichloroacetamide, and trichloroethyladipate, can lower ruminal CH₄ production. These halogenated compounds block the function of corrinoid enzymes and inhibit cobamide-dependent methyl group transfer in methanogenesis. These halogenated compounds also competitively inhibit CH₄ production by serving as terminal electron (e) acceptors. Drenching chloroform to cattle inhibited methanogenesis substantially for up to 32 days without affecting feed digestion or basic rumen function. The addition of BCM depressed CH₄ production both in vitro and in vivo. In steers fed grain-based diets, BCM decreased CH₄ production by 50 to 60% with no signs of toxicity or residues in meat. It was also reported that the abundance of total bacteria and protozoa was not changed, but methanogenesis and growth of methanogens were drastically inhibited by BCM in both batch cultures and continuous fermenters. While the commercial use of chloroform, a recognized carcinogen, is not practical, it provides validation for the class of BCM compounds in reducing methane production.

[0323] Some marine plants such as red seaweed, and algae, lichen, and fungi can contain high concentrations of organobromine compounds such as bromomethane and bromoform. A recent in vitro study showed that red seaweed Asparagopsis taxiformis lowered CH₄ production by 99% at a dose of 2% of organic matter substrate. No adverse effect on feed digestion or fermentation was noted at ≤5% (of dry matter) inclusion. Thus, red seaweed, and probably other organobromine-rich plants, may offer a potentially practical natural approach to mitigate CH₄ emission.

### Nitrooxy Compounds

[0324] 3-Nitrooxypropanol (3NOP) and ethyl-3NOP, two new synthetic compounds, have been shown to have specific anti-methanogenic properties. 3NOP appears to inactive Mcr by competitively binding to the Mcr active site and then oxidizing the Ni¹⁺ that is required for Mcr activity. Feeding of 3NOP at a dose rate of 2.5 g/day/cow mixed in diets decreased CH₄ emission by 60% per kg of DM intake. In a study using beef cattle, 3NOP fed at 2.0 g/day/cow decreased CH₄ yield by 59%, and the inhibition persisted for up to 112 days without much effect on feed intake, nutrient digestibility or total VFA concentrations. In one recent study, 3NOP fed at 40-80 mg/kg feed DM in dairy cows decreased CH₄ production by about 30% persistently for up to 84 days. Similarly, 3NOP fed at 2.5 g/day/cow decreased CH₄ yield by 37% in dairy cows. In sheep, 3NOP at 0.5 g/day also decreased CH₄ production by 29% without adverse effect on digestion or rumen fermentation. However, when 3NOP was directly added to the rumen through rumen cannula at a daily dose of 0.50 or 2.5 g per cow (equivalent to 25 to 125 mg/kg feed dry mailer), the degree of CH₄ suppression declined to 7-10%. The later study suggests that 3NOP needs to be fed together with the diet to achieve higher efficacy. Thus, 3NOP could be used to lower CH₄ emission from cows and sheep without adverse effects on nutrient utilization or animal performance. It has been demonstrated that 3NOP indeed decreased methanogen abundance while increasing the abundance of protozoa.

TABLE 12
Exemplary nitrogen-containing compounds that reduce methane production in animals

| | Inhibitory | Addition amount; maximum | |
|---|---|---|---|
| Types of nitrogenous compounds | effect | methane suppression amount | Inhibition mechanism |
| Nitrate | — | 20 mg/g dry matter; 21% | (1) Hydrogen consumption; |
| | | (Alvarez- [symbol] et al., 2019) | (2) Inhibits the proliferation |
| | | 5 mmol/L; 32.92% | of methanogen [symbol] reduces their |
| | | (Wa et al., 2019) | activity and abundance |
| | | 5 mM; 43.26% Lin rt al., 2017) | |
| Encapsulated nitrate (EN) | — | 70 g/100 kg of body | Reduces methane reducing |
| | | weight; 18.59% CH₄/kg of | bacteria |
| | | forage dry matter intake | |
| | | (Granja- [symbol] et al., 2019) | |
| | | 2.5%; 9.37 mM/d | |
| | | (Capelari et al., 2018) | |
| | | 2.5%, 2.8 g/kg Dry matter intake | |
| | | (Alema et al., 2019) | |
| Urea and nitrate mixture | — | 34 g/kg straw dry matter + 6 g/kg | Indirect consumption of hydrogen |
| | | dry matter of ammonium nitrate; | |
| | | 10.2% (Zhang et al., 2019) | |
| | | Urea + ammonium nitrate (34 + | |
| | | 6 g/kg of dry matter, respectively); | |
| | | 3.1 mL/g dry matter (Zhang et al., | |
| | | 2018) | |
| Nitroethane (NE), 2-Nitroethanol | — | 10 mmol/L; 96.7% (NE), 96.7% | (1) Inhibits the activity |
| (NEOH), 2-Nitro-1-Propanol | | (NEOH), 41.7% (NPOH) | of methanogens; |
| (NPOH) | | | (2) Inhibits methyl- |
| | | | coenzyme M gene expression; |
| | | | (3) Reduces the content of |
| | | | coenzyme F420 and F430 |
| 3-Nitrooxypropanol (NOP) | — | 0.08 mg/g dry matter; 44% | Inhibits methyl-Coenzyme M |
| | | (Alvarez- [symbol] et al., 2019) | activity |
| | | 2.5 g/animal/day; 38%/kg | |
| | | dry matter intake (Martinez- | |
| | | Fernandez et al., 2018) | |
| | | 60 mg/kg of feed dry matter; | |
| | | 26%/day (Melgar et al., 2020) | |
| | | 1.6 g; 28%(roughage), 23% | |
| | | (concentrate pellet) (Van | |
| | | [symbol] et al., 2019) | |

[symbol]

indicates data missing or illegible when filed

### Pterin Compounds

[0325] Pterin is a group of structural analogs of deazaflavin (F₄₂₀), which is a coenzyme involved in two steps of the hydrogenotrophic methanogenesis pathway. Therefore, pterin compounds can competitively inhibit CH₄ production. In one study, CH₄ production by Mbb. ruminantium, Ms. mazei, and Mm. mobile was significantly decreased by lumazin (2,4-pteridinedione) in a dose-dependent manner from 0.06 to 0.24 mmol/L. As expected, pterin is much less efficacious in mixed rumen cultures than in pure methanogen cultures. It was suggested that lumazine could be degraded or transformed by some microbes in mixed cultures or adsorbed to solid particles where it becomes unavailable to methanogens. Some N-substituted derivatives of p-aminobenzoic acid, which are inhibitors of methanopterin synthesis in methanogens, decreased methanogenesis in ruminal cultures without inhibiting VFA production.

### Hydroxymethylglutaryl-CoA (HMG-S-CoA) Reductase Inhibitors

[0326] All archaea contain long-chain isoprenoid alcohols as the major component of their cell membrane. Isoprenoid alcohols are unique to archaea. They are synthesized from mevalonate that is formed by reduction of 3-hydroxy-3-methylglutaryl coenzyme A (HMG-S-CoA) catalyzed by HMG-S-CoA reductase. This enzyme is also used for the synthesis of the same precursor ultimately used in cholesterol synthesis in humans. As an inhibitor of HMG-S-CoA reductase, statins (e.g., lovastatin and mevastatin) can inhibit the growth of methanogens by inhibiting the synthesis of mevalonate. Lovastatin and mevastatin may also act as a potential inhibitor of F₄₂₀-dependent NADP oxidoreductase as shown in the model structure of that enzyme. In the earliest reported study, mevastatin at 5.6 μmol/L inhibited the growth of all three strains of rumen Methanobrevibacter, but not rumen bacteria in vitro. In studies using a rumen simulation technique (Rusitec), lovastatin (150 mg/L) reduced CH₄ production by approximately 42% without altering bacterial counts or nutrient fermentation.

[0327] The high cost of pure statins promoted a search for natural sources of statins as agents to mitigate CH₄ production. Lovastatin is a secondary metabolite of idiophase of several fungal species (e.g., Penicillium spp., Aspergillus terreus, Monascus purpureus, and Pleurotus ostreatus), and it can reach a concentration up to 2.8% of the dry weight of P. ostreatus (oyster mushrooms) and 261 mg/kg fermented rice straw. Lovastatin extracted from fermented rice straw significantly reduced total CH₄ production by rumen methanogens by nearly 28% after 48 h in vitro incubation. Extract from A. terreus-fermented rice straw containing lovastatin (97 mg/g dry mass) also significantly reduced CH₄ production and abundance of methanogens, especially Methanobacteriales, and aerobic fungi, but increased several fiber-degrading bacteria. Lovastatin also altered the morphology of M. smithii significantly, resulting in abnormal membrane formation and asymmetric cell divisions and increased HMG-S-CoA reductase gene expression. Fermented rice straw extract also modulated expression of several genes associated with methanogenesis, increasing expression of mtr, mta, and mcr while decreasing expression of hmd and fno. Supernatant fractions containing statins produced by Mortierella wolfii also appeared promising to inhibit methanogenesis without reducing overall fermentation. In another study using sheep, fermented rice straw containing metabolites (possibly pravastatin and mevastatin) produced by Monascus spp. Decreased CH₄ emission (by 30%), the abundance of methanogens, and ruminal acetate:propionate ratio compared with the unfermented rice straw.

[0328] Diallyl disulfide, the main ingredient of garlic oil, is known to inhibit HMG-S-CoA reductase. Garlic oil (300 mg/L) was more effective than lovastatin as an inhibitor of CH₄ production (by up to 91% reduction); however, garlic oil also inhibited bacterial growth, which likely reduces the availability of methanogenesis substrates. Garlic oil lowered CH₄ production in vitro and growth of methanogens, altered community structure of methanogens after 24 h incubation. Moreover, interestingly, the anti-methanogenic efficacy increased over time up to 18 days of incubation.

### Plant Secondary Metabolites

[0329] Plants secondary metabolites (PSM), such as saponins, tannins, flavonoids, organosulphur compounds, and essential oils, have anti-microbial activities against several types of microorganisms. Numerous PSM extracts have been recognized as potential inhibitors of rumen methanogens and CH₄ production. Some forage plants rich in tannins and saponins have also shown promise at mitigating CH₄ emission from animals.

TABLE 13
Exemplary plant extracts that reduce methane production in animals

| | | Inhibitory | Addition amount; maximum | |
|---|---|---|---|---|
| Types of probiotics | | effects | suppression methane amount | Inhibition mechanisms |
| Plant extracts | Corymbia [symbol] leaf | — | 10 ml/calf/day; — | (1) Protozoa number |
| | | | | reduced (1.84 × 10 [symbol] /ml) |
| | | | | (2) Ratios of volatile fatty |
| | | | | acids altered |
| | Aloe vera, [symbol] | — | 25 mg/L and 50 mg/L Axadirachta | Unknown |
| | papaya, [symbol] | | indica, Carica papaya, Tithonia | |
| | indica, Moringa oleifern, | | diversifolia; 15% Jatropha | |
| | Tithania diversifolia, | | curcas and Moringa oleifera pods; | |
| | Jatropha curcas, and | | 30% ( [symbol] Hassen, 2018) | |
| | Moringa oleifera pod | | Eragrostis substrate, 4 ml plant | |
| | extracts | | extracts; 50% reduction in methane/ | |
| | | | Total gas production ( [symbol] | |
| | | | Hassen [symbol] 2020) | |
| | Pomegranate peel extract | — | 2% of dry matter intake, | Unknown |
| | and desert teak | | Punica granatum; 40% | |
| | extract | | T [symbol] mella undulata; 42% | |
| | Rhus [symbol] extract | — | 50 mg/L; lowest | Unknown |
| | [symbol] and Acacia | — | 2% dry matter basis, [symbol] | Unknown |
| | [symbol] extract | | Catechu; 21% Acacia [symbol] | |
| | | | 23% | |
| | [symbol] | — | 1.0%; 67.2% (Roque et al., 2019) | Unknown |
| | Garlic extract | — | [symbol] (Kim et al., 2018b) | Decreased abundance of |
| | | | 1 g the experimental mixture; 6.9 ± | methanogenic archaea |
| | | | 10.7 ml/d ( [symbol] et al., 2018) | |
| | Plant extract [symbol] | — | 25 mg, high-forage diets; 60% | Decreased abundance of |
| | | | high-concentrate diets; 41% | Methanobacter |
| | Plant extract [symbol] | — | 12 mM, [symbol] acid; 37 [symbol] % | Unknown |
| | acid and p-coumaric | | p-coumaric acid; 28 [symbol] % | |
| | acid | | | |

[symbol]

indicates data missing or illegible when filed

### 1. Tannins

[0330] Tannins decrease CH₄ production by directly inhibiting methanogens and indirectly decreasing H₂ production as a result of decreased fiber digestion and protozoal population in the rumen. The inhibitory activity of tannins extracted from Lotus pedunculatus was demonstrated on pure cultures of methanogens. The inhibition of methanogen populations was also shown by tannins in the rumen of goats fed diets containing tannins. Studies on structure-activity relationships have shown that types and molecular weights of tannins are important in determining their potency in lowering CH₄ production and abundance and diversity of rumen methanogens, with high molecular weight condensed tannins (CT) being more potent. Such structure-activity relationships have been demonstrated using members of Methanobacteriales including Methanobrevibacter.

### 2. Flavonoids

[0331] Flavonoids have not been extensively evaluated with respect to rumen methanogenesis. It was reported that inclusion of flavone, myricetin, naringin, rutin, quercetin, or kaempferol decreased in-vitro CH₄ production by 5 to 9 mL/g DM. Their potency ranked as follows: myricetin≥kaempferol≥flavone>quercetin≥naringin>rutin≥catechin. Catechin decreased CH₄ production both in vitro and in vivo. All the flavonoids, when fed at 0.2 g/kg DM, noticeably decreased relative abundances of hydrogenotrophic methanogens, and citrus (Citrus aurantium) extract rich in mixed flavonoids and its pure flavonoid components, neohesperidin and naringin, appeared to result in the greatest inhibition. Methanosarcina spp. Were also inhibited by poncirin, neohesperidin, naringin and their mixture. Flavonoids directly inhibit methanogens and also likely acts as H₂ sinks via cleavage of ring structures (e.g., catechin) and reductive dihydroxylation.

### 3. Saponins

[0332] The effects of saponins on rumen fermentation, rumen microbial populations, and ruminant productivity have been examined extensively. Quillaja saponin at 1.2 g/L, but not at 0.6 g/L, lowered CH₄ production in vitro and the abundance of methanogens (by 0.2-0.3 log) and altered their composition. Ivy fruit saponin decreased CH₄ production by 40%, modified the structure of the methanogen community, and decreased its diversity. Saponins from Saponaria officinalis decreased CH₄ and abundance of both methanogens and protozoa in vitro. It is hypothesized that saponins lower H2 production, thereby reduce CH4 production.

### 4. Essential Oils

[0333] The effects, mostly beneficial, of essential oils (EO) on rumen fermentation, microbial populations, and ruminant productivity have frequently been reviewed. Several EO compounds, either in pure form or in mixtures, are anti-methanogenic. The effects of EO on CH₄ production and methanogens are variable depending on dose, types, and diet. Five EO (clove, eucalyptus, peppermint, origanum, and garlic oil) that have different chemical structures in vitro at three different doses (0.25, 0.50 and 1.0 g/L) were tested for their effect on CH₄ production and archaeal abundance and diversity. Overall, all these EO suppressed CH₄ production and abundance of archaea and protozoa in a dose-dependent manner, but they differed in potency. Thyme oil or cinnamon oil fed to Holstein steers at 0.5 g/day decreased the relative abundance of total protozoa and methanogens. However, feeding beef cattle a blend of EO (CRINA®) did not affect CH₄ production, methanogen abundance or its diversity. Overall, methanogens may be directly inhibited or indirectly inhibited by Eos via inhibition of protozoa and H₂-producing bacteria in the rumen.

### Alternative Hydrogen Sinks

[0334] Compounds with a redox potential higher than CO₂ can thermodynamically outcompete CO₂ for reducing equivalents produced during rumen fermentation. These compounds, thus, can be used as alternative e⁻ acceptors to redirect e⁻ flux away from methanogenesis. The commonly evaluated alternative e⁻ acceptors are discussed below.

### 1. Nitrate and Sulfate

[0335] Nitrate (NO₃¹⁻) decreased CH₄ production both in vitro and in vivo. Mechanistically, nitrate decreases CH₄ production by outcompeting CO₂ as an e⁻ acceptor, and its reduction intermediates, nitrite (NO₂¹⁻) and nitrous oxide (N₂O), also directly inhibit methanogens as well as some H₂ producers. Sulfate also lowers CH₄ production, but much less effectively than nitrate. Archaeal abundance declined in goats receiving nitrate. While nitrate is not toxic to methanogens, it is toxic to protozoa, fungi and to a lesser extent to select bacterial species, suggesting a more general toxicity of nitrate. Nitrate can replace a portion of the dietary nitrogen as it is reduced to ammonia.

### 2. Nitrocompounds

[0336] A few organic nitrocompounds have been evaluated for their efficacy to decrease methanogens and CH₄ production. These compounds can serve as e⁻ acceptors by some bacteria competing with methanogens for reducing equivalents. This is demonstrated by nitroethane that can be used as a terminal e⁻ acceptor by Dentitrobacterium detoxificans, thereby indirectly decreasing CH₄ production. Nitrocompounds may also inhibit methanogenesis by directly inhibiting the activity of formate dehydrogenase/formate hydrogen lyase and hydrogenase, all of which are involved in the early step(s) of the hydrogenotrophic methanogenesis pathway, or inhibiting e⁻ transfer between ferredoxin and hydrogenase.

[0337] Nitrocompounds generally are quite effective in lowering CH₄ production, with 3-nitro-propionate, 2-nitropropanol, 2-nitroethanol and nitroethane being able to decrease CH₄ production by 57 to 98% in vitro. Using sheep, it was shown that nitroethane decreased CH₄ production by up to 45% and 69%, respectively, when orally administrated at 24 and 72 mg/kg body weight daily for 5 days. Although less effective than nitroethane, 2-nitropropanol also significantly lowered CH₄ production (by 37%) in steers.

### 3. Propionate and Butyrate Enhancers

[0338] Malate, acrylate, oxaloacetate, and fumarate are intermediates of carbohydrate fermentation. They can be converted to propionate or used in anabolism for the synthesis of amino acids or other molecules. They can accept reducing equivalents and thus stoichiometrically lower H₂ available for CH₄ production. When added at a concentration of 3.5 g/L, fumarate decreased CH₄ production by 38% in continuous fermenters with forages as a substrate. Types of forages and their combinations appeared to affect the anti-methanogenic efficacy of fumarate, ranging from 6 to 27% inhibition at 10 mmol/L. Acrylate also depresses CH₄ production in the rumen, but to a lesser extent than an equimolar level of fumarate. Malate was found to decrease CH₄ production by beef cattle in a dose-dependent manner, with a 16% decrease being noted when fed at 7.5% of DM intake, which corresponds to a 9% reduction per unit of DM intake. Different studies reported different anti-methanogenic potencies of this type of e⁻ acceptors. Fumarate fed to goats at 10 g/day/goat was found to decrease the abundance of methanogens and CH₄ production only by 11.9% while increasing concentrations of total VFA, acetate and propionate. Some of the intermediates of pyruvate conversion to butyrate can act as e⁻ acceptors, which could also decrease CH₄ production.

### 4. Unsaturated Organic Acids

[0339] Unsaturated fatty acids can act as hydrogen sinks during their biohydrogenation and thereby lower CH₄ production. Propynoic acid (an unsaturated analog of propionic acid), 3-butenoic acid and 2-butynoic acid (both unsaturated analogs of butyric acid), and ethyl 2-butynoate each at 6 to 18 mmol/L have been evaluated as alternative e⁻ sinks to lower methanogenesis in vitro. Only propynoic acid and ethyl 2-butynoate markedly lowered CH₄ production, by 65 to 76% and 24 to 79%, respectively. In another study, propynoic acid lowered CH₄ production by 67% and 78% at 6 and 12 mmol/L, respectively and decreased methanogen abundance. Propynoic acid and ethyl 2-butynoate are directly toxic to methanogens, and species of methanogens vary in their sensitivity to these two inhibitors, with Mbb. ruminantium being most sensitive, Ms. mazei least sensitive, and Mm. mobile intermediate.

### Inhibitors to Hydrogen-Producing Bacteria

### 1. Ionophores

[0340] Ionophores, such as monensin and lasalocid, are commonly used to improve rumen microbial metabolism. Being highly lipophilic ion carriers, they pass through the cell wall of Gram-positive bacteria and penetrate into the cell membrane. Therein, they serve as H⁺/Na⁻ and H⁺/K⁻ antiporters, dissipating ion gradients that are needed for ATP synthesis, nutrient transport, and other essential cellular activities and ultimately resulting in delayed cell division and even cell death. Ionophores preferentially inhibit Gram-positive bacteria, including members of class Clostridia, including Ruminococcus species that produce acetate and H₂. Ionophores can also inhibit some Gram-negative rumen bacteria, including bacteria that produce formate and H₂. Therefore, ionophores may lower CH₄ emission by decreasing H₂ production. For examples, monensin fed at 24-35 mg/kg diet lowered CH₄ production by up to 10% (g/kg DM intake), though no CH₄ suppression was observed at 10-15 ppm. In a recent in vivo study, however, monensin at 60 mg/day/cow did not lower CH₄ production by tropical cattle, though it decreased CH₄ production by about 30% when fed at 250 mg/day/cow. As repeatedly noted, at such high supplementation level, DM intake was lowered, which explains most of the observed decrease in CH₄ emission. Ionophores are not known to directly inhibit methanogens, but they can change the population dynamics of methanogen species. For example, monensin decreased the population of Methanomicrobium spp. While increasing that of Methanobrevibacter spp. Total methanogens were also decreased in cattle fed monensin. These can be explained by reduced availability of H₂ and differences in affinity for H₂ and growth kinetics among methanogen species.

### 2. Bacteriocins

[0341] Bacteriocins are proteins or peptides produced by bacteria and inhibit select microbial species in the rumen and other habitats. There are only a few studies investigating the effect of bacteriocins on CH₄ emission. Bovicin HC5, a bacteriocin produced by Streptococcus spp. From the rumen, was reported to suppress CH₄ by 50% in vitro. Nisin, a bacteriocin produced by Lactobacillus lactis subsp. Lactis, has also been shown to decrease CH₄ production in vitro by up to 40% depending upon its concentration. Similar to monensin, bacteriocins probably modulate rumen fermentation leading towards increased propionate, thereby decreasing CH₄ production.

Additional Agents that Reduce Methane in Animals

### Biochemical Pathways

[0342] In certain embodiments, the one or more deleterious atmospheric gases and/or precursors thereof are microbially derived through one or more biosynthetic pathway. The deleterious atmospheric gas can be any suitable deleterious atmosphere gas, such as carbon dioxide, methane, nitrous oxide, or a combination thereof. The deleterious atmospheric gas precursor can be any suitable precursor, such as acetate, hydrogen, carbon, methanol, monomethylamine, dimethylamine, trimethylamine, nitric oxide, or a combination thereof. In preferred embodiments, the deleterious atmosphere gas comprises carbon dioxide, hydrogen, or methane more preferably methane. In certain embodiments, wherein the resultant deleterious atmospheric gas comprises methane, the one or more biosynthetic pathways include the acetoclastic, hydrogenotrophic, and methylotrophic pathways, which differ based on the starting substrates, i.e., precursor, more preferably the acetoclastic or hydrogenotrophic pathways, even more preferably the acetoclastic pathway.

[0343] The acetoclastic pathway comprises a series of enzymes that convert the precursor acetate through a series of enzymatic conversions to methane. Starting from acetate, (1) acetate is converted to acetyl phosphate by acetate kinase (ack); (2) acetyl phosphate is converted to acetyl-CoA by phosphotransacetylase (pta); (3) the acetyl group from acetyla-CoA is transferred to a protein intermediate by acetyl-CoA decarbonylase; (4) the acetyl group is then transferred to tetrhydrosarcinapterin to form 5-methyl-tetrahydrosarcinapterin by methyltetrahydrosarcinapterin methyltransferase; (5) 5-methyl-tetrahydrosarcinapterin is converted to methyl-CoM by methyl-H₄SPT:CoM methyltransferase (Mtr); and (6) methyl-CoM is reduced to methane by methyl-CoM reductase (Mcr) (FIG. 8 and FIG. 9).

[0344] The hydrogenotrophic pathway comprises a series of enzymes that convert the precursors hydrogen and carbon dioxide to methane. Starting from carbon dioxide and hydrogen, (1) a formylmethanofuran dehydrogenase (Fwd/Fmd) produces a formylmethanofuran, (2) which is further converted into 5-formyl-tetrahydromethanopterin by a formylmethanofuran:H₄MPT formylatransfer (Ftr); (3) 5-formyl-tetrahydromethanopterin is further converted into 5,10-methenyltetrahydromethanopterin by methyl-H₄MPT cyclohydrolase (Mch); (4) 5,10-methenyltetrahydromethanopterin is converted to N₆-methyltetrahydromethanopterin by F₄₂₀-dependent methylene-H₄MPT reductase (Mer); (5) N₆-methyltetrahydromethanopterin is converted to methyl-CoM by methyl-H₄MPT:coenzyme M methyltransferase (Mtr); and (6) methyl-CoM is reduced to methane by methyl-CoM reductase (Mcr) (FIG. 8 and FIG. 9).

[0345] The methylotrophic pathway comprises a series of enzymes that convert one or more of dimethylamine, methanethiol, methanol, methylamine, methylthiopropanoate, tetramethylammonium, and/or trimethylamine into methyl-CoM, wherein methyl-CoM is reduced to methane by methyl-CoM reductase (Mcr) (FIG. 8 and FIG. 9).

[0346] In certain embodiments, provided herein are compositions, methods, and/or kits comprising one or more small molecules that reduce the activity of one or more enzymes in one or more methane biosynthetic pathways. The enzyme can be any suitable enzyme, such as 3-(methylthio)propanoate:coenzyme M methyltransferase, acetate kinase, acetyl-CoA decarbonylase, acetyl-CoA decarbonylase/synthase complex α₂ε₂, acetyl-CoA decarbonylase/synthase complex β, acetyl-CoA decarbonylase/synthase complex γδ, acetyl-CoA synthase, carbon monoxide dehydrogenase, carbonic anhydrase, Co-methyltransferase, coenzyme M reductase, cyclohydrolase, dehydrogenase, dimethylamine-[corrinoid protein] Co-methyltransferase, F₄₂₀-dependent methylene-H₄MPT reductase, F₄₂₀-dependent methylene-H₄SPT dehydrogenase, formylmethanofuran dehydrogenase, formylmethanofuran:H₄MPT formyltransferase, formylmethanofuran:H₄SPT formyltransferase, formyltransferase, H₂-forming methylene-H₄MPT dehydrogenase, methanol-5-hydroxybenzimidazolylcobamide Co-methyltransferase, methenyl-H₄MPT cyclohydrolase, methyl-coenzyme M reductase, methyl-H₄SPT:CoM methyltransferase, methylated [methylamine-specific corrinoid protein]:coenzyme M methyltransferase, methylcobamide:CoM methyltransferase, methylthiol:coenzyme M methyltransferase, methyltransferase, MtaC protein:coenzyme M methyltransferase, phosphotransacetylase, tetrahydromethanopterin S-methyltransferase, tetramethylammonium methyltransferase, trimethylamine-corrinoid protein Co-methyltransferase, or a combination thereof. In a preferred embodiment, the enzyme comprises methyl-CoM reductase (Mcr) (FIG. 10).

Compositions for Reducing Production of Deleterious Atmospheric Gases and/or Precursors Thereof In certain embodiments provided herein are compositions. In certain embodiments, provided herein are compositions comprising one or more small molecules. In preferred embodiments, provided herein are compositions comprising one or more small molecules that reduce the production of one or more deleterious atmospheric gases and/or precursors thereof.

[0347] The small molecule can be any suitable small molecule for reducing the production of one or more greenhouse gases and/or precursors thereof, for example a small molecule that interferes with the uptake and/or conversion of acetate, hydrogen, carbon dioxide, methanol, monomethylamine, dimethylamine, trimethylamine, nitric oxide, or a combination thereof, and/or a small molecule that interfere with the production of carbon dioxide, hydrogen nitrous oxide, or a combination thereof. In preferred embodiments, the small molecule interferes with the uptake and/or conversion of acetate, hydrogen and/or carbon dioxide and/or the production of carbon dioxide or methane, more preferably with the production of methane.

Small Molecules that Affect Production of Deleterious Atmospheric Gases and/or Precursors Thereof

[0348] In certain embodiments, provided herein is a composition for reducing emissions of deleterious atmospheric gasses and/or precursors thereof comprising: one or more small molecules that reduce the production of one or more deleterious atmospheric gasses and/or precursors thereof. The one or more small molecules that reduce the production of one or more deleterious atmospheric gasses and/or precursors can be any suitable molecule.

[0349] In certain embodiments, the one or more small molecules that reduce the production of one or more deleterious atmospheric gasses and/or precursors comprises a compound with the formula the formula R¹—[CH₂]ₙ—ONO₂
[0350] wherein
[0351] n is an integer from 1 to 15;
[0352] R¹ is selected from the group consisting of H, C₁-C₆alkyl, phenyl, —OH, —NH₂, —CN, —COOH, —O(C═O)R³, —NHC(═O)R³, SO₂NHR³, or —ONO₂, —SH and R³ is C₁-C₆alkyl, phenyl, pyridyl;
[0353] with the proviso that when n is >3 the hydrocarbon chain may be interrupted by —O— or —NH—.

[0354] In some embodiments, the one or more small molecules that reduce the production of one or more deleterious atmospheric gases and/or precursors comprises 3-nitrooxypropanol, 9-nitrooxynonanol, 5-nitrooxy pentanoic acid, 6-nitrooxy hexanoic acid, bis(2-hydroxyethyl)amine dinitrate, 1,4-bis-nitrooxybutane, 1,5-bis-nitrooxypentane, or any combination thereof. Preferably, the one or more small molecules is 3-nitrooxypropanol (3NOP).

[0355] In some embodiments, the composition comprises about 1 to about 25% by weight of the small molecule, about 5 to about 20% by weight of the small molecule, or about 5 to about 15% by weight of the small molecule.

### Solid Carriers

[0356] In certain embodiments, the composition further comprises one or more solid carriers. As used herein, the term “solid carrier” includes additives commonly used in the preparation of powderous formulations such as thickeners, for example gums or cellulose derivatives such as xanthan gum, karaya gum and/or ethylcellulose. The one or more solid carriers can be any agriculturally suitable carrier, such as attapulgite, kaolinite, fuller's earth, calcium carbonate, perlite, diatomaceous earth, calcium silicate, fly ash, a polysaccharide, a disaccharide, a monosaccharide, a gum, a natural or synthetic derivative thereof, or a combination thereof.

[0357] In certain embodiments, the one or more solid carriers comprises any carrier suitable for ingestion, such as a saccharide comprising cellulose, xantham gum, karaya gum, ethylcellulose, inositol, galactose, arabinose, lactose, lactulose, mannitol, mannose, sorbose, turanose, platinose, or a combination thereof.

[0358] In some embodiments, the carrier comprises attapulgite, kaolinite, fuller's earth, calcium carbonate, perlite, diatomaceous earth, calcium silicate, fly ash, a polysaccharide, a disaccharide, a monosaccharide, a gum, a natural or synthetic derivative thereof, or a combination thereof.

[0359] In other embodiments, the carrier comprises attapulgite, kaolinite, fuller's earth, calcium carbonate, perlite, diatomaceous earth, calcium silicate, fly ash, a polysaccharide, a disaccharide, a monosaccharide, a gum, silica, propylene glycol, hemp protein, biochar, montmorillonite, activated charcoal, lignin, wood flour, hemp protein, pea protein, soy protein, gelatin, casein, chitosan, talc, calcium phosphate, arginine, lysine, calcium carbonate, carbon black, glutamine, betaine, bismuth phosphate, bismuth citrate, iron phosphate, or any combination thereof.

[0360] In some embodiments, the carrier comprises the one or more solid carriers comprises a saccharide comprising cellulose, xanthan gum, karaya gum, ethylcellulose, inositol, galactose, arabinose, lactose, lactulose, mannitol, mannose, sorbose, turanose, platinose, or a combination thereof.

[0361] In some embodiments, the one or more solid carriers comprises a saccharide comprising cellulose, xanthan gum, karaya gum, ethylcellulose, inositol, galactose, arabinose, lactose, lactulose, mannitol, mannose, sorbose, turanose, platinose, carrageenan, cellulose acetate, hydroxypropyl cellulose, cellulose acetate phthalate, maltrodextran, dextran, inulin, corn starch, amylopectin, sodium starch glycolate, pentaerthritol, cyclodextrin, or a combination thereof.

[0362] In certain preferred embodiments, the solid carrier comprises silica and ethylcellulose, more particularly about 10% to about 50% by weight of the silica and about 50 to about 90% by weight of the ethylcellulose.

[0363] In other preferred embodiments, the solid carrier comprises silica and activated charcoal, particularly about 10% to about 90% by weight of the silica and about 10% to about 90% by weight of the activated charcoal.

[0364] In certain embodiments, the binder further comprises arginine, lysine, or both arginine and lysine. While not being bound by theory, it is believed that arginine and lysine are capable of forming hydrogen bonds with the small molecule, such as 3NOP, thereby altering the release rate.

[0365] In other preferred embodiments, the carrier comprises activated charcoal and ethylcellulose, particularly about 10% to about 50% by weight of the activated charcoal and about 40 to about 90% by weight of the ethylcellulose.

[0366] In some embodiments, the carrier further comprises about 1 to about 10% by weight of sodium lignosulfate. While not being bound by theory, it is believed that sodium lignosulfate improves coating adhesion to the tablet resulting in a reduction in release rate of the small molecule.

[0367] In other embodiments, the carrier comprises arginine and polycaprolactone, such as about 10 to about 60% by weight of the arginine and about 30 to about 90% by weight of the polycaprolactone.

[0368] In other preferred embodiments, the carrier comprises 25% silica, 66% polycaprolactone, such as about 10 to about 60% by weight of the silica and about 30 to about 90% by weight of the polycaprolactone.

[0369] In certain embodiments, the composition comprises a granular shape. The composition may comprise any suitable shape, such as a spherical-, square-, rectangular-, capsular-, cylindrical-, conical-, ovular-, triangular-, diamond-, disk-like shape, or a combination thereof. In certain embodiments, the shape of the particle affects the rate of dissolution of the particle.

[0370] The granular particle can comprise any suitable texture, for example hard or soft. In certain embodiments, the texture of the particle affects the rate of dissolution of the particle. In certain embodiments, the composition comprises a combination of differently textured pellets each of which release the small molecule at different rates.

[0371] In certain embodiments, the granular particles comprise a uniform size distribution, for example about ±20%, ±15%, ±10%, ±5%, ±2%, or ±1% size distribution in the median particle size. In certain embodiments, the granular particles comprise a non-uniform size distribution, for example greater than about ±20%. In certain embodiments, the granular particles comprise a plurality of differently sized populations of granular particles each of which comprise a uniform size distribution.

[0372] In certain embodiments, the one or more solid carrier dissolves and thereby releases the one or more small molecules that reduce the production of greenhouse gases and/or precursors thereof. In a preferred embodiment, the one or more solid carriers will dissolve in water.

### Extended and Delayed Release

[0373] It may be necessary to vary the rate of dissolution of the composition. For example, one may want to produce an extended-release formulation, wherein the composition releases the one or more small molecules over a period of time to maintain a suitable environmental concentration of the one or more small molecules. This can be beneficial to reduce the frequency of applications, for example to reduce labor costs and/or applications in rural and/or hard to reach environments. In certain embodiments, complete dissolution of the composition and full release of the one or more small molecules occurs over at least about 1, 2, 3, 4, 5, 6, 7, 14, 21, 28, 35, 42, 49, 56, 63, 70, 77, 84, 91, 98, 105, 112, 119, 126, 133, 140, and/or nor more than about 2, 3, 4, 5, 6, 7, 14, 21, 28, 35, 42, 49, 56, 63, 70, 77, 84, 91, 98, 105, 112, 119, 126, 133, 140, or 147 days, for example about 1 to about 147 days, preferably about 7 to about 63 days, more preferably about 7 to about 42 days even more preferably about 14 to about 42 days yet even more preferably about 14 to about 28 days.

[0374] In certain embodiments, the extended-release formula may comprise any suitable extended-release formula. In certain embodiments, the extended-release formula comprises one or more additives that reduce the rate of dissolution of the composition, one or more additives that reduce the rate of dissolution of the small molecule from the composition, one or more additives that comprise a membrane that dissolves over time, wherein the rate of dissolution of the membrane controls the rate of release of the one or more small molecules, a suitable alternative, or a combination thereof.

[0375] In certain embodiments, the population of granular particles comprises a plurality of populations of granular particles wherein each population comprises a different formulation and/or shape. In certain embodiments, the population of granular particles comprises a first population and a second population. In certain embodiments, the population of granular particles further comprises at least 1, 2, 3, 4, 5, 5, 6, 8, or 9 and/or no more than 4, 5, 6, 7, 8, 9, or 10 additional populations, for example a total of 3-10 additional populations, preferably 3-7 additional populations, more preferable 3-5 additional populations. In a preferred embodiment, each of the additional populations comprises a different formulation than the others.

[0376] In certain embodiments, the rate of dissolution of the granular particles is modulated by the size of the granular particle. In certain embodiments, smaller granular particles dissolve faster than larger granular particles, such that each successive larger population in the plurality of populations of differently size particles provides a delayed release compared to the smaller populations of particles. In certain embodiments, an increased proportion of larger to smaller granular particles in a population of granular particles results in slower rates of dissolution of the population of granular particles.

[0377] In certain embodiments, the first population of particles comprises an immediate release formulation. In certain embodiments, the second population comprises a delayed release formulation, wherein the second population dissolves and/or releases the one or more small molecules that reduce the production of one or more deleterious atmospheric gasses and/or precursors after the first population. In certain embodiments, each additional population comprises a delayed release formulation, wherein each population dissolves and/or releases the one or more small molecules that reduce the production of one or more deleterious atmospheric gasses and/or precursors at a different time than each of the other populations.

[0378] In some embodiments, an immediate release formulation releases the one or more small molecules that reduce the production of one or more deleterious atmospheric gases with about 1 day, 2 days, 3 days, 4 days, 5 days, or 6 days. In some embodiments, a delayed release formulation releases the one or small molecules after about 1 week or more, for example up to about 21 weeks.

[0379] In some embodiments, the first population of particles provides has a half-life for the one or more small molecules (such as about 1 to 12 hours), the second population has a longer half-life (such as about 24 or more hours), each additional population has a longer half-life than the previous population such that an effective amount of the one or more small molecules is maintained for weeks or months. Thus, the present compositions advantageously do not, in such embodiments, require repeated, frequent applications.

[0380] In certain embodiments, the extended release happens within the first 10% of the half-life and then the 1st delayed happens with 1-2 half lives, then the next with 1-2 of the delayed release.

[0381] In some embodiments, the particles have a size ranging from about 1 mm to about 20 mm, about 1 to about 15 mm, about 1 to about 10 mm, about 5 to about 20 mm, about 5 to about 15 mm, or about 5 to about 10 mm.

### Coatings

[0382] In certain embodiments, the composition may comprise a coating, for examples particles or tablet having a coating. The coating can comprise any suitable coating, such as a wax, a fat, or a synthetic polymer. In certain embodiments, the wax comprises organic compounds consisting of long alkyl chains, natural waxes (plant, animal) which are typically esters of fatty acids and long chain alcohols as well as synthetic waxes, which are long-chain hydrocarbons lacking functional groups. In certain embodiments, the fat comprises a wide group of compounds which are soluble in organic solvents and largely insoluble in water such as hydrogenated fats (or saturated fats) which are generally triesters of glycerol and fatty acids. Suitable fats can have natural or synthetic origin. In certain embodiment, the fat comprises glycerine monostearate, carnauba wax, candelilla wax, sugarcane wax, palmitic acid, stearic acid hydrogenated cottonseed oil, hydrogenated palm oil and hydrogenated rapeseed oil, or combinations thereof. Any suitable synthetic polymer can be used, such as poly-L-glutamic acid (PGA) and polylactic acid (PLA). In preferred embodiments, the synthetic polymer is at least partially water soluble.

[0383] The coating may be single layer or multiple layers, preferably two layers.

[0384] In some embodiments, the coating is selected from cellulose acetate phlalate, ethyl cellulose, hydroxypropyl cellulose, polycaprolactone, alginate, chitosan, polyethylene glycol, cellulose acetate, triacetin, propylene glycol, n-methyl-2-pyrollidone, and any combination thereof.

[0385] In certain preferred embodiments, the coating comprises two or more polyelectrolytes, such as polystyrene sulfonate, polyethyleneimine, sodium lignosulfate, polyglutamic acid and poly-L-lysine, poly-L-arginine, polyallylamine hydrochloride, polyacrylic acid, or any combination thereof.

[0386] In some preferred embodiments, the polyelectrolytes comprise polyallylamine hydrochloride and sodium lignosulfate.

[0387] In some preferred embodiments, the polyelectrolytes comprise polyallylamine hydrochloride and polystyrene sulfonate.

[0388] In other preferred embodiments, the polyelectrolytes comprise sodium lignosulfate and one of polyglutamic acid and poly-L-lysine, or poly-L-arginine, and sodium lignosulfate.

[0389] In still other preferred embodiments, the polyelectrolytes comprise polystyrene sulfonate and one of polyglutamic acid and poly-L-lysine, or poly-L-arginine.

[0390] The polyelectrolytes may, in certain embodiments, be chemically cross-linked with a cross-linking agent.

[0391] In certain embodiments, the composition comprises one or more coatings applied with minimal to no bubbles. Additionally or alternatively, the composition comprises one or more coatings that comprise a foam or a plurality of air bubbles. In certain cases, the foamed coating can temporarily alter the buoyancy of the composition. One such example includes a composition comprising a foamed coating that floats when initially applied, then, after a period of time, the air pockets in the foamed coating fill with water resulting in the composition sinking to the bottom.

Additives with a Density Greater than Water

[0392] In certain embodiments, the composition further comprises one or more additives with a density greater than water. For example, the additive may have a density greater than 1.1, preferably about 1.1 mg/mL to about 3 mg/mL, about 1.5 to about 3 mg/mL, about 1.5 to about 2.5 mg/mL, or about 1.5 to about 2 mg/mL. Suitable additives include silica, attapulgite, kaolinite, fuller's earth, calcium carbonate, perlite, diatomaceous earth, calcium silicate, fly ash, or a combination thereof. In certain embodiments, the one or more additives with a density greater than water result in the composition sinking below the surface. In certain embodiments, the one or more additives with a density greater than water result in the composition partially or completely sinking to the bottom. In preferred embodiments, the composition completely sinks to the bottom. In certain embodiments, the composition comprising the additive with a density greater than water has a density of at least 1.1, preferably about 1.1 mg/mL to about 3 mg/mL, about 1.5 to about 3 mg/mL, about 1.5 to about 2.5 mg/mL, or about 1.5 to about 2 mg/mL.

### Agriculturally Beneficial Additives

[0393] In certain embodiments, the composition further comprises one or more agriculturally beneficial additives. The agriculturally beneficial additive can be any suitable additive depending on the application, such a vitamin, a nutrient, an antibiotic, a fungicide, or a combination thereof.

[0394] In certain embodiments, the additive includes one or more suitable components that reduce methanogenesis by methanogens, such as, seaweed (e.g., Asparagopsis taxiformis), kelp, 3-nitrooxypropanol, anthraquinones, ionophores (e.g., monensin and/or lasalocid), polyphenols (e.g., saponins, tannins), organosulfurs (e.g., garlic extract), flavonoids (e.g., quercetin, rutin, kaempferol, naringin, and anthocyanidins; bioflavonoids from green citrus fruits, rose hips and black currants), carboxylic acid, terpenes (e.g., D-limonene, pinene and citrus extracts), or a combination thereof.

Methods for Reducing Production of Deleterious Atmospheric Gases and/or Precursors Thereof

[0395] In certain embodiments provided herein are methods. In certain embodiments, provided herein are methods for using one or more small molecules that reduce the production of one or more deleterious atmospheric gases and/or precursors thereof. In certain embodiments, provided herein are methods for applying one or more small molecules that reduce the production of one or more deleterious atmospheric gases and/or precursors thereof to any suitable environment. The suitable environment can comprise any suitable environment. In some embodiments, the suitable environment comprises an environment in which a ruminant (unvaccinated or vaccinated) lives or occupies, e.g., a habitat for a ruminant. In some embodiments, the suitable environment comprises the rumen.

[0396] In certain embodiments, the method for reducing emissions of deleterious atmospheric gasses and/or precursors thereof comprises applying a composition comprising one or more small molecules that reduce the production of the deleterious atmospheric gasses and/or precursors thereof. The composition can comprise any suitable composition. In a preferred embodiment, the composition comprises any one of the compositions as described in the Compositions for reducing production of deleterious atmospheric gases and/or precursors thereof section above. In a more preferred embodiments, the composition comprises 3NOP. In certain embodiments, the composition is applied to a water source, such as a trough or a pond, from which a ruminant ingests the composition or a portion thereof from the water source into the rumen. For example as illustrated in FIGS. 12-13.

[0397] In certain cases, the composition needs to be reapplied periodically to maintain a suitable concentration of the one or more small molecules. In certain embodiments, the method further comprises reapplying after a period of time a composition comprising one or more small molecules that reduce the production of the deleterious atmospheric gasses and/or precursors thereof. In certain embodiments, the method further comprises, reapplying again after a period of time a composition comprising one or more small molecules that reduce the production of the deleterious atmospheric gasses and/or precursors thereof. Any suitable number of reapplications may be performed as needed to maintain a an effective amount of the one or more small molecules. In some embodiments, the composition is reapplied after about 7 to about 28 days, about 7 to 46 days, about 7 to 92 days or about 7 to 147 days.

[0398] In certain embodiments, the composition is delivered to one or more water sources.

[0399] In certain cases, the concentration of the one or more small molecules can be measured to ensure the presence of a suitable concentration of the one or more small molecules. Any suitable method may be used to measure the concentration, such as a strip test, liquid chromatography, or thin layer chromatography. The method can be performed with or without human intervention.

Kits for Reducing Production of Deleterious Atmospheric Gases and/or Precursors Thereof

[0400] In certain embodiments, provided herein are kits. In certain embodiments, the kit comprises any one of the compositions as described in the Compositions for reducing production of deleterious atmospheric gases and/or precursors thereof section. In certain embodiments, the kit further comprises a suitable container for shipping.

### Methods of Using Vaccines, Animal Feed, Antibodies, Milk

[0401] Provided herein are methods of using the vaccines, antibodies, milk, animal feed, agents (e.g., an agent that reduces methane production in a subject, a probiotic bacterial strain, etc.), or any combination thereof.

[0402] In certain aspects, provided herein are methods of inducing an immune response against at least one methanogen in a subject, the method comprising administering to the subject the vaccines or pharmaceutical compositions of the present disclosure.

[0403] In some embodiments, the immune response comprises a B cell response (e.g., to produce the antibodies). The antibodies produced in response to the vaccine are transferred to the saliva of the subjects, which are swallowed by the subjects to enter the rumen. Once in the rumen, the antibodies come in contact with at least one methanogen to bind/neutralize said methanogen.

[0404] As used herein, the term “neutralization of a methanogen” encompasses any reduction in one or more activities that are normally carried out by the methanogen in the absence of the antibodies that bind the methanogen.

[0405] In some embodiments, the activity of a methanogen includes but is not limited to, the activity that aids in producing methane gas. For example, binding of the antibodies to the methanogen may reduce the ability of the methanogen to carry out biochemical reactions that are necessary to produce methane, e.g., reduce the ability to convert hydrogen (H₂) and carbon dioxide (CO₂) or acetate into methane (CH₄) and ATP. In some embodiments, the reduced ability to produce methane may lower the fitness of methanogen in the rumen.

[0406] In some embodiments, the activity of a methanogen includes but is not limited to, the activity that aids in forming a granular colony with other bacteria. In some embodiments, such activity may be disrupted physically—e.g., antibodies binding to the methanogen would prevent physical association and/or film formation of the granular colony of bacteria. In some embodiments, a reduction in the activity of forming a granular colony may lead to the reduced ability of a methanogen to remain in the rumen. In some embodiments, such reduced ability may result in the reduction of the total number of methanogens inside the rumen.

[0407] In certain aspects, provided herein are methods of reducing the activity, number, and/or type of methanogens in the gut of a subject, the method comprising administering to the subject the vaccines or pharmaceutical compositions of the present disclosure.

[0408] In certain aspects, provided herein are methods of reducing the amount of methane (CH₄) and/or hydrogen (H₂) emitted by a subject, preferably eructated and/or exhaled, the method comprising administering to the subject a vaccine composition, antibody, milk, and/or animal feed of the present disclosure.

[0409] In some embodiments, the amount of methane (CH₄) and/or hydrogen (H₂) is reduced by about 5-100%, preferably by about 10-100%, compared to a control.

[0410] In some embodiments, the amount of methane (CH₄) and/or hydrogen (H₂) is reduced by at least about 5%, 10%, 15%, 20%, 25%, 30%, 35%, 40%, 45%, 50%, 55%, 60%, 65%, 70%, 75%, 80%, 85%, 90%, 95%, or 100% compared to a control.

[0411] In some embodiments, the amount of methane (CH₄) and/or hydrogen (H₂) is reduced by about 20-100%, preferably by about 30-100%, compared to a control.

[0412] In some embodiments, the amount of methane (CH₄) is reduced by (a) about 1 kg-about 50 kg within 8 weeks from the time of first vaccination, or (b) about 5 kg-about 300 kg within a year from the time of first vaccination, compared to a control.

[0413] In some embodiments, the amount of methane (CH₄) normalized to an amount of CO₂ emitted by the subject (i.e., CH₄/CO₂) is reduced by about 5-100%, preferably by about 10-100%, compared to a control. In some embodiments, the amount of methane (CH₄) normalized to the amount of CO₂ is reduced by at least about 5%, 10%, 15%, 20%, 25%, 30%, 35%, 40%, 45%, 50%, 55%, 60%, 65%, 70%, 75%, 80%, 85%, 90%, 95%, or 100% compared to a control.

[0414] In some embodiments, the amount of methane (CH₄) normalized to the amount of CO₂ is reduced by about 20-100%, preferably by about 30-100%, compared to a control.

[0415] In some embodiments, the amount of hydrogen (H₂) is reduced by (a) about 10 g-about 500 g within 8 weeks from the time of first vaccination, or (b) about 50 g-about 3 kg within a year from the time of first vaccination, compared to a control.

[0416] In certain aspects, provided herein are methods of increasing the amount of carbon dioxide (CO₂) emitted by a subject, preferably eructated and/or exhaled, the method comprising administering to the subject a vaccine composition, antibody, milk, and/or animal feed of the present disclosure.

[0417] In some embodiments, the amount of carbon dioxide (CO₂) is increased by about 1-100%, preferably by about 1-20%, compared to a control. In some embodiments, the amount of CO₂ is increased by at least about 1%, 5%, 10%, 15%, 20%, 25%, 30%, 35%, 40%, 45%, 50%, 55%, 60%, 65%, 70%, 75%, 80%, 85%, 90%, 95%, or 100% compared to a control.

[0418] In some embodiments, the amount of carbon dioxide (CO₂) is increased by about 3-10%, preferably by about 3-20%, compared to a control.

[0419] In some embodiments, the amount of carbon dioxide (CO₂) is increased by (a) about 29.8 kg-about 1,490 kg within 8 weeks from the time of first vaccination, or (b) about 149 kg-about 8,940 kg within a year from the time of first vaccination, compared to a control.

[0420] In some embodiments, the control is: (a) an accepted reference; (b) the amount of methane, CO₂-normalized methane, hydrogen, or carbon dioxide emitted by an unvaccinated subject; or (c) the amount of methane, CO₂-normalized methane, hydrogen, or carbon dioxide emitted by the vaccinated subject prior to vaccination.

[0421] In preferred embodiments, any one of the methods produces an antibody against at least one methanogen. In some embodiments, the antibody is an IgM, IgG, or an IgA. In preferred embodiments, the antibody is an IgA or IgM. The IgA isoform, at least in cattle, may be more stable in the rumen. For example, IgA levels in cattle saliva were reduced by only 40% after 8 h exposure to rumen contents while IgG levels were reduced by 80%.

[0422] In some embodiments, the antibody is produced in an amount sufficient to: (a) carry the antibody to the gut; (b) reduce the number and/or type of methanogens in the gut; and/or (c) reduce the amount of methane produced by the subject.

[0423] In some embodiments, the method reduces the methane production by the subject by at least about 1%, 5%, 10%, 20%, 30%, 40%, 50%, 60%, 70%, 80%, 90%, or 95% as compared with a control.

[0424] In some embodiments, the method reduces the H₂ emission from the subject from at least about 1%, 5%, 10%, 20%, 30%, 40%, 50%, 60%, 70%, 80%, 90%, or 95% as compared with a control.

[0425] In some embodiments, the method increases the feed conversion efficiency of the subject by about 0.50%, 10%, 1.5%, 2%, 2.5%, 3%, 3.5%, 4%, 4.50%, 50%, 5.50%, 6%, 6.5%, 7%, 7.5%, 80%, 8.5%, 9%, 9.5%, 10%, 10.5%, 11%, 11.5%, or 12% as compared with a control.

[0426] In some embodiments, the method increases the concentration of one or more volatile fatty acids (e.g., propionate, butyrate, acetate) in the rumen of the subject by about 0.5%, 1%, 1.50%, 2%, 2.5%, 3%, 3.5%, 4%, 4.5%, 5%, 5.50%, 6%, 6.5%, 7%, 7.5%, 80%, 8.5%, 9%, 9.5%, 10%, 10.5%, 11%, 11.5%, or 12% as compared with a control.

[0427] In some embodiments, the method increases the average daily gain (ADG) of the subject by about 0.50%, 10%, 1.50%, 2%, 2.5%, 3%, 3.5%, 4%, 4.5%, 5%, 5.50%, 6%, 6.5%, 7%, 7.5%, 80%, 8.5%, 9%, 9.5%, 10%, 10.5%, 11%, 11.5%, or 12% as compared with a control.

[0428] In some embodiments, the method increases the dry matter intake (DMI) of the subject by about 0.50%, 10%, 1.50%, 2%, 2.5%, 3%, 3.5%, 4%, 4.5%, 5%, 5.50%, 6%, 6.5%, 7%, 7.5%, 80%, 8.5%, 9%, 9.5%, 10%, 10.5%, 11%, 11.5%, or 12% as compared with a control. Additionally or alternatively, the method increases the milk production of the subject by about 0.5%, 1%, 1.5%, 2%, 2.50%, 3%, 3.5%, 4%, 4.5%, 5%, 5.5%, 6%, 6.5%, 7%, 7.5%, 8%, 8.50%, 9%, 9.5%, 10%, 10.5%, 11%, 11.5%, or 12% as compared with a control.

[0429] In some embodiments, the control is an accepted reference, or the amount of methane production in a subject that has not been vaccinated.

[0430] Notably, methane emission or production of methane by a subject can occur at any part of its intestinal track, which includes, e.g., a rumen and a lower bowel (lower intestinal track).

[0431] The rumen accounts for 90% of all methane production. The rumen has no adaptive immune response. Thus, to be effective in reducing the level of methane production, the rumen or a methanogen therein must be exposed to neutralizing antibodies that bind and inactivate the methanogen. By contrast, the lower bowel, which accounts for 10% of all methane production, has adaptive immune response such that any immune response due to a vaccine can be amplified in the lower bowel. Accordingly, in preferred embodiments, the result of immune response from a vaccine is exposed to the lower bowel of a subject, which then further amplifies the effect of the vaccine. In other words, in preferred embodiments, a vaccine of the present disclosure or the immune response it elicits is exposed to a methanogen in a lower bowel of the subject. Thus, the present disclosure encompasses a method of reducing (i) methane production and/or (ii) activity, number, and/or type of methanogens in the lower intestinal track of a subject, the method comprising administering to the subject a vaccine comprising at least one methanogen cell surface protein or a fragment thereof.

[0432] Accordingly, in preferred embodiments, the methods and compositions of the present disclosure elicit immune response that is exposed to a methanogen in a lower bowel of the subject.

[0433] In some embodiments, the methods and compositions of the present disclosure reduce the activity, number, and/or type of methanogens in the lower intestinal track (lower bowel) of a subject.

[0434] In some embodiments, the methods and compositions of the present disclosure reduce the amount of methane produced by a subject in the lower intestinal track of a subject.

[0435] In some embodiments, the methods and compositions of the present disclosure induce an immune response against at least one methanogen in the lower intestinal track of a subject.

[0436] In some embodiments, the method of the present disclosure results in at least about 1%, 2%, 3%, 4%, 5%, 6%, 7%, 80%, 9%, 10%, 110%, 12%, 13%, 14%, 15%, 16%, 17%, 18%, 19%, or 20% reduction in the level of methane produced by the subject.

[0437] In some embodiments, the reduction in the level of methane is compared to an untreated subject.

[0438] In some embodiments, the subject methane emissions are measured using a respiratory chamber.

[0439] As described herein, in some embodiments, the vaccine or the pharmaceutical composition is administered to the subject via a route selected from intramuscular administration, intradermal administration, subcutaneous administration, and nasal administration.

[0440] In some embodiments, the subject is administered with at least one dose of the vaccine or pharmaceutical composition.

[0441] In some embodiments, the subject is administered with at least one or two repeat doses of the vaccine or pharmaceutical composition (e.g., booster dose).

[0442] In some embodiments, the subject is administered with the repeat dose of the vaccine or pharmaceutical composition after at least about 2 weeks, 1 month, 6 months, or 12 months from the time the subject is administered with the preceding dose of the vaccine.

[0443] In some embodiments, the subject is administered with the repeat dose of the vaccine or pharmaceutical composition no more than about 3 months, 6 months, 12 months, or 24 months from the time the subject is administered with the preceding dose of the vaccine.

[0444] In some embodiments, the subject receives the repeat dose of the vaccine after at least about 2 weeks and no more than about 18 months from the time the subject is administered with the preceding dose of the vaccine.

[0445] In some embodiments, the subject receives a repeat dose of the vaccine after at least about 4 weeks and no more than about 12 months from the time the subject is administered with the preceding dose of the vaccine.

[0446] In certain embodiments, the methods of the present disclosure further comprises administering to the subject at least one agent (e.g., at least one additional agent) that reduces the level of methane produced by the subject.

[0447] The vaccine composition may be administered before, concurrently with, or after, any agent, milk, antibody, animal feed, or any composition of the present disclosure.

[0448] In some embodiments, the at least one agent is selected from 3-Nitrooxypropanol (3NOP), ethyl-3NOP, 2-bromoethanesulfonate (BES), 2-chloroethanesulfonate (CES), 3-bromopropanesulfonate (BPS), bromochloromethane (BCM), bromoform, bromodichloromethane, dibromochloromethane, carbon tetrachloride, trichloroacetamide, trichloroethyladipate, lumazin (2,4-pteridinedione), p-aminobenzoic acid, lovastatin, mevastatin, pravastatin, diallyl disulfide, garlic oil, saponins, tannins, flavonoids, nitrate, nitroethane, -nitro-propionate, 2-nitropropanol, 2-nitroethanol, malate, acrylate, oxaloacetate, fumarate, propynoic acid, 3-butenoic acid, 2-butynoic acid, ethyl 2-butynoate, monensin, lasalocid, bovicin HC5, nisin, and any combination thereof.

[0449] In preferred embodiments, the agent is 3NOP or ethyl-3NOP.

[0450] In certain aspects, provided herein are methods of reducing methane production in a subject, the method comprising orally administering to and/or feeding the subject the antibody, the milk and/or the derivatives thereof, and/or the animal feed of the present disclosure.

[0451] In certain aspects, the methods of the present disclosure relate to a subject. In some embodiments, the subject is selected from a cow, cattle, a bull, a bison, a yak, a buffalo, an antelope, a goat, a sheep, a deer, a giraffe, a caribou, a gazelle, a macropod, a llama, a camel, and an alpaca.

[0452] In some embodiments, the subject is an offspring (e.g., calf) of the vaccinated female subject that received the milk comprising an antibody that binds at least one methanogen.

[0453] In some embodiments, the subject is an adult subject. In other embodiments, the subject is a young subject (e.g., a calf). In some embodiments, a young subject includes a subject from birth to weaning. In some embodiments, a young subject includes a subject from birth up to two years of age, such from birth up to 3, 4, 5, 6, 7, 8, 9, 10, 11, or 12 months. Accordingly, in some embodiments, a young subject may be at least, about, or no more than 1, 2, 3, 4, 5, 6, 7, 8, 9, 10, 11, 12, 13, 14, 15, 16, 17, 18, 19, 20, 21, 22, 23, or 24 months in age. In preferred embodiments, a young subject is administered with a vaccine, antibodies, milk, animal feed, agent (e.g., an agent that reduces methane production in a subject, a probiotic bacterial strain, a small molecule inhibitor, etc.), or other composition of the present disclosure prior to establishment of methanogens. In some such embodiments, a lower dose of vaccine or other agents may be required.

[0454] In some embodiments, a subject is a subject born from a vaccinated parent(s). In some embodiments, a subject is a subject born from a vaccinated mother such that the subject received a high level of methanogen-neutralizing antibodies in the colostrum and milk fed to the subject at birth. Such a subject or a subject who received an early treatment may have low initial methanogen establishment, thereby enhancing a long term performance of the vaccines, antibodies, milk, animal feed, agents (e.g., an agent that reduces methane production in a subject, a probiotic bacterial strain, a small molecule inhibitor, etc.), or other compositions of the present disclosure.

[0455] In some embodiments, a subject is vaccinated with each change in hands and/or environment, such as from one owner to another, one ranch to another, or one geographical area to another. Typical ranch operations will vaccinate a newly arrived animal to manage disease, and vaccinating with a vaccine of the present disclosure (e.g., a vaccine that targets at least one methanogen cell surface protein) will fall into this standard agronomic practice.

[0456] In some embodiments, a subject is vaccinated with a vaccine of the present disclosure (e.g., a vaccine that targets at least one methanogen cell surface protein) at a time when the subject is subject to at least one other vaccination. For example, a subject (e.g., a domesticated ruminant, a dairy cow, a beef cow) is subject to vaccination against infectious bovine rhinotracheitis (IBR), bovine virus diarrhea (BVD), parainfluenza-3 (PI3), bovine respiratory syncytial virus (BRSV), clostridia, E. Coli mastitis, leptospirosis, Mannheimia hemolytica, Brucella, vibriosis, Campylobacter, trichomonas, trichomoniasis, rotavirus, foot and mouth disease virus (FMDV), coronavirus, and/or respiratory disease. An exemplary vaccination regimen for a ruminant throughout the life cycle is shown in Table 14.

[0457] Additionally or alternatively, CH₄ reducing vaccine compositions may be combined with one or more additional antigens configured to target infectious bovine rhinotracheitis (IBR), bovine virus diarrhea (BVD), parainfluenza-3 (PI3), bovine respiratory syncytial virus (BRSV), clostridia, E. Coli mastitis, leptospirosis, Mannheimia hemolytica, Brucella, vibriosis, Campylobacter, trichomonas, trichomoniasis, rotavirus, foot any mouth disease virus (FMDV) coronavirus, and/or respiratory disease to form a multivalent vaccine composition, which is then administered to the subject as disclosed herein.

TABLE 14
Exemplary administration schedule of USDA-approved vaccinations for a ruminant

| Animal | Life Stage | Exemplary Vaccinations |
|---|---|---|
| Dairy | Adult | 4-way viral-IBR/BVD/PI3/BRSV |
| | Dry-off (e.g., 45-60 days pre-calving) | Leptospirosis (5-way) |
| | | Clostridial (7-way) |
| | | J-5 (mastitis) |
| Dairy | Adult | 4-way viral-IBR/BVD/PI3/BRSV |
| | Pre-breeding (e.g., 30 days prior to breeding | |
| | season) | Leptospirosis (5-way) |
| Dairy | Calf | 4-way viral-IBR/BVD/PI3/BRSV |
| | Weaning (e.g., 6-12 weeks) | Leptospirosis (5-way) |
| | | Clostridial (7-way) |
| | | Mannheimia hemolytica |
| Dairy | Calf | 4-way viral-IBR/BVD/PI3/BRSV |
| | Yearling (i.e., 12-24 mo) | Leptospirosis (5-way) |
| | | Clostridial (7-way) |
| | | Mannheimia hemolytica |
| | | Brucella |
| Beef | Adult | 4-way viral-IBR/BVD/PI3/BRSV |
| | | Leptospirosis (5-way) |
| | Pre-breeding (e.g., 30 days prior to breeding | Vibriosis (Campylobacter)- |
| | season) | natural mating |
| | | Trichomonas-natural mating |
| Beef | Adult | 4-way viral-IBR/BVD/PI3/BRSV |
| | Pregnancy examination (e.g., 30-45 days | |
| | post-breeding season) | Leptospirosis (5-way) |
| | | Clostridial (7-way) |
| Animal | Life Stage | Exemplary Vaccinations |
| | | Scour vaccines-E. coli, possibly |
| | | combination with rota and |
| | | coronavirus |
| Beef | Calf | Clostridial vaccines |
| | Newborn (e.g., 0-3 mo) | Possibly respiratory vaccines, if |
| | | there is a history of disease in very |
| | | young calves |
| Beef | Calf | 4-way viral-IBR/BVD/PI3/BRSV |
| | | Leptospirosis (5-way) |
| | | Clostridial (7-way) |
| | Weaning (e.g., 6-8 mo) | Mannheimia hemolytica |
| | | Brucella |
| Beef | Adult | 4-way viral-IBR/BVD/PI3/BRSV |
| | Arrival at stocker operation (e.g., 6-8 mo) | Mannheimia hemolytica |
| Beef | Adult | 4-way viral-IBR/BVD/PI3/BRSV |
| | 14-21d post-arrival at stocker operation | Clostridial (7-way) |
| | | Mannheimia hemolytica |
| | | Leptospirosis (5-way) (optional) |
| Beef | Adult | 4-way viral-IBR/BVD/PI3/BRSV |
| | Arrival at feedlot operation (e.g., 9-11 mo) | Mannheimia hemolytica |
| Beef | Adult | 4-way viral-IBR/BVD/PI3/BRSV |
| | 14-21d post-arrival at feedlot operation | Clostridial (7-way) |
| | | Mannheimia hemolytica |
| | | Leptospirosis (5-way) (optional |

[0458] Vaccinating a large number of animals (e.g., in a ranch, e.g., herding ruminants) is a challenging process. Thus, in preferred embodiments, the administration of a vaccine of the present disclosure is incorporated into a pre-existing vaccination program that an animal is already subject to. Such a method reduces the cost, time, and efforts in administering a vaccine of the present disclosure to an animal.

### Methods for Detection of Methane Production

[0459] Various methods for detecting the level of methane produced by animals are known in the art and can be applied to the methods of the present disclosure.

[0460] In some embodiments, portable respiration hoods for tethered and non-tethered animals (Garnsworthy et al. (2012) J. Dairy Sci. 95:3166-3180; Garnsworthy et al. (2019) Animals 9:837; Zimmerman and Zimmerman WO2011130538; each of which is incorporated herein by reference) directly measure the gas concentration of incoming and exhaust air from individual animals.

[0461] In some embodiments, tracer-ratio gas releases from the animal (Johnson et al. (1994) Environ. Sci. Technol., 28, 359-362, which is incorporated herein by reference), such as Sulfur hexafluoride (SF6) (Grainger et al. (2007) J. Dairy Sci., 90:2755-2766; Vechi et al. (2022) Agriculture, Ecosystems and Environment 330:107885; each of which is incorporated herein by reference), assumes that the tracer gas and the emitted CH4 have similar transport paths, so that a tracer measurement can establish the CH4 emission rate.

[0462] In some embodiments, micrometeorological techniques are typically considered a herd-scale measurement, where the emission rate is calculated from the measurement of enhanced gas concentrations downwind of an animal herd (Harper et al. (2011) Anim. Feed Sci. Tech., 166-167, 227-239, which is incorporated herein by reference), and these include the mass balance technique (Laubach et al. (2008) Aust. J. Exp. Agr., 48:132-137; Lockyer and Jarvis (1995) Environ. Pollut. 90:383-390; each of which is incorporated by reference), eddy covariance (Dengel et al. (2011) Glob. Change Biol., 17:3524-3533; Felber et al. (2015) Biogeosciences, 12:3925-3940; each of which is incorporated herein by reference), and inverse dispersion techniques (Flesch et al., (2005) Atmos. Environ., 39:4863-4874; Todd et al. (2014) J. Environ. Qual., 43:1125-1130; Bai et al. (2021) Atmos. Meas. Tech., 14:3469-3479; each of which is incorporated herein by reference). The main advantage of micrometeorological techniques is that they do not interfere with the animals or the environment.

[0463] There are also devices that measure the level of methane (see e.g., Rey et al. (2019) Animals 9:563, Mapfumo et al. (2018) Pastoralism: Research, Policy and Practice 8:15; each of which is incorporated herein by reference). For example, the laser methane detector (LMD) is a hand held open path laser measuring device (e.g., LaserMethaneMini (Tokyo Gas Engineering Co., Ltd. Anritsu Devices Co., Ltd., Tokyo, Japan)). The principle of the LMD measuring technology is described (Chagunda et al. (2013) Animal, 7:394-400; Garnsworthy et al. (2012) J. Dairy Sci. 95:3166-3180; and Chagunda et al. (2009) Comput. Electron. Agric. 68:157-160; each of which is incorporated herein by reference). Briefly, this device is based on infrared absorption spectroscopy using a semiconductor laser for CH4 detection. The device must be pointed towards the nostrils of the cow from a fixed distance. Then, the LMD measures the density of the air column between the device and the animal's nostrils. The reflected laser beam is detected by the device, and its signal is processed and converted to the cumulative CH4 concentration along the laser path in ppm-m. The LMD is connected to a tablet (Samsung Galaxy Tab A6, New Jersey, USA) running GasViewer app (Tokyo Gas Engineering Solutions, Tokyo, Japan) via Bluetooth connection for exporting and storing the data in real time at 0.5 s intervals. The effect of atmospheric ambient CH4 concentration from the measurements is discounted using the offset function of the LMD.

[0464] The non-dispersive infrared analyzer CH4 analyzer (NDIR) (Guardian NG Edinburg Instruments Ltd., Livinstong, UK) is one of the so-called sniffer methods that measure CH4 concentration (ppm) in breath or exhaled air. These methods have been previously used (e.g., by Garnsworthy et al. (2012) J. Dairy Sci. 95:3166-3180) to assess the CH4 production of dairy cows at commercial farms. Briefly, a gas sampling tube from the front of a cow's head to a gas analyzer to continuously measure CH4 concentration in the cow's breath is used. Then, air is drawn through the instrument by an integral pump between the gas inlet port and analyzer. The device can have a range of 0 to 10,000 ppm, and air can be sampled continuously at a rate of 1 L/min through an 8 mm polyamide tube, using approximately 2 m of tube from the analyzer to cow's nostrils. Methane concentration can be recorded at 1 s intervals and stored in a datalogger (Data Recorder SRD-99; Simex Sp. Z o.o, Gdansk, Poland). Baseline or ambient CH4 concentration can be calculated as mean CH4 concentration before starting the measurements and subtracted from the measured data. Each day before starting measurements, the NDIR analyzer should be verified using standard mixtures of CH4 in N₂ (0.0%, 0.25%, 0.50%, 0.75% and 1.0%; MESA International Technologies INC, Santa Ana, CA, USA).

[0465] Certain methods and devices are described further below and in Table 15.

TABLE 15
Features of exemplary methods for measuring methane output by individual animals

| | Purchase | Running | | | Behaviour | |
|---|---|---|---|---|---|---|
| Method | Cost ² | Costs ² | Labour ² | Repeatability | Alteration ³ | Throughput |
| Respiration chamber | High | High | High | High | High | Low |
| SF₆ technique | Medium | High | High | Medium | Medium | Medium |
| Breath sampling during | Low ⁴ | Low | Low | Medium | None | High |
| milking and feeding | | | | | | |
| GreenFeed | Medium | Medium | Low | Medium | Low | Medium |
| Laser methane detector | Low | Low | High | Low | Low-Medium | Medium |

[0466] As indicated above and shown in Table 15, exemplary methods include respiration chambers, the sulfur hexafluoride (SF6) tracer technique, breath sampling during milking or feeding, the GreenFeed system, and the laser methane detector. Each method measures different components of methane output. Only respiration chambers measure total emissions from the animal via the oral, nasal and anal routes; all other methods ignore emissions via the anus and only measure methane emitted in breath. Breath measurements are justified because 99% of methane is emitted from the mouth and nostrils, and only 1% via the anus. The SF6 technique samples breath over 24 h, whereas other techniques use spot samples of breath over periods of minutes throughout the day, so diurnal variation has to be considered. The majority of methane (87%) is released by eructation, which provides a clear signal for sample processing.

### Respiration Chamber

[0467] Respiration chambers for open- or closed-circuit indirect calorimetry are considered the ‘Gold Standard’, and were used extensively in nutrition studies when establishing the Metabolisable Energy system. A single animal (or occasionally more) is confined in a chamber for between 2 and 7 days. Concentration of methane (and other gases if required) is measured at the air inlet and outlet vents of the chamber. The difference between outlet and inlet concentrations is multiplied by airflow to indicate methane emissions rate. In most installations, a single gas analyser is used to measure both inlet and outlet concentrations, often for two or more chambers. This involves switching the analyser between sampling points at set intervals, so concentrations are actually measured for only a fraction of the day.

[0468] Respiration chambers vary in construction materials, size of chamber, gas analysis equipment and airflow rate, all of which can influence results. Validation of 22 chambers at six UK research sites revealed an uncertainty of 25.7% between facilities, which was reduced to 2.1% when correction factors were applied to trace each facility to the international standard for methane. The main sources of uncertainty were stability and measurement of airflow, which are crucial for measuring methane emission rate. It was concluded, however, that chambers were accurate for comparing animals measured at the same site. It is an added challenge, when benchmarking alternative methods against respiration chambers, that the respiration chambers themselves have not been benchmarked against respiration chambers at other facilities.

[0469] For large-scale evaluation of methane emissions by individual animals, respiration chambers are challenging, with only a single study in growing Angus steers and heifers exceeding 1000 animals, which found methane production to be moderately heritable h²=0.27 0.07. Installation costs and running costs are high, and only one animal can be measured at a time. If the monitoring time is three days per animal, and chambers are run continuously, then maximum throughput would be approximately 100 animals per chamber per year. In practice, throughput is likely to be 30 to 50 animals per year. Cows are social animals, and confinement in a chamber may ultimately influence their feeding behaviour, resulting in less feed being consumed and in a different meal pattern compared with farm conditions. Altered feeding patterns or levels is not a problem for metabolic studies evaluating feeds, but can be a problem when evaluating individual animals. Furthermore, the representativeness of respiration chambers to grazing systems has been called into question. However, promising developments have led to more animal friendly respiration chambers constructed from cheaper, transparent materials. These lower the cost and reduce the stress of confinement with minimal disruptions to accuracy, precision and no drop in feed intake of the cows (Hellwing et al. (2012) J. Dairy Sci. 95:6077-6085, which is incorporated herein by reference).

### The SF₆ Method

[0470] The SF₆ tracer gas technique was developed in an attempt to measure methane emissions by animals without confinement in respiration chambers. Air is sampled near the animal's nostrils through a tube attached to a halter and connected to an evacuated canister worn around the animal's neck or on its back. A capillary tube or orifice plate is used to restrict airflow through the tube so that the canister is between 50 and 70% full after approximately 24 h. A permeation tube containing SF₆ is placed into the rumen of each animal. The pre-determined release rate of SF₆ is multiplied by the ratio of methane to SF₆ concentrations in the canister to calculate methane emission rate.

[0471] Many research centres have used the SF₆ technique with variations in design of sampling and collection equipment, permeation tubes, and gas analysis. Reliable results depend on following standard protocols, with greatest variation coming from accuracy of determining SF6 release rate from permeation tubes and control of sampling rate. With capillary tubes, sampling rate decreases as pressure in the canister increases, whereas an orifice plate gives a steadier sampling rate over 24 h. A source of error that has not been evaluated is that animals might interact and share methane emissions when the sampling tube of one animal is near the head of another animal. There is good agreement between methane emissions measured by the SF6 technique and respiration chambers, although results from the SF₆ technique are more variable.

[0472] For large-scale evaluation of methane emissions by individual animals, the SF₆ technique is more useful than respiration chambers. Animal behaviour and intake might be affected by wearing the apparatus, and by daily handling to exchange canisters, but the technique is considerably less intrusive than respiration chambers, because cows remain in the herd. Labour and monetary costs for changing canisters each day and for lab analysis are high. Throughput is limited by the number of sets of apparatus available, handling facilities, labour, and the capacity of the lab for gas analysis. Animals need to be measured for 5 to 7 days, and it is recommended that group size should be less than 15 animals, so maximum throughput would be about 750 animals per year. Heritability has been estimated for methane production in grazing Holstein cows at h²=0.33±0.15.

### Breath Sampling During Milking and Feeding

[0473] Several research groups have developed methods to measure methane concentration in breath of cows during milking and/or feeding. These are often referred to as ‘sniffer methods’ because they use devices originally designed to detect dangerous gas leaks. Air is sampled near the animal's nostrils through a tube fixed in a feed bin and connected directly to a gas analyser. The feed bin might be in an automatic milking station or in a concentrate feeding station. Different research centres use different gas analysers (Nondispersive Infrared (NDIR), Fourier-transform infrared (FTIR) or photoacoustic infrared (PAIR)) and different sampling intervals (1, 5, 20 or 90-120 s). Methane concentration during a sampling visit of typically between 3 and 10 min may be specified as the overall mean, or the mean of eructation peaks. Some centres use CO₂ as a tracer gas and calculate daily methane output according to ratio of methane to CO₂ and daily CO₂ output predicted from performance of the cow. Repeatability and rank correlations were higher for eructation peaks than for mean concentrations, and were higher for eructation peaks than for methane to CO₂ ratio. However, all methods show good repeatability.

[0474] For large-scale evaluation of methane emissions by individual animals, breath-sampling methods have significant advantages compared with other methods. Breath-sampling methods are non-invasive because, once installed, animals are unaware of the equipment and are in their normal environment. Animals follow their normal routine, which includes milking and feeding, so no training of animals, handling, or change of diet is required. Equipment is relatively cheap, although more expensive gas analysers are available, and running costs are negligible.

[0475] The compromise for non-invasiveness of breath-sampling is that concentrations of gasses in the sampled air are influenced by cow head position relative to the sampling tube. The use of head position sensors and data filtering algorithms can remove the effects when the cow's head is completely out of the feed bin, but not within the feed bin. Consequently, sniffer measurements are more variable than flux methods, with factors like variable air flow in the barn increasing measurement error (imprecision), and head position, a highly repeatable characteristic, inflating between-cow variability.

[0476] Using CO₂ as a tracer gas partly addresses the issue but, because CO₂ arises from metabolism as well as rumen fermentation, variability of CO₂ emissions has to be considered. A further consideration is diurnal variation in breath concentrations of methane and CO₂ because animals are spot-sampled at different times of day and night. Diurnal variation can be accounted for either by fitting a model derived from the whole group of animals, or by including time of measurement in the statistical model.

[0477] The number of observations per analyser is limited only by number of cows assigned to one automatic milking station or concentrate feeding station and length of time equipment is installed. Typically, each analyser will record 40 to 70 animals 2 to 7 times per day for 7 to 10 days, although the number of sampling stations per analyser can be increased by using an automatic switching system. Throughput per analyser is likely to be 2000 to 3000 animals per year. Estimates of heritability for methane production measured using this method range from h²=0.12 to 0.45 over multiple studies.

### GreenFeed

[0478] GreenFeed (C-Lock Inc., Rapid City, SD, USA) is a sophisticated sniffer system where breath samples are provided when animals visit a bait station. As with other sniffer systems, GreenFeed samples breath from individual animals several times per day for short periods (3 to 7 min). GreenFeed is a portable standalone system used in bam and pasture applications, and incorporates an extractor fan to ensure active airflow and head position sensing for representative breath sampling. Measurements are pre-processed by the manufacturer, and data are available in real time through a web-based data management system. As GreenFeed captures a high proportion of emitted air and measures airflow, which can be calibrated using a tracer gas, methane emission is estimated as a flux at each visit. Providing visits occur throughout the 24 h, methane emission can be estimated directly as g/day.

[0479] A limitation of the GreenFeed system Is that animals require training to use the system, although animals which have been trained to use the system will readily use it again. However, some animals will not use the system or will use it infrequently, and frequency of visits is affected by diet. This can be a challenge when screening commercial herds for methane emission under genetic evaluation.

[0480] The manufacturer recommends 15 to 25 animals per GreenFeed unit, and recordings are made typically for 7 days. If all animals visit the unit adequately, throughput per unit is likely to be 750 to 1250 animals per year.

### Laser Methane Detector (LMD)

[0481] The laser methane detector (LMD) is a highly responsive, hand-held device that is pointed at an animal's nostrils and measures methane column density along the length of the laser beam (ppm·m). In the first implementation of LMD on a farm, measurements for each cow were taken over periods of 15 to 25 s between eructation events, and could detect methane emitted each time the animal breathed out. In a later study with sheep and beef cattle, monitoring periods of 2 to 4 min allowed authors to separate breathing cycles from eructation events. Typically, animals are restrained either manually or in head yokes at a feed fence for the required length of time. The operator has to stand at the same distance (1 to 3 m) from each animal every time and must be careful to keep the laser pointed at the animal's nostrils throughout the measurement period.

[0482] The LMD can be used in the animal's normal environment, although for consistency restraint is required during measurement. Because the LMD measures methane in the plume originating from the animal's nostrils, results can be a_ected by factors such as: distance from the animal; pointing angle; animal's head orientation and head movement; air movement and temperature in the barn; adjacent animals; and operator variation. Operator variation is likely to be one of the biggest factors, because the operator controls distance and pointing angle, and is responsible for ensuring that the laser remains on target. The structure of the barn and the resulting ventilation conditions and wind speed at the location of the measurement are also considerable sources of variation in recorded methane.

[0483] Assuming operator fatigue does not limit measurements, each LMD could record up to 10 animals per hour. If each animal is recorded 3 times (on 3 consecutive days, for example), throughput is likely to be up to 1000 animals per year.

Methods for Producing of Recombinant Protein and/or Antibodies

[0484] The terms“expression vector” mean the vehicle by which a DNA or RNA sequence (e.g. a foreign gene) can be introduced into a host cell, so as to transform the host and promote expression (e.g. transcription and translation) of the introduced sequence. Thus, a further object of the invention relates to a vector comprising a nucleic acid of the present invention.

[0485] Such vectors may comprise regulatory elements, such as a promoter, enhancer, terminator and the like, to cause or direct expression of said polypeptide upon administration to a subject. Examples of promoters and enhancers used in the expression vector for animal cell include early promoter and enhancer of SV40 (Mizukami T. et al. 1987), LTR promoter and enhancer of Moloney mouse leukemia virus (Kuwana Y et al. 1987), promoter (Mason J O et al. 1985) and enhancer (Gillies S D et al. 1983) of immunoglobulin H chain and the like.

[0486] Any expression vector for animal cell can be used. Examples of suitable vectors include pAGE107 (Miyaji H et al. 1990), pAGE103 (Mizukami T et al. 1987), pHSG274 (Brady G et al. 1984), pKCR (O'Hare K et al. 1981), pSG1 beta d2-4-(Miyaji H et al. 1990) and the like. Other representative examples of plasmids include replicating plasmids comprising an origin of replication, or integrative plasmids, such as for instance pUC, pcDNA, pBR, and the like. Representative examples of viral vector include adenoviral, retroviral, herpes virus and AAV vectors. Such recombinant viruses may be produced by techniques known in the art, such as by transfecting packaging cells or by transient transfection with helper plasmids or viruses. Typical examples of virus packaging cells include PA317 cells, PsiCRIP cells, gPenv-positive cells, 293 cells, etc. Detailed protocols for producing such replication-defective recombinant viruses may be found for instance in WO 95/14785, WO 96/22378, U.S. Pat. Nos. 5,882,877, 6,013,516, 4,861,719, 5,278,056 and WO 94/19478.

[0487] A further object of the present invention relates to a cell which has been transfected, infected or transformed by a nucleic acid and/or a vector according to the invention. The term “transformation” means the introduction of a “foreign” (i.e. extrinsic or extracellular) gene, DNA or RNA sequence to a host cell, so that the host cell will express the introduced gene or sequence to produce a desired substance, typically a protein or enzyme coded by the introduced gene or sequence. A host cell that receives and expresses introduced DNA or RNA has been “transformed.”

[0488] The nucleic acids may be used to produce a recombinant polypeptide of the invention in a suitable expression system. The term “expression system” means a host cell and compatible vector under suitable conditions, e.g. for the expression of a protein coded for by foreign DNA carried by the vector and introduced to the host cell.

[0489] Common expression systems include E. coli host cells and plasmid vectors, insect host cells and Baculovirus vectors, and mammalian host cells and vectors. Other examples of host cells include, without limitation, prokaryotic cells (such as bacteria) and eukaryotic cells (such as yeast cells, mammalian cells, insect cells, plant cells, etc.). Specific examples include E. coli, Kluyveromyces or Saccharomyces yeasts, mammalian cell lines (e.g., Vero cells, CHO cells, 3T3 cells, COS cells, etc.) as well as primary or established mammalian cell cultures (e.g., produced from lymphoblasts, fibroblasts, embryonic cells, epithelial cells, nervous cells, adipocytes, etc.). Examples also include mouse SP2/0-Ag14 cell (ATCC CRL1581), mouse P3X63-Ag8.653 cell (ATCC CRL1580), CHO cell in which a dihydrofolate reductase gene (hereinafter referred to as “DHFR gene”) is defective (Urlaub G et al; 1980), rat YB2/3HL.P2.G11.16Ag.20 cell (ATCC CRL 1662, hereinafter referred to as “YB2/0 cell”), and the like. The YB2/0 cell is preferred, since ADCC activity of chimeric or humanized antibodies is enhanced when expressed in this cell.

[0490] The present invention also relates to a method of producing a recombinant host cell expressing an antibody or a polypeptide of the invention according to the invention, said method comprising the steps consisting of (i) introducing in vitro or ex vivo a recombinant nucleic acid or a vector as described herein into a competent host cell, (ii) culturing in vitro or ex vivo the recombinant host cell obtained and (iii), optionally, selecting the cells which express and/or secrete said antibody or polypeptide. Such recombinant host cells can be used for the production of antibodies and polypeptides of the invention.

[0491] Antibodies and fragments thereof, immunoglobulins, and polypeptides of the present invention may be produced by any technique known in the art, such as, without limitation, any chemical, biological, genetic or enzymatic technique, either alone or in combination.

[0492] Knowing the amino acid sequence of the desired sequence, one skilled in the art can readily produce said antibodies or polypeptides, by standard techniques for production of polypeptides. For instance, they can be synthesized using well-known solid phase method, preferably using a commercially available peptide synthesis apparatus (such as that made by Applied Biosystems, Foster City, Calif) and following the manufacturer's instructions. Alternatively, antibodies and other polypeptides of the present invention can be synthesized by recombinant DNA techniques as is well-known in the art. For example, these fragments can be obtained as DNA expression products after incorporation of DNA sequences encoding the desired (poly)peptide into expression vectors and introduction of such vectors into suitable eukaryotic or prokaryotic hosts that will express the desired polypeptide, from which they can be later isolated using well-known techniques.

[0493] In particular, the present invention further relates to a method of producing an antibody or a polypeptide of the invention, which method comprises the steps consisting of: (i) culturing a transformed host cell according to the invention under conditions suitable to allow expression of said antibody or polypeptide; and (ii) recovering the expressed antibody or polypeptide.

[0494] Antibodies and other polypeptides of the present invention are suitably separated from the culture medium by conventional immunoglobulin purification procedures such as, for example, protein A-Sepharose, hydroxylapatite chromatography, gel electrophoresis, dialysis, affinity chromatography, ammonium sulfate or ethanol precipitation, acid extraction, anion or cation exchange chromatography, phosphocellulose chromatography, hydrophobic interaction chromatography, hydroxylapatite chromatography and lectin chromatography. High performance liquid chromatography (“HPLC”) can also be employed for purification. See, e.g., Colligan, Current Protocols in Immunology, or Current Protocols in Protein Science, John Wiley & Sons, NY, N.Y., (1997-2001), e.g., Chapters 1, 4, 6, 8, 9, 10, each entirely incorporated herein by reference.

[0495] Chimeric antibodies (e.g., mouse-ruminant chimeras, or one ruminant-another ruminant (e.g., goat-cow) chimeras, or ruminant-human chimeras) of the present invention can be produced by obtaining nucleic sequences encoding VL and VH domains as previously described, constructing a human chimeric antibody expression vector by inserting them into an expression vector for animal cell having genes encoding human antibody CH and human antibody CL, and expressing the coding sequence by introducing the expression vector into an animal cell. The CH domain of a human chimeric antibody can be any region which belongs to human immunoglobulin, such as the IgG class or a subclass thereof, such as IgG1, IgG2, IgG3 and IgG4. Similarly, the CL of a human chimeric antibody can be any region which belongs to Ig, such as the kappa class or lambda class. Chimeric and humanized monoclonal antibodies, comprising both human and non-human portions, which can be made using standard recombinant DNA techniques, are within the scope of the invention. Such chimeric and humanized monoclonal antibodies can be produced by recombinant DNA techniques known in the art, for example using methods described in Robinson et al. International Patent Publication PCT/US86/0226; Akira et al. European Patent Application 184,18; Taniguchi, M. European Patent Application 171,49; Morrison et al. European Patent Application 173,49; Neuberger et al. PCT Application WO 86/0153; Cabilly et al. U.S. Pat. No. 4,816,56; Cabilly et al. European Patent Application 125,02; Better et al. (1988) Science 24:1041-104; Liu et al. (1987) Proc. Natl. Acad. Sci. USA 84:3439-3443; Liu et al. (1987) J. Immunol. 139:3521-3526; Sun et al. (1987) Proc. Natl. Acad. Sci. 84:214-218; Nishimura et al. (1987) Cancer Res. 47:999-1005; Wood et al. (1985) Nature 314:446-449; Shaw et al. (1988) J. Natl. Cancer Inst. 80:1553-1559); Morrison, S. L. (1985) Science 229:1202-1207; Oi et al. (1986) Biotechniques:21; Winter U.S. Pat. 5,225,53; Jones et al. (1986) Nature 32:552-52; Verhoeyan et al. (1988) Science 239:1534; and Beidler et al. (1988)J Immunol. 141:4053-4060.

[0496] In addition, methods for producing antibody fragments are well-known. For example, Fab fragments of the present invention can be obtained by treating an antibody which specifically reacts with a ganglioside with a protease such as papain. Also, Fabs can be produced by inserting DNA encoding Fabs of the antibody into a vector for prokaryotic expression system, or for eukaryotic expression system, and introducing the vector into a procaryote or eucaryote (as appropriate) to express the Fabs.

[0497] Similarly, F(ab′)2 fragments of the present invention can be obtained treating an antibody which specifically reacts with a ganglioside with a protease, pepsin. Also, the F(ab′)2 fragment can be produced by binding Fab′ described below via a thioether bond or a disulfide bond.

[0498] Fab′ fragments of the present invention can be obtained treating F(ab′)2 which specifically reacts with a ganglioside with a reducing agent, dithiothreitol. Also, the Fab′ fragments can be produced by inserting DNA encoding a Fab′ fragment of the antibody into an expression vector for prokaryote, or an expression vector for eukaryote, and introducing the vector into a prokaryote or eukaryote (as appropriate) to perform its expression.

[0499] In addition, scFvs of the present invention can be produced by obtaining cDNA encoding the VH and VL domains as previously described, constructing DNA encoding scFv, inserting the DNA into an expression vector for prokaryote, or an expression vector for eukaryote, and then introducing the expression vector into a prokaryote or eukaryote (as appropriate) to express the scFv.

### Methods for Treating Diseases or Conditions

[0500] The vaccine compositions and methods of the present disclosure are also useful for treating disease(s) and/or condition(s). It is well documented that methanogens are associated with various diseases, including inflammatory bowel disease (IBD), gingivitis, and bloat. The vaccines of the present disclosure are also useful in treating diseases in subjects (e.g., animals, mammals, ruminants, humans) that are associated with elevated, increased, or severe lactic acidosis. Thus, the vaccine compositions methods of the present disclosure have utility in treating these diseases or conditions in subjects (e.g., humans, felines, canines, ruminants).

### Kits

[0501] The present invention also encompasses kits. For example, the kit can comprise a vaccine of the present disclosure, any one of pharmaceutical compositions described herein, at least one additional agent that reduces methane production in a subject described herein, or any combination thereof, packaged in a suitable container and can further comprise instructions for using such reagents. The kit may also contain other components, such as administration tools packaged in the same or separate container.

### Production of Low Carbon Animal Products

[0502] In some aspects, the vaccine compositions and methods disclosed herein may be used to produce low carbon animal products. The production of low carbon animal products may involve administering a vaccine composition to an animal, determining greenhouse gas emissions from the vaccinated animal, harvesting an animal product, and determining the carbon intensity of the harvested product compared to a product from an unvaccinated animal.

[0503] In some embodiments, a method of producing a low carbon animal product may comprise:
[0504] (a) Administering to an animal a vaccine composition comprising cells and/or cell parts of at least one methanogen, as described in any of the embodiments herein. The animal may be a mammal, such as a ruminant.
[0505] (b) Determining an amount of emissions of at least one greenhouse gas from the vaccinated animal following administration until animal product harvesting. The greenhouse gas may include, but is not limited to, CO₂, CH₄, N₂O, and/or H₂. In some cases, the emissions may be measured using a GreenFeed system or other suitable emissions measurement technique.
[0506] (c) Harvesting an animal product from the vaccinated animal. The animal product may include, but is not limited to, meat, milk, wool, or other products derived from the animal.
[0507] (d) Determining an amount of the harvested animal product.
[0508] (e) Determining a first carbon intensity as a ratio of the amount of emissions from the vaccinated animal and the amount of harvested animal product.
[0509] (f) Determining a second carbon intensity as a ratio of an amount of carbon emissions from an untreated animal and the same amount of harvested animal product.
[0510] (g) Determining the difference between the first carbon intensity and the second carbon intensity.

[0511] In some embodiments, the method may further comprise administering to the animal at least one agent that reduces methane production, in addition to the vaccine composition. This may provide a synergistic effect in reducing greenhouse gas emissions.

[0512] In some aspects, the method may include certifying the animal product as a low carbon intensity product based on the determined difference between the first carbon intensity and the second carbon intensity. This certification may provide added value to the animal product in markets where low carbon products are desired.

[0513] The methods described herein may allow for the production of animal products with a reduced carbon footprint compared to conventional production methods. This may be beneficial for meeting sustainability goals, reducing environmental impact, and potentially commanding premium prices for low carbon animal products in certain markets.

### EXEMPLARY EMBODIMENTS

[0514] 1. A vaccine composition comprising at least one polypeptide and/or at least one peptide of at least one cell surface protein or a fragment thereof of at least one methanogen.

[0515] 2. The vaccine composition of embodiment 1, wherein
[0516] (a) the at least one methanogen is of a family Methanobacteriaceae;
[0517] (b) the at least one methanogen is of a genus selected from: Methanobrevibacter, Methanosphaera, Methanomicrobium, Methanobacterium, Methanocorpusulum, Methanosaeta, Methanoculleus, Methanosarcina, and Thermoplasmatales, optionally Methanobrevibacter, Methanomicrobium, and Methanosarcina; and/or
[0518] (c) the at least one methanogen comprises Methanobacterium formicicum, Methanobacterium bryantii, Methanobrevibacter ruminantium, Methanobrevibacter millerae, Methanobrevibacter olleyae, Methanomicrobium mobile, Methanoculleus olentangyi, Methanosarcina barkeri, Methanobrevibacter boviskoreani, Methanobacterium beijingense, Methanoculleus marisnigri, Methanoculleus bourgensis, Methanosarcina mazei, Thermoplasmatales archaeon BRNA1, Methanobrevibacter gottschalkii, Methanobrevibacter thaueri, Methanobrevibacter smithii, Methanosphaera stadtmanae, Methanococcoides burtonii, Methanolobus psychrophilus R15, Methanobacterium paludism, Methanohalobium evestigatum, Methanomethylovorans hollandica, Methanothrix soehngenii, Methanocaldococcus vulcanius, Methanosalsum zhilinae, Methanocorpusculum labreanum, Methanoregula formicica, Methanoculleus marisnigri, Methanocella arvoryzae, Methanoculleus bourgensis, Methanolacinia petrolearia, Methanospirillum hungatei, Methanoplanus limicola, Methanohalophilus mahii, Methanococcus aeolicus, Methanosphaerula palustris, Methanocaldococcus fervens, Methanocaldococcus jannaschii, Methanocaldococcus sp. FS406-22, Methanoregula boonei, Methanobrevibacter sp. AbM4, Methanobrevibacter ruminantium, Methanosphaera, Methanobacterium formicicum, Methanocaldococcus villosus, Methanosarcina barkeri, Methanobacterium lacus, Methanotorris igneus, Methanotorris formicicus, Methanocaldococcus infernus, Methanofollis liminatans, Methanothermococcus okinawensis, Methanobrevibacter smithii, Methanobrevibacter, Methanocella conradii, Methanothermococcus thermolithotrophicus, Methanococcus maripaludis, Methanococcus maripaludis, Methanococcus vannielii, Methanothermus fervidus, Methanosarcina acetivorans, Methanosarcina mazei, Methanosaeta harundinacea 6Ac, Methanococcus maripaludis, Methanococcus voltae, Methanolinea tarda, Methanolobus psychrophilus, Methanosaeta harundinacea, or any combination thereof.

[0519] 3. The vaccine composition of embodiment 1 or 2, wherein the at least one methanogen comprises Methanobrevibacter gottschalkii and/or Methanobrevibacter ruminantium.

[0520] 4. The vaccine composition of any one of embodiments 1-3, wherein the vaccine composition comprises at least 2, 3, 4, 5, 6, 7, 8, 9, or 10 polypeptides and/or peptides.

[0521] 5. The vaccine composition of embodiment 4, wherein the at least two polypeptides and/or peptides are of the same cell surface protein or of different cell surface proteins.

[0522] 6. The vaccine composition of any one of embodiments 1-5, wherein the at least one cell surface protein or a fragment thereof comprises at least 90%, 91%, 92%, 93%, 94%, 95%, 96%, 97% 98%, 99%, or 100% sequence identity to an amino acid sequence of the present disclosure, optionally wherein the at least one cell surface protein or a fragment thereof comprises at least 90%, 91%, 92%, 93%, 94%, 95%, 96%, 97% 98%, 99%, or 100% sequence identity to an amino acid sequence set forth in any one of Tables C-F, 1A, 1B, 2A, 2B, 3A, 3B, 4A, 4B, 5A, 5B, and 6A-6G, or a fragment thereof.

[0523] 7. The vaccine composition of any one of embodiments 1-6, wherein the at least one cell surface protein or a fragment thereof comprises at least 90%, 91%, 92%, 93%, 94%, 95%, 96%, 97% 98%, 99%, or 100% sequence identity to an amino acid sequence encoded by at least one nucleic acid of the present disclosure, optionally wherein the at least one nucleic acid comprises the nucleotide sequence set forth in any one of Tables C-F, 1A, 1B, 2A, 2B, 3A, 3B, 4A, 4B, 5A, 5B, and 6A-6G, or a fragment thereof.

[0524] 8. The vaccine composition of any one of embodiments 1-7, wherein the vaccine composition comprises at least one full-length protein of at least one cell surface protein.

[0525] 9. The vaccine composition of any one of embodiments 1-7, wherein the vaccine composition comprises at least one fragment of at least one cell surface protein, optionally wherein the fragment is a polypeptide or a peptide.

[0526] 10. The vaccine composition of embodiment 9, wherein the at least one fragment:
[0527] (a) comprises an extracellular domain or a portion thereof;
[0528] (b) lacks a signal peptide, optionally a native signal peptide; and/or
[0529] (c) lacks a transmembrane domain, optionally a native transmembrane domain.

[0530] 11. The vaccine composition of embodiment 9 or 10, wherein the at least one fragment lacks at least, about, or no more than 1, 5, 10, 20, 25, 30, 35, 40, 50, 60, 70, 80, 90, or 100 amino acids, optionally from the N-terminus and/or the C-terminus.

[0531] 12. The vaccine composition of any one of embodiments 1-11, wherein the at least one cell surface protein or a fragment thereof comprises an adhesin-like protein; adhesin-like protein with cysteine protease domain; tetrahydromethanopterin S-methyltransferase subunit; ATP-processing protein; cell wall biosynthesis protein; cofactor biosynthesis protein; CRISPR protein; energy metabolism protein; enzyme; fatty acid synthesis protein; general metabolism protein; membrane protein; metal-binding protein; methanogenesis protein; Mtr protein; MtrE protein; phage-related protein; proteolysis protein; transcription regulation protein; ribosomal protein; substrate binding protein; transcription protein; transport protein; protein whose expression changes in response to lauric acid stress; a fragment thereof; and/or any combination thereof (optionally those listed in e.g., Table 6G).

[0532] 13. The vaccine composition of any one of embodiments 1-12, wherein the at least one polypeptide and/or at least one peptide is formulated in lipid or saline.

[0533] 14. The vaccine composition of any one of embodiments 1-13, wherein in the vaccine composition is a pharmaceutical composition, optionally comprising at least one carrier and/or at least one excipient.

[0534] 15. The vaccine composition of any one of embodiments 1-14, wherein the vaccine composition comprises about 0.01 mg to about 50 mg of protein per mL, optionally about 0.1 mg to about 5 mg of protein per mL.

[0535] 16. The vaccine composition of any one of embodiments 1-15, wherein the vaccine composition comprises about 0.01 mg to about 50 mg of protein, optionally about 0.1 mg to about 5 mg of protein.

[0536] 17. The vaccine composition of any one of embodiments 1-16, wherein the at least one polypeptide and/or at least one peptide is lyophilized.

[0537] 18. The vaccine composition of any one of embodiments 1-16, wherein the at least one polypeptide and/or at least one peptide is in a liquid composition.

[0538] 19. The vaccine composition of any one of embodiments 1-18, wherein the vaccine composition comprises at least one adjuvant.

[0539] 20. The vaccine composition of embodiment 19, wherein the at least one adjuvant comprises:
[0540] (a) inorganic salts, preferably aluminum and calcium salts;
[0541] (b) an oil emulsion;
[0542] (c) saponins;
[0543] (d) lipid or liposomes
[0544] (e) an immune-stimulating complex;
[0545] (f) a carrier protein (e.g., KLH, optionally conjugated to the at least one polypeptide and/or at least one peptide);
[0546] (g) a bacterial product or derivatives thereof (e.g., bacterial toxins, lipopolysaccharide, etc.);
[0547] (h) a cytokine; or
[0548] (i) any combination of two or more selected from (a)-(h).

[0549] 21. The vaccine composition of embodiment 19 or 20, wherein the at least one adjuvant comprises Complete Freund's adjuvant, Incomplete Freund's adjuvant, Montanide ISA70, Montanide ISA61, Saponin, chitosan thermogel, lipid (e.g., monophosphoryl lipid A), a lipid nanoparticle/cationic liposome adjuvant, Emulsigen-D, Emulsigen, Emulsigen-P, Polygen, ENABL 06, Montainde ISA 201, Montanide Gel 02, or any combination of two or more thereof.

[0550] 22. The vaccine composition of any one of embodiments 1-21, wherein the vaccine composition induces immune response against at least one cell surface protein or a fragment thereof of the at least one methanogen.

[0551] 23. A method of treating a disease in a subject, the method comprising administering to the subject a vaccine composition of any one of embodiments 1-22.

[0552] 24. The method of embodiment 23, wherein the disease is a periodontal disease, Inflammatory Bowel Disease (IBD), irritable bowel syndrome (ISB), ISB-C, small intestinal bacterial overgrowth (SIBO), colorectal cancer, obesity, metabolic syndrome, diverticulosis and diverticulitis, liver abscess, gingivitis, and/or bloat.

[0553] 25. The method of embodiment 23 or 24, wherein the disease is associated with elevated, increased, or severe lactic acidosis.

[0554] 26. A method of inducing an immune response against at least one methanogen in a subject, the method comprising administering to the subject the vaccine of any one of embodiments 1-22.

[0555] 27. The method of embodiment 26, wherein the immune response comprises a B cell response and/or a T cell response, preferably a B cell response.

[0556] 28. A method of reducing rumen lactate, increasing pH, or combination thereof in a subject, the method comprising administering to the subject the vaccine of any one of embodiments 1-22.

[0557] 29. A method of reducing the activity, number, and/or type of methanogens in a digestive tract of a subject, the method comprising administering to the subject the vaccine composition of any one of embodiments 1-22.

[0558] 30. The method of embodiment 29, wherein the digestive track comprises rumen, reticulum, omasum, abomasum, small intestine, and/or large intestine, preferably rumen.

[0559] 31. A method of reducing the amount of methane (CH₄) and/or hydrogen (H₂) emitted by a subject, preferably eructated and/or exhaled, the method comprising administering to the subject the vaccine composition of any one of embodiments 1-22.

[0560] 32. The method of embodiment 31, wherein the amount of methane (CH₄) and/or hydrogen (H₂) is reduced by about 5-100%, preferably by about 10-100%, compared to a control, optionally wherein the amount of methane (CH₄) and/or hydrogen (H₂) is reduced by at least about 5%, 10%, 15%, 20%, 25%, 30%, 35%, 40%, 45%, 50%, 55%, 60%, 65%, 70%, 75%, 80%, 85%, 90%, 95%, or 100% compared to a control.

[0561] 33. The method of embodiment 31 or 32, wherein the amount of methane (CH₄) and/or hydrogen (H₂) is reduced by about 20-100%, preferably by about 30-100%, compared to a control.

[0562] 34. The method of any one of embodiments 31-33, wherein the amount of methane (CH₄) is reduced by (a) about 1 kg-about 50 kg within 8 weeks from the time of first vaccination, or (b) about 5 kg-about 300 kg within a year from the time of first vaccination, compared to a control.

[0563] 35. The method of any one of embodiments 31-34, wherein the amount of methane (CH₄) normalized to an amount of CO₂ emitted by the subject (i.e., CH₄/CO₂) is reduced by about 5-100%, preferably by about 10-100%, compared to a control, optionally wherein the amount of methane (CH₄) normalized to the amount of CO₂ is reduced by at least about 5%, 10%, 15%, 20%, 25%, 30%, 35%, 40%, 45%, 50%, 55%, 60%, 65%, 70%, 75%, 80%, 85%, 90%, 95%, or 100% compared to a control.

[0564] 36. The method of embodiment 35, wherein the amount of methane (CH₄) normalized to the amount of CO₂ is reduced by about 20-100%, preferably by about 30-100%, compared to a control.

[0565] 37. The method of any one of embodiments 31-36, wherein the amount of hydrogen (H₂) is reduced by (a) about 10 g-about 500 g within 8 weeks from the time of first vaccination, or (b) about 50 g-about 3 kg within a year from the time of first vaccination, compared to a control.

[0566] 38. A method of increasing the amount of carbon dioxide (CO₂) emitted by a subject, preferably eructated and/or exhaled, the method comprising administering to the subject the vaccine composition of any one of embodiments 1-22.

[0567] 39. The method of embodiment 38, wherein the amount of carbon dioxide (CO₂) is increased by about 1-100%, preferably by about 1-20%, compared to a control, optionally wherein the amount of CO₂ is increased by at least about 1%, 5%, 10%, 15%, 20%, 25%, 30%, 35%, 40%, 45%, 50%, 55%, 60%, 65%, 70%, 75%, 80%, 85%, 90%, 95%, or 100% compared to a control.

[0568] 40. The method of embodiment 38 or 39, wherein the amount of carbon dioxide (CO₂) is increased by about 3-10%, preferably by about 3-20%, compared to a control.

[0569] 41. The method of any one of embodiments 38-40, wherein the amount of carbon dioxide (CO₂) is increased by (a) about 29.8 kg-about 1,490 kg within 8 weeks from the time of first vaccination, or (b) about 149 kg-about 8,940 kg within a year from the time of first vaccination, compared to a control.

[0570] 42. The method of any one of embodiments 32-41, wherein the control is:
[0571] (a) an accepted reference;
[0572] (b) the amount of methane, CO₂-normalized methane, hydrogen, or carbon dioxide emitted by an unvaccinated subject; or
[0573] (c) the amount of methane, CO₂-normalized methane, hydrogen, or carbon dioxide emitted by the vaccinated subject prior to vaccination.

[0574] 43. The method of any one of embodiments 23-42, wherein the subject produces an antibody against at least one methanogen.

[0575] 44. The method of embodiment 43, wherein the antibody is an IgG, IgM, or an IgA, preferably an IgA or IgM.

[0576] 45. The method of embodiment 43 or 44, wherein the antibody is produced in an amount sufficient to:
[0577] (a) be detectable in the digestive tract;
[0578] (b) reduce the number and/or alter the relative abundances of methanogens in the digestive tract;
[0579] (c) reduce the amount of methane, the CO₂-normalized methane, and/or hydrogen emitted by the subject; and/or
[0580] (d) increase the amount of CO₂ emitted by the subject.

[0581] 46. The method of any one of embodiments 23-45, wherein the vaccine composition is administered to the subject via a route selected from intramuscular administration, intradermal administration, subcutaneous administration, and nasal administration.

[0582] 47. The method of any one of embodiments 23-46, wherein the vaccine composition is administered to the subject via intramuscular administration or subcutaneous administration, preferably subcutaneous administration.

[0583] 48. The method of any one of embodiments 23-47, wherein the subject is administered with at least one repeat dose of the vaccine composition of any one of embodiments 1-22.

[0584] 49. The method of embodiment 48, wherein the subject is administered with at least two repeat doses of the vaccine composition.

[0585] 50. The method of embodiment 48 or 49, wherein the subject is administered with the vaccine composition at least 3 times per year.

[0586] 51. The method of any one of embodiments 48-50, wherein the at least one repeat dose comprises the same dose or a different dose compared to the preceding dose of the vaccine composition.

[0587] 52. The method of any one of embodiments 48-51, wherein the at least one repeat dose comprises the same adjuvant or a different adjuvant compared to the preceding dose of the vaccine composition.

[0588] 53. The method of any one of embodiments 48-52, wherein the subject is administered with the repeat dose of the vaccine composition after at least about 2 weeks, about 3 weeks, about 1 month, about 6 months, or about 12 months from the time the subject is administered with the preceding dose of the vaccine composition.

[0589] 54. The method of any one of embodiments 48-53, wherein the subject is administered with the repeat dose of the vaccine composition no later than about 1 month, about 2 months, about 3 months, 6 months, 12 months, 18 months, or 24 months from the time the subject is administered with the preceding dose of the vaccine composition.

[0590] 55. The method of any one of embodiments 48-54, wherein the subject receives the repeat dose of the vaccine after at least about 2 weeks and no more than about 18 months from the time the subject is administered with the preceding dose of the vaccine.

[0591] 56. The method of any one of embodiments 48-55, wherein the subject is administered with at least two repeat doses of the vaccine composition, and the subject receives:
[0592] (a) the first repeat dose (“boost 1”) after about 2 weeks to about 4 weeks from the time the subject is administered with the initial vaccine dose (“prime”); and/or
[0593] (b) the second repeat dose (“boost 2”) after about 3 months to about 6 months from the time the subject is administered with the initial vaccine dose (“prime”).

[0594] 57. The method of any one of embodiments 23-56, wherein the subject is administered with a dosage of between about 0.1 mg of protein per kg of animal body weight and about 250 mg of protein per kg of animal body weight of the vaccine composition each time of vaccination.

[0595] 58. The method of any one of embodiments 23-57, further comprising administering to the subject (a) at least one agent that reduces the level of methane and/or hydrogen produced by the subject; and/or (b) at least one agent that increases production efficiency.

[0596] 59. The method of embodiment 58, wherein the at least one agent is administered to a subject concomitant with, prior to, or after the vaccination.

[0597] 60. The method of embodiment 58 or 59, wherein the at least one agent is administered to a subject after the vaccination.

[0598] 61. The method of any one of embodiments 58-60, wherein the at least one agent is administered to a subject daily, semiweekly, weekly, biweekly (every two weeks), or monthly.

[0599] 62. The method of any one of embodiments 58-61, wherein the at least one agent is administered to a subject for a duration of at least 1 week but no more than 1 month.

[0600] 63. The method of any one of embodiments 58-62, wherein the at least one agent comprises:
[0601] (a) an agent selected from the agents listed in Tables 9-13;
[0602] (b) 3-Nitrooxypropanol (3NOP), ethyl-3NOP, 2-bromoethanesulfonate (BES), 2-chloroethanesulfonate (CES), 3-bromopropanesulfonate (BPS), bromochloromethane (BCM), bromoform, bromodichloromethane, dibromochloromethane, carbon tetrachloride, trichloroacetamide, trichloroethyladipate, lumazin (2,4-pteridinedione), p-aminobenzoic acid, lovastatin, mevastatin, pravastatin, diallyl disulfide, garlic oil, saponins, tannins, flavonoids, nitrate, nitroethane, -nitro-propionate, 2-nitropropanol, 2-nitroethanol, malate, acrylate, oxaloacetate, fumarate, propynoic acid, 3-butenoic acid, 2-butynoic acid, ethyl 2-butynoate, monensin, lasalocid, bovicin HC5, nisin, or any combination thereof; and/or
[0603] (c) Monensin (Rumensin®), Optigrid® 45 (ractopamine hydrochloride), Amprolium (Corid), Bacitracin (Albac, BMD), Bambermycin (GainPro), Decoquinate (Deccox), Fenbendazole (Safe-Guard), Laidlomycin (Cattlyst), Lasalocid (Bovetec), Melengestrol Acetate (MGA), Methoprene (Altosid), Morantel (Rumatel), Poloxalene (Bloat Guard), Ractopamine (Optaflexx, Actogain), Tetraclovinphos (Rabon), or any combination thereof.

[0604] 64. The method of any one of embodiments 58-63, wherein the at least one agent is 3NOP or ethyl-3NOP.

[0605] 65. The method of embodiment 64, wherein the subject is administered with
[0606] (a) at least about 0.5 g but no more than 25 g of 3NOP per day;
[0607] (b) at least about 1 g but no more than 5 g of 3NOP per day; or
[0608] (c) about 2.5 g of 3NOP per day.

[0609] 66. The method of embodiment 64 or 65, wherein the subject is administered with 3NOP for a duration of at least 1 week but no more than 1 month.

[0610] 67. The method of any one of embodiments 55-66, wherein the at least one agent is formulated in animal feed.

[0611] 68. The method of embodiment 58, wherein the at least one agent is a composition comprising one or more small molecules that reduce the production of one or more deleterious atmospheric gases and/or precursors thereof and one or more agriculturally suitable carriers.

[0612] 69. The method of embodiment 68, wherein the one or more agriculturally suitable carriers comprises a solid carrier.

[0613] 70. The method of embodiment 69, wherein the one or more solid carriers comprises attapulgite, kaolinite, fuller's earth, calcium carbonate, perlite, diatomaceous earth, calcium silicate, fly ash, a polysaccharide, a disaccharide, a monosaccharide, a gum, a natural or synthetic derivative thereof, or a combination thereof.

[0614] 71. The method of embodiment 69, wherein the one or more solid carriers comprises attapulgite, kaolinite, fuller's earth, calcium carbonate, perlite, diatomaceous earth, calcium silicate, fly ash, a polysaccharide, a disaccharide, a monosaccharide, a gum, silica, propylene glycol, hemp protein, biochar, montmorillonite, activated charcoal, lignin, wood flour, hemp protein, pea protein, soy protein, gelatin, casein, chotsan, talc, calcium phosphate, arginine, lysine, calcium carbonate, carbon black, glutamine, betaine, bismuth phosphate, bismuth citrate, iron phosphate, or any combination thereof.

[0615] 72. The method of any one of embodiments 69-71, wherein the one or more solid carriers comprises a saccharide comprising cellulose, xanthan gum, karaya gum, ethylcellulose, inositol, galactose, arabinose, lactose, lactulose, mannitol, mannose, sorbose, turanose, platinose, or a combination thereof.

[0616] 73. The method of any one of embodiments 69-71, wherein the one or more solid carriers comprises a saccharide comprising cellulose, xanthan gum, karaya gum, ethylcellulose, inositol, galactose, arabinose, lactose, lactulose, mannitol, mannose, sorbose, turanose, platinose, carrageenan, cellulose acetate, hydroxypropyl cellulose, cellulose acetate phthalate, maltrodextran, dextran, inulin, corn starch, amylopectin, sodium starch glycolate, pentaerthritol, cyclodextrin, or a combination thereof.

[0617] 74. The method of any one of embodiments 69-73, wherein the solid carrier comprises silica and ethylcellulose.

[0618] 75. The method of embodiment 74, wherein the carrier comprises about 10% to about 50% by weight of the silica and about 50 to about 90% by weight of the ethylcellulose.

[0619] 76. The method of any one of embodiments 69-73, wherein the carrier comprises silica and activated charcoal.

[0620] 77. The method of any one of embodiments 69-73, wherein the carrier comprises about 10% to about 90% by weight of the silica and about 10% to about 90% by weight of the activated charcoal.

[0621] 78. The method of any one of embodiments 77, wherein the carrier further comprises arginine, lysine, or both arginine and lysine.

[0622] 79. The method of any one of embodiments 69-73, wherein the carrier comprises activated charcoal and ethylcellulose.

[0623] 80. The method of embodiment 79, wherein the carrier comprises about 10% to about 50% by weight of the activated charcoal and about 40% to about 90% by weight of the ethylcellulose.

[0624] 81. The method of embodiment 79 or 80, wherein the carrier further comprises about 1 to about 10% by weight of sodium lignosulfate or about 1 to about 10% by weight of hydroxyethyl cellulose.

[0625] 82. The method of any one of embodiments 69-73, wherein the carrier comprises arginine and poly caprolactone.

[0626] 83. The method of embodiment 82, wherein the carrier comprises about 10 to about 60% by weight of the arginine and about 30 to about 90% by weight of the polycaprolactone.

[0627] 84. The method of any one of embodiments 69-73, wherein the carrier comprises silica and polycaprolactone.

[0628] 85. The method of embodiment 84, wherein the carrier comprises about 10 to about 60% by weight of the silica and about 30 to about 90% by weight of the polycaprolactone.

[0629] 86. The method of any one of embodiments 69-85, wherein the one or more solid carriers is inert.

[0630] 87. The method of any one of embodiments 69-86, wherein the one or more solid carriers is water soluble.

[0631] 88. The method of any one of embodiments 69-87, further comprising one or more additives with a density greater than water and/or one or more additives that reduces the rate of dissolution of the composition in water.

[0632] 89. The method of embodiment 88, wherein the composition has a density of at least 1.1, preferably about 1.1 mg/mL to about 3 mg/mL, about 1.5 to about 3 mg/mL, about 1.5 to about 2.5 mg/mL, or about 1.5 to about 2 mg/mL.

[0633] 90. The method of embodiment 88 or 89, wherein the one or more additives with a density greater than water comprises silica, attapulgite, kaolinite, fuller's earth, calcium carbonate, perlite, diatomaceous earth, calcium silicate, fly ash, or any combination thereof.

[0634] 91. The method of any one of embodiments 88-90, wherein the one or more additives that reduces the rate of dissolution of the composition further reduces a rate of release of the one or more small molecules into water.

[0635] 92. The method of embodiment 91, wherein the composition dissolves over at least about 1, 2, 3, 4, 5, 6, 7, 14, 21, 28, 35, 42, 49, 56, 63, 70, 77, 84, 91, 98, 105, 112, 119, 126, 133, 140, and/or nor more than about 2, 3, 4, 5, 6, 7, 14, 21, 28, 35, 42, 49, 56, 63, 70, 77, 84, 91, 98, 105, 112, 119, 126, 133, 140, or 147 days, about 1 to about 147 days, more preferably 7-63 days, more preferably about 7-42 days, even more preferably 14-42 days yet even more preferably 14-28 days.

[0636] 93. The method of any one of embodiments 69-92, wherein about 40 to about 80% of the small molecules that reduce the production of one or more deleterious atmospheric gases and/or precursors is thereof is released in water after 15 days.

[0637] 94. The method of any one of embodiments 69-93, wherein the composition comprises particles having a uniform size distribution.

[0638] 95. The method of any one of embodiments 69-94, wherein the composition comprises particles having a non-uniform size distribution.

[0639] 96. The method of embodiment 94 or 95, wherein the particles comprise a spherical-, square-, rectangular-, capsular-, cylindrical-, conical-, ovular-, triangular-, diamond-, or disk-like shape.

[0640] 97. The method of any one of embodiments 69-96, wherein the particles have a size ranging from about 1 mm to about 20 mm, about 1 to about 15 mm, about 1 to about 10 mm, about 5 to about 20 mm, about 5 to about 15 mm, or about 5 to about 10 mm.

[0641] 98. The method of any one of embodiments 69-97, wherein the particles further comprises a coating.

[0642] 99. The method of embodiment 98, wherein the coating comprises at least two layers.

[0643] 100. The method of embodiment 98 or 99, wherein the coating is selected from cellulose acetate phlalate, ethyl cellulose, hydroxypropyl cellulose, polycaprolactone, alginate, chitosan, polyethylene glycol, cellulose acetate, triacetin, propylene glycol, n-methyl-2-pyrollidone, and any combination thereof.

[0644] 101. The method of embodiment 98 or 99, wherein the coating comprises two or more polyelectrolytes.

[0645] 102. The method of embodiment 101, wherein the polyelectrolytes comprise polystyrene sulfonate, polyethyleneimine, sodium lignosulfate, polyglutamic acid and poly-L-lysine, poly-L-arginine, polyallylamine hydrochloride, polyacrylic acid, or any combination thereof.

[0646] 103. The method of embodiment 102, wherein the polyelectrolytes comprise polyallylamine hydrochloride and sodium lignosulfate.

[0647] 104. The method of embodiment 102, wherein the polyelectrolytes comprise polyallylamine hydrochloride and polystyrene sulfonate.

[0648] 105. The method of embodiment 102, wherein the polyelectrolytes comprise sodium lignosulfate and one of polyglutamic acid and poly-L-lysine, or poly-L-arginine, and sodium lignosulfate.

[0649] 106. The method of embodiment 102, wherein the polyelectrolytes comprise polystyrene sulfonate and one of polyglutamic acid and poly-L-lysine, or poly-L-arginine.

[0650] 107. The method of any one of embodiments 101-106, wherein the two or more polyelectrolytes are crosslinked.

[0651] 108. The method of any one of embodiments 69-107, wherein the one or more small molecules comprise a molecule that interferes with the uptake and/or conversion of acetate, H₂, CO², methanol, monomethylamine, dimethylamine, trimethylamine, nitric oxide, or a combination thereof.

[0652] 109. The method of any one of embodiments 69-108, wherein the one or more small molecules that reduce the production of one or more deleterious atmospheric gases and/or precursors interact with an enzyme selected from the group consisting of 3-(methylthio)propanoate:coenzyme M methyltransferase, acetate kinase, acetyl-CoA decarbonylase, acetyl-CoA decarbonylase/synthase complex α₂ε₂, acetyl-CoA decarbonylase/synthase complex β, acetyl-CoA decarbonylase/synthase complex γδ, acetyl-CoA synthase, carbon monoxide dehydrogenase, carbonic anhydrase, Co-methyltransferase, coenzyme M reductase, cyclohydrolase, dehydrogenase, dimethylamine-[corrinoid protein] Co-methyltransferase, F₄₂₀-dependent methylene-H₄MPT reductase, F₄₂₀-dependent methylene-H₄SPT dehydrogenase, formylmethanofuran dehydrogenase, formylmethanofuran:H₄MPT formyltransferase, formylmethanofuran:H₄SPT formyltransferase, formyltransferase, H₂-forming methylene-H₄MPT dehydrogenase, methanol-5-hydroxybenzimidazolylcobamide Co-methyltransferase, methenyl-H₄MPT cyclohydrolase, methyl-coenzyme M reductase, methyl-H₄SPT:CoM methyltransferase, methylated [methylamine-specific corrinoid protein]:coenzyme M methyltransferase, methylcobamide:CoM methyltransferase, methylthiol:coenzyme M methyltransferase, methyltransferase, MtaC protein:coenzyme M methyltransferase, phosphotransacetylase, tetrahydromethanopterin S-methyltransferase, tetramethylammonium methyltransferase, trimethylamine-corrinoid protein Co-methyltransferase, and any combination thereof.

[0653] 110. The method of embodiment 109, wherein the one or more small molecules that reduce the production of one or more deleterious atmospheric gases and/or precursors interact with methyl-coenzyme M reductase (MCR).

[0654] 111. The method of any one of embodiments 69-110, wherein the one or more small molecules that reduce the production of one or more deleterious atmospheric gases and/or precursors comprise a compound having the formula R¹—[CH₂]ₙ—ONO₂ wherein
[0655] n is an integer from 1 to 15;
[0656] R¹ is selected from the group consisting of H, C₁-C₆alkyl, phenyl, —OH, —NH₂, —CN, —COOH, —O(C═O)R³, —NHC(═O)R³, SO₂NHR³, or —ONO₂, —SH and R³ is C₁-C₆alkyl, phenyl, pyridyl;
[0657] with the proviso that when n is >3 the hydrocarbon chain may be interrupted by —O— or —NH—.

[0658] 112. The method of embodiment 111, wherein the one or more small molecules that reduce the production of one or more deleterious atmospheric gases and/or precursors is selected from 3-nitrooxypropanol, 9-nitrooxynonanol, 5-nitrooxy pentanoic acid, 6-nitrooxy hexanoic acid, bis(2-hydroxyethyl)amine dinitrate, 1,4-bis-nitrooxybutane, 1,5-bis-nitrooxypentane, and any combination thereof.

[0659] 113. The method of embodiment 111, wherein the one or more small molecules that reduce the production of one or more deleterious atmospheric gases and/or precursors comprises 3-nitrooxypropanol (3NOP).

[0660] 114. The method of any one of embodiments 69-113, wherein the composition comprises about 1 to about 25% by weight of the small molecule, about 5 to about 20% by weight of the small molecule, or about 5 to about 15% by weight of the small molecule.

[0661] 115. The method of any one of embodiments 69-114, wherein the composition comprises a plurality of populations of particles, wherein each population or particles comprises a different formulation, a different shape, and/or a different size distribution.

[0662] 116. The method of embodiment 115, wherein the plurality of populations of particles comprises a first population and a second population.

[0663] 117. The method of embodiment 116, wherein the population of granular particles further comprises at least 1, 2, 3, 4, 5, 5, 6, 8, or 9 and/or no more than 4, 5, 6, 7, 8, 9, or 10 additional populations, for example 3-10 additional populations, preferably 3-7 additional populations, more preferably 3-5 additional populations.

[0664] 118. The method of embodiment 115 or 116, wherein the first population comprises an immediate release formulation.

[0665] 119. The method of any one of embodiments 116-118, wherein the second population comprises a delayed release formulation.

[0666] 120. The method of any one of embodiments 117-119, wherein each additional population comprises a delayed release formulation, wherein each population dissolves and/or releases the one or more small molecules that reduce the production of one or more deleterious atmospheric gases and/or precursors at a different time than each of the other populations.

[0667] 121. An antibody produced by the method of any one of embodiments 23-120, or an antigen-binding fragment thereof.

[0668] 122. The antibody of embodiment 121, wherein the antibody is a monoclonal antibody.

[0669] 123. The antibody of embodiment 121 or 122, wherein the antibody is an IgM, an IgG or an IgA, preferably an IgA or an IgM.

[0670] 124. The antibody of any one of embodiments 121-123, wherein the antibody is lyophilized.

[0671] 125. The antibody of any one of embodiments 121-124, wherein the antibody is in a pharmaceutical composition, optionally comprising at least one excipient and/or carrier.

[0672] 126. Milk and/or a derivative thereof produced by the subject of any one of embodiments 23-120.

[0673] 127. The milk and/or a derivative thereof of embodiment 126, wherein the milk and/or derivatives thereof comprises an antibody that binds at least one methanogen.

[0674] 128. The milk and/or a derivative thereof of embodiment 126 or 127, wherein the milk and/or derivatives thereof is pasteurized and/or homogenized.

[0675] 129. The milk and/or a derivative thereof of any one of embodiments 127-128, wherein the milk and/or derivatives thereof is lyophilized or evaporated to form dry milk powder (e.g., boiling at low pressure at low temperature).

[0676] 130. The milk and/or a derivative thereof of any one of embodiments 126-129, further comprising at least one agent that reduces methane and/or hydrogen production in a subject, optionally wherein the at least one agent is selected from the agents in Table 9.

[0677] 131. An animal feed comprising:
[0678] (a) the antibody of any one of embodiments 121-125;
[0679] (b) at least one agent that reduces methane and/or hydrogen production in a subject, optionally wherein the at least one agent is selected from the agents in Tables 9-13;
[0680] (c) the milk of any one of embodiments 126-130; or
[0681] (d) any combination of two or more of (a)-(c).

[0682] 132. The animal feed of embodiment 131, wherein the animal feed is liquid (e.g., drinking water, milk) or solid (e.g., fodder).

[0683] 133. The animal feed of embodiment 131 or 132, wherein the animal feed comprises fat and/or fatty acid, optionally wherein the animal feed comprises fat and/or fatty acid that is at least about 1%, 2%, 3%, 4%, 5%, or 6% of the diet.

[0684] 134. A method of reducing methane and/or hydrogen production or increasing CO₂ production in a subject, the method comprising orally administering to and/or feeding the subject the antibody of any one of embodiments 121-125, the milk and/or a derivative thereof of any one of embodiments 126-130, the animal feed of any one of embodiments 131-133, or any combination of two or more thereof.

[0685] 135. The method of embodiment 134, further comprising administering at least one agent that reduces methane and/or hydrogen production in a subject, optionally wherein the at least one agent is selected from the agents in Tables 9-13.

[0686] 136. The method of embodiment 134 or 135, further comprising administering the subject with the at least one vaccine composition of any one of embodiments 1-22.

[0687] 137. The method of any one of embodiments 23-120 and 134-136, wherein the subject is a mammal, a human, a canine, a feline, or a ruminant.

[0688] 138. The method of embodiment 137, wherein the ruminant is selected from a cow, cattle, a bull, a bison, a yak, a buffalo, an antelope, a goat, a sheep, a deer, a giraffe, a caribou, a gazelle, a macropod, a llama, a camel, and an alpaca.

[0689] 139. The method of any one of embodiments 23-120 and 134-138, wherein the subject is cattle.

[0690] 140. The method of embodiment 139, wherein the cattle is selected from a pregnant cow, heifer, bull, and steer.

[0691] 141. The method of any one of embodiments 23-120 and 134-140, wherein the subject is an adult.

[0692] 142. The method of embodiment 141, wherein the subject is adult cattle selected from:
[0693] (a) a cow that is about 6-8 months to about 2-7 years old;
[0694] (a) a beef adult that is about 1.5 years to about 2.5 years old; and
[0695] (b) a dairy adult that is about 4 years to 7 years old.

[0696] 143. The method of any one of embodiments 23-120 and 134-140, wherein the subject is a young subject (e.g., before weaning or below 2 years of age).

[0697] 144. The method of embodiment 143, wherein the subject is young cattle selected from:
[0698] (a) a newborn calf and a pre-weaned calf that is about 0 month to about 3 months old; and
[0699] (b) a weaned cow that is about 3 months to 8 months old.

[0700] 145. The method of any one of embodiments 23-120 and 134-140, wherein the subject is a pregnant female subject.

[0701] 146. The method of any one of embodiments 23-120 and 134-140, wherein the subject is an offspring (e.g., calf) of the vaccinated female subject that received the milk comprising an antibody that binds at least one methanogen.

[0702] 147. The method of any one of embodiments 23-120 and 134-146, wherein the vaccine is administered to a subject as a part of a pre-existing vaccination program to which the subject is subject (e.g., Table 14).

[0703] 148. The method of any one of embodiments 23-120 and 134-147, wherein the vaccine is administered to a subject when the subject is subject to or receives at least one other vaccine, wherein the at least one other vaccine is against infectious bovine rhinotracheitis (IBR), bovine virus diarrhea (BVD), parainfluenza-3 (PI3), bovine respiratory syncytial virus (BRSV), clostridia, E. Coli mastitis, leptospirosis, Mannheimia hemolytica, Brucella, vibriosis, Campylobacter, trichomonas, trichomoniasis, rotavirus, coronavirus, and/or respiratory disease.

[0704] 149. The method of any one of embodiments 23-120 and 134-148, wherein the vaccine is administered to a subject when the subject changes in hands and/or a changes in environment.

[0705] 150. The method of any one of embodiments 23-120 and 134-149, wherein the vaccine reduces methane and/or hydrogen production in the lower intestinal track (lower bowel) or the rumen of the subject.

[0706] 151. The method of embodiment 150, wherein the method results in at least about 1%, 2%, 3%, 4%, 5%, 6%, 7%, 8%, 9%, 10, 1%, 12%, 13%, 14%, 15%, 16%, 17%, 18%, 19%, or 20% reduction in the level of methane and/or hydrogen produced by the subject, optionally wherein the reduction in the level of methane and/or hydrogen is compared to an untreated subject.

[0707] 152. A kit comprising the vaccine composition of any one of embodiments 1-22.

[0708] 153. The kit of embodiment 152, wherein the vaccine composition comprises no more than one polypeptide or peptide.

[0709] 154. The kit of embodiment 152, wherein the vaccine composition comprises:
[0710] (a) at least two polypeptides;
[0711] (b) at least two peptides; or
[0712] (c) at least one polypeptide and at least one peptide.

[0713] 155. The kit of embodiment 152, wherein the kit comprises at least two vaccine compositions, each comprising different polypeptide(s) and/or peptide(s).

[0714] 156. The kit of embodiment 155, wherein the at least two vaccine compositions are in separate containers.

[0715] 157. The kit of any one of embodiments 152-156, wherein the kit comprises about or at least about 1, 2, 3, 4, 5, 10, 20, 50, 100, 250, 500, 1000, 1500, 2000, 2500, or 3000 doses of the vaccine composition.

[0716] 158. The kit of embodiment 157, wherein
[0717] (a) all doses are in a single container;
[0718] (b) each dose is in an individual container; or
[0719] (c) about or at least about 2, 3, 4, 5, 10, 25, 50, or 100 doses are pooled in a single container.

[0720] 159. The kit of any one of embodiments 152-158, further comprising at least one adjuvant.

[0721] 160. The kit of embodiment 159, wherein the vaccine composition and the at least one adjuvant are in separate containers.

[0722] 161. The kit of embodiment 159 or 160, wherein the kit comprises at least about 1, 2, 3, 4, 5, 10, 20, 50, 100, 250, 500, 1000, 1500, 2000, 2500, or 3000 doses; and
[0723] (a) all doses are in a single container, and the at least one adjuvant for all doses are in a separate single container;
[0724] (b) each dose is in an individual container, and the at least one adjuvant for all doses are in a separate single container;
[0725] (c) each dose is in an individual container, and the at least one adjuvant for each dose is in a separate individual container; or
[0726] (d) about or at least about 2, 3, 4, 5, 10, 25, 50, or 100 doses are pooled in a single container, and the pooled amount of at least one adjuvant for the pooled doses are in a separate single container.

[0727] 162. The kit of any one of embodiments 159-161, wherein the kit comprises at least two adjuvants that are different.

[0728] 163. A method of treating a subject afflicted with a disease, the method comprising to the subject:
[0729] (a) the vaccine composition of any one of embodiments 1-22;
[0730] (b) the antibody of any one of embodiments 121-125;
[0731] (c) the milk and/or derivative thereof of any one of embodiments 126-130;
[0732] (d) the animal feed of any one of embodiments 131-133;
[0733] (e) at least one agent that reduces methane and/or hydrogen production in a subject, optionally wherein the at least one agent is selected from the agents in Tables 9-13; or
[0734] (f) any combination of two or more thereof.

[0735] 164. The method of embodiment 163, wherein the subject is selected from a mammal, ruminant, a canine, a feline, and a human, optionally wherein the ruminant is selected from a cow, cattle, a bull, a bison, a yak, a buffalo, an antelope, a goat, a sheep, a deer, a giraffe, a caribou, a gazelle, a macropod, a llama, a camel, and an alpaca.

[0736] 165. A method of reducing CH₄ emissions in a ruminant comprising administering to the ruminant a vaccine composition comprising at least one polypeptide and/or at least one peptide of at least one cell surface protein or a fragment thereof (e.g., an antigenic fragment, e.g., a fragment comprising an epitope, e.g., a fragment comprising an extracellular domain or a portion thereof) of at least one methanogen, wherein the CH₄ emissions are reduced by at least about 10%, 11%, 12%, 13%, 14%, 15%, 16%, 17%, 18%, 19%, or 20% as compared to an untreated control ruminant.

[0737] 166. A method of reducing H₂ emissions in a ruminant comprising administering to the ruminant a vaccine composition comprising at least one polypeptide and/or at least one peptide of at least one cell surface protein or a fragment thereof (e.g., an antigenic fragment, e.g., a fragment comprising an epitope, e.g., a fragment comprising an extracellular domain or a portion thereof) of at least one methanogen, wherein the H₂ emissions are reduced by at least about 1%, 2%, 3%, 4%, 5%, 6%, 7%, 8%, 9%, 10%, 11%, 12%, 13%, 14%, 15%, 16%, 17%, 18%, 19%, 20%, 21%, 22%, 23%, 24%, 25%, 26%, 27%, 28%, 29%, 30%, 31%, 32%, 33%, 34%, 35%, 36%, 37%, 38%, 39%, 40%, 41%, 42%, 43%, 44%, 45%, 46%, 47%, 48%, 49%, or 50% as compared to an untreated control ruminant.

[0738] 167. A method of increasing the productivity of a ruminant comprising administering to the ruminant a vaccine composition comprising at least one polypeptide and/or at least one peptide of at least one cell surface protein or a fragment thereof (e.g., an antigenic fragment, e.g., a fragment comprising an epitope, e.g., a fragment comprising an extracellular domain or a portion thereof) of at least one methanogen, wherein the productivity is increased by at least about 0.50%, 1%, 1.5%, 2%, 2.5%, 3%, 3.5%, 4%, 4.5%, 5%, 5.50%, 6%, 6.5%, 7%, 7.5%, 8%, 8.5%, 9%, 9.5%, 10%, 10.5%, 11%, 11.5%, 12%, 12.5%, 13%, 13.5%, 14%, 14.5%, or 15% as compared to an untreated control ruminant.

[0739] 168. The method of any one of embodiments 165-167, wherein the vaccine composition comprises the vaccine composition of any one of embodiments 1-22.

[0740] 169. The method of any one of embodiments 165-168, wherein the ruminant is cattle.

[0741] 170. An animal injected subcutaneously with the vaccine composition of any one of embodiments 1-22, wherein the vaccine composition comprises about a dosage of between 0.1 mg/kg and 250 mg/kg, or any range in between or any value in between.

[0742] 171. A method of producing a low carbon animal product, the method comprising:
[0743] (a) administering to an animal (e.g., a mammal, a ruminant) a vaccine composition of any one of embodiments 1-22;
[0744] (b) determining an amount of emissions of at least one greenhouse gas (e.g., CO₂, CH₄, N₂O, and/or H₂) from the animal of (a) following administration until animal product harvesting;
[0745] (c) determining a first carbon intensity as a ratio of a first amount of emissions from the vaccinated animal in (b) and the amount of harvested animal product;
[0746] (d) determining a second carbon intensity as a ratio of a second amount of carbon emissions from an untreated animal and the same amount of harvested animal product; and
[0747] (e) determining the difference between the first carbon intensity and the second carbon intensity.

[0748] 172. The method of embodiment 171, wherein determining the amount of emissions comprises measuring the emissions using a GreenFeed system.

[0749] 173. The method of embodiment 171, wherein the animal product is selected from the group consisting of meat, milk, and wool.

[0750] 174. The method of embodiment 171, further comprising administering to the animal at least one agent that reduces methane and/or hydrogen production.

[0751] 175. The method of embodiment 171, further comprising certifying the animal product as a low carbon intensity product based on the determined difference between the first carbon intensity and the second carbon intensity.

### EXAMPLES

### Example 1: Computational Selection of M. gottschalkii Antigens

### Dataset Generation

[0752] The complete list of 1,800 predicted proteins from the Methanobrevibacter gottschalkii DSM 11977 genome was obtained from NCBI and included both the protein identifiers, amino acid sequence, and native or genomic nucleic acid (DNA) sequence.

### Protein Metadata Generation

### Localization Predictions

[0753] A successful protein antigen would need to be located on the exterior of the methanogen cell in order for it to be accessible to antibodies for binding. Therefore, we were interested in understanding the subcellular localization of all proteins in the M. gottschalkii genome. Several computational tools were used to predict both the overall localization of the entire protein and the residue-specific localization.

[0754] Subcellular localization for whole proteins was performed using the pSORTb (World Wide Web at hub.docker.com/r/brinkmanlab/psortb_commandline/) command line interface (CLI) tool. PSORTb is a bioinformatics tool for predicting subcellular localization for a given set of protein sequences. We report the localization with the highest score per protein.

[0755] Localization per-residue was predicted using TMbed (World Wide Web at github.com/BernhoferM/TMbed). This tool predicts for every residue whether it is predicted to be inside the cell, outside the cell, or embedded in the plasma membrane. We used the predictions from this tool to select extracellular fragments from proteins that may be only partially exterior to the cell.

### Specificity and Conservation

[0756] A successful antigen in a methanogen vaccine should be both specific to methanogens and conserved among them; that is, widespread among methanogen species but not among non-methanogen microbial species. To identify proteins that are both specific to and conserved among methanogens, we analyzed the prevalence of two types of annotations within ruminal microbes (both methanogens and non-methanogens). We analyzed Gene Ontology (GO terms), which describe the predicted function and localization of a protein, and Pfam domain annotations, which describe conserved protein sequence features shared among members of a protein family. Both analyses were performed using the same methods.

[0757] To perform a comparative genomics analysis of methanogen genomes, we used data from Stewart et al., 2019 (World Wide Web at doi.org/10.1038/s41587-019-0202-3). In this paper, rumen samples from 283 beef cattle were DNA sequenced and 4941 genomes were assembled, of which 126 were archaea and 111 were from the Methanobrevibacter genus.

[0758] Stewart et al. annotated genes using DIAMOND to search against several public databases including UniRef; 9 million UniRef100 genes were annotated across the 4,941 genomes. Stewart et al. classified each genome's taxonomy. We defined “methanogens” as archaeal genomes containing methanogenesis genes and identified ˜235,000 genes from those genomes for further analysis.

[0759] The UniRef100 genes' Gene Ontology terms were obtained and GO term enrichment analysis was performed on each genome. A hyper-geometric test was used to quantify the degree of enrichment of each GO term in every genome (p-values adjusted with the Benjamini-Hochberg method). Then, for each GO term we used a two-sided t-test to measure the significance of the difference between the means of the adjusted p-values from the methanogen and non-methanogen genomes. GO terms that were enriched (hypergeometric test; adjusted p-value <0.05) in at least 50% of the methanogen genomes (i.e., at least 63 genomes) and were significantly different between methanogens and non-methanogens (two-sided t-test; adjusted p-value <0.05) were considered “preferred GO terms”. See Table A below for a list of preferred GO terms.

TABLE A

| go_id | count | go_name | ttest_pval_adj |
|---|---|---|---|
| GO: 0016491 | 126 | oxidoreductase activity | 1.112e−164 |
| GO: 0044272 | 122 | sulfur compound biosynthetic process | 0 |
| GO: 0015948 | 117 | methanogenesis | 0 |
| GO: 0000178 | 117 | exosome (RNase complex) | 0 |
| GO: 1901576 | 116 | organic substance biosynthetic process | 0 |
| GO: 0016020 | 114 | membrane | 8.154e−47 |
| GO: 0019386 | 112 | methanogenesis, from carbon dioxide | 0 |
| GO: 0032259 | 112 | methylation | 0 |
| GO: 0016151 | 111 | nickel cation binding | 0 |
| GO: 0000287 | 109 | magnesium ion binding | 1.933e−142 |
| GO: 0006082 | 108 | organic acid metabolic process | 0 |
| GO: 0009236 | 106 | cobalamin biosynthetic process | 2.213e−183 |
| GO: 0006730 | 101 | one-carbon metabolic process | 0 |
| GO: 0006777 | 100 | Mo-molybdopterin cofactor biosynthetic process | 5.948e−273 |
| GO: 0003899 | 96 | DNA-directed 5′-3′ RNA polymerase activity | 0 |
| GO: 0030677 | 93 | ribonuclease P complex | 0 |
| GO: 0000428 | 93 | DNA-directed RNA polymerase complex | 0 |
| GO: 0046982 | 91 | protein heterodimerization activity | 0 |
| GO: 0050454 | 84 | coenzyme F420 hydrogenase activity | 0 |
| GO: 0015252 | 83 | proton channel activity | 0 |
| GO: 0008270 | 81 | zinc ion binding | 1.057e−173 |
| GO: 0005267 | 77 | potassium channel activity | 0 |
| GO: 0030269 | 74 | tetrahydromethanopterin S-methyltransferase activity | 0 |
| GO: 0003743 | 72 | translation initiation factor activity | 0 |
| GO: 0050524 | 71 | coenzyme-B sulfoethylthiotransferase activity | 0 |
| GO: 0008234 | 71 | cysteine-type peptidase activity | 5.831e−42 |
| GO: 0003735 | 71 | structural constituent of ribosome | 3.140e−14 |
| GO: 0006412 | 70 | translation | 4.23le−13 |
| GO: 0008168 | 66 | methyltransferase activity | 0 |
| GO: 0052645 | 66 | F420-0 metabolic process | 0 |
| GO: 0006824 | 65 | cobalt ion transport | 0 |
| GO: 0046872 | 63 | metal ion binding | 2.974e−17 |

[0760] Pfam enrichment analysis was performed similarly; however as Stewart et al. did not perform Pfam annotation, we annotated these protein sequences using eggNOG-mapper (World Wide Web eggnog-mapper.embl.de/), a tool that first determines the orthology of a sequence based on pre-computed phylogenies prior to annotation. This approach can be more accurate than homology-based approaches (e.g. BLAST) since orthologs, or genes in a different species that evolved from a common ancestor, tend to retain their function as they evolve. EggNOG-mapper provides annotations from multiple public databases, one of which is the Pfam database composed of protein families, domains, motifs, and repeats. Pfam IDs were obtained for each genome's set of protein sequences, and similar to the GO term enrichment, all combinations of Pfam IDs and genomes were analyzed for enrichment. Pfams passing the same statistical tests were considered “preferred Pfams”. See Table B for a list of preferred Pfams.

TABLE B
Pfams enriched in at least 63 methanogen genomes
and with an adjusted p-value of <0.05

| pfam_id | count | ttest_pval_adj |
|---|---|---|
| Fer4 | 126 | 2.66E−11 |
| DNA_pol_B | 124 | 0 |
| Rad51 | 118 | 0 |
| RLI | 116 | 0 |
| TGT_C2 | 116 | 0 |
| eRF1_2 | 115 | 0 |
| DUF1743 | 115 | 0 |
| eRF1_3 | 115 | 0 |
| eRF1_1 | 115 | 0 |
| TF_Zn_Ribbon | 114 | 0 |
| TFIIB | 114 | 0 |
| ECR1_N | 113 | 0 |
| Big_3_5 | 113 | 0 |
| CBFD_NFYB_HMF | 113 | 0 |
| FMN_red | 113 | 6.00E−40 |
| PMBR | 112 | 0 |
| Beta_helix | 110 | 1.38E−78 |
| DUF4013 | 109 | 0 |
| Fer4_4 | 109 | 4.74E−60 |
| DUF2115 | 107 | 0 |
| FTR | 107 | 0 |
| Class_IIIsignal | 107 | 0 |
| FTR_C | 107 | 0 |
| HTH_5 | 107 | 3.34E−58 |
| Fer4_17 | 106 | 1.46E−24 |
| CBS | 106 | 1.19E−07 |
| DUF3100 | 103 | 0 |
| HEAT_2 | 103 | 4.49E−166 |
| NosD | 102 | 0 |
| UDG | 101 | 3.42E−08 |
| AAA_17 | 99 | 0 |
| TFIIS_C | 99 | 0 |
| RNA_POL_M_15KD | 99 | 0 |
| DUF1724 | 99 | 0 |
| LSM | 99 | 0 |
| DUF447 | 98 | 0 |
| DUF11 | 97 | 1.30E−280 |
| zinc_ribbon_2 | 97 | 6.25E−74 |
| Aldo_ket_red | 97 | 9.41E−09 |
| DUF1211 | 95 | 0 |
| PIN_6 | 94 | 0 |
| DUF2112 | 94 | 0 |
| Transglut_core | 94 | 2.68E−36 |
| HycI | 93 | 0 |
| NiFeSe_Hases | 93 | 8.00E−101 |
| S-AdoMet_synt_C | 93 | 0.00127743 |
| S-AdoMet_synt_M | 93 | 0.00131966 |
| S-AdoMet_synt_N | 93 | 0.0018158 |
| FrhB_FdhB_N | 92 | 2.40E−239 |
| Rubredoxin | 92 | 2.13E−29 |
| HIGH_NTasel_ass | 91 | 0 |
| FrhB_FdhB_C | 91 | 9.65E−178 |
| GGGtGRT | 91 | 9.47E−16 |
| HTH_12 | 87 | 0 |
| DUF2097 | 86 | 0 |
| MMR_HSR1_C | 86 | 0 |
| FlpD | 86 | 0 |
| Peptidase_C1 | 85 | 1.60E−31 |
| Regulator_TrmB | 84 | 0 |
| DUF2149 | 83 | 0 |
| CbiM | 83 | 5.61E−180 |
| zf-ribbon_3 | 82 | 1.32E−247 |
| FdhD-NarQ | 81 | 0 |
| Oxidored_q6 | 81 | 1.55E−107 |
| Flavodoxin_4 | 81 | 8.47E−29 |
| HTH_45 | 79 | 0 |
| Chlam_PMP | 79 | 0 |
| TOBE | 79 | 1.84E−25 |
| Ribosomal_S28e | 78 | 0 |
| CbiZ | 78 | 0 |
| DUF4012 | 78 | 0 |
| Ion_trans_2 | 78 | 1.34E−166 |
| S_layer_C | 77 | 0 |
| O_anti_polymase | 75 | 0 |
| Glyphos_transf | 75 | 8.67E−76 |
| Abi | 75 | 7.14E−55 |
| MTD | 73 | 0 |
| MtrA | 71 | 0 |
| DUF2085 | 71 | 0 |
| MFS_1 | 71 | 0.00344293 |
| PKD | 70 | 2.11E−67 |
| Radical_SAM | 70 | 3.62E−10 |
| Fer4_3 | 69 | 0 |
| HTH_33 | 69 | 2.44E−296 |
| ThiC_Rad_SAM | 69 | 2.30E−92 |
| NAD_binding_4 | 69 | 2.16E−71 |
| MCM_OB | 68 | 0 |
| MCM | 68 | 0 |
| OrfB_Zn_ribbon | 68 | 2.49E−53 |
| UDPG_MGDP_dh_C | 68 | 9.87E−06 |
| UDPG_MGDP_dh_N | 68 | 1.03E−05 |
| HxIR | 67 | 2.36E−47 |
| MarR | 67 | 3.57E−13 |
| UDPG_MGDP_dh | 67 | 1.65E−05 |
| CARDB | 66 | 5.57E−172 |
| MCM_N | 65 | 0 |
| DEAD_2 | 65 | 1.09E−74 |
| Pilin_N | 64 | 0 |
| DDE_Tnp_IS240 | 64 | 7.40E−266 |
| Condensation | 64 | 2.44E−39 |
| PadR | 64 | 3.96E−22 |
| DDE_Tnp_1 | 64 | 3.59E−10 |
| DUF3344 | 63 | 0 |
| TelA | 63 | 1.69E−36 |

### Gene Expression—Metatranscriptomics and Transcriptomics

### Methods

Growth of M. gottschalkii Monocultures

[0761] Triplicate M. gottschalkii DSM 11977 cultures were grown anaerobically in 100 mL of BY medium in 500 mL bottles at 38° C. The headspace was regularly exchanged and pressurized to ˜10 psi with 80% H₂/20% CO₂. Growth of the cultures was monitored via methane measurements. While the cultures were in exponential phase, 50 mL samples were anaerobically collected at 4° C. after centrifugation at 5000×g for 6 min. Cell pellets were immediately frozen on dry ice and stored at −80° C. until sent on dry ice to Texas A&M University (TAMU).

### Rumen Sampling Via Ruminal Cannula

[0762] Rumen samples were provided by the Wickersham Lab at Texas A&M University (TAMU). Samples were previously collected via the ruminal cannula, strained through three layers of cheesecloth, and separated into liquid and solid phases. Individual 50 mL samples of both liquid and solid phases were retained in conical tubes. Sub-samples of the solid phase were immediately flash frozen using liquid nitrogen and transferred to −20° C. storage until further processing and analysis.

### Total RNA Extraction, Library Preparation, and Sequencing

[0763] Previously frozen biological samples were thawed on wet ice and further processed by the Dass Lab at TAMU. Total RNA extraction was completed using the protocol defined in Wang et al. 2011, and RNA cleanup using the RNeasy mini kit (Qiagen) was performed. All total RNA samples were treated with DNAase to remove any DNA contamination. Total RNA was delivered to Texas A&M AgriLife Research's TxGen for sequencing library preparation and subsequent RNA-sequencing. Total RNA samples were stored at −80° C. before and after transport and were transported to TxGen on dry ice.

[0764] Samples were QC'ed according to TxGen's SOP prior to library preparation. The bulk of the ribosomal RNA was removed using the Illumina Ribo-Zero Plus rRNA Microbiome depletion kit. The remaining RNA was processed using the PerkinElmer NextFlex Rapid Directional RNA-Seq kit 2.0 to obtain the final libraries. All libraries were stored at or below −20° C. prior to sequencing. RNA-Seq libraries were sequenced using the Illumina NovaSeq 6000 platform and 2×150 bp paired-end reads.

M. gottschalkii Transcriptomic Analysis

[0765] The M. gottschalkii transcriptomic data was processed using the latest release of the standardized RNA-Seq Nextflow pipeline (nf-core/maseq: World Wide Web at nf-co.re/rnaseq/3.13.2). Using various tools, the pipeline trims and filters low quality reads (TrimGalore!: World Wide Web at bioinformatics.babraham.ac.uk/projects/trim_galore/), filters out ribosomal RNA (SortMeRNA: World Wide Web at github.com/sortmema/sortmema), builds a transcriptome assembly (StringTie: World Wide Web at ccb.jhu.edu/software/stringtie/), performs multiple alignment (STAR: World Wide Web at github.com/alexdobin/STAR) and quantification (Salmon: World Wide Web at combine-lab.github.io/salmon/) of reads against the transcriptome and reference genome, and compiles a quality assessment report (MultiQC: World Wide Web at multiqc.info/). No major changes were made to the pipeline. The M. gottschalkii DSM 11977 genome in FASTA and GTF file format was used as a reference (NCBI RefSeq Assembly GCF_003814835.1).

### Bovine Rumen Meta-Transcriptomic Analysis: Metatdenovo Nextflow Pipeline Development

[0766] In order to analyze the meta-transcriptomic data we utilized the development version of the metatdenovo Nextflow pipeline, published by nf-core (metatdenovo: World Wide Web at nf-co.re/metatdenovo/dev). The metatdenovo pipeline is still under development, so we added a number of improvements to adapt the pipeline to our dataset (FIG. 2). First, we added filtering steps to filter unnecessary input reads: adapter sequences and low-quality reads (Trimmomatic: World Wide Web at usadellab.org/cms/?page=trimmomatic), contamination from bovine sequences (bowtie2: World Wide Web at github.com/BenLangmead/bowtie2), ribosomal RNA (SortMeRNA: World Wide Web at github.com/sortmema/sortmema), and unnecessary bacterial and non-archaeal reads (Kraken2: World Wide Web at ccb.jhu.edu/software/kraken2/). We also developed a novel parallelization strategy in Nextflow to split input reads into smaller file chunks to increase analysis throughput by leveraging cloud resources to run multiple filtering steps simultaneously.

[0767] We then combine the filtered reads into concatenated FastQ files, which are merged and deduplicated (BBMap: World Wide Web at jgi.doe.gov/data-and-tools/software-tools/bbtools/bb-tools-user-guide/bbmap-guide/). The deduplicated reads are then assembled (Megahit: World Wide Web at github.com/voutcn/megahit), as in the original nf-core/metatdenovo pipeline. We then use this assembly to: quantify reads (Salmon: World Wide Web at combine-lab.github.io/salmon/about/), annotate contig information (eggNOG-mapper: World Wide Web at github.com/eggnogdb/eggnog-mapper and HMMER: World Wide Web at hmmer.org/), identify archaeal contigs (Kraken2), and report some pipeline and assembly statistics (MultiQC, Transrate: World Wide Web at hibberdlab.com/transrate/, Kraken2).

### Generation of Heatmaps

[0768] Heatmaps of expressed transcripts were generated in R with Pretty Heatmaps (pheatmap: Pretty Heatmaps: World Wide Web at cran.r-project.org/package=pheatmap). Counts matrices containing read mapping values for both the M. gottschalkii transcriptome data and the rumen meta-transcriptome data were first normalized for library size and variance-scaled transformed. The normalized and transformed counts were used as inputs for the heatmaps.

### Nextflow Tower & AWS Batch

[0769] While our Nextflow pipeline can be run on standard personal computer machines, the scale of our experiment makes that impractical for the billions of reads sequenced in a meta-transcriptomic experiment. We designed our pipeline to be compatible with Seqera's Nextflow Tower (now known as Segera Platform) to connect our cloud-stored data with computational resources. Seqera Platform utilizes a Fusion file system to access input and reference data without copying data, saving on wall time.

[0770] Our pipeline is run on AWS Batch, a batch computing cloud platform that allows for scalable computational jobs. This synergizes with our parallelized pipeline to allow for thousands of pipeline steps to be run at the same time, reducing 30 years worth of compute time to only 24 hours of wall time. We reduced the amount of unnecessary bacterial reads present in the meta-transcriptome, and our meta-assembly was able to complete in less than 2 hours because of the parallelized effort.

### Data Storage on AWS S3

[0771] After sequencing was completed on the rumen and cultured methanogen samples, raw FastQ files were uploaded to our AWS S3 bucket. Reference databases and files are also stored in S3, which allows us to scale up storage capacity nearly infinitely.

### Metatranscriptomic and Transcriptomic Results

[0772] From the M. gottschalkii transcriptomic data, 192 genes were selected for comparison of their gene expression values. These genes were selected based on their potential for use as protein antigens in future vaccine products. Three lines of evidence were used to assess their potential: whether they contain a Gene Ontology (GO) term enriched in methanogens, whether they contain a Pfam enriched in methanogens, and their presence in four mass spectrometry samples of M. gottschalkii proteins exposed and reactive to ArkeaBio's Trial 2 sera. Details of the GO and Pfam enrichment analyses are described above. In total 192 genes met at least 1 of these lines of evidence and 32 genes met at least 2. Of the 48 genes whose corresponding protein was found in at least 1 mass spectrometry sample, 15 were present in at least two samples. In addition, several genes of interest are expressed by M. gottschalkii well above baseline, indicating their active use during normal growing conditions (FIG. 3). Common GO term groups include those related to membrane localization, enzymatic activity (hydrolase, endopeptidase, etc.), ion transport and binding, methanogenesis, and energy use or production (ATP-related or FAD-related). Common Pfam domains include those involved in metal ion binding or transport (zinc_ribbon_2, Fer4, Ion_trans 2), glycosyl- or glycerophospho-transferases, methanogenesis (MtrH), and several domains of unknown function (DUF).

[0773] The same 192 M. gottschalkii genes were compared using DIAMOND BLASTp against the metatranscriptomic de novo assembly to determine if they were expressed in the bovine rumen. Of the 192 genes, 127 matched to at least one assembly contig, with 1700 different hits overall. To visualize this, a stringent filter (bit score >80 and percent sequence similarity >50%) was used to obtain the best hits, yielding 97 different gene and contig pairings. When combined with the metatranscriptome expression data from the 24 rumen samples, all but 3 contigs had read mapping support for expression in the rumen after low abundance filtering (>1 read in at least one sample; FIG. 4). This indicates that the 192 M. gottschalkii genes of interest not only match sequences sourced from the rumen in terms of homology but are also being actively expressed within it. Both gene rows and sample columns are also clustered by expression values, indicating similarity of expression patterns across different conditions. Table C lists the metatranscriptomic de novo assembly contigs with the highest average expression values across all rumen samples, the unique M. gottschalkii proteins that mapped to them, and a short description of their functional annotation.

[0774] Mean expression Z-scores were calculated as follows: the metatranscriptomic and transcriptomic counts per sample were transformed into per-sample Z-scores, then the mean Z-score was calculated per protein.

[0775] The Z-score is a statistical measurement that describes a value's relationship to the mean of a group of values. Z-score denotes the number of standard deviations a value is away from the mean. If a Z-score is 0, it indicates that the data point's score is identical to the mean score.

[0776] The difference in expression between cultured and rumen samples was calculated by subtracting the cultured Z-score from the rumen Z-score. A large positive value indicates that the gene has higher relative expression in the rumen than in culture, while a large negative value indicates the opposite.

TABLE C
The 10 highest expressed metaT de novo assembly contigs on average across all rumen samples,
the M. gottschalkii proteins that mapped to them, and their functional annotations.

| | | metaT de novo | Mean | |
|---|---|---|---|---|
| | M. gottschalkii | assembly contig | normalized | |
| SEQ ID NO | protein ID | ID | expression | functional annotation |
| 71358 | RPF51679.1 | k141_250835 | 7.991 | MCR beta subunit |
| 71521 | RPF52611.1 | k141_53717 | 7.186 | MtrA |
| 71178 | RPF50774.1 | k141_202519 | 5.732 | hypothetical protein |
| 71282 | RPF51428.1 | k141_294869 | 4.664 | MtrA |
| 71469 | RPF51995.1 | k141_106620 | 4.612 | cation diffusion facilitator family |
| | | | | transporter |
| 71124 | RPF50456.1 | k141_88927 | 2.903 | V/A-type H+-transporting ATPase |
| | | | | subunit A |
| 71694 | RPF53127.1 | k141_262553 | 1.998 | ferrous iron transport protein B |
| 71189 | RPF50793.1 | k141_92432 | 1.657 | P-type E1-E2/heavy metal translocating |
| | | | | ATPase |
| 71432 | RPF51892.1 | k141_157370 | 1.527 | multimeric flavodoxin WrbA |
| 71679 | RPF53090.1 | k141_167452 | 1.352 | FlaA1/EpsC-like NDP-sugar epimerase |

### Proteomic Analysis of Trial 2 Active Sera

[0777] Briefly, sera identified as having binding antibodies in the whole cell methanogen ELISA assay were used as the source of primary antibodies in Western blots to identify bands of interest for proteomic analysis. The rationale is that identified proteins bind to antibodies from vaccinated animals and therefore might represent antigens of interest. A protein is more preferred if it was identified in more than one proteomic sample (maximum of four).

### Preferred Antigens

[0778] Preferred antigens were selected based on the following criteria.
[0779] Full-length proteins—Set 1
   [0780] Antigens include full-length proteins from the M. gottschalkii genome with a localization of “Cellwall”, “Cytoplasmic Membrane”, “Extracellular”, or “Unknown” by pSORTb predictions, or at least one amino acid residue predicted to be outside the cell by TMbed.
[0781] Full-length proteins—Set 2
   [0782] Antigens include any full-length protein from Set 1 that also was annotated with at least one preferred GO term or at least one preferred Pfam.
[0783] Full-length proteins—Set 3
   [0784] Antigens include any full-length protein from Set 2 with either above average expression in the rumen transcriptome (Z-score >0), or a rumen-cultured difference >2, or was detected in the Western blot proteomics analysis.
[0785] Peptide Fragments—Set 4
   [0786] Antigens include any portion or a fragment of a protein from the M. gottschalkii genome where the amino acid residues are predicted to be outside the cell by TMbed. The peptide fragment contains at least 10 amino acids.
[0787] Peptide Fragments—Set 5
   [0788] Antigens include any peptide fragments from Set 4 that originated from a protein that was annotated with at least one preferred GO term or at least one preferred Pfam.
[0789] Peptide Fragments—Set 6
   [0790] Antigens include any peptide fragments from Set 5 that originated from a protein with either above average expression in the rumen transcriptome (Z-score >0), or a rumen-culture difference >2, or was detected in the Western blot proteomics analysis.

### Example 2: Informatic Analysis of Antigen Targets and Vaccination

[0791] This example demonstrates informatic selection of 40 methanogen cell surface proteins and generation of nucleic acid vaccines encoding those cell surface proteins

### Cell Surface Protein Selection

[0792] Briefly, Methanobrevibacter ruminantium and Methanobrevibacter gottschalkii were identified as the two most prevalent ruminal methanogens in the abundance analysis. Each open reading frame (ORF) from their published genomes were curated first database comprising ˜4500 ORFS. Subcellular localization for each ORF was predicted using pSORTdb (Lau (2020) Nucleic Acids Research) and the predicted localization was appended to the first database. The 741 predicted non-intracellular proteins were then ranked based on published gene expression changes in response to lauric acid stress (Zhou (2018) BMC Research Notes) resulting in a second database comprising 45 proteins. The DNA sequences of the proteins were collected from NCBI and were used to search a subset of rumen transcriptomic studies in the Sequence Read Archive (SRA). Proteins were given additional emphasis for inclusion in the final set of candidates based on if there was evidence that either the exact nucleotide sequence or a highly similar sequence was found in transcriptomic data. From examination of the combination of all of these datasets, as well as information based on the predicted functions of the proteins (adhesin or metal binding for example), a final list of sequences was output for additional studies comprising 40 sequences. The protein IDs were used to download the protein sequences from NCBI. As an additional step prior to ordering constructs, the proteins were analyzed using a signal peptide predictor and signal peptides were removed from the final designs. In addition, some of the proteins were too long for synthesis of the template for mRNA production. In this case, the proteins were examined and truncated versions of the protein were chosen based on predicted domain boundaries. This final list of sequences (Table D, ARK016-055) encompasses a list of proteins from two methanogens commonly found in the rumen of cattle. These proteins are predicted to be outside of the cells and there is evidence indicating that they are expressed.

### Table D. Selected Methanogen Cell-Surface Proteins

[0793] See SEQ ID NO: 16689 to SEQ ID NO: 16728 for the native nucleic acid sequences of selected methanogen cell-surface proteins (ARK016-ARK055, respectively). See SEQ ID NO: 16729 to SEQ ID NO: 16768 for the Bos Taurus codon-optimized and uridine-depleted nucleic acid sequences of selected methanogen cell-surface proteins (ARK016-ARK055, respectively). See SEQ ID NO: 16769 to SEQ ID NO: 16808 for the amino acid sequences of selected methanogen cell-surface proteins (ARK016-ARK055, respectively).

### Example 3: Ruminal Metagenomic Mining of Methanogen Cell Surface Proteins

[0794] This example demonstrates informatic selection of candidate methanogen cell surface proteins, generation of protein and/or peptide vaccines encoding those cell surface proteins or a fragment thereof.

[0795] To identify candidate methanogen cell surface proteins, a comparative genomics analysis of ruminal methanogen genomes from rumen samples from 283 beef cattle was used (Stewart (2019) Nature Biotechnology, which is incorporated herein by reference). In total, the analysis comprised 4941 genomes were assembled, of which 126 were archaea and 111 were Methanobrevibacter. Genes were annotated in the 4941 genomes using DIAMOND, resulting in first database comprising 9,712,545 total open reading frames. Methanogen genes were identified by narrowing the total 4941 genomes to those that were archaeal genomes comprising one or more methanogenesis metabolic pathway genes. From those, a second database comprising 235,935 methanogen open reading frames was generated. UniRef100 gene's Gene Onotology terms were obtained and GO term enrichment analysis was performed on each of the ORFs in the second database. The p-values for the enrichment analysis were used as input to a machine learning classification model to classify genomes as methanogen or non-methanogen. This resulted in a third database comprising 10,640 methanogen-specific genes. GO terms most specific to methanogens were used to select candidate genes for localization prediction. pSORTb and TMbed was used to predict subcellular localization and selected whole genes and domains predicted to be accessible to antibodies (e.g., localized to the cell membrane or extracellularly). Based on the subcellular localization, 225 whole proteins and ˜7500 peptide fragments were selected for vaccine production. The bioinformatic selection is shown in FIG. 11A (left). FIG. 11A (right) further shows a network map of the enriched cell surface protein functions, with key methanogen enriched cell surface proteins having functions related to adhesin-like proteins, metal binding, ATP processing, proteolysis, and transport. Many of the adhesin-like proteins comprise cysteine protease domains that are important for cell health, survival, and membrane remodeling.

### Table E. Select Non-Methanobrevibacter Genes

[0796] See SEQ ID NO: 16809 to SEQ ID NO: 16832 for the native nucleic acid sequences of select non-Methanobrevibacter genes. See SEQ ID NO: 16833 to SEQ ID NO: 16856 for the bovine codon-optimized nucleic acid sequences of select non-Methanobrevibacter genes. See SEQ ID NO: 16857 to SEQ ID NO: 16880 for the amino acid sequences of select non-Methanobrevibacter genes.

### Table F. Select Protein Fragment Sequences

[0797] These fragments are isolated functional domains based on predicted computation folding. For example, a hypothetical protein in FIG. 11B comprising 3 folded domains would yield 3 fragments, each of which is a stable domain on its own and can be used as an antigen for vaccine.

[0798] See SEQ ID NO: 16999 to SEQ ID NO: 35021 for the native nucleic acid sequences encoding the select protein fragments. See SEQ ID NO: 35022 to SEQ ID NO: 53044, and SEQ ID NO: 71068 for the bovine codon-optimized and uracil-depleted nucleic acid sequences encoding the select protein fragments. See SEQ ID NO: 53045 to SEQ ID NO: 71067 for the amino acid sequences of the select protein fragments.

### Example 4: Vaccination of Animals with a Protein Vaccine Composition

[0799] This example demonstrates a method of preparing and administering a vaccine composition to an animal (e.g., cattle). The vaccine composition used in this study contains a full-length protein of Methanobrevibacter gottschalkii, which upon vaccination to animals resulted in reduction in the animal emitted methane, hydrogen, and/or carbon dioxide normalize methane; and/or increase emitted carbon dioxide.

### Preparation of a Vaccine Composition

[0800] A full-length protein of Methanobrevibacter gottschalkii is expressed in bacteria (e.g., E. Coli) or yeast (e.g., S. cerevisiae or P. pastoris). The purified protein is combined with an equal volume of Freund's complete adjuvant (ThermoFisher, Waltham, MA) for primary injections. The purified protein is combined with an equal volume of Freund's incomplete adjuvant (ThermoFisher, Waltham, MA) for booster injections.

### Vaccination and Sample Collection

[0801] Healthy, weaned, Angus cross steers are weaned for a minimum of sixty days and received pre-weaned vaccinations a minimum of sixty days prior to initiation of the study. Animals are transferred to the study site fourteen days prior to vaccination to allow for acclimation to the study diet and environment. Each vaccine formulation is administered by intramuscular (IM) injection to three animals. In total, 120 animals are vaccinated with the protein vaccine comprising the full-length protein of Methanobrevibacter gottschalkii and 3 animals are vaccinated with adjuvant alone. Intramuscular injections are delivered into the cow's right neck muscle by veterinary-trained staff using an 18-gauge 1-1.5″ needle. Animals are boosted with a second vaccine administration on day 21. Total blood samples (˜100 mL) are collected from the jugular vein by veterinary-trained staff and processed by ultracentrifugation within 24 hours of sample collection. Isolated serum samples are aliquoted, labeled and stored in cryogenic tubes at −20° C. until use.

### Example 5: Vaccination of Animals with a Peptide-Fragment Vaccine Composition

[0802] This example demonstrates a method of preparing and administering a vaccine composition to an animal (e.g., cattle). The vaccine composition used in this study contains a peptide fragment of Methanobrevibacter gottschalkii, which upon vaccination to animals resulted in reduction in the animal emitted methane, hydrogen, and/or carbon dioxide normalize methane; and/or increase emitted carbon dioxide.

### Preparation of a Vaccine Composition

[0803] A peptide fragment of Methanobrevibacter gottschalkii is synthesized in vitro using methods known in the art via a vendor (GenScript, Piscataway, NJ). The purified peptide fragment is combined with an equal volume of Freund's complete adjuvant (ThermoFisher, Waltham, MA) for primary injections. The purified protein is combined with an equal volume of Freund's incomplete adjuvant (ThermoFisher, Waltham, MA) for booster injections.

### Vaccination and Sample Collection

[0804] Healthy, weaned, Angus cross steers are weaned for a minimum of sixty days and received pre-weaned vaccinations a minimum of sixty days prior to initiation of the study. Animals are transferred to the study site fourteen days prior to vaccination to allow for acclimation to the study diet and environment. Each vaccine formulation is administered by intramuscular (IM) injection to three animals. In total, 120 animals are vaccinated with the protein vaccine comprising the peptide fragment of Methanobrevibacter gottschalkii and 3 animals are vaccinated with adjuvant alone. Intramuscular injections are delivered into the cow's right neck muscle by veterinary-trained staff using an 18-gauge 1-1.5″ needle. Animals are boosted with a second vaccine administration on day 21. Total blood samples (˜100 mL) are collected from the jugular vein by veterinary-trained staff and processed by ultracentrifugation within 24 hours of sample collection. Isolated serum samples are aliquoted, labeled and stored in cryogenic tubes at −20° C. until use.

### Example 6: Ruminal Microbiome Measurement

[0805] ˜50 mL of fresh rumen samples are collected by esophageal tubing and retained in conical vials. Samples are strained through three layers of cheesecloth, with the liquid phase aliquoted into 50 mL conical vials. All samples re snap-frozen in liquid N₂ and stored at ˜20° C. for subsequent processing. Samples are processed within twenty-four hours of collection. Sample aliquots are labeled with animal number, collection method, collection date and time.

[0806] Isolation of DNA from the rumen follows the methods defined in Henderson (Henderson, G. et al. Effect of DNA Extraction Methods and Sampling Techniques on the Apparent Structure of Cow and Sheep Rumen Microbial Communities. PLOS One 8, e74787 (2013), which is incorporated herein by reference), with preference given to methods involving both phenol-chloroform and mechanical lysis steps (PCQI, PCBB, PCSA). PCR amplification of the hypervariable V6-V8 regions of the 16S rRNA gene is performed using the archaea-specific Ar915aF/Ar1386R primer set with Illumina adapters as defined in Table 1 of Kittelmann 2015 (Kittelmann et al. Buccal swabbing as a noninvasive method to determine bacterial, archaeal, and eukaryotic microbial community structures in the rumen. Appl Environ Microbiol 81:7470-7483 (2015), which is incorporated herein by reference). and PCR cycle conditions as defined in Kittelmann 2013 (Kittelmann et al. Simultaneous Amplicon Sequencing to Explore CoOccurrence Patterns of Bacterial, Archaeal and Eukaryotic Microorganisms in Rumen Microbial Communities. PLOS One 8(2): e47879 (2013), which is incorporated herein by reference). PCR products are stored at the appropriate conditions until subsequent use. The PCR products are then purified, quality checked, prepared into sequencing libraries, and analyzed for 16S rRNA sequencing within three weeks of the final rumen sample collection (Day 90). Libraries are generated using the PerkinElmer NextFlex DNA-Seq kit. The 16S rRNA amplicon libraries are sequenced on the Illumina MiSeq v3 600-cycle (2×300 bp) platform. Following the completion of 16S rRNA sequencing, the resulting data is analyzed for methanogen abundance. Methanogen abundance is reduced by ˜10-80% after treatment with vaccines encoding methanogen cell surface proteins as compared to pre-vaccination.

### Example 7: Methane Production Measurements

[0807] Cow enteric methane production is monitored using GreenFeed Systems (C-Lock, Inc., Rapid City, SD). Briefly, feed intake is recorded daily throughout the study period using GrowSafe Systems. Animals are fed once daily in the morning and have access to a water source at all times. Body weight is recorded periodically, at the time of total blood draws. Enteric methane, hydrogen, and carbon dioxide emissions are measured daily throughout the study period using GreenFeed Systems (C-Lock, Inc., Rapid City, SD). Animals have free access to the GreenFeed System throughout the study period; animals are coerced to use the system. Methane yield and intensity is calculated using dry matter intake for each measurement period separately. Methane production is reduced by ˜10-80% when treated with nucleic acid vaccines encoding methanogen cell surface proteins as compared to pre-vaccination.

[0808] This example demonstrates informatic selection of methanogen cell surface proteins for formulation into protein vaccines, vaccination into subjects, and subsequent reductions in methane in vivo.

### Example 8: Analysis of Antibody Binding

### Sera Collection and Confirmation of Sera Antibody Binding to Methanogens

[0809] Total blood samples are collected under the supervision of veterinary-trained staff. Samples are collected via jugular vein needle puncture into blood tubes. Collected blood samples are then clarified via ultracentrifugation within 24 hours of collection in order to harvest serum. Clarified serum samples are aliquoted, labeled and stored at ≤−20° C.

[0810] Specifically, jugular blood draws are accomplished by first restraining the animal in a squeeze chute with a head gate. The neck area was then cleaned by wiping the area with isopropyl alcohol, e.g., rubbing alcohol, and gauze to remove any superficial dirt and debris. The jugular vein is occluded by applying pressure at the base of the jugular groove in order to visualize the raised vein. After a sufficient volume of blood is collected, the needle is removed and disposed of in an approved sharps container.

### Confirmation of Sera Antibody Binding to Methanogens Using a Methanogen ELISA.

[0811] In order to determine a humoral immune response to the vaccine in the immunized animals, a methanogen ELISA is developed and utilized to assess sera antibody binding to M. gottschalkii.

[0812] Specifically, each well of a 96-well high binding ELISA plate, e.g., plate, is coated with 50 μL of 0.001% polylysine. The plate is then stored at 4° C. for at least 10 hours, and up to 2 weeks. Polypeptide and/or peptide samples are diluted in DPBS to an empirically determined dilution for each plate preparation (typically 1:10). Next, the volume of 0.001% polylysine is removed from the plate, and 50 μL of diluted, the polypeptide and/or peptide sample is added to each well. The plate is then centrifuged for 5 minutes at 900×g to facilitate binding of the polypeptide and/or peptide sample. Next, 50 μL of 0.1% glutaraldehyde is added to each well, mixed well, and incubated for 20 minutes at room temperature. The liquid from each well is removed, and 200 μL of 5% goat serum in PBST (blocking solution) is added to each well. The plate is then incubated for 1 hour at room temperature to prevent non-specific binding of the detection antibodies in subsequent steps, also referred to as ‘blocking’.

[0813] The clarified sera collected from the animals enrolled in this study as described above are diluted in 5% goat serum in PBST, e.g., blocking solution. Next, the blocked plates are washed twice by adding 200 μL of PBST to each well, and then removing the liquid. 50 μL of PBST-diluted sera is added to each well and incubated for 1 hour at room temperature. The plate is then washed three times with 200 μL of PBST per well. 50 μL of 1:1,000 rabbit anti-bovine-HRP conjugate is added to each well and incubated for 1 hour at room temperature. The plate is then washed three times with 200 μL of PBST per well. Next, 50 μL of TMB solution is added to each well, incubated for 20 minutes at room temperature, to develop. Finally, 50 μL of 2 M H2SO4 is added to each well to stop the reaction. OD450 is measured for each well using a Synergy plate reader (BioTek, Winooski, VT).

### Confirmation of Sera Antibody Binding to Methanogens Using FACS.

[0814] In order to confirm the development of a humoral immune response to the vaccine in animals immunized with a vaccine composition comprising a protein or a fragment thereof of M. gottschalkii, fluorescence-activated cell sorting (FACS) is utilized to observe sera antibody binding to M. gottschalkii.

[0815] Specifically, 5 μL of fixed M. gottschalkii cells are added to 50 μL of PBS-T in an Eppendorf tube. Then, where applicable, 1 μL of clarified sera collected from the animals enrolled in this study as described above, is added to the relevant Eppendorf tube and mixed well. A detection solution is prepared by adding 150 μL of PBST to 1.5 μL of rabbit anti-bovine IgG biotin and 1.5 μL of SA-PECy7 and mixing well. Once prepared, 50 μL of detection solution is added to sample in Eppendorf tube(s) and mixed well. Sample in Eppendorf tubes, including detection solution, is incubated for 30 minutes at room temperature. Finally, 5 μL of each previously incubated sample is added to 1 mL of DPBS immediately before running on SONY SH800 (FSC gain: 5; threshold: 0.04%; all other settings: default).

### Confirmation of Sera Antibonding Binding to Methanogens Using Western Blot.

[0816] In order to confirm the development of a humoral immune response to the vaccine in animals immunized with the vaccine composition, a methanogen Western blot is utilized to observe the sera antibody binding to the polypeptide and/or peptide to which the animals are vaccinated. The Western blot analysis detects the interaction of (a) the sera antibodies previously collected from the animals enrolled in this study as described above, and (b) methanogen protein antigens resolved on an SDS-PAGE gel.

[0817] Specifically, a polypeptide and/or peptide sample is mixed with 100 to 200 μL of 1×SDS sample buffer. Next, the polypeptide and/or peptide sample is boiled for 5 minutes at 100° C.

[0818] Between 5 and 10 μL of the boiled sample is loaded into individual wells of a 4-15% SDS-PAGE gel. Next, the SDS-PAGE gel is run for 10 minutes at 100V, and then 30 minutes at 200V. The proteins are then transferred using wet transfer technique for 1 hour at 100V onto a 0.22 μm PVDF membrane. Next, the 0.22 μm PVDF membrane is incubated in SuperBlock SuperBlock T20 TBS buffer solution (blocking solution) for 1 hour at room temperature to prevent non-specific binding of the detection antibodies in subsequent steps. The blocked 0.22 μm PVDF membrane is then exposed to various dilutions of clarified sera samples, previously collected from the animals enrolled in this study as described above, in blocking solution for 1 hour at room temperature. Next, the 0.22 μm PVDF membrane is washed three times (5 minutes for each wash) in TBS-T20 to remove any unbound sera and/or antibodies. The 0.22 μm PVDF membrane is then exposed to HRP-conjugated anti-bovine IgG secondary antibody in SuperBlock T20 TBS buffer solution for 1 hour at room temperature to detect any bound bovine sera antibodies. Next, the 0.22 μm PVDF membrane is washed three times (10 minutes for each wash) in TBS-T20 to remove any unbound HRP-conjugated anti-bovine IgG antibodies. Finally, the 0.22 μm PVDF membrane is developed using chromogenic TMB blotting solution, or an appropriate chemiluminescence substrate.

### Example 9: Sample Collection and Additional Analyses

### Saliva Collection

[0819] Saliva samples are collected using a suction tube in the oral cavity, into a conical flask or directly into a sterile Eppendorf tube. Equipment contacting saliva, e.g., collection flask or plastic tubing, is changed out after each animal's collection; either single-use or autoclavable materials are used. Sample are immediately put on wet ice, and then transported to the lab for storage at ≤−80° C.

### Rumen Fluid Collection

[0820] First, the ruminant, e.g., steer, is restrained in a squeeze chute with a head gate and nose tucked down toward the chest. Then, a long flexible plastic tube is inserted into the animal's nostril and down into the stomach. A hand-operated rumen fluid pump, attached to the flexible plastic tube, is then used to harvest 20-50 mL of rumen fluid per collection. Harvested rumen fluid samples are stored in conical vials and transferred to the lab. Finally, within 24 hours of collection, rumen fluid samples are strained through three layers of cheesecloth, and the liquid phase is aliquoted into 50 mL conical vials and snap-frozen in liquid nitrogen for cryostorage at ≤−20° C.

### Recording and Analysis of Dry Matter Intake

[0821] This example describes a method to record and analyze daily dry matter intake of vaccinated animals in order to determine whether the administration of a vaccine has an adverse effect on individual daily feed intake. Furthermore, such a record may be used to normalize inter-animal, e.g., ruminant, for example, cattle, comparisons of daily emitted methane.

[0822] Animals are fed once daily in the morning and had access to a water source at all times for the duration of the study. Feed intake is recorded continuously using GrowSafe systems (GrowSafe Systems, Calgary, AB, CA). Briefly, an individual animal's electronic identification tag, e.g., EID, which is typically affixed to the ear, is read by the GrowSafe feed bunk when the animal's head is in sufficiently close proximity to the bunk, e.g., when the animal is feeding from the bunk. During recorded feed events, the animal's EID is associated with the amount of feed that animal consumes from the bunk, which is automatically measured using scales equipped within the bunk. A comparable method for tracking individual dry matter intake may be used where GrowSafe systems are unavailable.

### Recording and Analysis of Animal Body Weight

[0823] This example demonstrates a method of recording individual animal body weight (lb) in order to confirm that administration of a vaccine composition does not have an adverse effect on the rate of individual animal weight gain.

[0824] Animal body weight is recorded periodically, at the time of total blood draws, throughout the study. Body weight is recorded using a livestock scale. Specifically, animals to be weighed are walked through a pipe alley from their housing area to the holding pens. After being weighed, they are released to return to their holding pen with other animals from the same pen. At the end of the weighing, animals are then walked back to their assigned pen.

### Measurement of Animal Emitted Methane, Hydrogen and Carbon Dioxide

[0825] The amount of animal-emitted methane, hydrogen, and carbon dioxide is measured using GreenFeed systems (C-Lock, Inc., Rapid City, SD). Briefly, the GreenFeed system uses a pelletized feed to incentivize animals to visit multiple times per day. When an animal visits a GreenFeed system to consume the dispensed feed pellets, its individual animal's electronic identification tag, e.g., EID, which is typically affixed to the ear, is read by GreenFeed and a measurement period associated with that animal is recorded. During the measurement period, GreenFeed records the amount of animal-emitted methane, hydrogen, and carbon dioxide.

### Example 10: Pregnant and Postpartum Animal Vaccination

[0826] A vaccine is used to vaccinate a pregnant animal (e.g., ruminant). The unborn fetus is exposed to the antibodies against methanogen generated by the mother. After birth, the offspring receives milk and/or colostrum laden with the antibodies against the at least one methanogen surface antigen. The offspring is vaccinated with at least one vaccine of the present disclosure prior to weaning. The offspring may be vaccinated with a polypeptide and/or peptide vaccine that is the same or different from the vaccine used to vaccinate the mother.

### Example 11: Combinatorial Therapies

[0827] A subject is treated with a combinatory therapy, which comprises any two or more selected from a vaccine, antibodies, milk and/or derivative thereof, animal feed, an agent (e.g., an agent that reduces methane production in a subject, a probiotic bacterial strain, a small molecule inhibitor, etc.), and other composition of the present disclosure (e.g., those reducing methane production in a subject). Any one of the combinatory therapy may be given in any order, i.e., before, concurrently with, or after any other combinatory therapy. Here, a reduction in methane production that is greater than the use of a single therapy alone is achieved.

### Example 12: Synthesis of 3NOP

[0828] Adapted from “Structure-Based Design, Synthesis, and Biological Evaluation of Indomethacin Derivatives as Cyclooxygenase-2 Inhibiting Nitric Oxide Donors” (J. Med. Chem. 2007, 50, 6367-6382).

[0829] All reagents purchased from Sigma-Aldrich and Fisher Scientific and used as received.

[0830] 3-Bromopropanol (78.0 g, 0.56 mol) in acetonitrile (300 mL) was added dropwise within minutes to a solution of silver nitrate (145.9 g, 0.86 mol) in acetonitrile (600 mL) and stirred at room temperature for 24 hr. The solution was protected from light by being covered with aluminum foil. After 24 hr, 5:1 excess of brine was added to the reaction mixture and stirred for 1 hr. Silver halide was filtered through Celite and filtrate was extracted with diethyl ether (300 mL×3). The organic layer was washed with brine (300 mL×3). Dried over sodium sulfate, and concentrated (59 g, 86% yield). Product confirmed via NMR (>97% purity based on HPLC).

[0831] 3NOP pH and Temperature Stability: Confirmed via HPLC over a 1-month time period at temperature between 4-30 C and pH 4-10.

[0832] 3NOP Volatility: 500 mg of 3NOP in a 5 dram vial was left open to air at ˜18-24 C at 15-30% RH over the course of 6 days. Average mass loss is ˜0.25% per day.

### Compaction Study

[0833] The viability of different binders for densification were examined. 0.5 g of powder was tableted under 20 kN in a 13 mm pellet die. Potential binders are summarized in Table 16.

TABLE 16
Potential binders ranked based on densification.

| | | 3: powdery | 2: compacts, |
|---|---|---|---|
| | | break, | no strength |
| | 4: clean | retains | 1: compacts, |
| 5: Unbreakable | braking, | moderate | disintegrates |
| tablet by hand | no dust | strength | 0: no compaction |
| Xanthan gum | Lignin | Pea protein | Chitosan |
| k-carrageenan | Inulin | Soy protein | Hydroxyethyl |
| | | | cellulose |
| Sodium alginate | Wood flour | Gelatin | Talc |
| Cellulose acetate | Corn Starch | Casein | Sodium starch |
| | | | glycolate |
| Ethyl cellulose | Amylopectin | | Pentaerythritol |
| Hydroxypropyl | Hemp protein | | Calcium |
| cellulose | | | phosphate |
| Cellulose acetate | | | Diatomaceous |
| phthalate | | | earth (Celite) |
| Maltodextrin | | | Biochar |
| Dextran | | | |

### Tablets for Encapsulation of 3NOP

[0834] A multilayer encapsulation system was employed for extended-release formulations consisting of 3 main parts:
[0835] 1) Adsorbent—inert, non-toxic, solid-support for 3NOP (ie. silica, biochar, activated charcoal, talc, arginine, lysine, calcium carbonate, carbon black, cyclodextrin, calcium phosphate, celite (diatomaceous earth), glutamine, betaine, bismuth phosphate, bismuth citrate, iron phosphate, etc)
[0836] 2) Binder/matrix—allow for granulation of adsorbent to form solid core (ie, starches, flours, sugars, proteins, gums, gelatin, cellulose and derivatives, etc)
[0837] 3) Coating—single to multilayer coatings to decrease water penetration and modify release kinetics

[0838] All materials purchased from Sigma-Aldrich and Fisher Scientific and used as received unless otherwise specified.

### Tablet Preparation

[0839] 3NOP was adsorbed onto the corresponding adsorbent at a given weight percent (noted in formulations) by dropwise addition to adsorbent stirring on a hot plate. The mixture was left to stir for more than 30 minutes until a free-flowing powder was obtained. The resulting mixture was speed mixed with the corresponding binder for 1 minute followed by compaction of in a carver press using an 8-13 mm pellet die under various forces of 10-60 kN.

### Coated Tablet Preparation

[0840] Selected coating materials were dissolved in various solvents at 5-20 wt %. Tablets were then dip coated multiple times allowing for drying in between to give the desired coating weight.

### 3NOP Release Quantification and Corresponding Tablet Formulations

[0841] 13 mm, 0.5 g tablets were placed in a sealed 5 dram vial with 10 mL of distilled water and incubated at 70 F until full dissolution of 3NOP. 1 mL aliquots were taken every few days and refreshed with 1 mL of distilled water. Aliquots were filtered through a 0.22 um PVDF filter before being quantified via HPLC.

### Uncoated Tablets

[0842] All formulation percentages are based on weight. 2 replicates of 13 mm disc-shaped, 0.5 g tablets were compacted under 20 kN. The uncoated formulations had the following compositions:
[0843] AH-01-7.5% 3NOP, 12.5% propylene glycol, 60% Cargill hemp protein
[0844] AH-02-8.57% 3NOP, 22.86% Celite, 68.57% hemp protein
[0845] AH-03-8.57% 3NOP, 22.86% Wakefield Biochar, 68.57% Cargill hemp protein
[0846] AH-04-8.57% 3NOP, 22.86% K10 montmorillonite, 68.57% Cargill hemp protein
[0847] AH-05-8.57% 3NOP, 22.86% activated charcoal, 68.57% Cargill hemp protein

The 3NOP release of the uncoated tablets
after 12 hours is shown in Table 17.

| | Total Average | |
|---|---|---|
| | Concentration of 3NOP | Standard deviation |
| Formula | (mM) | (mM) |
| AH-01 | 24.56 | 2.09 |
| AH-02 | 24.50 | 1.76 |
| AH-03 | 19.61 | 0.17 |
| AH-04 | 33.10 | 0.10 |
| AH-05 | 18.58 | 0.07 |

### Coated Tablets

[0848] Tablets for coating experiments consist of 10% 3NOP, 20% Wakefield biochar, and 70% cellulose acetate (Mn: 50,000). Tablets were then coated with ˜0.2 wt % of the corresponding coating material, as shown in the table in Table 18. The release profile over periods of 4, 6 and 11 days for each formula is also shown.

TABLE 18
3NOP release profile of coated tablets over 4 days.

| | | Total Average | Standard |
|---|---|---|---|
| | Time | Concentration | deviation |
| | (days) | (mM) | (mM) |
| Cellulose Acetate Phthalate | 4 | 34.21 | 2.23 |
| (CAP) | | | |
| CAP | 6 | 30.65 | 0.04 |
| CAP | 11 | 32.38 | 0.24 |
| Ethyl cellulose (EC) | 4 | 29.92 | 0.06 |
| EC | 6 | 31.07 | 0.01 |
| EC | 11 | 31.50 | 0.26 |
| Hydroxy propyl cellulose (HPC) | 4 | 31.70 | 0.05 |
| HPC | 6 | 30.35 | 0.01 |
| HPC | 11 | 32.53 | 0.4 |
| Polycaprolactone (CAPA 6800) | 4 | 32.08 | 0.29 |
| CAPA 6800 | 6 | 31.00 | 0.14 |
| CAPA 6800 | 11 | 31.99 | 0.23 |
| Alignate (layer 1) Chitosan | 4 | 30.30 | 0.17 |
| (layer 2) | | | |
| Alignate (layer 1) Chitosan | 6 | 30.22 | 0.17 |
| (layer 2) | | | |
| Alignate (layer 1) Chitosan | 11 | 31.90 | 0.10 |
| (layer 2) | | | |
| Polycaprolactone Mn: 2000 | 4 | 33.68 | 0.01 |
| Polycaprolactone Mn: 2000 | 6 | 32.25 | 0.18 |
| Polycaprolactone Mn: 2000 | 11 | 33.23 | 0.09 |
| PEG Mn: 1500 | 4 | 32.74 | 0.22 |
| PEG Mn: 1500 | 6 | 31.88 | 1.30 |
| PEG Mn: 1500 | 11 | 33.48 | 0.29 |

[0849] Further formulations were prepared and tested. 3 replicates of 13 mm disc-shaped, 0.5 g tablets were compacted under 6 kN. All formulas consist of 23.8% 3NOP, 28.6% silica, and 47.6% ethyl cellulose. Tablets were then coated with 60-80 wt % of the corresponding coating material. Control tablet (CTRL) is uncoated. “R” denotes replicate number. CAP coating solution was 18 wt % in 70% ethanol/water. Cellulose acetate (CA) coating was 6 wt % in 70% ethanol/ethyl acetate with an additional 5 wt % triethyl citrate, 5 wt % propylene glycol, and 5 wt % N-methyl-2-pyrollidone. The release profiles were analyzed at 1, 4, 8, 11, and 15 days, as summarized in Table 19.

TABLE 19
3NOP release profile of coated tablets over 15 days.
Total concentration of 3NOP is listed in mM.

| | | | | | |
|---|---|---|---|---|---|
| CAP R1 | 25.74 | 47.79 | 59.39 | 61.05 | 59.68 |
| CAP R2 | 18.72 | 43.71 | 52.56 | 53.74 | 53.37 |
| CAP R3 | 23.12 | 50.66 | 57.23 | 59.23 | 58.75 |
| AVG | 22.53 | 47.39 | 56.39 | 58.01 | 57.26 |
| STD | 3.54 | 3.49 | 3.49 | 3.81 | 3.41 |
| CA R1 | 50.90 | 75.98 | 73.80 | 66.97 | 61.48 |
| CA R2 | 71.29 | 78.41 | 73.11 | 66.66 | 60.18 |
| CA R3 | 63.86 | 69.38 | 65.56 | 61.28 | 57.00 |
| AVG | 62.01 | 74.59 | 70.82 | 64.97 | 59.55 |
| STD | 10.32 | 4.67 | 4.57 | 3.20 | 2.31 |
| CTRL R1 | 45.80 | 80.64 | 80.33 | 73.64 | |
| CTRL R2 | 45.80 | 84.41 | 83.39 | 76.22 | 69.25 |
| CTRL R3 | 45.80 | 77.15 | 75.92 | 70.11 | 62.74 |
| AVG | 45.80 | 80.73 | 79.88 | 73.32 | 66.00 |
| STD | 0.00 | 3.63 | 3.76 | 3.07 | 4.60 |

### Coated Tablets

[0850] All formulation percentages are based on weight. 3 replicates of 13 mm disc-shaped, 0.5 g tablets were compacted under 60 kN. All formulas consist of 23% 3NOP, 30% silica, and 47% ethyl cellulose. Tablets were then coated with 60-80 wt % of the corresponding coating material. Control tablet (CTRL) is uncoated. V1 coating solution was 20 wt % cellulose acetate Mn: 50000 in 70% acetone/ethyl acetate with BYK coating additives. V2 coating solution was 20 wt % in 70% acetone/ethyl acetate cellulose acetate Mn: 50000 with BYK coating additives. Ethyl cellulose coating solution was 20 wt % in 70% ethanol/water with 15 wt % triacetin. CAP coating solution was 18 wt % in 70% ethanol/water with 10 wt % propylene glycol. The 3NOP release profile of the coated tablets over 18 days is shown in Table 20. PGP-49;

TABLE 20
3NOP release profile of coated tablets over 18 days.
Total concentration of 3NOP is listed in mM.

| Time | 1 | 5 | 8 | 12 | 18 |
|---|---|---|---|---|---|
| V1 R1 | 33.04 | 70.32 | 70.57 | 66.04 | 60.88 |
| V1 R2 | 57.54 | 77.54 | 77.42 | 72.65 | 67.44 |
| V1 R3 | 61.42 | 71.21 | 70.08 | 65.71 | 61.19 |
| AVG | 50.67 | 73.02 | 72.69 | 68.13 | 63.17 |
| STD | 15.39 | 3.93 | 4.10 | 3.91 | 3.70 |
| V2 R1 | 31.15 | 66.47 | 65.62 | 61.03 | 56.78 |
| V2 R2 | 32.55 | 66.81 | 67.61 | 63.67 | 59.55 |
| V2 R3 | 53.59 | 69.37 | 71.28 | 67.53 | 63.01 |
| AVG | 39.10 | 67.55 | 68.17 | 64.08 | 59.78 |
| STD | 12.57 | 1.59 | 2.87 | 3.27 | 3.12 |
| EC R1 | 17.99 | 39.67 | 45.39 | 47.12 | 50.00 |
| EC R2 | 15.84 | 38.15 | 43.53 | 45.83 | 49.27 |
| EC R3 | 21.21 | 52.28 | 58.64 | 60.42 | 63.56 |
| AVG | 18.35 | 43.37 | 49.19 | 51.13 | 54.28 |
| STD | 2.70 | 7.75 | 8.24 | 8.08 | 8.05 |
| CAP R1 | 24.07 | 57.62 | 63.10 | 69.28 | 68.61 |
| CAP R2 | 23.24 | 56.30 | 61.85 | 60.67 | 59.42 |
| CAP R3 | 37.58 | 63.57 | 71.80 | 69.89 | 70.48 |
| AVG | 28.30 | 59.17 | 65.58 | 66.61 | 66.17 |
| STD | 8.05 | 3.87 | 5.42 | 5.15 | 5.92 |
| CTRL R1 | 61.62 | 97.29 | 89.52 | 81.26 | 74.20 |
| CTRL R2 | 45.40 | 82.69 | 79.42 | 73.16 | 67.07 |
| CTRL R3 | 53.75 | 83.30 | 76.77 | 70.18 | 64.12 |
| AVG | 53.59 | 87.76 | 81.90 | 74.87 | 68.47 |
| STD | 8.11 | 8.26 | 6.73 | 5.74 | 5.18 |

### Bilayer Coated Tablets

[0851] All formulation percentages are based on weight. 3 replicates of 13 mm disc-shaped, 0.5 g tablets were compacted under 60 kN. All formulas consist of 15% 3NOP, 20% silica, and 65% ethyl cellulose. Bilayer coatings were applied with ˜10 wt % of the first coating material and ˜20 wt % of the second coating material. CAP/EC denoted first and second coating material. The 3NOP release profile of bilayer coated tablets over 27 days is shown in Table 21.

TABLE 21
3NOP release profile of bilayer coated tablets over
27 days. Total concentration of 3NOP is listed in mM.

| | Time (days) | | | | | | | | |
|---|---|---|---|---|---|---|---|---|---|
| | 1.25 | 2.5 | 5.5 | 8 | 10 | 14 | 17 | 21 | 27 |
| CAP/EC | 6.27 | 8.80 | 15.97 | 18.49 | 20.41 | 24.15 | 24.59 | 24.46 | 26.21 |
| R1 | | | | | | | | | |
| CAP/EC | 4.39 | 7.77 | 15.50 | 17.78 | 19.54 | 22.90 | 23.44 | 23.74 | 25.94 |
| R2 | | | | | | | | | |
| CAP/EC | 5.63 | 8.43 | 15.44 | 17.84 | 19.29 | 20.36 | 20.94 | 21.18 | 22.65 |
| R3 | | | | | | | | | |
| AVG | 5.43 | 8.33 | 15.64 | 18.04 | 19.75 | 22.47 | 22.99 | 23.13 | 24.93 |
| STD | 0.96 | 0.52 | 0.29 | 0.39 | 0.59 | 1.93 | 1.87 | 1.73 | 1.98 |
| EC/CAP | 9.75 | 14.58 | 22.35 | 23.09 | 23.76 | 26.40 | 26.04 | 26.12 | 26.82 |
| R1 | | | | | | | | | |
| EC/CAP | 10.72 | 17.13 | 24.89 | 26.10 | 26.78 | 29.51 | 28.89 | 28.52 | 29.31 |
| R2 | | | | | | | | | |
| EC/CAP | 9.84 | 15.34 | 22.33 | 24.08 | 25.21 | 28.03 | 27.91 | 27.56 | 28.17 |
| R3 | | | | | | | | | |
| AVG | 10.10 | 15.68 | 23.19 | 24.42 | 25.25 | 27.98 | 27.61 | 27.40 | 28.10 |
| STD | 0.54 | 1.31 | 1.47 | 1.54 | 1.51 | 1.56 | 1.45 | 1.21 | 1.25 |
| CTRL | 26.11 | 28.76 | 36.26 | 37.49 | 36.75 | 35.77 | 33.69 | 31.26 | 32.66 |
| R1 | | | | | | | | | |
| CTRL | 26.12 | 28.43 | 38.45 | 39.57 | 38.58 | 37.45 | 34.91 | 32.16 | 33.30 |
| R2 | | | | | | | | | |
| CTRL | 25.23 | 29.94 | 40.65 | 41.23 | 45.02 | 42.91 | 39.10 | 27.92 | −2.04 |
| R3 | | | | | | | | | |
| AVG | 25.82 | 29.05 | 38.45 | 39.43 | 40.12 | 38.71 | 35.90 | 30.45 | 21.31 |
| STD | 0.51 | 0.79 | 2.19 | 1.87 | 4.34 | 3.73 | 2.84 | 2.24 | 20.22 |

### Adsorbent Study

[0852] Various adsorbents were assessed for potential binding affinity and adsorptive capacity of 3NOP. Activated carbon/charcoal and silica were identified as the most suitable adsorbents based on their high binding affinity and adsorptive capacity.

[0853] Briefly, 0.2 g of adsorbent was added to 4 mL of 2.5% 3NOP/H2O stock solution or 10 mL of 1% 3NOP/H2O stock solution. The solution was then placed in an ultrasonic bath for ˜4 hr and then allowed to equilibrate over 24 h. All materials were purchased from Sigma-Aldrich and used as received. After 24 h, adsorbents were tested for their binding affinity and adsorptive capacity by looking at the reduction of 3NOP concentration via HPLC at 230 nm.

[0854] The following adsorbents were tested and integrated areas were converted to mM concentrations of 3NOP based on calibration standards of known 3NOP concentration in distilled water, as seen in Table 22. FIG. 14 is graph showing the concentration of 3NOP (mM) v. adsorbent (20 mM stock solution).

TABLE 22
Change in concentration v. control of 0.2
g of adsorbent in 4 mL of 2.5% 3NOP/H2O.

| Adsorbent | 3NOP concentration (mM) |
|---|---|
| Control | 20.649 |
| Calcium Carbonate | 20.649 |
| Talc | 20.463 |
| Silica Gel (40-60 um) | 20.043 |
| Silica (5-20 nm) | 19.920 |
| Arginine | 19.782 |
| Lysine | 18.583 |
| Carbon Black | 17.422 |
| Activated Charcoal | 11.063 |

Table 23 shows the change in concentration v. control of 0.2 g of adsorbent in 10 mL of 1% 3NOP/H2O, and FIG. 15 shows 3NOP concentration (mM) v. adsorbent (˜8 mM stock solution).

TABLE 23
Change in concentration v. control of 0.2
g of adsorbent in 10 mL of 1% 3NOP/H2O.

| Adsorbent | 3NOP concentration (mM) |
|---|---|
| Control | 8.258 |
| Lignin (Alkaline) | 8.326 |
| Bismuth Sulfate | 8.079 |
| Bismuth Citrate | 8.072 |
| Lignin (Dealkaline) | 8.056 |
| Diatomaceous Earth | 7.895 |
| Copper Sulfate | 7.814 |
| Molecular Sieve (4 Å) | 7.771 |
| Cyclodextrin | 7.676 |
| Glutamine | 7.588 |
| Iron Phosphate | 7.503 |
| Betaine | 7.202 |
| Activated Charcoal | 1.358 |

[0855] Activated carbon shows strong binding affinity for 3NOP filtering ˜45 wt % in concentrated (20 mM) conditions with ˜80 wt % in more dilute concentrations (8 mM). It appears that the adsorbent pore size should be greater than 4 Å for adsorption of 3NOP. Mesoporous adsorbents with high surface area such as silica and activated carbon show high adsorptive capacity with no visible welting seen until ˜75 wt %. Layer-by-Layer

### Polyelectrolytes Coatings

[0856] Formulated tablets containing 3NOP, an adsorbent, and a binder can be coated with sequential layers of oppositely charged poly electrolytes. While not being bound by theory, it is believed that ionic crosslinking between the layers can result in a controlled release of 3NOP out of the tablets. Examples of polyelectrolyte pairs that can be used include polyglutamic acid and polylysine, polyallylamine hydrochloride and polyacrylic acid, and polyallylamine hydrochloride and polystyrene sulfonate. An exemplary formulated tablet includes an adsorbent of silica, arginine, lysine, and activated charcoal (30-45%) and a binder of ethyl cellulose and hydroxypropyl cellulose (40-55%).

TABLE 24
Formulation examples of 3NOP tablets.
Tablet weight varied from 0.2-0.5 g.
Tablet Formulation

| | Part per | | Part per |
|---|---|---|---|
| | formulation | | formulation |
| Adsorbent | (wt %) | Binder | (wt %) |
| Silica, Arginine, | 30-45 | Ethyl Cellulose, | 40-55 |
| Lysine, Activated | | Hydroxypropyl | |
| Charcoal | | Cellulose | |

The release data of 3NOP tablets coated with multilayers of some polyelectrolytes is shown in Table 25.

TABLE 25
Release (%) of 3NOP out of tablets formulated with
15% 3NOP, 30% silica, and 55% ethyl cellulose.

| | Release Compared to Control Tablets (%) | | | | | | | |
|---|---|---|---|---|---|---|---|---|
| PE Pair | Day 1 | Day 3 | Day 6 | Day 8 | Day 14 | Day 16 | Day 21 | Day 30 |
| PLK20 + | 58.1 | 56.6 | 61.3 | 62.6 | 64.7 | 63.6 | 63.8 | 63.2 |
| PRE20 | | | | | | | | |
| PAH + | 61.5 | 62.5 | 67.1 | 70.2 | 70.4 | 71.4 | 71.7 | 71.6 |
| PAA | | | | | | | | |
| PAH + | 61 | 66.5 | 74.7 | 76 | 77.5 | 76.6 | 76.7 | 74.8 |
| PSS | | | | | | | | |

Weight of tablets ~0.5 g. Calculations are based on a comparison to control tablets with no coating.

### 3NOP to Adsorbent Ratio Study

[0857] Optimal loading of 3NOP onto adsorbents was determined by varying ratios of 3NOP to adsorbent. 3NOP and adsorbent were speed mixed at 2000 rpm for 1 min at the following ratios by weight: 1:1.5, 1:2, 1:2.5. The adsorbed 3NOP powder mixture was then placed in distilled water at 1% 3NOP loading. The solution was allowed to equilibrate for 24 hr and then an aliquot was taken for HPLC to determine the reduction in 3NOP concentration. Table 26 shows the average integrates are of 3NOP in solution at various adsorbent ratios.

TABLE 26
Average integrated area of 3NOP in solution at varying 3NOP:adsorbent ratios

| | 3NOP:Adsorbent | | | | | |
|---|---|---|---|---|---|---|
| | 1:1.5 | | 1:2 | | 1:2.5 | |
| | Average | | Average | | Average | |
| | Integrated | Standard | Integrated | Standard | Integrated | Standard |
| | Area | Deviation | Area | Deviation | Area | Deviation |
| 3NOP | 2566.4 | 51.3 | 2566.4 | 51.3 | 2566.4 | 51.3 |
| Silica | 2499.4 | 293.2 | 2321.9 | 99.3 | 2340.9 | 30.3 |
| Activated | 1751.2 | 29.6 | 1581.9 | 8.5 | 1403.7 | 14.5 |
| charcoal | | | | | | |
| Lysine | 2336.2 | 61.7 | 2308.9 | 23.9 | 2266.6 | 56.1 |
| Arginine | 2406.0 | 113.2 | 2372.8 | 61.2 | 2435.2 | 230.2 |
| Glutamic | 2445.9 | 149.9 | 2452.5 | 78.9 | 2446.3 | 85.0 |
| acid | | | | | | |

[0858] Higher ratios of activated carbon to 3NOP result in higher adsorptive capacity. At ratio of 1:2.5 an adsorption capacity of ˜45% is observed and at a ratio of 1:1.5 an adsorption capacity of ˜30% is observed.

### Activated Carbon Tablets

[0859] Based on the 3NOP:adsorbent ratio study, the same ratios were tested for tablet integrity, friability, porosity, etc to determine the optimal 3NOP loading. 500 mg, 13 mm tablets were compacted under 60 kN.

[0860] High ratios of activated carbon (1:2.5 3NOP:adsorbent) resulted in tablets that absorb more water and coating solutions. This water/solvent absorption of non-wetted charcoal causes difficulty in producing uniform, defect free coatings. High loadings of activated charcoal >25% in tablets result in poor tablet integrity characterized by loss in hardness, increased porosity, tablet spilling, and poor shape retention. The preferred loading for tablets with poor disintegration was 1:1.5 3NOP:adsorbent.

[0861] FIG. 16 shows a multilayer tablet formulation above consisting of 10 wt % 3NOP, 15 wt % activated carbon, and 75 wt % ethyl cellulose. The first day release of coated tablets is ˜40% less than uncoated tablets and after 30 days, ˜30% 3NOP remains adsorbed on activated carbon.

[0862] FIG. 17 shows a multilayer tablet formulation consisting of 10 wt % 3NOP, 25 wt % activated carbon, and 75 wt % ethyl cellulose. After 30 days, ˜50% 3NOP remains adsorbed on activated carbon. These adsorptive capacities are in-line with what was observed during the 3NOP:adsorbent ratio study.

[0863] FIG. 18 shows a multilayer formulation consisting of 10 wt % 3NOP, 15 wt % activated carbon, 5 wt % sodium lignosulfonate, and 70 wt % ethyl cellulose. The addition of 5 wt % sodium lignosulfonate improves coating adhesion to the tablet resulting in ˜30% reduction in the first day 3NOP release. Over time, the release rate remains similar to previous formulations with a residual 30% 3NOP remaining adsorbed to activated carbon.

[0864] FIG. 19 shows a multilayer formulation consisting of 10 wt % 3NOP, 15 wt % activated carbon, 5 wt % hydroxypropyl cellulose, and 70 wt % ethyl cellulose. The addition of 5 wt % hydroxypropyl cellulose, a hydrophilic water-soluble binder, results in increased release between day 4 and day 10. After 30 days, ˜30% 3NOP remains adsorbed to activated carbon.

Silica v. Activated Carbon Controls to Assess Binding Affinity of 3NOP

[0865] Various control experiments were conducted to confirm the adsorbed 3NOP to activated carbon after 30 days. Activated carbon was compared to silica as preferred adsorbents. 500 mg of 1:1.5 3NOP:adsorbent were speed mixed at 2000 rpm for 1 min. The resulting powder mixture was placed in 10 mL of distilled water and 10 mL of acetonitrile (ACN) separately. The solutions were placed in a sonic bath for ˜5 hr, removed, and allowed to equilibrate for 24 hr.

[0866] Aliquots were filtered through a 0.22 um PTFE filter, and taken for HPLC to measure the 3NOP concentration in solution.

[0867] The same trend was observed in the adsorbent study. However, 3NOP is recoverable by washing the activated carbon with acetonitrile or a similar organic solvent with high 3NOP solubility (ie. ethanol, acetone, ethyl acetate, tetrahydrofuran, chloroform).

TABLE 27
Silica powder release v. activated carbon release
in distilled water and acetonitrile.

| | 24 hr in H2O | 24 hr in ACN |
|---|---|---|
| | Integrated Area | Integrated Area |
| Si-1 | 8415.7 | 8847 |
| Si-2 | 8507.3 | 8822.2 |
| Average | 8461.5 | 8834.6 |
| AC-1 | 4940.8 | 8103.9 |
| AC-2 | 5577.5 | 8082.8 |
| Average | 5259.2 | 8093.4 |

[0868] After 24 hr in water, less than 5 wt % 3NOP remained adsorbed to silica compared to the powder mix placed in acetonitrile. After 24 hr in water, ˜35 wt % 3NOP remained adsorbed to activated carbon compared to the powder mix placed in acetonitrile. By washing the activated carbon in acetonitrile, the adsorbed 3NOP can be recovered in solution proving that the remaining 30-50% 3NOP that is seen in FIG. 11-FIG. 14 remains adsorbed. Further studies need to be conducted to determine the driving forces for 3NOP desorption from activated carbon under different environmental conditions to utilize adsorptive capacity of activated carbon. This study also confirms that from previous tablet formulations, diffusion is the primary driver for 3NOP release of unbound 3NOP. This can be seen by very similar release profiles between silica-based adsorbent tablets and activated carbon-based adsorbent tablets. FIG. 20 compares a silica-based tablet and activated carbon-based tablet over 8 days. Small differences in release profiles could be due to differences in porosity between tablets using silica or activated carbon.

### Compounding of 3NOP

[0869] 3NOP was compounded with a variety of matrix materials using a DSM Xplore MC15 conical twin-screw extruder. The extrudate was pelletized and used as is or further compression molded into tablets as a suitable 3NOP extended-release form.

[0870] 3NOP was adsorbed onto the corresponding adsorbent and speed mixed with binder prior to compounding is a DSM Xplore MC15 conical twin-screw extruder at 100 C and 50 rpm. The strand was then pelletized, heated, and molded into a 13 mm disc-shaped tablet using a carver press under 40 kN of compaction force. Formula consists of 8.3% 3NOP, 25.0% arginine, 66.7% CAPA 6800.

TABLE 28
3NOP release profile of compounded tablets over 24 days.

| Time | 1 | 3 | 7 | 10 | 14 | 20 | 24 |
|---|---|---|---|---|---|---|---|
| Arg R1 | 8.97 | 16.37 | 22.55 | 23.42 | 24.11 | 23.07 | 24.56 |
| Arg R2 | 12.49 | 15.85 | 20.43 | 21.45 | 21.60 | 19.33 | 19.97 |
| Arg R3 | 9.90 | 17.78 | 24.52 | 24.50 | 24.36 | 22.60 | 22.33 |
| AVG | 10.45 | 16.67 | 22.50 | 23.13 | 23.36 | 21.67 | 22.29 |
| STD | 1.82 | 1.00 | 2.04 | 1.55 | 1.52 | 2.04 | 2.29 |

Total concentration of 3NOP is listed in mM.

[0871] Formulas consists of 11.1% 3NOP, 13.9% silica, 75.0% CAPA 6800 denoted “11PCL” and 19.4% 3NOP, 24.2% silica, 56.5% CAPA 6800 denoted “19PCL.”

TABLE 29
3NOP release profile of compounded tablets over 24
days. Total concentration of 3NOP is listed in mM.

| Time | 1 | 3 | 7 | 13 | 17 |
|---|---|---|---|---|---|
| 11PCL R1 | 9.79 | 18.77 | 24.31 | 29.15 | 27.93 |
| 11PCL R2 | 10.34 | 19.81 | 24.99 | 30.02 | 29.49 |
| 11PCL R3 | | 19.05 | 22.51 | 27.14 | 26.95 |
| AVG | 10.06 | 19.21 | 23.94 | 28.77 | 28.12 |
| STD | 0.39 | 0.54 | 1.28 | 1.48 | 1.28 |
| 19PCL R1 | 23.55 | 40.56 | 49.99 | 55.00 | 3.48 |
| 19PCL R2 | 24.19 | 40.59 | 51.03 | 53.46 | 51.64 |
| 19PCL R3 | 25.05 | 42.76 | 52.21 | 57.93 | 55.77 |
| AVG | 24.26 | 41.30 | 51.08 | 55.47 | 36.96 |
| STD | 0.75 | 1.26 | 1.11 | 2.27 | 29.07 |

### Compounded Polyelectrolyte Complexes for Extended Release of 3NOP

[0872] Solid polyelectrolyte complexes can be processible when plasticized with aqueous electrolytes to act as a matrix for 3NOP molecules. An example of a polyelectrolyte pair for compounding is polydiallyldimethylammonium chloride (PDADMAC), as a cationic polyelectrolyte, and polystyrene sulfonate (PSS), as an anionic polyelectrolyte. At no salt conditions, the complex is brittle and not ideal for processing and the addition of salt, such as sodium chloride, can help with the plasticization and further processing. A trial formulation used for compounding includes mixing of equal charge stoichiometry of PDADMAC and PSS solutions with a concentration of 100 mM, with respect to each polymer, and a total volume of 200 mL (as per preparation method described in ACS Appl. Mater. Interfaces 2015, 7, 895-901). The polyelectrolyte complex can be separated, removed from the supernatant phase, and soaked in salt water with a concentration of 1M for 24 h. The polyelectrolyte complex should be decanted and ready for compounding. A typical formulation used for compounding is summarized in Table 30.

TABLE 30
Compounding formulation with polyelectrolyte complexes for extended
release of 3NOP. Total materials used 20 g. 3NOP was mixed with
arginine (as in solid powder) overnight at 30 C.
PEC Compounding Formulation

| | Part per | | Part per |
|---|---|---|---|
| | formulation | | formulation |
| 3NOP Complex | (wt %) | PEC Complex | (wt %) |
| 3NOP: Arginine | 25 | PDADMAC: PSS | 75 |
| (ratio 1:3, wt %) | | (Equimolar with | |
| | | respect to the | |
| | | monomer) | |

Table 31 shows release (%) of 3NOP out of compounded PEC formulated as per Table 21. The compounded PECs were cut into 5-10 mm pellets and soaked in water (10 mL) for the release study.

TABLE 31
Release percentages
Release (%)

| Day 1 | Day 4 | Day 6 | Day 12 |
|---|---|---|---|
| 22.4 | 34.4 | 35 | 35.7 |

### Compounded Pellets

[0873] 3NOP was adsorbed onto the corresponding adsorbent and speed mixed with binder prior to compounding is a DSM Xplore MC15 conical twin-screw extruder at temperatures of 110-130 C and 100 rpm. The extrudate was then pelletized forming ˜2 mm pellets. Material suppliers are listed in Table 30. Polybutylene succinate grades FZ71, FZ91, FD92 were supplied by Mitsubishi Chemical. Polycaprolactone-based formulations are summarized in the Table in FIG. 21. FIG. 22 shows 3NOP release in mM for polycaprolactone-based formulations.

TABLE 32
Polybutylene succinate-based formulations

| | | | | |
|---|---|---|---|---|
| Code | 65FZ71 | 65FZ91 | 65FD92a | 65FD92b |

Material

| | | | | |
|---|---|---|---|---|
| Polybutylene succinate | 65.0% | 65.0% | 65.0% | 65.0% |
| Activated charcoal | 20.0% | 20.0% | 20.0% | 20.0% |
| 3NOP | 15.0% | 15.0% | 15.0% | 15.0% |

On total solids

| | | | | |
|---|---|---|---|---|
| Glycerol monooleate | 0.5% | 0.5% | 0.5% | 0.0% |
| Compounding Temperature | 120 C. | 120 C. | 130 C. | 110 C. |

[0874] FIG. 24 is chart showing the normalized 3NOP concentration v. Release time in days of polybutylene succinate-based formulations. Lower 3NOP loadings (<10%) have a less pronounced burst release over the first 7 days of monitored release. Glycerol monooleate was identified at a potent processing aid at loadings <1%. High levels <25 wt % activated carbon can easily be processed unlike silica which leads to high viscosity and screw torque. Cross-linked systems show slower release in comparison to un-crosslinked systems. High shear conditions of compounding appear to destroy activated carbon structure and adsorption capacity is lost.

### Microcapsules for the Encapsulation of 3NOP

[0875] Polyelectrolyte complexes (PECs) are used to form microcapsules and encapsulate 3NOP. PECs are formed through attractive forces such as ionic interactions, hydrogen bonding, hydrophobic, and pi-interactions between the polyelectrolytes. Polyelectrolytes are polymers with ionic groups bonded to counter ions and can dissociate in a solution to make positively or negatively charged polymers. Herein, PEC microcapsules refer to interconnecting networks of polyelectrolytes formed upon the interaction between oppositely charged polymers.

[0876] Examples of polyelectrolytes used in this invention include synthetic polyelectrolytes such as polystyrene sulfonate (PSS), polyacrylic acid (PAA), and polyallylamine hydrochloride (PAH). Further examples include naturally occurring polyelectrolytes such as chitosan and alginate or ionic biopolymers such as proteins, enzymes, and charged polypeptides.

[0877] Examples of Polyelectrolytes (charged polymers with positively or negatively charged repeating units) Used:

### Synthetic Polyelectrolytes

[0878] Polystyrene sulfonate (PSS), molecular weight ˜200,000 Da, Sigma Aldrich
[0879] Sodium Lignosulfonate (SLS), molecular weight ˜52000 Da, Sigma Aldrich
[0880] Polyethyleneimine (PEI), molecular weight ˜2000 Da, Polysciences
[0881] Polyallylamine hydrochloride (PAH), molecular weight ˜17,500 Da, Sigma Aldrich

### Commercially Available Peptide Sequences

[0882] Poly (L-lysine) (PLK10), degree of polymerization: 10, molecular weight: 1600 Da, Alamanda Polymers
[0883] Poly (L-lysine) (PLK20), degree of polymerization: 20, molecular weight: 3300 Da, Alamanda Polymers
[0884] Poly (L-arginine) (PLR10), degree of polymerization: 10, molecular weight: 1900 Da, Alamanda Polymers
[0885] Examples of Crosslinker Used:
[0886] Glutaraldehyde, 25% solution in water, Sigma Aldrich
[0887] EDC (1-ethyl-3-(3-dimethylaminopropyl) carbodiimide hydrochloride), Thermo Fisher.

### PEC Microcapsules Preparation

[0888] Equal stoichiometry of oppositely charged polyelectrolytes is sequentially added to water or water-3NOP solutions followed by vortexing for 10 s, after the addition of each component, to form PEC microcapsules. Some samples are chemically crosslinked (glutaraldehyde is an example of the crosslinker used). The PEC microcapsules may also be formed with non-stoichiometric ratios of polyelectrolytes. While stoichiometric ratios of polyelectrolytes provide almost a neutral microcapsule, microcapsules prepared with non-stoichiometric ratios are positively or negatively charged. All polyelectrolyte solutions are prepared in water and pH adjusted. The concentration of solutions is based on the monomer charge. The stock solution of 3NOP is prepared in water with a concentration of 100 mM and pH adjusted to 8.

[0889] High-performance liquid chromatography (HPLC) is used to determine the concentration of 3NOP in PEC microcapsules and calculate the release of 3NOP from the microcapsules. Samples are centrifuged to separate the supernatant phase from the complex phase. The supernatant phase is then removed carefully by using a micropipette and transferred to a 2 mL glass vial for further analysis. The 3NOP release of some PEC microcapsules prepared at neutral pH conditions and after 96 h of preparation is summarized in Table 31.

TABLE 33
3NOP release (%) from the PEC microcapsules. Samples
are prepared with a 3NOP concentration of 100 μM. Final
pH solution ~7. K, L, F, and E refer to lysine, leucine,
phenylalanine, and glutamic acid, respectively. PSS
refers to polystyrene sulfonate. Table 33 discloses
(KKLF)3 as SEQ ID NO: 79312, (EELF)3 as SEQ ID NO:
79313 and (kKlF)3 as SEQ ID NO: 79314.

| | | 3NOP Concentration |
|---|---|---|
| | Release (%) at | in Microcapsules |
| Polyelectrolyte Pair | 96 h timepoint | (μM) |
| (KKLF)3 + (EELF)3 | 63 | 37 |
| (KKLF)3 + PSS | 64 | 36 |
| (kKlF)3 + PSS | 66 | 34 |
| (kKlF)3 + (EELF)3(crosslinked) | 70 | 30 |
| (kKlF)3 + PSS (crosslinked) | 72 | 28 |

FIG. 24 is a graph showing 3NOP release (%) from the PEC microcapsules. Samples are prepared with a 3NOP concentration of 100 μM. Final pH solution ˜7. K, L, F, and E refer to lysine, leucine, phenylalanine, and glutamic acid, respectively. PSS refers to polystyrene sulfonate.

[0890] Examples of release profiles of some microcapsules made of positively charged polypeptides with either polystyrene sulfonate (PSS) or sodium lignosulfonate (SLS) are shown in FIG. 25 (3NOP release (%) from the PEC microcapsules. Samples are prepared with a 3NOP concentration of 100 μM. Final pH solution ˜7. PLR refers to poly (L-arginine), and PLK refers to poly (L-lysine). SLS and PSS refer to sodium lignosulfonate and polystyrene sulfonate).

[0891] The encapsulation efficiency of some PEC microcapsules prepared at neutral pH conditions is summarized in Table 34. Table 35 shows the encapsulation efficiency of samples prepared at pH-8.

TABLE 34
Encapsulation efficiency of the PEC microcapsules. Samples are prepared
with a 3NOP concentration of 100 μM. Final pH solution ~7.
Upper and lower cases in (kKlF)3 sequences represent L and D-chirality,
respectively. Table 34 discloses (KKLF)3 as SEQ ID NO: 79312, (EELF)3
as SEQ ID NO: 79313 and (kKlF)3 as SEQ ID NO: 79314.

| | Total Concentration | Encapsulation | 3NOP Concentration |
|---|---|---|---|
| | (monomer charge basis) | Efficiency | in Microcapsules |
| Polyelectrolyte Pair | (mM) | (%) | (μM) |
| PLK20 + PRE20 | 5 | 7.4 | 7.4 |
| PLR10 + PRE20 | 5 | 0 | 0 |
| (KKLF)3 + (EELF)3 | 5 | 100 | 100 |
| (kKlF)3 + (EELF)3 | 5 | 22.2 | 22.2 |
| (KKLF)3 + PSS | 5 | 37 | 37 |
| (kKlF)3 + PSS | 5 | 100 | 100 |
| PAH + PSS | 5 | 30.9 | 30.9 |

TABLE 35
Encapsulation efficiency of the PEC microcapsules. Samples are prepared with
a 3NOP concentration of 2.5 mM. Final pH solution ~8. Upper and lower cases
in (kKlF)3 (SEQ ID NO: 79314) sequences represent L and D-chirality of the amino
acid residue, respectively. Table 35 discloses (kKlF)3 as SEQ ID NO: 79314.

| | Total Concentration | Encapsulation | 3NOP |
|---|---|---|---|
| | (monomer charge | Efficiency | Concentration in |
| Polyelectrolyte Pair | basis) (mM) | (%) | Microcapsules (mM) |
| PLR10 + PRE20 | 5 | 50 | 1.25 |
| PLK20 + PRE20 | 5 | 53.8 | 1.34 |
| (kKlF)3 + PRE20 | 5 | 50.2 | 1.26 |

Physical Cross/Inking of 3NOP with Small Molecules

[0892] 3NOP molecules can form hydrogen bonds with small molecules such as amino acids to make a larger size conjugate resulting in enhanced encapsulation efficiency. For example, an equal stoichiometry of 3NOP and two selective amino acids, arginine and lysine, were reacted in aqueous solution for 24 h, and the solution was used for encapsulation studies. The results of such encapsulation with some PEC microcapsules are shown in Table 36.

TABLE 36
Encapsulation efficiency of the PEC microcapsules. Samples are prepared
with a 3NOP concentration of 125 μM. Final pH solution ~7. Table
36 discloses (KKLF)3 as SEQ ID NO: 79312 and (EELF)3 as SEQ ID NO: 79313.

| | Encapsulation | | 3NOP Concentration in | |
|---|---|---|---|---|
| Polyelectrolyte | Efficiency (%) | | Microcapsules (μM) | |
| Pair | Arginine-3NOP | Lysine-3NOP | Arginine-3NOP | Lysine-3NOP |
| PLR10 + PRE20 | 4.6 | 19.1 | 5.75 | 23.9 |
| PLK20 + PRE20 | 34.3 | 28.4 | 42.9 | 35.5 |
| (KKLF)3 + (EELF)3 | 27.4 | 34.8 | 34.25 | 43.5 |
| PAH + PAA | 30.3 | 47.1 | 37.9 | 58.9 |
| PAH + PSS | 67.4 | 67.6 | 84.3 | 84.5 |

### Example 13: Vaccination of Cattle Population

[0893] It is demonstrated herein that vaccination of exemplary vaccines of the present disclosure resulted in generation of antibodies which were effective in neutralizing ruminal methanogens.

### Treatment Groups

TABLE 37
Treatment descriptions

| Treatment ID | Count | Treatment Description |
|---|---|---|
| 9A | (n = 20) | Untreated |
| 9G | (n = 5) | 1 mL of RPF51698.1 (SEQ ID NO: 11032) + |
| | | ADC46800.1 (SEQ ID NO: 5382) |
| | | 1 mL of Enable C1 |
| 9H | (n = 4) | 0.5 mL of RPF51698.1 (SEQ ID NO: 11032) |
| | | 0.5 mL of Enable C1 |
| 9I | (n = 2) | 0.5 mL of ADC46800.1 (SEQ ID NO: 5382) |
| | | 0.5 mL of Enable C1 |

### 1. Conclusions

### 1.1 Vaccine Formulations

[0894] Treatment with protein antigen formulations (9G+9H+91) did not adversely affect daily feed intake nor average daily gain. Any trends in enteric emissions changes reported herein are present when CH₄ production (g/d) is normalized for DMI (i.e., CH₄ yield) or ADG (i.e., CH₄ intensity). Furthermore, no adverse events were reported for animals treated with protein antigen formulations.

[0895] Antigen-specific ELISA assay of sera from animals vaccinated with treatments 9G and 9H demonstrated elevated IgG's against RPF51698.1 protein. IgG response peaked in the d42 sample. Antigen-specific ELISA assay of sera from animas vaccinated with treatments 9G, 9H, and 9I demonstrated elevated IgG's reactive to ADC46800.1 protein. This further demonstrates that vaccines comprising RPF51698.1 and/or ADC46800.1 protein antigen induce an immune response generating antibodies capable of binding ADC46800.1. This observation suggests one or more epitopes on ADC46800.1 raise cross reactive IgG response to both protein homologs.

[0896] Treatment 9G and 91 formulations appeared to be efficacious following primary vaccination (d0), while treatment 9H formulations appeared to be efficacious following secondary vaccination. Efficacy for protein antigen formulations was determined using a covariate analysis (i.e., AA) using the pre-prime period (p0) as the baseline for emissions.

[0897] When compared to the untreated control animals, treatment with protein antigen formulations resulted in mitigation of ˜46 kg of CO₂ₑ over 10 weeks (p1, p2+p3). Specifically, treatment resulted in a reduction in CH₄ intensity of ˜10%, ˜15 and ˜17% in p1, p2 and p3, respectively, as compared to p0.

### 2. Protein Antigen Vaccine Formulation

### 2.1. Preparation of Recombinant Protein

[0898] Recombinant proteins were expressed using an E. coli T7 based bacterial expression system. Briefly, genes encoding the proteins of interest were amplified from genomic DNA using PCR primers designed to facilitate Gibson assembly into a linearized pRSET expression plasmid. Sanger or nanopore sequencing was used to confirm the sequence of the target gene and its intended subcloning into the expression vector. Subcloning included the addition of an N-terminal histidine affinity tag to facilitate purification and confirmation of expression. Expression plasmids were used to transform a lon-expression strain of E. coli such as BL21(DE3) pLysS, BL21(DE3), or clear coli (a DE3 lysogen strain engineered for reduced levels of endotoxin). Shake flask expression conditions were determined empirically and used either LB medium with IPTG induction or commercial autoinduction medium (Magic Medium). Cells were lysed with BugBuster reagent.

[0899] Purifications were conducted using HiTrap HP Nickel columns using either an FPLC to apply a linear imidazole elution gradient or manually driven syringes to create a step gradient. Fractions containing target protein were pooled and concentrated using Centricon concentrators. Concentrated purified protein was dialyzed against DPBS using slide-alyzer cassettes. If needed, endotoxin levels of preparations were reduced using polymixin-B resin followed by another round of concentration and dialysis. To reduce the likelihood of cross contamination of the proteins, purification media was used for a single target protein only. Preparations were sterilized by passing through 0.22 um syringe filters. Endotoxin levels were monitored either out-of-house by Charles River Laboratory or in-house using a Charles River NextGen-PTS instrument. Protein concentrations were routinely monitored by use of OD280 and final concentrations were determined relative to BSA standards using Bradford Assay.

[0900] Purified proteins were diluted to a concentration of 200 μg per 500 uL in DPBS for single protein treatment group doses or 200 ug each protein/1 mL for the dual protein treatment group. Purity of final material was confirmed by SDS-PAGE with coomassie brilliant blue staining. Purity of at least 85% was confirmed using densiometry of gel images with ImageJ. Endotoxin levels were confirmed to be less than 2000 EU per dose. Table 38 describes the final protein preparations.

TABLE 38
Protein preparations summary

| Protein | % Purity | EU per dose | Group |
|---|---|---|---|
| RPF51698.1 | 87 | 780 | 9H |
| ADC46800.1 | 85 | 1,100 | 9I |
| RPF51698.1 + ADC46800.1 | 86 (avg) | 1,900 | 9G |

### 3. Vaccine Preparation+Administration

### 3.1. Treatment Assignments

[0901] Prior to the study's initiation, steers were transferred to the study site, McGregor Research Center (McGregor, TX 76657) for a GreenFeed training period lasting approximately 8 weeks to learn behaviors associated with GreenFeed systems, as well as to allow for adaptation to a grower's diet (i.e., 40% rolled corn, 25% dried distillers grains, 2.5% mineral premix, 7.5% molasses and 25% sudan hay).

[0902] Only healthy, weaned Black Angus cross steers were utilized for this Project. All animals were weaned and received pre-weaned vaccinations a minimum of sixty days (60 d) prior to initiation of the study. In addition, animals demonstrated no clinical signs of health concerns (e.g., dull or sunken eye, depression, signs of scours, listlessness, weakness, or raspy breathing) at the time of enrollment. All animals selected were within approximately one hundred (100) lbs of each other at the time of enrollment.

### 3.2. Vaccine Preparation

[0903] Vaccines were prepared in their final formulation, i.e., antigen mixed with adjuvant, onsite on the following dates: Jun. 10, 2024 and Jul. 1, 2024.

[0904] Briefly, vaccines were prepared by mixing antigen prepared as described above, and the appropriate adjuvant at a 1:1 volumetric ratio via inversion less than 24 hours prior to injection. Exact mixing volumes are defined in Table 37.

[0905] Specifically, frozen protein antigens were shipped on dry ice overnight to the Research Center, with storage at −80° C. before and after shipment. Protein antigens were packaged as single aliquots, e.g., 1 mL each. Prior to injection, antigen aliquots were thawed on wet ice and mixed with equal volume of veterinary adjuvant (1:1 mix ratio) using gentle inversion to prepare a final vaccine volume of 0.4-2 mL. Vaccines were kept at 4° C. and/or on wet ice until injection, less than 24 hours.

### 3.3. Adjuvant Selection

[0906] ENABL C1 (Huvepharma, cat. #7010201) was chosen due to its known performance profile and USDA-approved 21 d withdrawal period.

### 3.4. Vaccine Administration

[0907] Animals were assigned to one of nine treatment groups, detailed below in Appendix A. Vaccines were administered subcutaneously by veterinary-trained staff. Just prior to injection, animals were restrained using a cattle silencer, and injections were administered into the animal's neck region using an 18-gauge 0.5-0.75″ needle 4. Dry matter intake, body weight, and daily gain 4.1. Dry matter intake (DMI) To ensure that vaccination did not adversely affect intake, dry matter intake was recorded daily using GrowSafe feed bunks. DMI for Individual animals was recorded by GrowSafe using known RFIDs.

[0908] Throughout the entirety of the study period, animals were fed once daily in the morning and had access to a water source at all times.

[0909] Individual daily feed intake (kg/d) was used to normalize enteric methane emissions, as well as to confirm that vaccination did not have a deleterious effect on intake. Intake was recorded from May 21, 2024 through Aug. 13, 2024 using GrowSafe feed bunks. Animals also consumed alfalfa pellets from the GreenFeed systems.

[0910] Total daily feed intake was determined by summing the feed intake recorded using the GrowSafe feed bunks and the estimated pellet consumption from the GreenFeeds, using the reported good visit duration. Daily dry matter intake was then calculated by correcting the total feed intake for the dry matter content of the feed type; average dry matter content of the feed consumed from the GrowSafe bunks and the pellets consumed from the GreenFeed System.

[0911] Dry matter content of the growing diet and GreenFeed pellets were determined.

### 5. Results

### 5.1. Body Weight

[0912] To ensure that vaccination did not adversely affect animal weight gain, body weight (kg) was recorded weekly throughout the study period. Body weight was recorded using a livestock scale. Specifically, animals to be weighed were walked through a pipe alley from their housing area to the holding pens. After being weighed, they were released to return to their holding pen with other animals from the same pen. At the end of the weighing, animals were walked back to their assigned pen in the barn.

[0913] Bodyweight measurements were used to determine average daily gain (ADG) throughout the study period (Jun. 4, 2024-Aug. 13, 2024). ADG was determined by taking the linear regression of weekly body weight measurements collected over 11 weeks.

ADG=SLOPE(body weight_{period X-Y},measurement date_{period X-Y})

[0914] Except for Group 9I, ADG over the entire study period was not significantly different from the untreated control (Group 9 A+9B). Group 9I was significantly greater (P=0.0004) than the untreated control, suggesting that there was no deleterious effect following any of the treatments; the observed difference between Group 9I and the control (Group 9 A+9B) may be attributable to the number of biological replicates in Group 9I (n=2), as compared to other treatment groups. When all protein antigen vaccines were considered together (Group 9G+9H+9I), there was no significant difference in ADG as compared to the untreated animals (Group 9 A+9B).

TABLE 39
ADG (kg per day) averaged per treatment group

| Treatment Group | ADG (kg/d) | P value |
|---|---|---|
| Untreated control | 1.12 | N/A |
| 9 A + 9B | | |
| All gen2 | 1.20 (↑) | 0.187 |
| 9G + 9H + 9I | | |
| 9G | 1.16 (↑) | 0.368 |
| 9H | 1.17 (↑) | 0.373 |
| 9I | 1.33 (↑) | 0.0004 |

ADG (kg/per day) for individual animals is shown in FIG. 26 and Appendix B.

### 6.1. Enteric Emissions Measurement

[0915] Enteric methane, hydrogen and carbon dioxide emissions were measured daily throughout the study period using GreenFeed skid systems and GrowSafe feed bunks. Animals had free access to the GreenFeed systems throughout the study period; animals were not physically coerced to use the system. Methane yield and intensity was normalized for dry matter intake for each measurement period separately. Measurement periods were binned into 21-day intervals to align with the prime-boost vaccination schedule, as well as allow for sufficient GreenFeed Spot visits; ≥20 spot visits per measurement period are recommended for analysis.

TABLE 40
GreenFeed measurement periods

| | | | Avg. GreenFeed |
|---|---|---|---|
| Period | Start Date | End Date | Spot Visits |
| 0 | May 21, 2024 | Jun. 10, 2024 | 35 |
| 1 | Jun. 11, 2024 | Jul. 1, 2024 | 38 |
| 2 | Jul. 2, 2024 | Jul. 22, 2024 | 37 |
| 3 | Jul. 23, 2024 | Aug. 19, 2024* | 37 |

*_{#}Extended + 7 d beyond the planned period end date (28 d total). Drop in wk 7 GreenFeed visitation would have resulted in 15 animals failing GreenFeed visitation criteria (>=20 visits) if p3 were not extended.

[0916] Period 3 (p3) was extended +7 d to from Aug. 12, 2024 to Aug. 19, 2024 in order to meet the minimum visitation threshold (>=20 spot visits) for the majority of animals. GreenFeed visitation greatly decreased in the first week of p3 (i.e., wk 7). If p3 had not been extended, 15 of 71 animals would have been excluded from the final emissions analysis for poor visitation; between Jul. 23, 2024 and Aug. 12, 2024, the average GreenFeed visitation was 27. The decrease in GreenFeed visits during wk 7 may be attributable to a drop in ambient air temperature, as no equipment malfunctions or loss of data was reported. The GreenFeed units are located beneath a shade structure, and, with the corresponding drop in temperature, it's possible that animals spent more time in the sun, away from the GreenFeed unit and therefore did not visit as often (FIG. 28).

### 7.1. Methane Emissions

[0917] A covariate analysis was used to interpret average daily methane production, yield and intensity. The rate of change between measurement periods in treatment groups was compared against the rate of change between measurement periods in the untreated control (Group 9A+9B) in a AA analysis (FIG. 29). The following equations were used to perform this analysis Definitions:

$$C {H}_{4} production = grams of CH4 per day$$

$${CH}_{4} yield = \frac{grams of CH4 per day}{kg of DMI per day}$$

$${CH}_{4} intensity = \frac{grams of CH4 per day}{kg of bodyweight gained per day ( ADG )}$$

### Equations:

$$A vg {CH}_{4} production = AVERAGE ( {CH4 massflow values}_{period X} )$$

$$Avg DMI = [ [ DEFINE ] ]$$

$${CH}_{4} yield = [ [ DEFINE ] ]$$

$${CH}_{4} intensity = \frac{{( Avg CH4 production )}_{period X}}{ADG}$$

$$Δ C {H}_{4} production = {( Avg CH4 production )}_{period X} - {( Avg CH4 production )}_{period Y}$$

$$ΔΔ C {H}_{4} production = Δ {CH}_{4} {production}_{group X ; period X - Y} - Δ Avg CH4 {production}_{control ; period X - Y}$$

[0918] Efficacy for protein antigen formulations was determined using a covariate analysis (i.e., AA) using the pre-prime period (p0) as the baseline for emissions.

[0919] Treatment with protein antigen formulations (Group 9G+9H+91) resulted in an average mitigation of ˜46.5 kg of CO₂ₑ per animal over 10 weeks (p1, p²+p3).

TABLE 41
ΔΔ CH₄ production (g/d) for protein antigen formulations

| | | Avg ΔΔ CH₄ Production | |
|---|---|---|---|
| Treatment Groups | Period | (g/d), per animal* | P value |
| 9G + 9H + 9I | p1 - p0 | −16.01 (↓) | 0.006 |
| (n = 10) | p2 - p0 | −23.71 (↓) | 0.002 |
| | p3 - p0 | −25.89 (↓) | 0.001 |
| 9G + 9I | p1 - p0 | −21.97 (↓) | 0.0003 |
| (n = 7) | p2 - p0 | −24.64 (↓) | 0.00001 |
| | p3 - p0 | −27.43 (↓) | 0.001 |

*_{#}Δ CH₄ production relative to untreated animals (Groups A + B) over the same periods of time.

[0920] CH₄ intensity was significantly reduced following treatment protein antigen formulations, as compared to changes in CH₄ intensity in the control animals over the same measurement periods (Table 42). Treatment with protein antigen formulations resulted in an average reduction in CH₄ intensity of ˜0.10%, ˜15% and ˜17% per animal in p1, p2 and p3, respectively, as compared to p0.

TABLE 42
ΔΔ CH₄ intensity (g/kg ADG) for protein antigen formulations

| | | Avg ΔΔ CH₄ Intensity | |
|---|---|---|---|
| Treatment Groups | Period | (g/kg ADG), per animal* | P value |
| 9G + 9H + 9I | p1 - p0 | −15.27 (↓) | 0.003 |
| (n = 10) | p2 - p0 | −23.73 (↓) | 0.0002 |
| | p3 - p0 | −25.67 (↓) | 0.0002 |
| 9G + 9I | p1 - p0 | −19.36 (↓) | 0.001 |
| (n = 7) | p2 - p0 | −23.44 (↓) | 0.00001 |
| | p3 - p0 | −26.26 (↓) | 0.0004 |

*_{#}Δ CH₄ intensity relative to untreated animals (Groups A + B) over the same periods of time.

8.1. Sample collection+analysis

[0921] Total blood samples were collected periodically throughout the duration of the immune monitoring period for subsequent processing. For a detailed sample collection, see Table 43 below.

TABLE 43
Sample collection schedule

| | | |
|---|---|---|
| Date | Vaccination | Total blood |

| | | | |
|---|---|---|---|
| Jun. 11, 2024 | d 0 | X | X |
| Jul. 2, 2024 | d 21 | X | |
| Jul. 9, 2024 | d 28 | | X |
| Jul. 23, 2024 | d 42 | | X |
| Aug. 13, 2024 | d 63 | | X |

No adverse events were observed.

### 8.1.1. Sera

### 8.1.1.1. Sample Collection

[0922] Generally, total blood samples were collected under the supervision of veterinary-trained staff. Samples were collected via jugular vein needle puncture into blood tubes. Collected blood samples were then clarified, via ultracentrifugation, to collect serum within twenty-four hours of collection. Clarified serum samples were aliquoted, labeled and stored at or under −20° C.

### 8.1.1.2. Sera Sample Receipt+Processing

[0923] Frozen sera samples returned from the field were thawed at 4° C. overnight or rapidly in an ambient temperature water bath. Thawed samples were mixed by inversion at least 3 times, aliquoted to 4×1 mL in 1.5 mL Eppendorf tubes. Additionally, a 5 mL pooled sera sample was made for each treatment group, which was also aliquoted. A working aliquot of each sample was held at 4° C., and the remaining volumes refrozen and held at −80° C.

### 8.1.1.3. Determination of IgG Response Using WC or Protein ELISA

[0924] Protein ELISA plates were prepared from recombinant methanogen protein preparations. Briefly, ˜0.2 micrograms of protein in carbonate buffer was applied to wells of a high binding plate and allowed to coat overnight at 4° C. Coated plates were washed with PBS-T and then blocked with SuperBlock T20 (ThermoFisher) for 3 hrs at 4° C. After blocking, plates were emptied, dried at room temperature overnight, vacuum sealed with a desiccant pack, and held at 4° C. until use.

[0925] Sera samples diluted to 1:25,000 were applied to ELISA plates and binding IgG's were detected after washing using a commercially available anti-bovine IgG H & L chain secondary antibody. The WC ELISA data shown below represents the average of technical triplicates (i.e., the same sera dilution run in multiple ELISA plates).

APPENDIX A
Treatment assignments

| Visual ID | RFID | Treatment ID |
|---|---|---|
| 112L | 000000000840003242071747 | 9A |
| 1165L | 000000000840003234349454 | 9A |
| 674L | 000000000840003242071873 | 9A |
| 459L | 000000000840003234349414 | 9A |
| 687L | 000000000840003242071828 | 9A |
| 598L | 000000000840003234349578 | 9A |
| 587L | 000000000840003242071497 | 9A |
| 1025L | 000000000840003234349264 | 9A |
| 135L | 000000000840003242071667 | 9A |
| 078L | 000000000840003242071732 | 9A |
| 1186L | 000000000840003234349477 | 9A |
| 294L | 000000000840003242071736 | 9A |
| 695L | 000000000840003242071637 | 9A |
| 637L | 000000000840003242071841 | 9A |
| 299L | 000000000840003234349545 | 9A |
| 649L | 000000000840003242071881 | 9A |
| 629L | 000000000840003242071463 | 9A |
| 334L | 000000000840003242071454 | 9A |
| 443L | 000000000840003242071471 | 9A |
| 163L | 000000000840003242071646 | 9A |
| 121L | 000000000840003242071647 | 9G |
| 336L | 000000000840003242071449 | 9G |
| 335L | 000000000840003242071444 | 9G |
| 349L | 000000000840003242071455 | 9G |
| 1100L | 000000000840003234349456 | 9G |
| 705L | 000000000840003242071763 | 9H |
| 1168L | 000000000840003234349470 | 9H |
| 155L | 000000000840003242071658 | 9H |
| 617L | 000000000840003242071483 | 9H |
| 673L | 000000000840003234349556 | 9I |
| 1130L | 000000000840003234349458 | 9I |

APPENDIX B
Average daily gain (kg/d), measured weekly

| Treatment Group | Visual ID | ADG (kg/d) |
|---|---|---|
| 9A | 078L | 1.33 |
| 9A | 1025L | 1.22 |
| 9A | 112L | 1.23 |
| 9A | 1165L | 1.04 |
| 9A | 135L | 1.15 |
| 9A | 459L | 0.93 |
| 9A | 587L | 1.07 |
| 9A | 598L | 0.96 |
| 9A | 674L | 1.00 |
| 9A | 687L | 0.85 |
| 9A | 1186L | 1.10 |
| 9A | 163L | 1.72 |
| 9A | 294L | 0.89 |
| 9A | 299L | 1.39 |
| 9A | 334L | 1.33 |
| 9A | 443L | 1.23 |
| 9A | 629L | 0.98 |
| 9A | 637L | 0.75 |
| 9A | 649L | 1.09 |
| 9A | 695L | 1.09 |
| 9F | 511L | 0.93 |
| 9F | 577L | 1.00 |
| 9G | 1100L | 1.49 |
| 9G | 121L | 1.37 |
| 9G | 335L | 0.85 |
| 9G | 336L | 1.11 |
| 9G | 349L | 0.99 |
| 9H | 1168L | 1.07 |
| 9H | 155L | 1.25 |
| 9H | 617L | 1.48 |
| 9H | 705L | 0.87 |
| 9I | 1130L | 1.35 |
| 9I | 673L | 1.31 |

### Abbreviations and Acronyms

| | |
|---|---|
| ADG | Average daily gain |
| BSA | Bovine serum albumin |
| CH₄ | Methane |
| CO₂ | Carbon dioxide |
| COA | Certificate of Analysis |
| CVB | Center for Veterinary Biology |
| DMI | Dry matter intake |
| DMSO | Dimethyl sulfoxide |
| DNA | Deoxyribonucleic acid |
| DPBS | Dulbecco's PBS |
| ELISA | Enzyme-Linked Immunosorbent Assay |
| FPLC | Fast protein liquid chromatography |
| H₂ | Hydrogen |
| GHG | Greenhouse gas |
| Ig | Immunoglobulin |
| IgA | Immunoglobulin A |
| IgG | Immunoglobulin G |
| O₂ | Oxygen |
| OD | Optical density |
| PCR | Polymerase chain reaction |
| PBS | Phosphate buffered saline |
| PBST | PBS Tween 20 |
| USDA | US Department of Agriculture |
| WC | Whole cell |
| WCVL | Whole cell vaccine lot |

### Ranges

[0926] Where ranges are given, endpoints are included. Furthermore, it is to be understood that unless otherwise indicated or otherwise evident from the context and understanding of one of ordinary skill in the art, values that are expressed as ranges can assume any specific value or sub-range within the stated ranges in different embodiments of the disclosure, to the tenth of the unit of the lower limit of the range, unless the context clearly dictates otherwise.

### INCORPORATION BY REFERENCE

[0927] All publications, patents, and patent applications mentioned herein are hereby incorporated by reference in their entirety as if each individual publication, patent or patent application was specifically and individually indicated to be incorporated by reference. In case of conflict, the present application, including any definitions herein, will control.

[0928] Also incorporated by reference in their entirety are any polynucleotide and polypeptide sequences which reference an accession number correlating to an entry in a public database, such as those maintained by The Institute for Genomic Research (TIGR) on the world wide web at tigr.org and/or the National Center for Biotechnology Information (NCBI) on the World Wide Web at ncbi.nlm.nih.gov.

### EQUIVALENTS

[0929] Those skilled in the art will recognize, or be able to ascertain using no more than routine experimentation, many equivalents to the specific embodiments of the invention described herein. Such equivalents are intended to be encompassed by the following claims.

The application's sequence listing, which the Patent Office published only in electronic form, follows.

SEQUENCE LISTING (79314 sequences)

SEQ ID NO: 1 - DNA, 1167 bp, Methanobrevibacter ruminantium
  source 1..1167: mol_type = genomic DNA
atgactaatatttttgaggatttacaggaagaaagcgtgggagtgagtatttttaaagataaaaaacctttagatcatcgttttttacctgaaaatttgcctcatagaaagaaacagattactgaaattgctaaacattggattgaagcattaaatggaaacaccccttcaaacattacaatttatggtaagacaggaactggaaagactgctgctgctaaattcgctaaagagcagcttattgaagcatctagagataaaaatgtcttcattaaagtcgaatatatcagatgtacagacttcactacagaataccaggtccttacctatctttgtcaaaggctaggccgtgatgttcctaaccgtggatggaccaagggggagattgtaaacacctttagagacattttaagaagaaatgcctttggcagaaatcttattttaattgtcattttagatgagatcgatattcttcttgaaaaggacggcgacggaatcttatacacccttacaagaactgataatattgccattctttcaataagtaattatcttgactttaagcaattcattaagccaagggttgcaagcagcttaagggataaagaaatagtgttcccgccttatgatgcagagcaattagctgatattttacatgaacgttctgaattggcatttgaagaaaatacacttgaagaaagcgttattccattatgttcagctatggctgctaaggaagaaggtgatgcaagatatgctcttgacctattggagaacgctggagacattgctgttgaagaaggatctgaaatcgttaagggaaaatatgtgcgtcaagctaaggatgtcattgagtataataaggttaaagacgttattattacacttccaacccaacagcaaagggttcttgcagctataatgaaattaactcaagacaatgaggaaatcacttcaggtaagctctttgaagtctataaagatatttctaaaggagacagtgttacctatagaagaatctttgatttcattaacgaattggagatgttaggaattatctctaccaacaccatatccaggggcagaggtaaaggcaggaccaatattattaagttgcagactgattctaagttgattcaagataacttatctgctgttctttattag

SEQ ID NO: 2 - DNA, 705 bp, Methanobrevibacter ruminantium
  source 1..705: mol_type = genomic DNA
atgactagacttattgagtttaagaatgtgaacaaggagtataaatctggagattacattttaaaagctatggataatgtgaactttacaatagatgaaggagagtttgtagtaattcttggaccttcaggtgcaggtaagtccacccttctaaaccttttaggaggccttgattcagttagctcaggtgaaataatcgtaaatggcagtcatattgaatcattcgatgacgatcagcttacaaactatagagcccgtaatgtaggctttgttttccagttctataaccttattcctaacttgacagccttggaaaacattgaattgatgaaggacgttgttgattttgacatcaatggattggctgtattggatgctgttgggctaaaggatcatgccgatcattttccagcacaattgtccggtggagagcaacaaagggtgtcaattgcaagggcaattgctaagagacctagtatgcttttgtgtgatgagccaacaggagctcttgattcaaaaacaggggctttgatattggctttgcttcaggacatgtgcgaaaagctcaatacaactgttgtcatagttactcataatgcaattctatcagaagctgccaataaggttattaggataaagaatggacagattgaaagtgtaattgtaaatgagatgcctaaaaaggtctctgaattagaattgtga

SEQ ID NO: 3 - DNA, 2268 bp, Methanobrevibacter ruminantium
  source 1..2268: mol_type = genomic DNA
atgcttaaaagaaagatgctaagagatatttggaattataaagttcaatttatatccattttcataattgcattcataggcgtatttgtatttgccggactgactgcagaggcagatggttttgaagcctccatagactcattttaccagaggagcaatttagctgacggatggatatactcaaactatcttgttgatgactttctaaagcaggtctacttgcttggcgcaaccactagtatggagagacagttggttgtagattcccaagctgaattagatggcaagcccgatattacgctgcattttgttgaaaacaacaccatatctaaatattatcctcttgaaggcaatgaattaaatataagcgattctgaaggtgtatggttagataaaactttcgctgatgctcgaaatctgaagataggggacaccattgcatttgaaagcaatggaattaaaatagaaaagaagattaggggattaggctattctccagagaatgtttatagcttagttcccactcaaacagttccaaattatacggcaaggggctttgcttatatgtcctataaggcatttccatcagacaatataacttataatgttcttaatgttaagtttgatggacgccctgaaatcttctcagagctattgtcctatcgtttagatggatattatgaattgtatctgccccaatcaaatcaatatagcgtaaatgcggtttcagattcaatcgctcatcaaagttcattaaacgctgttttcccaattcttttcactttgatttcaatgctgatgctttcagtgactatgaaaagaatcatctctaatcaaagaactcaaatcggtgttcttaaggctaatggatttagcaataggtcaatagctatccattatatgtcctttggctttttattagtcacatcagggtcaatattaggtgcaattttagggccgatcgtattccatttcgttgttcatgaatccagaatttattattttaagttccctgtttgggcttatgtgggacttgagagattcatatttgtaattgttataatatcattgatttcacttattgtttcatatctttcaattaaaagcattgtcaatgagcctccatctcaaataataaagcctaagcctccaaaaatggtcagttctggtttcattgaaaagctagcaatctggaaaaggctttcatttaacataaggtggaattatagggatatcaaaagaaacaggttcaaatcactaatgacaatcgttggcgtgatgggatgcactatacttttgatttcaggctttgcagtttatgagcagatggaaatttcaaaggattggtatttcaatgacgttaatcattttgaatccaagctggtgattgatgataatacagacttatctcaaatagattcaatagcccataaggttaatggggatgagataatggagtcctccattgaaatattaaagggtgatgccaattttgcttcccttttggttttaaatgacaccgatcttatcacaatgaccaatgacaatcgtgagaagatagatattccaaaaaatgaggtttcaatttcaaagaagatggctgatattctggatttaaaggttggagatactatagattgccatctattagattccaataagcttgttaagattaggattgataggattcattcaaccccatttactcagggccttgtcatgtctgccgataaatatgaagagttaggctttaattttactccaacaagcataatcacttcagagcatgtcaataagtcttatgatggagtcaaatccacaatctattcagaagatatggttcgaggatgggaccagatgcagaaaaccagcatgatgataataacttcaatattgtttttagctattgttttagctgttgtgattctttataatatgaatcttctttctttcatagagatggagaatgatattgcaacacttaaggttttaggatttaagagcaagtatctcactaaattgctagctactcagggctttttctttattattgttggttttattttaggtcttcctgtagcttattatattttaacattgttgatgcctgcatttggaaataagatctatttgattcctaatatttctgttttgaatatggcctttagctttttgataattgtatctgtgtttattgttatgaatttatatttctctaggaagattagaaagctagacatggttgatgctcttaagacttttgagtag

SEQ ID NO: 4 - DNA, 2238 bp, Methanobrevibacter ruminantium
  source 1..2238: mol_type = genomic DNA
atgaaaaatcgtatgattttaattatttcactattccttatttcattactcgctatcggtgcggcaagcgcatctgaagacataactgatacaattgaagcacctgctgctgatgaagtagtaacagttgatagtgaaatccaagaaatagaaacggttgataataaccttgaagaaatagaaaccgatacaaataatattgaagaggtggaagctgctgacgatgaagtcataaatgaaacagctgaaactgaaataaaagacgaaaccgaaattacagatgaaactatcatatctgaagaaaaggttcaaatcgctaatgatgaaaaaatcgtccaagacggtttgcttggctttagcatcaatttaacagacctacttggaggagaaagctcaagccttaatttgagcaaactcttaagtggagacaacttaaaccttaatttgagcaaactcttaagtggagacaacttaaaccttaactggagcgaactcttaagtggagatagcttcacccttaactggacagacctattaggaggagacagcctaacagtcaactggacagacctacttggaggagaaagcacaaccctcaactggacagacctattaggtagagacagcctaacagtcaactggacagaccttctcggagaagactttacccttaatttgacagacctattaggtagagacagcctaacagtcaactggacagacctattaggaggagacagcctaacagtcaactggacagaccttcttaacggagacagcttaaccttcaactggacagacctattaggagataacctaacactcaatatgtcaagccttttaggtggcgaaagcacaaccatcaactggacagaactgttaggtgacaatttaacattcaatatgtcaagccttttaggagaagactttaaccttaatatgacaagccttttaggagaagatttcaaacttaacctaacaaacatctttggagataacttaacagcaatctttggagaaaacttaacaaacaaactagaagaactcttcggagacgatttcacaattaacatgacagatctctttggagaagacttagctcttaacatgtcagacatcttcggagacgattccatattcaatctttcaaatatattaggcgaaagcacaaccatcaactggacagatctccttggagaaggttctacacttaacatatcaaaaatcctcggagaaagcctaacacttaacttgactgacctctttggagaaagttcaaccctcaattggacagaactattaggtggcgaaagcctaacacttaactggacagaactattaggcggagacagcttcaccatcaactggacagatcttttaggaaacagcacaaccatcaactggacagacctcctcggcagagacagcctaacagtcaactggacagacctcctcggtggagacagcttcaccatcaactggacagacctattaggaggagaaaccctaactatcaactggaccaaaatcttaggaaacgatacttcattaattgataacatcacttcattaattgatgatatcagtccattcgttgataaccttaccactgcagtcaaagatttaattaacaagttccttaaagaagaaaagactgtgagtgtcatcaactatgaagatatgaccacaactgctttcgactctaaaattgatggcagaatcggtaaatacttcgtagtaaaattaaccgatgacaagggcaaagccttatcagacaagtttgtacaaatcggattcaatggtagaatctacaacagaaccagtgatgaaaacggtacagtcaaattgcaaataaaccttggatataaaggtgattacacctttgctatttgtttcctcggtgatgaaaaaaccaacggatcatttgcagttgcaaaaattactgtcaaaaaacaaaaggctaaattaaccggaactgccgctagctacaaagcatccgctaaaaacaaatacatcagcgctacctttaagacaactgcaggcagtccaatagccggtaagaaaataacctttaccatcaataagaaaacttacactgctaagaccgatgcaaaaggtgttgctaaagttaaagtaagcattaccaataaaggcacttatgctttcactgctaaatacgcaggcgacgatacttatgcaactattaccagtgcaagtaaaaaacttactataaaataa

SEQ ID NO: 5 - DNA, 960 bp, Methanobrevibacter ruminantium
  source 1..960: mol_type = genomic DNA
ttgtatttcaagtgtaaacttaaggagtgtaatattatttttggccataataatgtaatttcaataaaagactttgaaaaggaagatataaaattcatcctagatgaagctgaaaagcttgaagacatcgctcaatcaaaagaaaaatcagaagagctctctggaaagatactcggactattattctacgaaccttcaacaagaaccagattgtcctttgaaaccgccatgaaaagattaggcggagactgcatctcacttggagaaacttcaaacagcagtgtagccaaaggagaaagcattgcagacactgcaaagatgtttgaaagctactgcgatgcaatcgtaataagacacgaccttgaaggtgtttcacgatttttatctgatgtaatagacgttccaatcataaatgcaggagacggtgcaggccaacaccctacccaaaccctattagacttatacaccatcagaaagcacttcggcaagatcgatggccttaacatagcacttcttggagacttaaaatacggccgtaccgtacactcactttcatatgctttagggatgtatgatgttaaaatgacattcgtatcccctgaagagctaaagatgcctaaggaaaacctccttgaccttgaaaagaacaatataaaatataaggaaacatcaaacctgaaagacatcatagatgagattgatgtattgtatgtcacaaggattcaaaaggaaagatttccggatattgaagagtatgaaaagatcaaaggagcttatcttatcaacaaagacttgctcgaaggcaaggaactgattgtaatgcacccattgcctagagtagatgagatagactatgatgttgacaatacaaaatacaataagtactttgaacaggctgcaaatgcaattcctgtaagaatggccatattaaagaatctcattaggcacagatacgaatag

SEQ ID NO: 6 - DNA, 504 bp, Methanobrevibacter ruminantium
  source 1..504: mol_type = genomic DNA
atgaaaacagccattatttatgcaagcaaaactggaactactaaaaagattgcaaaggccttagtggacaagatagatggagaagtcctaacaataccaatagctagagccaaatcagcctgtcttttaaaatacgactttgtaatcatagcaggatccatccattacggccgcattcaaggggaaataaaatcctttgtaaataaaaactataaaacattgcaaggaataaattacggcctatatatcacttgcacaaaccaaggcaaggctgaagaatatctgaacaaatcattttcagaggagatagtaaaatcagcatttgtaactgcatgctttggagctgaaataaaccccaataagggagacatgattactaaacgcataataaattccaatttaaaaaggtttaaaaaggaaaataaggagccaccaagtattgattgggagcttgtagatgaatttgcagataaaatcaataaaagaacaataaaaaagaaataa

SEQ ID NO: 7 - DNA, 807 bp, Methanobrevibacter ruminantium
  source 1..807: mol_type = genomic DNA
atgaagtttttaagattcaaaaagaaaatcaatgaattgggcaaagacaattcaatcaaaataggattctacgatggagaaaagataatcgaacttaaaggagacatattagactattttaactctaatctagatgaaataaaggaaaatatgatagaatcatatagtctagaagatatagaaatagaagctccagtaaatccatctaaaatcatatgcattggcctaaactacaaagaccatgccaaagaattaaatttagagcttccaaaaaagcctgtaattttcataaagccaaattctgcattaaacagtacagaaaagaatataatcttccctaacatttcaaagcaagtggattatgaaggggaattggcagttgtcattggaaaggcaacaaaaaaggtatctaaagaagaggctgatgattatatattcggctacacaatcataaacgatgtcaccgcaagggatttcacccttggagatggccaatggacaagaggaaaaagctgtgatggatttgccccaatagggccttttattgaaacagaccttgacccattaaatcaaagaatcgtaacaaaggtaaacggagagataaagcagaattccaacacttccatgatgatcttctccccacaggagataattgaattcatatcacagacaactaccctcaatccaggagatataattgcaaccggcacacctccaggtgtaggtccaatggatgctggttcaactgtagaagtctctattgaagagataggaatcttaaagaactatttaataaaagaagaataa

SEQ ID NO: 8 - DNA, 1452 bp, Methanobrevibacter ruminantium
  source 1..1452: mol_type = genomic DNA
atgaatcaaaatgcccagtggaattcaattataacatttatattggcaatgattggccttaccataggcatagggaatatttggcgtttcagctatgtattatactctaatggaggaggatccttcttcataccttattttattgcaataatggttatgggaattcctttcttgattttagagtatggattaggctttagcctaaagaagagtttttcaaagctgatgcatgatatacgcccggaatttgaggtaattgcttggatgttggtcatattcgtattcatcgttgtaatttactatatggttatcataggctgggattttgtatatttcctaaacagctttagcttcggttggggaagcgatcccaattcattcttcatgacttatgttggtggaactagggagatatcccagattggaaggcttcttcttcctacattaatttgcacaacagtcttatggattattttttggtttgtatccaatcgtgatgtggatgaaggaatcggaaagatttcaaccattctaatgcctttgctatttataataatgatttttatctttttatactcattcacattgccaggatttgacattggaataaagacattgcttaagcctaattggtctcttcttttagacattcacatctggcttgcagcattcggacagacaatattcaccttaagcataggccaggcaatggtctatacctatgcaagctatttgcctaggaattccaaattggtcgatgaagtattgcttgtggttattacaaacaccttatatgaggttttcattgccattggggtcttttcaatacttggatatatgtccctaaagtcatcaatacctatagaaaaactaatcagtgaaggaactggactgatatttgttgtatttccaaagatatttagtgagatgggttttgtaggtcagattataggtccattgctatttttatcaatactatttgcaggatttacttccgcattggcattgtttgagcctttcctatcatccttatgtgataagtttaatttaagtagacgcaaaggggttacaatacttgtaattgttgcagtgatttgctccattcctttttcaacaggaataagcagctatttggttgggattgttgacaagtttgtaaatgactttggaatattgattttgattggtgtgcaggccattatatttggatggttctatggtgttgaaaaggtcatgcccgttttaaatgagctttctacttttaaggtaggcaaatcatgggtttttacaataaaatatctattgcctgttcttattattatcatttgggtaaatggtgttgtgggactgttcagtaataccaatagctttgaattgattgtagatttgattattacttttgttgtggttggattctctgttttgtttactaaattaggtgttaaagagtaa

SEQ ID NO: 9 - DNA, 750 bp, Methanobrevibacter ruminantium
  source 1..750: mol_type = genomic DNA
atgatattctactatacaggaactggaaacagcaaatatgtagcagagacaatagctaaaagcaatgaagaagagattatctcaatcccagactgcataagggaaaacaaattcacatttgacgtgaaagaagatgaaataataggatttgtatgcccaatctattcgctaggaataccagattctgttagaatattccttaagaaactccgccttaactataataaaaagccatatatcttccttgtagccacatatggaagcactgttggaaacattaaaagcatagtttcaaaatactttaaaaagatagatggattcttcaatgtaaagatggtagacaattgggttcctaaatttgatctaacagaccaaaactacataaaacaggctgaagaatatggagagaaaagattagaggaagtgaacaatctaatactcttaagaaaaacaggaaaataccttgaaaatgaaaataaaatattcagcggattcatatacaaggttggatatgacttcatccgtaatacaagcaattttaagctagatgacaattgtataggctgcggaatatgcagaaacaattgtccaaccaatacaataaaaatagagaataaacggcctgtctggaagagaaaaaagtgtgacatgtgctttgcttgtctacatagatgtcctcaatttgccattcactatggaaaaaggtctatagagcatggccagtatttaaatcctaacgttaaattataa

SEQ ID NO: 10 - DNA, 864 bp, Methanobrevibacter ruminantium
  source 1..864: mol_type = genomic DNA
atgaaaatcaaaatagcagtcccttccaaaggaagaataagtgaaccttccataaaaatactagaaaaggcaggactaggcttaaaggattcaacaaacagaaaattattctcatcaacttacaatgaaaatatagacgtgatgtttgcccgtgcagcagacattccagaatttgtagacgaaggaatttgtgatatgggaatatcaggctatgacctgatagaagaggcaggagcagatgttaaaatattaacagacctccaattcggtgcaacaaagcttgttttagcttctcctgaaaactccgaaataaacacaaaagatgatttgaaggatggaatgacaatagctacagaatttccaaaccttacaagaaaataccttgaagaaaacaatctgaacataaagatagtaaagcttacaggatctactgaaatagctccattcattggaatagcagatgctataacagaccttacaagcacaggaacaacactaaatatgaatcatttgaagatagttgatgtcatccttgaaagctcaattaaattgatagctaacaaaaattcatacacagaaaaaaataaccttgtagaagcggttagcaccagcattcaaggtgtgcttgaagcggaaagaaagaaactggttatgatgaacgtcgcaaaggaaaacctttgtgaggttcaaaaggtcatgccggcaatgagcggacctactatatctcaagtgctttccgaagaggaaaccatggccgtacaagcagtggttggagaggatgaagtctttgacctagttaacaagcttagaaatgctggcgcacgtgatatcttggtagttcctatagaaaggattattcaataa

SEQ ID NO: 11 - DNA, 204 bp, Methanobrevibacter ruminantium
  source 1..204: mol_type = genomic DNA
atgagtattcctgtagctcctattggaagaatcattaaagacgctggtgctgaaagagtaagcgaagatgctaaaaaagaattaaacgcatacgtaaccgcacaagctgaagctgttgctaaaaaagcaatcgaattcgcagctatggcaaaaagaaaaaccgtcaaagctgaagatatcgaattagcaatcaaaaacttataa

SEQ ID NO: 12 - DNA, 1020 bp, Methanobrevibacter ruminantium
  source 1..1020: mol_type = genomic DNA
atgggaagaagaaaaaaacaagattctacacttgattcttattttccagattctgatttgatagaggaaaaaaagaagaaggatgaagcatgcaagatctgtggcaatcctatagaggacgccacctttcaaagatgtcgcaagtgcttaaacaagcttgcactgatagatgacttaagggaactattggaatacgtttctccaggtgaaagctttagggaaattgacctaatcaataaaggctttaaaagcttgaaactcaacattctcatttctaaatttttaaaagaacagctcattttaattaatctcgacggtttatttactcttaacaatattgattttttaaatgcctttattaaaaaatatggcgaaaaggaaaagccacttaaggaaacagattacttaatagtaagggatgacaagtctgccttttatattgatgtcaacaactattcagattatataaagataaggttcaatcctaggattaacaagtggcaggttgatttctttaatgaaaacggcctcgcaaataccaagtcctttattgattccaatgatgcaaataaggaagccatctattacattaagcagttaggtgttatcggatcttcagctgatgataagaaagaggaaaagtctgataaaagattatactcttctcatgagggaatctattacagccctagccgtggaatgtggggagctaaagtcaagggatataagggatttaagttcattggacacttcagcagcgaagaggaagcttatgaggcaagatgcaagtatttggaaaataaggaaagaaccagacaaaagtatatttctgaaaagagaggattgaaatccggccttaggaatcaaagctctggagagctgatttactttagcaaacagaagggcaaatggattgtaaggcttaaaaataaggaaggccaaattgttaatgtaggccagtttgacaccgaagaggaagctaataaagctaaagaggagtttattaaggataatagttaa

SEQ ID NO: 13 - DNA, 321 bp, Methanobrevibacter ruminantium
  source 1..321: mol_type = genomic DNA
atgagtgaattaaagttggatttggtattcgatgactatcaaatcaaaagggcaaaacctgcaaggggttcatctgttattcatgtgaataagagatggataggaaaggaagtgtccataattccactgccatttgacgtggatgaaaagtttattgatgaaactaaaggggaagacggtttatatcatttagagttggctgttaaggagatcttttccaaaacagtatcagatcgtaaagatgtaggattcttttatcttaaggagtctttgcttggattgtttttcctcattatagaagcgcctgatattgtttattag

SEQ ID NO: 14 - DNA, 1464 bp, Methanobrevibacter ruminantium
  source 1..1464: mol_type = genomic DNA
atgtatgaaaaagaagatattttaatcgattatattaataatgaaattaacactgttccattcagcttaaatgataaacttaaaataagaaatgagaagtttcgttgtcgtgaggagttttatgagataaaaaattatgtggatgattttttagaaggtaactataccaatagatacatagtgttacctggactaaggggtttaggtaaaacaaccattatttaccagttatatcaatatttattaagagaaaaggaaatcaatcataatcaaattctttatatctcctgtgatgatttaaatgactatatggatattaatattttagatgtcgttaactgcttcttgaagcttcatcataattctaatttaagaactttagataagaagatctttatttttattgacgagtcacagtatgattctaattgggcaggggctggtaaaagaatttatgataagactaataatgtttttttaatatttactggttcatctgcattgaatttagaatataatgctgattctgcaagaagattattgaaaaaaagcatcactcctttaaattacggtcattttttaaaattaaaatatggttttcactatgatgaattctctgatgcattaagtgacctgatatttttaggtgatgagaagaaagccattcaatgtgaaagggaagtttattctaaattgtataatttagaaggctataatgataatgtatgggatgattttttaagaaatggaggatttcccatatccttttatgagaaaaatgatgataatgtttctcaaaggttaagggaagtagttaaaaaagtcttaataagcgatattgctaatatttccactatttcaagtgaaaagtatattaacagcattaggctattaaattttttagcggtgcaaaagccaggggacatttcacaaaataaattagctaattttttaaatgtatctcctacaactgttaagggtataatagaccttttggaaaagacacatttgatatttcatacagagccttatggttctgccgccaaaagatctaaaaaatcatggaaatatttttttgctagttcttccctaaaacatgctttagttaaggatttaggtagttctatgagagatgtaaaatcttatgaaggtatcttattagaaaatcttgtagcatccactttctttaattggacaaataggaaaaatatttccttcaatctattttatgatgcaaatgatgatgaaaaaaataagactactgttgattttattattaaggaaggttttaataagccaattcctatagaagtaggtattggaaaaaaaggcgataagcaaatttccaagtctattagtgattatagggctgattatggtattgttatatctaataagaccaagtttatagaaagacagggaaatgttatttatttgcctccaagaagcttttcttttttatga

SEQ ID NO: 15 - DNA, 3846 bp, Methanobrevibacter ruminantium
  source 1..3846: mol_type = genomic DNA
atgaaattatataaaaatagcataatcattttattattaattttaattttatcgattggagcagctgcagctgtagaaaatgattattctaatgccgatttagatatttctaatgattttgttttaagtgataattctaatgaaattttaatagattcttctggctctttagatgattcttctagtgccttagtttcagaaggttcttctaatggattggattcatattattctaatgatttggttttaaatgattctttatcttctagatcatctgtgattgaagactcttgttctattgactcaactactattgaagataaggccttagaaaaaagcttgtcttcaaatgaattggctgaaggcacaaagacatatacagacctgctaaaggatataaagagtgctaagaatgtgcttaacttaaaatacgactatatatacgatagcactattgacaaaagtcttaaaaaaggaatcgtattaacctttgatgaagactatgagcttacaatcaatggaaacggccatattatagatggaaatggaattgctggtggatttaactttgaaaatggtgaatttgtcataaataaccttagctttcaaaactgtaagatatcctctctaatcttaactagctgtgatttcactacaaattatgtcactttttcaaacaattatgacaagagctctggtgcatgcgtatatcttgacaactcttatttctacagcagtcatgataattttatagataactatgcgccttcaggatcagccatctatggcgaatgcagtgtaatagatgtttatgatggcttatttgagtctcaaaaaccgattgactggtcctttatctatggatgggatgagactgaaatatatatagaagactgtttgtttagaaacaccgtatccaattactcaactgcagtatatggcgattatataatagaaatctccaactctcattttactaatctattctccaaattcacaggaggagccattggagtaaggaatgctagccttaccgttgaaaaatctgaatttaacaatgtctcctctttaagaaatggcggagtcatttatgcagacatgaatgtggatgaggaaaaatccagcgaagagacaatcattaaggattctagctttgtaaattccaagtctgactttggaggagctgtattgcagcttggaggtaaattaaagatatacagatcaaattttacagagaatactgccaactactatggtggtgccatttatacttccaatgtcagcttttacaccagtaaaagcaaattttcaaataatgtagcaaatgaaatgaaaggctctgcaatctattttgacaatggagacttgaaaatcgaaaattctaatgtcttaagcaatccttcctgcgaaggagccatttatatttacgatagcttttataatataagtggcagtacgttttcaaacaatgatgtggcaatacattcattctttgaccgcacaagaactgtaaaaaattctaaaacaggtaaaagcaccactgtaaagtcctctctaaataataatacttggggcggcgatagaaataagttaaacaatgtggaatatccttattttgtatccaatcttggtcaagacattatattgaatccagttaaaattaatgccactatcaaggacaaatactttaatctggttgatttgggattggtgacacctgttaaggaccaaggagacagcggagcatgctgggcatttggaggagcagcggcccttgagtcagcaatcttaaaggcaactggagtaagcttagacatatctgaaaacaatatacagtctgcaggattaagatatagcctttatggaaagccttcccttaccgaaggaggctatgactataccgcccttgcatactacttaagctggctaggtcctaataatagctctatcgatgagtatgaccaattcggtaagatatcccctcaattgttctctgaagataattatcatatcttggatgtgattttcctagaccctgcaaatacaagctcaataaaggatggattaatcaaatatggggcattgtctgcctcagcaaatggtgcagattcagattccaatgactttttcaatgaaaagacctatgcccaatactgcaatgatgatgaggcttccgccaatcacatcataagcattgtgggatgggatgacaactattccaaaaacaatttcctcattacccctaagggaaatggggcatggattgtaaagaatagctggggatctgactggggaaagaatggatactattatatctcctactatgacgaaagcctaaggtcctgctatgcagtagcctatctattaaataatactcttcgctacaataagctttatcaatatgacttgactaattacgatgactttgatgacggcgattatgatggggttatctattccaataagttcacctcaaatggggatgacctgattgccgctgttggaacctactttgaatatgaggatgacgactatgtcatttcagtttatgtaaatggcaaaaaggcctatcagcaaaagggcacatctgcatttgtaggatacaataccattaaattgaataagtatatcgctgtaaataagggagaaacatttacagttgccatcagctcatctgccatgccttatgttgatgatactaggatccatcttcctaagggaagctcatttttaaccgttgacggcgaacagattgacttaagccaaagaggccaaatagcttgcattaaggtatatacctttaatgacacaaagataactagagaccaaagcacttattacggttcagataagaagctagctattgaatctgagcttgaaggtactacaatcagcctaacagattcaaattgtaagagcttaggctctgctaaggtcgtagatggagtggctcaattcgatttggtattaggccctggaacttatttctacacaagctcatatgctggagagaaaataataaatagctttaaagtcttcagcacaatcggaggagtttctaataagaacataggatataaggctacagcaagctttagcctatcctttaaagatgaaaatggagagattttaaacaatagtcaattcacttacacattggatggaaagtcaaagactttaaccacattggatgatggaacttataatatctcctttaagaatttggccattggaacacataagttgtctgtcaagaaccttataagcggccaggtttccaatgccacaatcaaggttgtctcaagattcagcggcgctaaagacattagcatgttctatttcgatggcacatgctataaggttagaataatgggtaatgatgctaaggcagttggaaagggacagacagtaactgtagttctcaataagaagacctacaagctaaagacagatgcaaacggatatatcagccttaagatacctaatacattaactccaaatggcgcaaaggccaaggtatactcaattaagatgacttatgctggtcaaagcctgtccaagaagataactgtaaagcaggtcttaaagaccaatagtctcactgtcaagaagaaagcaaagagcttttcaattaaagtcacacttaagggaaaaacagttcttaagtataaggtgctgaccattaagtttaagggaaagacctataaggtcaagaccaatgctaaaggaattgcaactttaacccttaagaaagctgttattaatggtcttaaaaagggaggaaagtacactttcactgtgacctatcttaaggacactattaaggctactgtgagtgttaaatag

SEQ ID NO: 16 - DNA, 507 bp, Methanobrevibacter ruminantium
  source 1..507: mol_type = genomic DNA
atgaataaaaaattgattgaatatttgattatagcaacagttattattttaatcctttatggttgctattctcttattgattatcaatccaacggatatcagtttcgtatggtgaatgctactgattcaatgaatatatcttgtccttcaagttctgcctattcagtcagtggagacacagtagaatttagaaatggattaaacagtttctataatatggacgttagcaagctaaactcttcagatggtaaagttaaaaatatattgaatcaatattctaagttccataagtccggtactttagatttaaaaaatgagacttgctatgtgctgacagtagaattggaagacgataaaggatttaattatcattccatgattatctctgtcgattcatttgataaggatagtttatcctttaataaggaagcaaccgtttatctatttgatggaaacaatagggaatttgttgtagatactgtatatggaagtcaggtggtaatatga

SEQ ID NO: 17 - DNA, 939 bp, Methanobrevibacter ruminantium
  source 1..939: mol_type = genomic DNA
atgagtccatatgaactgataaaggatgatggtgaagtggttaatcttggtggttctcctgatgagagtcaagattttgatgtttctttagaaaggctaaatgataaatctttagcagattcagatggcgatggaaagcatgacgtattcatcagctattcaactaaaaactcagatatagcaaatgagatatgctaccttcttgaaaagaacggtcttgaatgctggattgctccaagaaacatttcatctggcaaaaattatgttgatgagatagcagatggaatcaaatcaactaaaatagtcgttttagtattttcaaaatattcacaggaatccaaatatgtaaacaatgaagttatgatggcattcagctataataagcctattatttcatttaatattgatcaaacagagcctaatgacattatgggatattatttaaaggtggctcaatggctgccggcatatccaaatcctaaaagtcagtatgagacattggttactgacgctttaaaattatgcaatgaaaggccaagaactgtaattacaagcttagacggcttcattccagaagacatatccaagcaaaagaaaaattggatatcacttatattgctgtttactccaatctattgggcttcatttatttatatgggccttgtttcaaagaaaaaatcatggacattgttaggatttttatatgcgattccaacagtaatcggattgcttttgtatttccaggtatttaccagattattccttatttatccgatatttaggttatttaatttaatatttatattatgctggatattggccataattcatggattggttattagaaatgagtttttaaccagatattctgttttaggactgatgtcttttgataaggatctctttgagtatctttatggtatgtattataaaatgtaa

SEQ ID NO: 18 - DNA, 876 bp, Methanobrevibacter ruminantium
  source 1..876: mol_type = genomic DNA
atgagtcatgatgtttttatatgctatgatgaggaagataaagattgtgcagaggccatttgccgtatctttgaagagaataatattaagacttggattcgctcaagagacgtatcttcaaaggatgcagcccgcaatctaacagaggctataagaaattccaaatgttttgtattggtctattcaaagaatggaaagaacaccaattatattataaatgaaacagacatagcattttcaaaagaaattccaattatactctttaagcttgatgagacaagcattccaaaggatttggaatttattttaataagcaaaaagaagatagtggcatatcctcatagcaaaagacaattaaagactcttgtaaaagagacttcagatatattagatagaccaacagatgatattaagcttgattctaattcagtcaagacaattgaaaggtctaatcctaaaagaaaggaaaacaatataaagaaagctattggagcagcggctttaatagcagcagttttaattttaatttatttatttgtaatagtgcctacaggccagaacatcaccgatagcggtgtattctccatggatgtaacccatgttgaagtggatgaattggccaaaggcaataagtatacgatatatggcgaatcatataatttgccaagtgattctgatagatactttatgaaccttcaattctttgatgataaggataatgtggtttatgaggtaaattcaacagccgatgagtttaaatcaggcattatatggagtggtgatataaataaaggtgatattaagcatattgggtttaaattaactgatatggataataaaatactctcccaagaggattataatcttggattgtag

SEQ ID NO: 19 - DNA, 1221 bp, Methanobrevibacter ruminantium
  source 1..1221: mol_type = genomic DNA
atggtgaaaatgaaatttaagcgtagtttaatattggcagtgattttgataatcctattttcacttggaactgttgcagcaagtgaaaatatagttattgatgagtcttctgattccaatttagttatagaccatgctaaggataattatttattcaatggacctataaaagataattatttatctagcagttctattagtgataattatttatctaaaggtgttcttgatgattcttatttatcaagaagcgatttggatgattcttatttatctatggatgatggcaaaggctctatcgatttgacgaatcataatcaactatctaattcagatgataaacagcttaaaacttctaatttagaggatgaaaaacagcttgaaagtgtaaataaaggagataagcttcttaaagattcaaatgacaatgtcgatttgtttattaatatggatgtaaagacatcattgaccaacaagcaatataaccgtgcaggaagcgaagttccatggattataactgtttcctctctcaatggaaccagctataatacccaagttcgtgacgttttatctgaaaatttacagtatttatcacataatgctacaatgggaacattcgatccggaaaatggaatttggactgttggtgacttggaatcttctaaaaatgcaagcttgacaatattgacaagattgaaaagagatggtacatatataaacaaggcttatgctactaccgattcaaatgatgttaatctattgaataacttcctaatcatttccataaggaccggttcatcaaagatcacttctaacattacagagacaagtgatgaaagagagggaattcagcataatgttcattatgctagtatggttgatacggactttatatatagatatgaagaggactcttcagaagacgatggcggcaatgaagaaggccaatctgaaggaaattcccataccaagactagatctttaggaaataaattgaaattattcaatgctcagaatatagattatcattctctttccaaaaacatcggtggagcattaggttttggatataattcaaatggaggattccttaattcaaaggacatttatgaggctttatttgtttatgactatacaagaatccctattattgtatttgcagcctttttagttgttttagcatctatagttggctatgataaggttaaatcttcaaaataa

SEQ ID NO: 20 - DNA, 6015 bp, Methanobrevibacter ruminantium
  source 1..6015: mol_type = genomic DNA
atgaggattatgataaataaaaaattgttttttgttttcttattaatggttctagtgattggaaccatttctgcagttagtgcaaatgaatgcgctaatgacttaacgatggagataagtgatgataatatagctattgatagttcttctgctttagaaggggatgatttagctattgatagttcttcttcagatttaagtaatgaaaataatataaattctatgaatgatagtgtaattaattctaattctattaattctgattctattaattctgattctattaattctgattctattaaccctaatcctaatattgatgatgaaataaataaccataaagatagctttttaaaggctgtacaggcctctaaaaccggaacatttacagagcttcaaactaagataaacaaggcaagcaaaggctcaacaatctatctggataagaattacctctataatgatgactttaaaggcaaatatggaatagtgataaacaagtctatcacaatcgatggaaaaggccatgtcattgacggtttaaagaaatcaaatctgattttcatcaatgatgcttcaaacgttgtctttaagaacataatatttagaaagggcgacggggacgagaatggagctataaatcttattggctctgatcatatcgagtttaacaattgcagcttcaattataactatggtgataggggtgctgtatttttatccggcagcgattactcctcctttgtaaattgcaagtttaatgagaatattggggagaacggcggagctcttatattggctgatagtgattattctcgccttgtcaactgtatcttttttggaaatgaggcatctgacggaggagccgtatttataacttatagtgattattcttactttttcaactgtacttcagagggcaatagcgtagattatacaggaggggccttttatttggattattccgataattcctctttcattgattgcgtatttgacacttccagcgctaaggatggcggtgccttttatttaggcgattgccataattcctctttcattaactgtagctattggaataatcaagttgattattatggtgctgtttgttatttggacaattgctatgactcctctttcatatcttgtaatttcactggaaattctggttctaaccctgaattagatgaaacaccttccattggcggtggcgtattttatataagcgagtctcacggcttgtattttacccattgtaatttttccgaaaatgaggcaaaaaatgatggcggtgccatatatgcttcagattccgatgttcatattgattcctctgtatttgaggagaattgcgctttatgcggaggtgccctttatgctatgaactctgatattttcattgactcatccctttttgagagtagcgttggagataggggaggttcaatatttgcaaataagtctaatgtttattctaaaaactcctcttttattcaatactatgaaattgaagatgaatatgtctatattcctgcttctggagcatatcaccttatggaaggaaatattggcggagcaatatactctcttcagtctgtcttgaatatttcttctaataaattcaataacaattttggcttgacttcagggggagatatctattcccaatacagcatgatctatatagatgactgctcattttcaaattcattctccaatggatttggaggctcattaagcttcaacaacgactatgtccaaatcacagattccagctttgaaaactgcagctcaagggataacggcggaggtggaatctactctataaattccattttgaattgctctgattcagacttcaccaattgctattcatatttcggcggttcaatctgttccttaaacactgatctatccattaataacaataatttttacaaaagctctgctgaatattatggcggatccatttatttcctttatggaactttagacattaacggctctctcttttcaaattcatacggtcagtatggaggctccatttatataagaagtcctcagacaataaagaacattacaaataatcagtttctattttctcaaggcataagaggcccaaggatatatatcgaccaatattatggagaaatctccaatagcggcaatgtttataccgatgaatatgaagaaaagggattgttttcagattatggaatgggaatttcttttgaaagcaatgaaggtttggtcccattgattcactattacccttcaaacgagtcattgccttcattctatgaccctagaggtggtggagattcagaagatgattatgaagatgaggatgatgattcagatatagctgttaaagaccaaggcattggaggcaactgttgggcattttcaggaattgcaacccttgaggcatgccttgaaaaggtaaccggagaggaattcggcttttcagagggcaatgctaaaaaccttatggccatatcatccatttatggcttgaacatagacacaaacaatggaggatatgacacaatgttccttgcttatcttgcaagctggctaggtcctatctatgaggaatatgatacatataatccattatcctccctatccatagatcttccttcagtattccacattcttgacattgatttcttggctcctcgtaaaaacagcttggataatgatgagtacaaaagggcgataatgaataacggagccgtttcagtgaccttcgattgggtggaaaataaggtttccaacggattccattcagtttccattataggatgggatgatgattatgatgacattgactccttaggaaactatgcaaagggcgcctggatatttaaaaacagctggggctatgaatggggagatggcggtttcggatacctttcctataagcaaaagctttcagaggagatagctccatatatgcatgcatatacattttcatttaaggaaaatgacattggatatactgacatatatcaatatgacttttcaggattaagcgatttcctgattttaaattccacaaatgcctattataagaacaagttcatagcagaggacaatgaattcctatatgcattttccacatattttgataaggagaccgatttcacctattcagtttccataaatggcaatgtcattacaaaaacagaggatggcaaagacatattgacttctatccatcattctccggctggatatcataccattccattaggctataacctgaccttgaaggagggggatgagtttgagataatcataaaattgctgaatgacaatcaaaacaggattcctgtttgccaagctgatgaattgtacagaacttcactgccttcaaatgcatctttcatgagtttaaacggcaaggattggattgacttgagcaatttagcttcatccaatgagttctcttcacttggcatcaaggcaaacacttcacaagtagcttgcataaaggcattcacttccaattggagaatgaattcggattcctctatagtgaactctaagaatcatagcataatcacctcagaaggaacagagttaagccaatatgaaatatgccagcttaaggtaggctcatttacaagggcttcagccaatgaaactatcattatagccatgagcattccagaatggagaaattatcaggatgaatatgaaaattatatagaggttcatatcaatgatgaattctattatgtaagggtcaatgagggagttgcctatttggatatcagctttgataagattggccattatgactttaaggcccagttcaagtccaatatatactcatctgatattgtagagtttgattttgaagtagtaaaggattcaatctttgatgttgatgatttggatgcctcaaacccaggaactttcaaggaacttcaggatataattagaaatgctaagaacggttccataatcagtttggataaggattatgctttctctagtggtgatgagtctgttgttgatgattatatagagataaataaatctctaattattgatggaaaaggccatataattgatggttcttctgattcaggcatttttagactaagttcaggtgataatcttactttgagaaacattaagtttatgaatgcagataatggtgcaatagtttctaatggaaatttgacagtttctaattgttatttcattagtaattgtgcttctggttctagttctacttctacttccagttctgattctagttctactgcttgtggaggtgcaatttactgtgaaggcacttgttttatagtgaattctctatttgaatctaattctgcagatgccggtggtgctgtttactgtgaaggcacttgttttatagtgaattcttattttgattccaattatgcagatcttggtggtgctgtttgttgtgatggcagctgttatatagtgaattctctatttgattccaattttgcagtttatggaggtgcagcttccatagttggaaatgaatcatgtgaaattatagattcaaactttattgaaaatgaggccatctatggcggtgcaatatacttagaaagctattgttatcttttagattcaagtttcaattataattatgcaaacaatggaggcgccatttattctatagctgaccttgacattcataccactggctttaattacaatgaagcctataaggatggaggtgcaatctatcttgtaaacagcacatcctatatcaatgaaggaaatttcactgaaaacagtgctaaagagaggggcggtgcaatatgcgcacttgaattctcaaatctaactattagatgggcttatttcatggataactctgcttcaaagtatggaagtgcaatcttttcagtaaatgcccttaacattacagattctgaagtgactgtaagttctggtaaggtggaacttatctgctttgcttatgattatgcttcaaatggccaggcatatggagatttatactttgatgaaaatagcttttatatcagtggtgctcctgagatttactacttcagagaaaagatagctcataaattagccttggatcttgagttcaataatatagagcttatcagaggaggaggcgttgagatatccagggacttgaatgatgatggctgggaggataaaatcaataacaatatgcttgagatatgcagattggttgatgacgatgattatatgactgtccttagaatgaaggagatagaagtgattctaataaacaagaacaatagatctgacattcaaaagtttaagattccatttaatgtcaagcttaatggctatttccttaacacttcttcattgaagtatggctcttatatccttactggaaatctttctaaggatcttgcaagcaattgtattgtaaagaatggaactttgaaagttttaaggaaaactaccctctcttctctgtctactttcactaaagtttatggaaatagtaagaatcttgtagttactttaaaggacagtagtggaaaagctatagttggtgttaatattgctgttaaattgaatggaaaaacaattaaagcaaagactaattcaaagggtcagatttccatagccattagtcttaagccaaagacatatactgcatatatcagctttgcaggcaatgactattatgcaagcgcaagcaagaaggtaaaggtagttgttaaaaaggcaaaccctaaattgactgcctctaaaaagacctttaagttaaggaatgctaaaaagtatacagtcactcttaagaacaaccttggaaaggcattgaagaatgctaaggtcactattaaggtggctggaaagacttataccgctaagactaatgccaaaggtcaggtaacattcaatttgaaattggctaaaataggcaagttcaaggcagttgttagctttgcaggtaataagctttataatggcttgaagaaggcggttgttttaactgttaaaaagtaa

SEQ ID NO: 21 - DNA, 558 bp, Methanobrevibacter ruminantium
  source 1..558: mol_type = genomic DNA
atggaatatgagaatatactggacttgaagagctctgaagagtttagggagtggatgataaaaaaccattccagccaaagggaatgctgggtcaactgcaaaaggggaaaggccgataaggatgagttgtcctatgtcgatgcagcctatgtggcattgtcattcggatggatcgattccacctatgggctgatagatggaaagagaatgcaaagattctctccaaggagaaaaaacagcaattggtctcagcttaataaggaaagatgtcgatggcttataagaaatggccttatgacagatagcggatatgaaagccttcccgatttagaggaagattttattatagattcagatattttagatgaattgaagaaggataatgagacttggaataattttaagaactttccagacctttataaaagaataaggatagctaatattcaaaaggaaaaagatagggaagcatttgataaaaagttggctaattttattaaggacacaaaggacaataagatgaaaggaaactggaatgatgatggaaggcttatatga

SEQ ID NO: 22 - DNA, 255 bp, Methanobrevibacter ruminantium
  source 1..255: mol_type = genomic DNA
atggcaaatgagataattttaaatatagatggcaatgagcatcaaattaaatatgataatatggaagtagatcatgtttctataatagatcttgaaaaattgggacgttcattgattttagaattggaaatagatggaaaggtggataggaactcattggatgatgctatcaacagctttttagatacaatctatgatgatattaagtattttgcagtagagtatgcagatgataatgaaatagaattaatatga

SEQ ID NO: 23 - DNA, 468 bp, Methanobrevibacter ruminantium
  source 1..468: mol_type = genomic DNA
atgagaaaccctaaagattatattatgaagactgattatttgattattcttatggccttattgctgatttctatagtttcacctatagcagctgcagatagctttgattttgatattccagagggctatcatatagagaatgcaagcgatgatttcgtactattggagaatgaggactattatagcatttcaatttccattatggacaattccacagacaggaagactctgatggatatgcttgaaaggcacaggtgctatgactttagaaatggtgtcaattataccaaaggggatttttatatagaggagaagccttattatcaggagttccaaatgggaattttgtacttttgtgaaaatggtagagatcttgttgtgattgattataagggacctttaggtatggatttgaataatagtcctatagatggcattttggatagttttaagtgggtaagttattaa

SEQ ID NO: 24 - DNA, 759 bp, Methanobrevibacter ruminantium
  source 1..759: mol_type = genomic DNA
atgggacaagatggttttaaaaacgaagatttaatgttagaagctttaaataataaaaaatttatggatttgaacgataatttaaaacaaatgattttagatatgtatggtgaagaaatttctcaagattttattattaaggcttataaaaaaggtggagtaaataaaacagatttgactattgatattaattctcaaaattttaatgtcagtataaaaaaaggaactggaaatagtgtccatcaagaaaaattagaagagtttgtttcttttttaaaagaagaatatggtatttctaatgtattatctgatgatataaggttttttatttggggtgatggaactttagatggtactggtgaagtttcagatagattaagcgcttctgaatttagaaaacaattccctgaaaaaataagaaatattagagaatttttctatactgttaaaagagatttaatagaacgttttgtcattaaaggacctaaatctaaatctaggcctgattttatttattatggaacaccagataaaggtattattgttgaatctcaatccgttattgattggttatcggatgataaaaatgaaaaaagcagctcccctattcctataggcagattaacattccaagcatggaataggaatattaatggtggagataaatctgaaaataaaagaggggttattcaattaaaatggagttcagttggtaaggatttagttaagatttataaggagaaaaaagatgacaaatag

SEQ ID NO: 25 - DNA, 582 bp, Methanobrevibacter ruminantium
  source 1..582: mol_type = genomic DNA
atgacaaatagaggaactgcagaaggtacagaagaagaaatatcctttgtaaaattattaaacaaaaaagaggacttatcttattgggatgtattaaatttagatcataattgtcattttgcaatacatgttttatatcaaaaatttagtaaaataagtaataaaaaagtttatcctaaagcagatgtttatattgctaaaggtaatgttccttatagctatttagaagataatgatttctatctaagcgaagataatacagaagactttgatttggaacctataaaatacactggcatttcagtcaaacttcaaaattctagtagatatcaaataacaaaaatgggacctaatacatttaaagatatttttggttgttatgaattgggggctggagcttcaatatattgtagagatgtggatgatttagaaaaaaatcctcaagtcttaactggctggaatactaattttgaagactttataaagtattttaaatcttttgatgtagtttccagctcagatttagatatttcttcatataaaaaattaaaagtttttctaatcaaaagattgaggaaatga

SEQ ID NO: 26 - DNA, 1020 bp, Methanobrevibacter ruminantium
  source 1..1020: mol_type = genomic DNA
atggtttcaaaaaaaagagcaatgcaatacacattagaagattttaaagagaaaaatcttgatgaaactgaagaaaacgataaagatttcacattcattgatttattttcaggtattggtgggttcagattagcctttgagtcagtaggtggaaaatgtgtctttagttcagatattgacaaatgggccaatgaaacttattatatgaactttggagaatatcctcatggagatataagtgagattcctgcaaatcaaatacctgatcatgacattttatgtgcaggatttccatgccagccatttagcataggaggatatagaaaagggttttgtgataccagagggactttattttttgaaattgaaagaatacttaaagctaaaaaaccccaaatgttcctactggaaaacgttaaaggcttaacaaaccatgacaagggaaaaacatttaaagttatcaaggaatccttatggaatttaggatattcaatattttaccaagttttaaattcaaaagactatggagtccctcaaaacagggaaagaatattcatagttgggtttaaagacaatgtaaatacattcaagttcccattaccttttgaaaataaagccaatattaatgatttattggaaaaaaatgttaaagatcatgagttaagtggaattgcttcagatcatctaaaaaagcattatgaagaattcttaaaaaataaaaaagttaataaaaattatcccattttcgctacagaaattaggccttcaagatgttctattaggaatgatggcaattctccttgtttaactgctaaaatgggtactggtggcaataatgtcccggtattagtaaatgaaaataggaaattaactgttcgtgagtgtttaagacttcaaggattcccagagaattataaaattaaagataattattctcaaagctataagcagattggaaacagtgtaactgttccagttgttactttgatagctaaggaaatgataaaatatttaaattaa

SEQ ID NO: 27 - DNA, 1029 bp, Methanobrevibacter ruminantium
  source 1..1029: mol_type = genomic DNA
atggaaaaaccaacagttattgatctattctgtggaatcggaggatttagtaaaggatttgaaatggcaggtttcgatgtgttatttggaatagatatttgggatattgcaatagaaacattccaacataatcataaaaacacagagggaatattagcagatttaacagaattagatgatgatttttttaaacaatacacaaataaagttgatgttatcatagcagggccaccttgccaaggattttcaatgtgtggaaagagagaagttggagataaaagaaatgaactgttccaagaggtagtgagagcagttaaaattattaatcctaaaattgttattattgaaaatgtagtaggccttctttctatggaaaatgttgatggtgaagatgttaaaggacttatagtctctgaattcgaaaaattaggctatgaaacaaactataaaatactagatgcatcagaacatggagttcctcaaaaaagaaaaagagtaattttcattggttctagaattggagatgttgaattcccaaaaccaaaagataaaaaagtttctgttatggaagcattaggcaacattccagacacaaattttgaatattatgatgagccaacaaatagctttcaagagcttatggctgatggagaaaagaaaatctataaccatgacgctatgaaacataatgaaaaagtgcttaaaagaattgaaaacgttcctcaaggaggtaattggcaagatattcctccagaaatctatgatgttggtggaacacatagtaataattacagacgtttagatccaaataaaccgtctataactatcaaacatgctattaaatctatgataattcacccaacattcaatagagtaattacagcaagagaagcagctagattacaatcaatacctgatagttttataattaaaggaaataaaactgcacaacatcaacaactagctaacgctgttcctccattattaggttatgagattggaaagcaaattataaaaaagttaaattaa

SEQ ID NO: 28 - DNA, 174 bp, Methanobrevibacter ruminantium
  source 1..174: mol_type = genomic DNA
atgaaaagaatacaagtaaattttacaaaagaacagtatgaactattacaaaaacttaaaggagaattaggaaacagtgattcagaagttataaaaaatataactatggcttggctaagcgaaaaatcattaatatcaacaaccctaaaagaaaaaatatttaacaattattaa

SEQ ID NO: 29 - DNA, 753 bp, Methanobrevibacter ruminantium
  source 1..753: mol_type = genomic DNA
ttgaatgaaatcataaagaccacattgattctacttttaaagcaagagataagaaaagaacaaagacggggcataaagaacatacttttatacttccgtgatgtggatacgctggatacaaattccataaattggaaaatccgctatgataggaataatcagaattatcagatgattgtcggcatttgctatcttacacttaaaggactcctccagtctgatagtaagggtgaaaagaagcttatgagctttttggataatcaaaggatgaataggctatatgagaaattcattttaaattattataagagagagcatcctgacatcaaggcttcctctcctaagatagaatggcaattggacgatgattttggtgaaatgcttcctcgtatgcagacagatatcactttagagcataaaaataagatattgattattgatgccaagtattattcaagcaccactcagacctattatgataaaaagaccattcattcacacaatctctatcagatttttacctatgtgaaaaataaggaagttgaagtggctaatgaagcaaatggagtggaacttgacaataaggtttctggaatgttactttatgcaagaacaagagaaaaaatatatccagacaatgattatttaatgagtggaaataggataagcgttaaaaccctagatttaaaccaggattttactttaattaagaaacaattagacagcattatagaggtttatttgaaggcttga

SEQ ID NO: 30 - DNA, 471 bp, Methanobrevibacter ruminantium
  source 1..471: mol_type = genomic DNA
atgaataataaaaagatatttgtggccggattagccatattggctattgttctaatgggatcagttgctgcagttgatatgggcattcttagcggaagcccaaccaaattcagcattgacggcatcgacttcaatattccacagggatatgcagttactgacaactatacaagagtgaatgatacagacactgctggaagctcaagctatagggttacccaagcaacctttgaaaacaatgtacatgatgccatttcagttcttgtagctgattatgatcatgacatgagtgaggatatcatatctcaaagaggcaataagacaactataaatggtgtggacggatatatgcaaacccaaggggattatactacattcaattatcttgttgatgggaatcttgtgacaatcactcttacaaatgcagatttgcttgaggatattattgttggtaatcagacagatgactga

SEQ ID NO: 31 - DNA, 4416 bp, Methanobrevibacter ruminantium
  source 1..4416: mol_type = genomic DNA
atgtccgaagatattggaatcaatgacaataatggtgctttgatagcagacgttaactttgctgatgacaataataatgctttaaaggctgaatccaactctgctagtcagaatgacgcttcaatagatgaatctgctaatcccactcaagatcttgtagatacagataatggattaaaccaatccatcactaaaagcccactaaaatccaatactggcctcactgttacaaaaacaattgataacagctctaaccatatgcctgtagacggattttacgacattggagacactatctactataccatcaacataaccaacaatctagaagaaagcataggcaatatcagtgttgttgaaaacttccctgatggattgatatgggaatatatttggtttgctgatgacaatccaaattggaaaaatgagagcaatgtattcaattatacaaaagcattagagcctgaacatagcatccttctcaagatacgtatgacaggaaataaaacaggcacttacattaacacaatcaatgtaagctccaacctaacaagctctcaagagttcttatccgaagaagtgactgtttatgctccaaatttaacaattacaaaagtggccaatgatccaatcgttaccattggagaaatagcaaactttacaatcaacgttaccaataacggaaataggccattaagtaatttgcgtatctatgaagatcctgaagaatcattattcctaaatgagttcactaacataagtggaaattgggactcttttgcaaatcgtggtggagattacggttttagcttggaccagctggatataggtgaatctgctgctataatagtatcttttttaacaacagaaattggaaatttcaccaataatgtctatagcaactatccgaatcctcaagtagaggcaaatgccactgtcacagttgttccaagaattgaaaagactgtcaatgccactgaaattgatatgggagagtctgttgaatacaatgtttacatcgacatgacaggagccaataaattaggcattgatgactttaaaatcaaggtcaccgacattttaaacgaatacttcgatttggataaagatagcatctcctcaaattggaaatataatagagatgaaaaggcctttgaatatatgctaagcgacattccagagtcatttgaattcaattttgctgtatatatcactgaaagaggaaattacaccaacacagtttcccttaaaataggtgacctgcctgaagtcagtgctgagtctgatgtcactcatgtcagaataagtgatgcaaatatcgctgaaactgccctagattcaacagtaaatcttcaagaacaagcggttttcattgttaatatcaccaatactggagataagacatttaatccttatgaacttgttgtaaacgacgactatgatgaagatgctctaacttacctcagtcatgaagatataacaggcaaatggatagagaatattgaaactgattccctttcatttacattgaattcaacattagaggtaggagaatctgcaagctttaagctttacttcaatacaagcaaggtaggatcttattccaattatgtctatattaacattaatgataaagaggatgattcaatagtcattgtattagctctcatgaacaaatcagtcaattcaagagagattgatgcaggagactctgttgagtataatatcttcattaatttaagcggatatcaaggccctgtaaaggttgaagaccttttcaatgatacatttgcattggataaggacactatctcagagaattggcattatgatgaaacagaaaatgctttcattttcgatcttagcgacaatccagacaccttaaaccttagcttcaatgttacaatcaatgaaaaaggcaattacactaaccttgctaagcttatattaagttcagattatcctgaaatcacagctgaagctccagaggtctgtgtctacaagccggatatgacagtgacaaaaacagtaaacgacactgaaatatatatcggagatactgtaaaatacactgtcactatagataacactggagatagaactttaacaaacattattgtcaaagacgaactggaccctgcatttatactggatgaatcctctatcactgaaggctggacttacaacaaggacaattcttcattcacttacaacaataacataagcgttggagaaagcgccatcttagaatttattgttgagataagcaaagaaggcaaatacacaaatattgtaaatgtctcaagtccaggagttgctaataaagaagctaggtctgaagaaaccgttgctaaaactattccgaccaatatctgcctagaaaacgtgactgccgatccagacagttttgtgagaataataatcaacataactgcagataaaggcttaattaatggaacagtaaacattactttccctgatgggacaaatgaagctgtagaaatcacaaacggaattggagaaacagtctggtatgttcctgataattatgcttcaggaaactacagtgtctttgcatattatgaaggcaatggaacttatttagaatctgaaggccaaggaaatattgaagttattccatattacactgaaataagcctatctaatgtgactgcttatccagacagtgatgtggaaatagaaatcaacataactgcaggagatgctaagcttataaatggaactgtaactgtaagtttcccagacggcacaaacaaaactgcagaaataatcaatggtacaggaaatgtaaattggactgtaccagatgattataagggcaattattccataagcgcaagttatcctggaggtggaaactatctggattcaaatgccacagccaatattgaagtcatagcaaagatcagtactcaaatcacagcagacattcctaatgcctatccgggagaggagatagatatttctgtaaatgtcacagcagataatgatgtaccattcaatggaaatataacagtgaatctacctgatggctctaaagaaactgtagagattaaagacggaaaaggaaacatagcttggactgttccagacaatttggatgtaggagattataatctcaccctcactttcgatggagataataattacctgccttcaaatgcaacaagcaccctaacagttgaaaagataaaattactcatcattatagataacattactgctcatccaaaagaggatgtgactatttctgttaatgttgctatagatgatggtagtgagtctgataattcaactaaaggttctttatctgataacaatctaaataagggtgctttatctgataacaatctaaataagggtgttttatccaataatgataataaggctttattaaaggcttatatcagttcagctaaaggcattctatccagcaaccatcttaatgatggagataatttcaacggctatgtcaatataaccttaccagacaattccaccgttgaagttcaagtcaaggatggaaaagctgctctcaattggactgtaccagagggatacgaaggtgaatatccaataaaagtcactttcaacggcaatggaaaatatctatctgccagcgagacaggatacattacaatcgaaaagatcccaacttcaatcgaccttgaaaacattggaacaaagccaaacagagaaatcataattccaatcacaataaaaactgatgatgacgttccattcaatggaaaagtaagtgttgaactgcctgatggcacaattcaaacagcagaaatcacagagggcattggaaacacaacatggactgttccagatgattataatggagaatataattatacagtaagatttgaaggagacgaaacctacctcccatcaaacaatactgctataattaaggttgattccaagatcccagttgaaataattgttggaaacattacagcaaaaccaaaagataaggtgacaattcctattgaagtaatcactgcagaagaatccttatttaatggaaatgtaactgtaagattgccagacggaactgaagtcactgcccaaatcactaatggtgaaggcagtgtggaatggacagtcccagaggattataatggaacttattccgttagcgtaagattcgatggagatgatacattcctagaggctgatggaactggatttattactgtaactccagagactccggataatccagtgcctccaataagtccagtaagtccagataatccagtagctccagcaaaacattcagctaataagccgatgccaatggataaaacagctccaggtaatcctataatggcattgttaatagtgctttcaagtttaatttttgtaagaagaagtagaaaataa

SEQ ID NO: 32 - DNA, 978 bp, Methanobrevibacter ruminantium
  source 1..978: mol_type = genomic DNA
atggactttaataatttcaaatatcttgatgaattgattcatagtggtgcaaaggaaataaatctagactcagacataatcctagaggacaaagaagagcaaaaatattcagatggaattaaactgaacatagacaatctagtcatcaatggaaatggccatatcattaacgccaaagaaaaaacaagaatattctattccacagcccaaaacatcacaataaaaaacattagattaaaaaatggaaaaacaaatacaataggaggagccatatacaacctaaagggcaaaataaaaatcatagaagccacaataaaagaaaaccaatcaaaatatggcggatccatatacaatgacgaaggagaaatggaaataataaagtccacattcacaaaaaacaatgccaaatcaaatggaggggcaatccacaactataaaggcaagatgagcatagaggaatcaataataaatgaaaacaccgcaaagcaaggaggagcaatccacaactatagagccattctaagcatagaaaacaccacattaagaaaaaacgatgcaaaagactttggtggagccatattcaacgatggcaatgagttaaaaatcaccgaaagcacaatagaagaaaacacatcaagccaaggaggggcaatatacaataatattggagaaataatcataaaaaactccacaatcacaaaaaacatagcaaaaataggtggagcaatccacagctggaacaaattaagcataatatcctccacactcaataaaaacaaatcatatgagtatggcggcgcaatacataatttcgatggagaaatattcatcaaagactccataatcaccgaaaacatatcaaacaaaggtggaggaatattctcaaacaataaaaaatacaaaattacgacttccaccatcgaaaacaatgaatctgacaatatccatgaaatagactcatttttagacatggattga

SEQ ID NO: 33 - DNA, 1098 bp, Methanobrevibacter ruminantium
  source 1..1098: mol_type = genomic DNA
atgagcaaaagttttagagaccttgaattattgatagaaaattgcgacgatgagatagttttggattcagacattgttttaggagatggtgaaggccctatttacttagaaggcattaatttggatagtgatgtaattattgatgggaatggacattcaattgatgcatgtgggaaagtgagaatattttattcttcaggagaacttacaattaaaaacattagcttattgaatggatactctgatgaaagcggaggtgccatagtggtagatgggggaaagatggacataattgattctatcatctctggaaactattctgctgatgatggaggggctatacacatagaggaaggtgaattggcccttataaactccacagttaaggagaataaagcaaaggaattcggtggagcaatcaataattgggacagcttgaagattgtaaactgtgaaataagctcaaatgaggcacgttttggtggagcaatccttaataatgatggcaatttagagataagcgattctctttttaaagacaacaaggcagataagggaggagttatctataatcaagatggtgacttttccgttgaaaaaacactctttgagaaaaacaaggcatctgctgatggcggagtattctataatgaaaattgtgatataagcgttattgaatccaaattaaatgacaatcaggcagataaaggtggagttatctataataatggtgtctttatcataaaggactgtgaacttataaataatagggcaaatgatggaggatctattgtcaattatgaggcagagcttaatgtaatgggttccagtcttagtggaaatctttctaattatggcggggccatatacacttatgatggtgagatgagcattgacgagtctagatttgatgataatagggcagaatgtggtggagctatctatagcgaaaagtgcatctgggatgtttctaattcagagtttaattcaaataaggctaaaaactctggcggtgctatattattgaagaaatctaaatatgaagttgataatgttagttttagggataatgagcctgatgatgtttcaaacttttag

SEQ ID NO: 34 - DNA, 276 bp, Methanobrevibacter ruminantium
  source 1..276: mol_type = genomic DNA
atggatgacctaattaccactgcaggaatgtatggagagccagtaagctcaagaaaaggaaactatatagtggaaggtctctttggaaagcctatttattatatagacggagatatagtaagagaaaataatccgtttggaaaacccgtctatagaatagaaggaaactatataaaagaaggaatgtatggaaagcctaaatactatattgatggtgacttgattagggaaaataatcagtttggaaaagtagtaggccgaaaaagaaaattttga

SEQ ID NO: 35 - DNA, 273 bp, Methanobrevibacter ruminantium
  source 1..273: mol_type = genomic DNA
atgaaatactgttttaaatgcggagctaaattgatagaagagaaccaaaagttctgcatagaatgcggttccaatctggaaaagcgtaaagaagagcacaataaggatttaaaagagtcccataagaaatacaatccaaaaaagggcgaatcctataatgattatctaaatagaatcgactcaccaataaaagacaaaatagcaacagaagatgagataataaaagaaagcattgcctataaagaatacaatccgctaaaaaaaagagtctga

SEQ ID NO: 36 - DNA, 1815 bp, Methanobrevibacter ruminantium
  source 1..1815: mol_type = genomic DNA
atggattttagagaggaattaaataaaatattaaaatctgatgatgaagaaaataataatttaaaatcaactgaaaacaaaataaaagacaaaaaagaagacaacaacttaaaaccaatcgataacaaaataaaagacaaaaaagaagacaacaacttaaaaccaatcgataacaaaatcccaaatgaaaataaagaacctaaagagaaaaaaactccacagaaaactgatgaagaacgaatgcaaaacagacctaaagaaaccatagaccatctaaaaagatttaaagaactaaacaccacaactgacagcatatttaatataagtccataccaagtcctaatcatcctaaaagatggaacaaacatcaccgattggaaagagatagaagacaaaaaggacattctctatatcagtgaagacctgtctggagagagctatatatcaaacaaatatagagacctggaaggaatgcgccttatcatagcccaagggattacaagcaaagtccaatttatcgaatcaatgtttgcagactgcaagtccctgattgacgtaatcggacttgaaacatgggacacttccaatctattaagcttggagaatatgtttggaggatgctccagcttgacaagctgcgacggtctaaggtatctggatgtctctaacgtcaatgacatgaccgccctattcaatgactgttaccgcctaaatgacatagattcactaaaggaatggaacacatccaatcttacaaagatgtggagcatgtttgcaggctgcaaatcattaaaggaccttagaccaataagcaattggaacacaagcaatgttacaaacatgaccagtctctttacagaatgcgaatcattgaatgatataaatggcatcagatcatgggacagctctaatctaaaagatatgggaagtctcctttggggatgcaaatccttaactgacatttcagccttaagcaattggaacacaagcaatgttagaaaaatggggcgcatgttttggaactgcgaatccctaactgacatcagcccattaaaggattggaacgtctcaaatgttgaagacatggtctatatgtttgtaaactgcaaatccctaaaggacctcactccgctatctaactggaagccttccaaagtcataataatgagaagcatgtttgacggatgctcctctatagaaagcctgaatgggcttgaaaactggaatctggaaaatgtcacaactgtagagaggatgtttgacagatgcaagtccttaagtgacgtttctgccttaaagtcatggaatctctcaaatgatgtaatcgccggaggaatcttcaatgaatgtccgaatgtgaaggaaaatccccttaaaaaagaaataaaagacaaaaataagccattgcaccatattgacctaaatatcaagtttctagacatctatggaacaggatggtgcctggtcaagctgggagacatctacagcagggcatcatatatcacagatgtgccctatgattgccttagctcaatagtaaatgcaataaagaatgatgaaaacttccatgttgacttcaatggagagggatggacctttgatgttgaagcagacaatgaacagtgctattttaatttccatggaggagaaaagcatgcatttgacacaatgaacaagtatgaccttgcaattgtaatatatagaaacataagggacaacctttcatcttggaagggatggacacatagggacttaagtccattgcttaatgagctatgctccctgattaatgagaatgaagcagatgaaaattaa

SEQ ID NO: 37 - DNA, 1344 bp, Methanobrevibacter ruminantium
  source 1..1344: mol_type = genomic DNA
atggaattactcgatagattaataccaaaatacaaagatatcaattggatgaaaagaattgatataataagaaaaacagatgaccaagcccttttagaggagattgcccgaaaggaagaagagggaatcgttcgaaaatatgccgtaaaaaagatcaatgaccaaagcgtcctaatcgacattgcctacaacgatccccattgggaaagctccagtgaggctgtaaagaaaatcgacaatcaagacgtcttaatcgatatagcatatagcaagcttaaggccagccctagaagcaaggcagcagaaagaatcaaagaccaaaatgtcctaatcgaccttgctcaaaatgacaaggaatatcaagttcgccgtgcagctgttaaaggaattgatgaccctttcgttttaaaagaactggccttaaacgacccggacagttctgttcaaatggaagctgcaaaaaaaataaatgatggtgaagccctagcagagattgccctaaaagaccgtagcgagtttaaacgattggaagccaccagacatattgatgatgagaagatcctatcccaaatcgtcctaaatgacccagatttctatgtcagactggaagcatccaaaaagatcacagatgaaaaaaccctagcagagatgggaaagaatgatttttattggcagattcgttcaaatgcccttaataaaatcaccgatgaaaaggtattggcatatatggcatgcaatgaccctaatccaagcacacgttacgaagcagtgaaaaaaataaatgataaagctatcttagtagatatcgccctcaatgcattcgattggaaagtcaggttatgcgcctgcagaagaatagatgatgaagaagttatgacaaaaatagtcaaaaaagacacatgttggagaataagaaggaatgcagtgggcaaaataactaatgaaacatttttagaagaaattgcctttaatgaacctgcctggagagtcagactggaatcaataaagaacattgaagatgaatctgcattgatttatattgctttaaacgattcaaactggcatgtcagaaggcaggcattaagcaaaataaaagataaaagtattttagaagacatagctcaaaacgacccaatatttgagcttagaaaacttgcagtaagaatgataaatgatgagtcagttctaagaaaaatagctaaaaatgacccagaatggaaaatcagaagacttgcaattagaaacatagaaaacacagatattttaaaagatattgcaatgaatgattccaatattgatgttcgtttagctgccagtgataaaattactgataaaagtgattaa

SEQ ID NO: 38 - DNA, 1917 bp, Methanobrevibacter ruminantium
  source 1..1917: mol_type = genomic DNA
atgacagctcctgatagtaattacgaaacaatggcagaaatgaccataagaaactccattatagaaaataacagtgcaaggaatggaggggcgatcctcaatgatggaaatctttttattgaaaagacgacttttaagaataatcttgcatttactgccggagcaataagcaatggaggatatgtttccttaaaggatgtttcaatggaaaataacattgcagttacaggggctgccttcatcaatggaggagatgcgaagatagaagacagctttataataaaaaacattgccataggtgaaaaaagaggaatgaacggcgaacatgatgtcggcggagcagtcggtaattcagataatcttttgctgaaaaacacttccttcattaataactcatcaccttttggaagtgcaatatacaatttaggcattgatattccaaaattaaaatatttatgtaaaataaaaatagaagactgcagatttgaaaacaatagctcccatataagcggtgagattcataatgagataggtgaaatatcaatagatgattccaaattcaaaaacgaaactgcaaaaagaggatcagtcatatacaatgacagttatctgacaatcacatcctgtgattttaaagacttaaaaaagatagttcataatttcaatctcatgacaatccacagctctaatttcgagtcaaatcaatcagacagcgcagttattgaaaatgatggggaaattggaatcttaagcattgaaaaaggaaaaatcgccaataatatcagcgattataccactgtctataatcatggaaaggattgcaacattacaggaactatttttgaaaacaatcactctaaaaaagaaaattgccataatatatgcaataggtccaatatggtcttaaaagaaataatcctaaaggataagactgtcagcatttttaatgagggaatcctaactgccgagaaaaaatataaaaactttattttttccgtaggcaaggttttttatcttggaatggaaaatgagtttaattttagctatttggatgagctgattcattctaatatatccgatacaatttcttttgatgaggacattagcttgcttagcgatgaattcgatttttatgaagggggaatcgaacttgacagggacaatatggtgattgatggaaagggcaagacaatcgatgcatcaggcaggtcaaggatatttttagttacaggaaacaatatcactcttaagaacataatatttaaaaatggacacgcttttgacaattatttcatgtcaaacaatgaagggggagcaataaaggtttataaaggccttgatttgaaaatagaaaactgcaaatttatcgataatatttccgaaagcaagggaggagccataaataataaaggacatcttacaataagcaatggattatttgaatccaacaaatcaaatgaagggggagcaatatacaatcatcagaaattatccataatagatacttgctttaagggcaatgaaggccatattggaggggcaatatataataaagaagatttagagattgtctcaactaaatttttaaaaaacattgtcaaagaatcattatttaaggccaggtttattccaatcctccaattagaagatgaatcctttggaggggcaatttttaataaaaaaagaatggtgataaagcaatcatcatttaagaaaaatatgggattggatgatactgatggcgcatggggcggtgcaattcgaaccattggcgatgaagaggttacaataattcagacagagttcattggcaattatttaaaggacagcaattttggaggagcaatatcttcctataaaactccaaatctgattgattgcactttctcggacaattatcctaatgatttaaattag

SEQ ID NO: 39 - DNA, 1350 bp, Methanobrevibacter ruminantium
  source 1..1350: mol_type = genomic DNA
atgggaatggtattgaaaatcaatgtaaaaatcggagattccgttaaaaaaggtgatgtagtctgtattttagaggctatgaaaatggaaagtgagatttttgcagataaaagtggtgtagttgaaaatatacttgtaaatcctggagatattgtaaatcaaaacgatttgataatgataataggggattctatagatagagatgagaataaatcaaacaaagaaaacaagcccaaaccaaacaaagaagaccctaaagataggaaaaatgaattttccaaatccaagaatgataaaaagataaacagtccaaatgaaatgcttgataagctaaaaaataatataaaagtggataaaattctttttgttgacggagcaaacatttccattagccccatagccgaagctatctttaataaaaaagtcaaaggcattaaagcttactctgcaggtttatctgcaatcagtggaaataaagccgttccaaatgcaataaaagtatgcgaaaatcatgatattgacctatctagccactgcacagcaaatattgaagattatgatttagatgattctacattaattttaagttctacaacctatatcagaaatatcttaaaatattattatcatgtttataaagttgtaaccattaatgaatttgcaggattttctaatttagatattcaagacccgttttggtctgatttggatgcctttgaaacttgctttagcaagatcaatgatgcaattgatgaaatttttggactaaatagtttagaaaaggacaatatggcctttaactgcgaaatagaagaaaataagaacatacaatccaataaagaagaaaacaagaacacaaccataacctccaataaagaagaaaacaagaacacaaccataacctccaataaagaagaaaacaagaacacaaccataaccgccaataaagaagaaaagaatacacaatccaataaagaatatctaaatgaaaaatcctccaaaataaattctttcaaatatttagatgatttaatacatagcaataaaaagaacatcactttagattcagatattattcatatggaaggagacagcccaatcattctagatgtggatgatactctaattgatggcaggggccatgccatagacgcaaaaggaaaatgcggaatctttaacatcacagggaaaaacatcaccatcaaaaatattgttttaaaaaacggatttgtcgagtctgatggagtcatttgcaataagggcaaagttacgctggaaaatatatcagtgcaaaacaataggggctctaaatatgagggcaatgcaatagtcaataaaaaaatatcctga

SEQ ID NO: 40 - DNA, 1236 bp, Methanobrevibacter ruminantium
  source 1..1236: mol_type = genomic DNA
atgccaagcaaaataatcaaacgtgaagcttacattcgtgatttaaaagattatgttaacactgattttgttaaagtatatataggaattagaaggtccggcaaaactagtttaatgcataatatcatagacgaacttaaaagagatggcgtaaatgatgaaaatataatattcatgtcctttgaatcaagagaatatatccacatcaacaacagcgagcaattagatgaactcgtctataagaaagttgaaaatcttgaaggcaaaatatatctattttttgacgaaatccagcaagtaaagggatgggaaaaatccattaatagctatagggtttccattgacagtgacatatacattacagggtctaattcaaaattattgtctggtgaactggcaacactattgactggaagatatctcacaatccatgtttatccattctcatttaaagagtttttacaatataaaaatgaaattgagggtgttgaaataactaagtattcaattgatgaattatatgaggaatacttcaactttggaggcatgcctggtattctctcattaggcagtgatgagtttaaaagattggctctgaaagacatttataattcaatattatttgaagatgtggtttcacgatttaatattagcaatattgacctactacaacgtttctctcgctatatgattagtagcactggagaaatattctcatctaaaagcataaaaaactatttaaaaagcaatgatatctatacttcagaagacacattgctcaaatataatgaatacttaaaacaatccttcttcatttcaaaatgcaaatgtttccatctaaaaggaaaaaaagaaatgaaaatccttggaaaatattatttaaccgatcatggctttcatcatgcattaatcgaagataatatattgaaagtaactaaaatattagaaaacattgtttatgtagaactattaagaagaggatacaaagtaaatgttggcagaaatgaggataaaacagaagtagattttgtatgtgaaaaatctggcaaatataaatatattcaagtctcctatagattgacaagcgagcaaactctaaatcgtgaaattaatccattattaagaatacctgataaatacgagtcaatattgataacaacagaaaatcatgatttttcaaaagacggagtaaggcatctaaacattgttgattttttatgtggtgatgatgtataa

SEQ ID NO: 41 - DNA, 3135 bp, Methanobrevibacter ruminantium
  source 1..3135: mol_type = genomic DNA
gtgtctgaaaaatatacagttgcagaactaaaatacattttaaaggaaaacggcttaaaggtttcaggaagaaagccagatcttgttgaaagggttttgcctatcttaaatgctgaagcaagtgaagaggccgttgaagaagttaaagaagaagttaaagaagaaactgttgaagcagaaattgtagaagctgaagaaaaagctccagtggatttgactttcccagatactgaggaagcattaagctccatacttgctctgtatggactaagctatgacgatttatcaattaaagatatagaatttgccgatggtaaaatttgcataaacggtgaagctttcattcaaaacggtttaagcatgtcagattctaccatgtcaataataaatgcagatccaactcttaatctgacaatgaatattccagaagtcgcctatagtgactttgaaagcactatctttagatttaaagaccttgatttaaatcttattcctactgatgatagtcttgagtttaaagcggctttgaaaggcttggacataatgactgatttgaataatataatcctaaagggccttgatttcgcattcaagtctttcccagataggggtgtagaaataggtattgatatagacgatttcatttatcctaatttttataacacaagctttaactttgaaaaccttgatttcaatatggcaataggagtggatggacaaagcattgccatatcagttaatttgcctgcattagacctactaaacaaagactatagggtaaaattatctgatttaagtctaaatctagtgctctctgatttgcaattatcagaccttgacttatccatagcaatatcagatttccattacacaaactttgatgatgttgtcatttatatggaggacataggtgtatcacttgaacatattccagatacaaacagcttcaatgtccttattggcttgagcgctatggatgcagttggtttaaattcatttgatgccttgttcccaatgatggaaatcactggagtaaactttaactctaaggattcagactcactaattaactttacaggtcttatatctcctatagatcttactcaaattgatttattagagcttggcgcccttttaggttcaggatttgaccttgacgcctacactagaaatatggcatattatccagacattgcaagtgaaggagcatcagatttaggtattccaggattggatttaggtgccatagttgcaaactgtgactattcatgtttaggcgcaatcgagcttaatctaactggactccttgattcagcagatattgatttatctgatttaggcattgacttgtctgattatgatatttcttcaatcaaattgtctgaccttatcggtgctgtaggagattctgagtttgttatgtctgccattccagctgtcttaaacatattctcacttgacttaactgacgttgacgtctctggattgatagctgactttgacgaagagaactttgatatctcttctttacttgctagccttaatttatcaagcacagatattgctgctattttagatatcttagataaatcagatattgatttaggagccatatttgcaggctgtgatatttcatgcttagatgcaattacccttgacttgactggattcattgattcattaggcattgatttgtctgcatttattgatttatctgaatttgacttgtctgcagttagcttaactgatattattgccatattaaacagttttgaatttgatatgtctaccatttcagctctcttaaagatattcggccttgacataggagatcttgacttggaaggattgatagcaagctttgacactgaaaactttgatctctctactttgcttgcaagccttaacttatctgacttggatattgatgctattttagctatcttcaataatccagacttcgattgggctggcatatttgaaaacagtgacttgtcatgcttagatgctattacccttgacttgaccggtcttctagattcagcagagattgacttatctgccttaggcattgacttatctgattatgacctatcttcaatcaaattatctgagcttattggcgtatttggaaatcttgactttgacatgtctgatatgatatctggcattgacttcgaaagcattgactttgagaatattgacttggaaggattgatagctgactttgacgctgagaactttgacatatccaccttattggaaagccttaacctatccagtacagacttatctgccattttcgacatgttcatcaattcagatgtcgatttaggcaaggtatttgaaggctgtgactattcatgcttagatgctattgtgcttaatttaagcggacttcttgattcaataggcattgacttggctgatttaggcattgacttatctgattatgacctttctgcaatcaaactctctgagcttatcggaatcttaaatggattcgatttagatatgaacactttatctgctctcttgaagatatttggaattgacttagaagagcttgacttgtctggtcttatagctatctttgacggcgacaactttgatatgactgcattgttatccagtcttaatttaggaggtgtggatatttccgctattgtagagctatttgataatttaggctttgatttcgatggcatgtttgaaaacttggatatttcatgcttcgatgcaatcacccttgacttgactggactcattgattcaacaggcattgaccttgctgctttcggcatagatttgtctgcctatgacttatctgcaatcaagctgtctgatcttattggtgttgtatgcagttctgagtttatcatgtctgcctctggtgctgtcatgaagctattcaatataaatgtggatgaccttgactttgatggattgattgccagctttgacgctgagaactttgacatatctcctttattagaaagcattgagctatctggatttgacatttcagagatgttggaaatgtttgatatgaatggatttgacttatctcagttcttgaatcagttcataagctcatttatggagaatgctcttttggaatctggtgatgaatga

SEQ ID NO: 42 - DNA, 294 bp, Methanobrevibacter ruminantium
  source 1..294: mol_type = genomic DNA
atgctaaaaatcgatgaatttagaatggaaatggaagagcctaaaaggatctatacagaagaactaaagaaattcgctaaaaaatacgattttctaggggattttaccatagtggaagagcgagacattgatactgcagattatttcttttgtttcaataatctaaatggaacaagcgatgaaactctatattccacacgtgatgaaatctatgatcatatgattaaattttgcgaagataatggaatcgatgaatttagcaaaaatgcatacatcttttataagagcgattaa

SEQ ID NO: 43 - DNA, 501 bp, Methanobrevibacter ruminantium
  source 1..501: mol_type = genomic DNA
atgtctcaagaagaaaataaaatgatagatgaagtggaaatgagttctgtagaagaaatagggagggattctgtagaagaaattaaaattggctctcaagatgaaatagggatgaattctgtagaagaaatggatttagactctgcagatgaaatagatatggacgatgtagaagaaatggaaatgaagatagaaaactatgaaaatagaatcaaattgcaagatatattaatagaatctttaggagaaagatgtgagggagaaaaggagagaaataagcaacttcatgatagaatcatccaattaaatgaagagttaaagaaaaaacaggaactggaaatggtaagcgatatcaattattggaggggaattgaaaaagcccatatagaactgcatgataagtactataagaggataatccagcttgaaaaacagaatttcctgcttgaagttgaaaacgatgagctgaaggatgaattagagaggataaaaaatgtttaa

SEQ ID NO: 44 - DNA, 810 bp, Methanobrevibacter ruminantium
  source 1..810: mol_type = genomic DNA
atgggtttgttaagcctcaccatttcctattttaacaaatccgcaaatggagaatcattatgggcgccatttttagaaatgtttagaatgctttctgtagtcttgattctaacatacatagccaccaaatccaaaagttttaaagttataatcagaggccaacagtcccgtaaaaccataatctggcagattatcatattttccattctaggaattcttgcatcatattgcactatggatgtaaatggaatccctgcaaatgcaagaggattgattgtaatgatatccgcattgcttggaggaccatatgttggaatacctgtaggaataatagccggagtctggagatatggcatgggaggcattactgccttggcatgtggcgttgcaacaataatggctggaattgtaggaagtctcgtttatagatggaacgatggcgaattcctaaggccatataaggctgcacttttaatgcttctatatagcggctttgacatgtttctaataaccatattaacccctcaaccaaagggagttcttattgctaatgccctttatgctccaatgacatttggcgctgttcttggaatcttactcttcaccctatttttaactgagaaaaaagaggaagccgaaaaaagcgatgaacaaactgtttctgacaataggaatacagacacacagaatataaatgaaatctcacaagaattgaatgaatataaagataaagttaaaaagttagaacagaaactagaggaatacgacaaaaaatttaatcaattggaacagaaattaaaggacaaataa

SEQ ID NO: 45 - DNA, 306 bp, Methanobrevibacter ruminantium
  source 1..306: mol_type = genomic DNA
atgactaaaatggaatttgatttaacagatgaacaaattgaaaaagtgaaagaattagaaaagagcggaattagtcttggagaagctatagaccttctttttgaaataaaagatgaagcatttaatcaaatggacgaagttgacgaaaatattgaaattgtcagccaaattactaaatcaatgaatggtgaaaaaaaaatagagataatagaaaaagcatatcgaaattatgaaaaaacccctgaaatgaaaatccaagaggttaaacgcaaccttagttggggtagggatttctttaaatattaa

SEQ ID NO: 46 - DNA, 1545 bp, Methanobrevibacter ruminantium
  source 1..1545: mol_type = genomic DNA
atgaatgaaaccattaaggagcactcttggattcccttaatccttgtttgttttgctacctttatcatagctttggatacaacattcatgaacgtcagcatttcctcagttgttgctgacttgaacactgatgtgagtaccattcaaacaatctcatcattctatactctcatcactgcctcattcatgctcttaagtaccaagcttcaggatatagttggtaaaaagaagctctttttaatcggtgctggaatttatggcgtcggtaccttgactgcagcattaagtgccaatactctaatgttatttataggatgggcattgctggaaggtataggcggtgcattgatgacacctactgcagtttccatcataagcggaacctatcagggtgaaaagcttacattcgcccttgcaattgaaagcgcactggttgcaattgcagcagctatcggcccgctcttcggtggggtcgttacaacatacttcacttggagattaggatttgcagtggaatttataatcgtcctgatcgtatttgcactgcagggcaaaataccttatttcgaagctacaggatccaaaagcgaattggacattacaggtgctataatctcatttgtaggtcttgtcctctttgttatgggtattttgatgctaactgatgataccactttcagcatagctataatggctgcaggattaattgttctagcactctttgcactctttgaaatcaaaagaaaaagaaaaggcaacgtaccgttgcttgatgttgaattattaaaagacagaaatctccgtgtaggtactctccttaggctgttggttaaccttgcaatgggcggtgcattgtttgcagtctcagtctatctgcaaagcgtattggccttatctgcattcaacacaggtttgaccttgcttccaatgaccttaggtttgcttctctttgcattgacagccccaaagctatctgcaaaactgaaccacaagatcctcatgtcaataggatgtataatatcaatcataggatgtcttattttaagccagcagtttacaatggcgacatcaatgcttgagctaatgcctggactcttcgtacttggagcaggacttggttttgtaatggctttaggtgtggacattgcattaagcaatattccgcaggaaggtcaaaacaatgcatccggtattgttacaaccggtcagactttaggtcagtctatgggtacagcaatcattggtgtaatccttattctgggcatcattggaggaatcagcaatgcagttgatacctatgtgccggatcagtccggtaatgcgacattcgaacacgatgtctatgagggattccaatcaataagcagcataaacgatgttaaagcagagaacagcactattcagaatattgtaaatgtcattgttagagattccatggcgtttgtaatgtatgtaacgatggctctgatggccataatctttgtcttgacattgcggctctcggataaggagattaaaaaaccagataaacttaaaaaacaatga

SEQ ID NO: 47 - DNA, 735 bp, Methanobrevibacter ruminantium
  source 1..735: mol_type = genomic DNA
atgactactactaatgatcaagatgaatcaataagcgaacatataaaaaaagcgttctccttgaaggaagatacggcctctaatgaagagattcgctcccgccttttagatggaggcaaaatcacaggaacaaacatgcgcgttctggtatgtgctatggtgattgcatctgtagggcttaacatgagctcaactgcagtaatcatcggtgccatgctgatttcacctctgatgggaagcattcttgcctctgcctatgcaagcgtgaccaatgaccgtccccttcttggaaagcatttaaccggatttgcaatgcagattataataagcgtaactgcagcagccatcttctttttcctctctccagttaaggagccaacagtagagctattggctagaacatctccttcattttatgatgtgttaatcgcattcttcggaggacttgcaggaatcataggacagaccaggtcagataaggtaagcacagttatcccaggggtagctattgcaacagcccttatgcctcctctatgtacctgcggttattcaattgcaaacggaagatgggacatgcttctaggagcaggttatttgtttttaattaactgctatttcatattcctctcatcaagccttattttaagtgcattgaagattccaaaattgaaggagtatacagaaaaagaatggaaaatccataagtggagaatgagttacggaatactattttaa

SEQ ID NO: 48 - DNA, 3006 bp, Methanobrevibacter ruminantium
  source 1..3006: mol_type = genomic DNA
atgggatttatagataaattaaaaaaaggaataggcagaaaaaataaagaaaaaagctctaaaagagatacccaaaaggacactggattgaagaggaaatctccacctattgacaaggcatcttttgatggtagcgatgaggaatacaaattatttgaaagcataatgtcctatagggacgagccagtcgtccatagtatcttaagaaaaataagtgacgatcgcctattgattgaaattggaaaatcccatccgtttcttgaacttcgacgtgacgcaatcctaaagataaaacatgcctcaagagaagacttgattgagctctttgaccttaacgaggacagatggggcatcggattaagaaacgctatcgcaagcaagttcaccaaagagcaactaatggaaataaatgatgaaaggaaattgagagagataatacgatattcaaatgaggaaaatgcaaattgcatctatgacaagataaatgatgaggagcttctcattgatatcgtatgccttacaaggtatgaaagcatacgagacaagtttgtggaaagatttaaaaacgatccagaagtgatgagaagatgcctggaatccagcagaagccctgagcttaagtctaaagtagcccaatacataaacaatgacaaggaactaaagaaatacatcctatcccaaaatgattggaacaacaccgttgaatatgccttaaatgagatgaaggatgagaaaattgcaaatgaagcattatacgaattcgcccataaaggaaagaatcagctcaacaagtcaatagagttcatgagcgatgatgagaccctattgaatattgccttggaatattacaatctggattatgacagatactactttgagattggaatggcccttgatagaatcaatgacgatagccttttagtggacctgatgcataatgagactgatgagactcttcgcaggcttgctgcaaaatacattaaaagcgaagaagcgttaaaggagttcgtcaatgaccctaatgagaacgtgcgcaaaatagcaatcagagccacctgcaaaaacagcctggataaatttatggatctattcaacaatgatgaaatcatccttgacgatcatttcatattggatggggacggcatatatgaaacaatcaccataaatcgggacaatgtgacaattgatgggaaaaaccataagcttgaatgcatcaaccctaaaatcgagcttaggattgaagcaaacaatttcagcataaagaatatagagaccaatatgctgattcgccttaatgaaggctccttaaacatctccaattccatcatagacaagtccattgaaattaatgaggggaacttgactggagaaaactccacatttgacagaagaatcaaaaacattaatggaagcttgaatctgacagattgcaatattgatcaaatcttcaatgaatcttccctaagccttaaaggctgtataataggctccattaagaatgatgattcctgcaatatagataactgtacaataaacgaattcctatacaacaatggaagatgcaagattgaaaattctaaagtggaatcagcaagcagaaattatagcaatccttatgatgggggaggagccatttcaaatgggcagaacgcttcaatggaacttacaaaatgcatattggcaaagaattctaccgacaagaatggaggagtcattaggaatataggctcaataaacctatatgactgcatctttgaagacaataaggccggattatccggcggagccatcttcaatgagggcaggctaacagcttcaaggtgcaagtttaaaaacaatctggttgaatttccgagatatggctcatttagccgcgcaactggaagatatcatttcattaagcatggaaactccattttaaacctggcatttatggatctcttcaactgtcagttcatcactgataagataaatgacgctcctgaaatcattgcccaattcggtaaagacagctatctcaatattgaaaactgtcaattttcaactaataaaaagacttctgttgatgcaatagagggaggattgaactttaataatgcgaagtttaaagtttcctttgatgatgttgaagaaataaacctagcaaatgagggtcctgaagaaacaggttctataaataaaaatcttaaagaaaccagctctacaaatgaaggtcttaaagaaagaagatctacaaataaaggtcttaaagaaacaagctctataaataaaggtgaagaaacaacagtaagctctaaaaatgaagatatagatgcagaaagcattttagaaaacttcaagggctttgaatatcttgatgatttgattaacgacggctcaagtgaaataacccttgactgcaatatccaaatgcatgaactggagcaggcattctatgaagggggaatagaaatctacgaagacaatctgacaattgatgggcaataccatacaatcgatgcaaacaatctctctagaatattccatataaccggaaatggcattgtcattaaaaacatcaagtttaaaaacggatattactatcaggattattttgataattcaaaagatgggggaggagtattatgcataacccatagtgcttcagcaaaaatcataaactgtgaattttcaaataacgaatccagacaatctggaggagtcgtgaaaaacaattcagattccttggaaatcatagattccaactttagagacaataaggtaatctatcaaaaaggaggatgcataatcaataatgcctcattgaccttaagaaactgcagctttaaaaataacttttcaaatgccggatcatgcgtatttaacagtgaagattcatccttgaaaatatttgactgtgagtttaacaataacacttcaaggaaggactttgaagcgggaggagtgagattttcattggaggtgcctagcagcggcggagcaatcgcaaatgagggaagcctttag

SEQ ID NO: 49 - DNA, 1974 bp, Methanobrevibacter ruminantium
  source 1..1974: mol_type = genomic DNA
atgagagacattgaagaacttaaaaagacaccaggactgtcacttaaaagatatcttattctttttattgcaaatcttatcggattgtatctaatcagctttggattggatttcaccgtcaccaatctaggcagagtcataatattcatatttttcataagcatcttcaatgcagcaatatggcctctggtaacaaggatatacatgccccttatggtttggacctttggaatcggagcactccttttaaacggaggggtctttgccttcttcggcccatactttggcttagacatatcaggatggggaatagtccttgccccattaacaattgcccttattacaatcgtcctatcaacccttatggacgctgaggatgatggcacatattatcaggctgttcttagagaagcccaaactaaaagaaaaggagagattaaggattatcctgggctaatcattgttgaaatcgatgggcttgcatatgacgtgctcttggaagctgtagagaaaggagtcatgccaactgtcaagtcaatgattgacaacaaaacccatatccttaaaaaatgggagactgacctctcctctcaaaccggagccagccaagcaggtatcctacatggaaacaatgaaaacatcaccgccttcagatggattgaaaaggaaaacaacaatcagatgatgcagtgctctggagttacaaaggtaaaggttcttgaagagagaatatcagacggtaacggcttgcttgttgaaaatggggcaagcagatcaaacctcttttcaggggatacagacaatgtcatatttaccttcagcaaaataacagaccttagaaagctttacaatggcgcttggttttcaatcttttcaaatccaagcgaattcgcacgtatagtaattttagtcatagaagacatggtccatgagatctattcccaacttaagcacagcatactaaatatccgtccaagaatctcaaggggcatcgcatatattccaacaagggccggaacaaatgtcttcatgagggaaatcaataccgaaacccttattggggacatgctgattggagacattgacgttgcatattcaacatatctaggctatgacgagattgcccaccattcaggagtgagagatgaggatgtatggtttgcccttaagggaatggacaagcagataaggcgcttgatctatggaaacaaatactctccaagggaatatgagtttgtcatacagtcagaccatggccaaaccaatggtgcaacattcaagcaaagatatggccagtcatttgaggactttgtaaagtccttgcttcctcacgagaccaatatctatgcaaagatgtcctcaaacgaagaccactttgcagaggtctacattccatttaaagatagaatagataaatttaaaaacaggaacaagccagatgaggataagctgatttcagagtctgaagttattgtccttgcctctggaaaccttgcaatgatctatcttacccgatggagccataggctgacttatgaagagatcaatgagatgtttccagatatgataagtgaaatagtgaataatgaatatgtaggatttgttttagtccgctcatctgaaaatggtgatatggcaataggcaagaatggaatttattacctggatagcgatgagatagaaggggaaaatcctctcattggatttggagacaatgttacccaacatcttaaaagaaacagctcattccagtacacaccggacattcttgtaaacagcttttatgatgtggaaaatgatgaggtatgtgcatttgaagagctggttggaagccatggaggcgttggaggaagccagtcagagccatttattttatatccatcagattgggacattccagatgaggagattgtaggtgctgagaatatatataggatattgaaggataatttggctaagatgaaagaaaaatag

SEQ ID NO: 50 - DNA, 285 bp, Methanobrevibacter ruminantium
  source 1..285: mol_type = genomic DNA
atggatgtaatggatatgattaaggaaatagaaactggaaatgactattggcaggaaggcttggattatcatatggattgtaaagtaacagtgaacaatgtccgcacaagatgcgatcaagtcagcatagtgcaatgtgatatgtcaaagtatggcaagggcatcgagcttttgctggaacttcgaagaggagatttcataagctggatatatcttgacgatgttgtatcatttgatgtgcagatgatggataatgtcttaagggaggagaaaaagaatcattaa

SEQ ID NO: 51 - DNA, 258 bp, Methanobrevibacter ruminantium
  source 1..258: mol_type = genomic DNA
atgatcgatgaaatgatgaagatagaacaatttacaagccattgctgctttgtagatgaagagggcatgaattcagttgatggggacttcctcactgccatcgctctatgtgtgaactttatgtataatttcatagacattcaaaacattgaatccggcagcgaggatgaggatgacttgaactttcagctcatcatgaacaagatagaatactaccaaaagatggaagaaatatgcaaaaaatataaggaggaataa

SEQ ID NO: 52 - DNA, 687 bp, Methanobrevibacter ruminantium
  source 1..687: mol_type = genomic DNA
atgaataaaatcaacatcctatcagtatctcgccttagaacatatacagatggagatggaataacaagccttgtagcaactatgggatgtccattaagatgtgcatactgccttaatccaagctcatgggatggtacggcctatccaaaatccttgactgtggatgagctatacgaagagctaaaaagagacaatatctactttctctcaacaggtggagggatagcattcggcggaggagagcctctcttataccataaattcataaggaagttcatagaaaagtacagctccaccaaatggaaattctatttggaaagctccctatcatataagacagattccttaaaagatataatcgaccttatcgactacttctatatagactgcaaggacatggacaagaccagatatgagctatacacaaaaggagactacgatctcttcttcggcaatctaatctatctaaaggaacatgtggacaataacaaaataaagataagagttccaaggataaagggattgcataaatctgatgaagctgaatcaaaccttaaagtgcttcaagagatgggatttacaaatatagaaatatttgactacattgatgatgttgaaatccataagccaatatctgataaggccataagaaacaaaaaagactttttagaaagaataaaagaataa

SEQ ID NO: 53 - DNA, 480 bp, Methanobrevibacter ruminantium
  source 1..480: mol_type = genomic DNA
atgaatggcagggataaatgcgaacttctaaacgaagtccggcaaaggatagccaaagcgaacaatattgaatttgactttgaggaatgcacattcgaagggaactgcagcgggacatgccctaaatgtgaaagcgaagttgcataccttgaaagagagcttgaaaaaaaacaggacaatggcgaaaagatagacattgaaggaatattcacattaaaggaaaaagagcctactaaactattatgcaaagatgtctttgtgccttttggaaattttgaacctgtaagacctaaaatggagattctagaaaagagcccatattgtgaaactttcggcgatatagagtataaagattatgcttttacataccttaaaatcttttatttagggaatgatgaagagatagtgcttccatataatgagaaggaatatgatggagatataactgtttttgaaatcaaagaggacgaatatgaataa

SEQ ID NO: 54 - DNA, 552 bp, Methanobrevibacter ruminantium
  source 1..552: mol_type = genomic DNA
ttgtatcaatggtgtaatctatttggaaaaatccatcgtggacaaaattatgaagatattaaagaggataattgcaggatgctcttagatcttgttaggaaatatccagaacattctgatattatttaccttaaaaaagttaaagatatcggcacatcttcaaaaatggataattctcttgatgagcgtattaatcaaatggaagaagctcttaagccagtccatgatatggtggatgatgtttattcatgccaaataaatgatgatttaattaatttagatgattttgtgccttttgaattcctttctgaatatgcatataaaaaaaggttttggttgacatataatgaaaaaccggatatatttgagctagaaacctcttatagggataagatttatagttttgattctgttacagaatcagtgatatttgttatggatgagatgaaaaatttcattgataagtatcctcaatattctagattgattccggattacagctcttttattaaatataaagaaaaacttatagaggagtttgagggtgaataa

SEQ ID NO: 55 - DNA, 177 bp, Methanobrevibacter ruminantium
  source 1..177: mol_type = genomic DNA
atgaaaagtgaattagtgccaggttatgattttgaatacacttacgacggtgtgttgctgattgaatatgacacatatcattacaaaaactatgaaatcaatagggtttatttggaagatcacattgaaaagttaataaaattgcctgatgtttatgtgatttgcctggaacagtag

SEQ ID NO: 56 - DNA, 219 bp, Methanobrevibacter ruminantium
  source 1..219: mol_type = genomic DNA
atgaatgaaaataataagaaaataaaagaaaagagcgctgaagactattctgatttagattcttttttagaagaggtttttggccctactgatgatatagagtggactgaagagaaacgcaaacgttttgaggaaataaataataagtgccctttttctcctacccgtaatgaatggccgaatataaaaattcatagagaagaattaaaagaagattaa

SEQ ID NO: 57 - DNA, 2058 bp, Methanobrevibacter ruminantium
  source 1..2058: mol_type = genomic DNA
atgaccgaagaaataaatgaaaaaataaacactcaactcgaagaagagatcaaaggattcggcacacgtgtagtagaaatatttaaaaacacaaaatcaactaaaaaagaaaatgaagatcctgaagatgataacactaaaaaatcacaggaattcataactgtagcagaatttaatgagttcaaaatcgaaaccctcgagtttgtaactgaaatgaacaataaggccaataatcttattaaagcctctgaaaaattcggagaccctgaagatgactatgctgagattgtcaataaagtagatactttgttgcaaggattgcataatgaacttttaggcaaggaaattacaattgaagaccgattggacaagaggaacacattagtaagaatgtcattgaaagtgcatcagtcaaaaaggattctaaaacttttagacaaacagtcacagatgcgttctgcagaagaaaataatcttaaaaaagacttgagcaaatggttccacaaactggaaagaagaatacagaacctcatagacatctactatgaaaatgaactgttcttcctccatatcaacaaggttaccactatcgtagaggatatgaagccagaatacaataccatactcttgaagcatgggttgacagtattctacaatgcccgggaaactgccaccacattgtacactattcaacagaaaaaggtttccagtaagacaggcctctacgaaccaaaaatcatgcgagaaactgatgtcggattgttccgtaccaacccagaaatagaagacagcctaaggtacagcacatttcaagctagtaattccacattgattcgtgttagtaaaaatatcaccaacaacctagcagatagctaccataaaggattaggaatcgaggatgttgggcataagattactgaggaattcactggtttgaaaggttggcaagcaaagcgaatagcaaggacggagattaattccgcaagcaatgtaggaacattcagtgtttacgatgaacttggtgtagaataccatatgtggtggacaggcaatgatgcccgtgtaagagattcacataagcctttgcatagccatatagtagcagttggtaacactttcagcaatggcttgttgcatcctggagacaaatcaggacccataaatgagtggattaattgtcgttgcactagtgtgccctatattattccgttgggtatgatggcccctccaggagtaaaagagtttactgaagatcaactgatacctattccagattatgattctagtaaagatagaggaaaaatcattaattcttcatcaaatagttttaataatgtgttgaaagttccaaataataaattaaaaaaagaaggacataattttagaaaaaaagaactggaagagcttttagaacttaaaattcgtgaaaaatctctaaaacaacccattataaaatccgataacactccattagttgaattagagcatcctatactaaaaagagaattagacaattttgacaaatttttagaagataaagatattgaatattttcaaatgtatacttttgatggtagggaagcttcaaaattgtatattggtaaaatgcatgaggttgatgtgcctaatgaagaaataattgaagcagttaggaaaggagggaaaatctcagtacataatcatcctactaattttgataatatgcattctatttcagatatttatactcaaattgaaacaggaatagaattaaatatagttaaatcatatactaaaaaatatattgtagttgcagaagatttatcttctaaagaaagaaaatatttacttaatcaattagaaaaaattgaaaaaaaatataatgaatttatagaaaaagaaaaaaaaccttatttaagaggattggataaaatagatttaacagttgctgaaagagaatatgccgaagaaattatacatcaatatgtagtaattaacaattatgataaatatgaaaaagtgatgagttatttctttaaagcgaatccaagtattgatttatatgtttatgatatttag

SEQ ID NO: 58 - DNA, 498 bp, Methanobrevibacter ruminantium
  source 1..498: mol_type = genomic DNA
atgctacccgtattcataccaaacttaccggattgtgaataccaatatggggaaaagcccttgaccgcagatcaaataatccaattcgcaagggattatgaagaatggctgatagttgaccttgaacatgaattcctctatactggccaggtaataggaacagtaataaaatcacatgttaacacagaaccagtcaccgtgaaattcattgacagcacaccacgagaatatcctaccggcacatggtttgttacattgaaaattacaaaccaagatgtgattcaaggaatacataacgaacactataccggcggaagtgcaaccactatcgaaagagaagatactgacaagctaaggaaaatcttaaatgttccaataacatcaacaacaaagtcaaaaatcaaacgcatacccataagcgagattaaaaacccagtggtgatcactataagcattgttcattctccttgtgttcctcttgcaaattttgtagtttaa

SEQ ID NO: 59 - DNA, 1023 bp, Methanobrevibacter ruminantium
  source 1..1023: mol_type = genomic DNA
atggttgaatttgattcatttattaatgtagaaaaagttattgaagcaaaagatagtaattatgttactaaagaattatcttttgacgataaaaccatattaaacacaccatataagatttttaatgtgtctaaagtaaaattaaataaattagaattgcctcttaaaggaaatattattgaaactactaaatttatcaataataaaaaatcatatgatgcattatataatttacttgaaaattctcctaataatcaaaaatcaaaattaaatcaattttttaaggtagataatacatttaaatcatataaatcaattatatctttgactttctcaaaaaacccatttaaatctaataaatttactcatgggcacagtaaacccctttcattttctaatttcgaatatttattagattatatgtatgaatattcaactttatttgtattgattccagatattgattttaagtcatttgattctatggataattatatggagtatattgaaaaagcagtaaatgttgtttcttcatttaataataaacctatttttgttccattatctatgaaattggacaacagtaatcttgaaaaattattacatttttataaagagaataactatagcaatatttggtttaatttttattccaatcaaataaatactaaaatttctatcattcgttattctttaagattaatcaatcgtttatttaaaggaaatgcagtaacatatttttctaatatgaaaaaagaaattaataaacatcttgatgatgtttacactttaccatctgattttttagggccttttttcggttgtgattttctaggttcaaatagagagtcaggttttcctgggaaaaatattaaaagaaccgctaaagaaaaaagggaatttgaaagaaaaaatttaattaataaaaatcgtatttttgattcatcaagctattattattttagtattttagaatatccatctgatttaagaattaaattcaaagtcaattctacaaactaa

SEQ ID NO: 60 - DNA, 570 bp, Methanobrevibacter ruminantium
  source 1..570: mol_type = genomic DNA
ttgttttttgcagatttcctaaggtttctttcatatggttttttagaggaactaaaacaaagcaattgttataattttttagattattataattttgctattggttcaaaagtttttgaagaaataaatcaacaccttgataataacttaattaataaattacatttttgtccaaacaataattacaattattctgctttaattgctcctcttttatctaacgaagaaaaaaataaaaataaaggagaatatgaagtaataggtttatctttacattatttgtctttaaatcaagtgaaatacataattattgatgataaaagagcaagaaaatttgcaaaaagaaattttgaagaattacaagagtatattactggaacaataggcattattatattttgttcaaaagataattttatttcaaaaattgatgctgcaaatatattaaaagatattgaatttgcaatcgaaaatcatgatgaaactcaagggaatttcatttgtagtcttgggaaacaaaattataaaaaaataatcgatgatgcgattaaaatgttggatgtagagtaa

SEQ ID NO: 61 - DNA, 573 bp, Methanobrevibacter ruminantium
  source 1..573: mol_type = genomic DNA
atgactttatcgaatgcagaatataaacaaaaatatattgaatatttaattttattattattaggggactttaaaaataaattatctgtattgcatattcaaaaagaaatatatttgttatataactttgatgtagagttaaaaaaattattttcctttgtaaaacattataaaggaccctatctagatttaattaattcgtgctgtgaaactccattttatttagatggttgttgggaatattttgaaccgaaagaaaaaattagtggaggatttttaaaaatcactgataaaggttataaagaatatttaaaatttcttcaaaaaattaaagatgaaaatcaggaagaattacttcatataaataccgctataagtatgttaaataggttatatggttctttagattgtgaagaattattactgctgatttatactgagttcccagagtacactgaaaaatcagaagtgtattcaaatataatatctaaaaaaacaaatattgcaaaaaatttatttgaaaaaaaagttattagcgaggaaaaatataatgagttatcaggaatcttataa

SEQ ID NO: 62 - DNA, 2769 bp, Methanobrevibacter ruminantium
  source 1..2769: mol_type = genomic DNA
gtggaaccaacaatctcatcccgattgctaatttttattagaaatgatttaaaaaatgatataaatgagctacttggtgagccaaaatgtggtaaaggttctgcaggtataggtaatttagctcatatgccttggttagattttacattgcataatattgatgaaaacttaggtgctattaatgttgcttatttatttaaaccagatatgtctggattttatttaacatttagagctttattttatcaagaaattgagaaaaaacatggcaaatatttattaatttatttaaaaaataaatcaagacatattagagagtttttagaggaatctaacaaacttagagatgattttttatttaatatggacttctctgaagacacagctgtactaaaaaaacatagtgcaggaacaattgtagcaaaatattatgatgcaagtaatgtgccttccgatgaggaattaataaatgatttaaattattttttagatttatatgcttttgtcattgacaattatgaaaataaaacagatctttcagtagatgaatgggtcaaggttttagaaaataaagaattaattgatgataagatgtttagcattttagaaatcatgaatgaaatggataattattccgctactacaagccagatttctaaaaaaagggaagaattaggatttttggatgaaaagtcttataatagtattattatttctaattcaagaaaaattaaagaattcttaaataaaaaacctatttataatgacgatggtaccgaaaattattggacaaggttcttttatggaaaaaatgttgatggtgcttttgaatttaaaatgaaggatgaattagttgaagcttttaaaaaaactaatgtggaaaaacgaaaaaaaggtggggaagaagtgactaaaaactataactctttttatgatttccttttagataatggttatttgtttgataaaggaactattgagaattatttgctttctttaaaggttaagccatttgctattttgactggtaactctggaactgggaaaactaaattatctcaattgttttctcaatatatttctaataataatcctattttagtttctgaaatgaatagattatcaaaagatactgaagattttgtagaggttcaggttactacaagaagatcttcgtggaatatttttgaaaaaggtaaagaaatgaaccctggttggacaatatcaaatgaattttttagtaattatttgcctattgatcaatttagtggtgaatatcaaattgaagttgatggaattgaaggtaatgggattattagtcctgtaattcaagtatattatgataaaaatagtttaaaacttaaaaaagagtttgaaaaattgtatttatccgaattagaatcaatagaaaaagataaagaaaataaagtttcacacgaaattcaattagttggtttagaattaaatgttaattctcttgaaaatatggttaatactaattttacaaaatttaagggagatataagttttaaaaaagaaattacaacaacttctattaaaccaggagaattcattgttccttatgaaatatttgattatataccttttaataagaatcaaatggattgtaaaataatttcttgtggaagattttctaatgctaatatccatattaagtttaaattaagaaaattaagtaaaaatatccgagagtatttggaagagaagggtgtaggggctgaaattgatgttaaaattaaaaatattgacacttctttagaaagatttaatccagattggagttcagctaaaagatattcttcagagcaaattgcacaattaaacgaaaagaatattgatttaatcgactttaattctcaaaattacaaaataatccctgtaggtgctaattggactgaaaacagaaacatagtaggctattacaatgtaataaccaataaatatcaatccactccagcatatgacttaatcacacaggcacaaaagtctgatgaacctcacttcttaattcttgatgaaatgaacctttcccatgtagagcgctactttgcagactttttatcagctattgaaagtaaagaaaaaatacctctctatggagaagaagctttagaaatccctgataatctgtttatcataggaacagtcaatgtagatgaaacaacatacatgttctctcctaaggttctagatcgtgctaatgtccttgaatttaaaacatattctgctgcatcctatatgaatggcgatattaaactatctggtcctgatggaaacctatcatatttagaaaatccattggatggtaataatattcgtagtaagggaatagatgaattaagagagttatttgatggagttaaagtagaaaataaacctttctggaacattttatcttcagagattgaaaagttccaatctgtattaaaagtatctggatttgatttcggtttccgtgtaattaatgaaatagttcgtttcatggctgtagcatgggaatatgagaacaagcctgatgaatttagcaattgggaaagatattttgatgcccaaataaagcaaaagatgcttccaaaattacatggctccgaaaagatcattggagatacaattgatgagcttcacaagatctgcttggacagttccattgatgatgtggagatggctaaatatccagaatcctataagaaattaactgagatgagaaaagtgcttcgtaagcaaagatatgtttcattcattaactaa

SEQ ID NO: 63 - DNA, 1644 bp, Methanobrevibacter ruminantium
  source 1..1644: mol_type = genomic DNA
atggagcaatacattaaaataaatgctatcgataatgaatctaatcaattgggaacattcaaaatctcaaaagaatatgatggatacataccatctatagaaaactttaataaagagattattttagaaaaccttatcctatacaatgttccaatagttgaatattttgataataagactcccattcaatactataagaatgatagctttaatgcaaatattcttcttcttgaggaatatgagtatacaattgaatttgaaggcgatctgaatcttgatgtttatgaaagtttaaagaacagcaaaaacagtccattgaagttgctgtcaaacactaattctggctttttaaactttggaagctatgtaggcaagacatttatagacatttataaggatgaaggccttcttttcaaatgccctatagaggttcgttctcgcaagataaattatgctaaagactatgccactatgattggggatttgtctcgtttttcttctggtctaatctatgagcttaactcccctgtctatcagtcattggaagtaagtgacatcaataagactccatatgaggattttatgcttcttgagtatctatttgaggatgagaatcttccatccactgttgagtatttgtctcgcaatttgtatactttgcttgaggagtccagggaagaagttccaagctcccttgcatctaatattgggcctaatgagcttgttgaggtcttttctaacagtgataatttggaaaggtatgatggccttgataatggtcatttggattctgttttgtctagaactaaaggatatcttccattaaagataaatgaaataaagtatgtggacaatatagacactcctgagaatcgattctataaaaactttctattgtatatagatgacttgattgatgatttaataaaaaggatagatgaaggctactctttggataagcttcatgaatataaggaaacacttagctattatctctcttcacgctattttttagacatttctcctatggattatcctcctcttaattcacaggttttgcagaagaaagagggttatcgtgacattcttgaatattatcttttatttgagttcggtttcaagcttaactggaatcaggttgttgatgattttcgtggctatgagaagaaggtgtatcgtctttatgaatactggtgctattttgaactcttggatatagttggtgaattgacagatactgaaatacgttttgatgatctttttattgaagagaacttgaacatctcccttagggaaggggctatcaaaagatttgacttgaacttgtctgacttgttggacaatgatttgccttcatctgatgatttggacataaggatagacttgatgtataacaagaccttcaataaggatatggcttttcattcctattcagttgccttaaggcctgattataccttgtcaatagagtttgggggtaatgcttatcgcattcatttcgatgcaaagtataaattgaacatcaatgatgaatcctttaagaatgatgatattgtaaagatgcattcctataaggatgctattggggatacaattgcagcatatgtgctatatcctggagatagaaaagagatatttttatga

SEQ ID NO: 64 - DNA, 3537 bp, Methanobrevibacter ruminantium
  source 1..3537: mol_type = genomic DNA
atggagaaaactatgaaatctaaactttttatacttctaatcattatctctattctaataagcatttcatcagtttcagcaagtgaactccaagctgatgcatcaaatatagataatgattatcaaacaaacatggaatttgatcctatctgcaatgatgaatcaaatcaaaaccaggatttaaatctgaaaaacaataatgaacatattttaaaagaagagaacacaaaccccccagaaatagaagatgaaacatgctttacaactttatatcaggaaatcaatcaatcagatgatgagctaaacctcacacatgactatatattcaataaaagctatgacaatgccagcttataccaaatgtattacggcccattaatttcagtgaataagaccaattttacaatcaatggaaatggccatatcatcgacggaaatgaaatgggggcagaatttgattttgaaaacaataagggagaaattgtaattaatgacttgacatttaagaatttcaaccaaacagttttacaaatttacggaaagcttacattaaacaatgtcaactttacagagagctttgaatcacttgaaagcattatatttgtaagcaagggcgtcttgaatgtaaataattgcagtttttattcaaaccgcgcaaagaatatcataagcggatcccagtcaaatataaccgtaaacaattcaatcttttctggaaatggcaattatgaaagagcaatttcagccaacagatggcagctggtcatccacaattccagatttgaaaatttcactttcaagaacggtgcaataattgatttcaagggatattacctagatctagaaaactcaagtttcaataatatacattccaatttaagtggcggagcaatacttggaaaatacttccccgcctatataaaagtagctaataaaacccaataccttccatcagaccctatgataatcaaaaactgcagatttgaaaacatttcctgcctcaacgacgggggagcaattcactttgactttgactcaggatcccaaaggattgcccaaagcctaaacattatcgattccaatttcacaaactgcagcagcaaatatggaggggcaatatcaattctaggaggaggattgaatctcgaaaaaagcaatttactaaataactatgcaagcttcgagggaggtgcaatatactcctcatggaccaacattaacattacagattccagcataaaaaacaataaggcagaaaagaatgcaggagcgatatactttgacaaaggaaacctatcaatcaaatcctccgatatcatcaataacagcgctcttgaggaatccccaactaccgcaaatgcaatctatgcccatgacgttgcagcggatttcagtgactccacatttgacaatgggggaattgcagtctatgcagactttgcaagccattcaaatttcacaaacgtcaataagaatgatgacatattcctcatggacaatcataattacatcgtttcagttgaaacccctggaataaaactcaatctaacaaataatgaaataattgttgactccctcccatccaaattcaattcacaggattggggatggacaacacctggaaaagtccagggagacaatgacgactgctgggcatttgcaacaatagcctccattgaaacaggccttggcaaatccacaggagtgctctacaatctctcacagaactatgtgcagaagcttcaattgaaatattatgaagtgggggatttgagaaacagcctgacaggattcataaccagcggcttaggctatgcattaagctggtatggggtcttgcctacagatgcagcttatgatgaccgtggaatgattgcagatagtgatatgaatgttcctagaatccacgttcaggatgcaatgttcatatatacaggagaaaacaacacaatagatcaattgaaaaaagcgataattaaatacggcgctgtcactgtgcaatactgggcatatagagaaggtgaggaaatactaagcgaaggagaggacatttccattatggaacataacacccatttcatttcacttgtaggatgggacgacaattttacaaatgattttggcggagccccagggtgttggataaccaaggattcccttttcggatactcaaatacagaatacatcaatttcgcggacatagactattttgccattgtgcctttaagggttgcagtagcctatatctttgaaaacgacattgactatcatgtaaactatcagacagaccttacctgccttgcaggatttgaccaaaactatacaatctattcaaatgagttcacttcaaagtacgacgagctgataggagcagtaggaacctatttcaatgaatcaggaataaaatactcctttgacatatttgtaaacgacaaaaaggtccaaacccaaaacggaacaagcgaatatgcaggatttaggacaatagttttaaataattacatccctattaagtctggagaccagttcaaggtagtcttcaagagcaattcagttccttatcaggcatggtctagggtccattacctaaatggaacatcccttgtaagcgctgatggaagcacttggaccgactttgctcctttaaataagactgtctgtcttaaagtatacacactcaatgacactacaaaattagcagacgccaatgacatgattattgaatatggcgaagattcctatttcagcgtaagggctgcaacagagaataatatatctgtaggaccaggagaggaagtcactttcaccatcaataataatacaacaacagttaaaactaatgatgagggtgtggccaaaataaagataagcgaagctccaggaacatacaagataacaagcagctacaataatcaaagctatgaaaacaatataacaataattagcagagaaagaacaagcacaagaatcctatatcagaacatgagcacagtggctgtcaattccaaggtcgatggcaggataggcaaatactttgaagtaaacctaaccgacgatgaaggacagccgttaaataacatgccagttcaaataggattcaatggagcagtctataatcgtacaacaaatgctacaggcggtgtaaaactacagatcaaccttggatatgaaggctcatacacctttgcaatagcattcttgggagacaataaatatgcaggctcatttgaagttgcaatcatcaaagtcagcaagcaagctcctaagataaccgcacctgcaaagacatataaagccagtgcaaagacaaagacaatcactgcaacattcctatccgataaaggacatggagtaaaaggcaagaagatcaactttgttataaacggcaagacctatacaggcacaacaaatgataagggagttgctagcgtaaaggtttctttaaataaaaaaggaacatacacctgtacagccaaatttgcaggagatggaatgtataaggcaactagcactaatttcaaggtgaaaataatatag

SEQ ID NO: 65 - DNA, 1065 bp, Methanobrevibacter ruminantium
  source 1..1065: mol_type = genomic DNA
atgaaaggattggcaagaatcgaacaagatgtacttggctgggttgatgctgagctagacgaatgcggaccttatgatgctatctgtaagccattggctatggcaccatgtacctctgacgtccatattgtatggggtcatgcatacatgagcgatgcacctaaccgtgtagttggacacgaagcaactggtgaggtcattaaagttggggataaggttaaggacttcaagcctggagaccgtgtaatcgttcctgcaatcacacctgattggctgactgtgccagctgaacaaggattctcccaacactgttatggtatgggtacaggaatgagttttgtaacctttaagcatggggtctttgcagagcaattccatgtaaaccaagctgacgctaacttggctcacttgcctgataatgtaagccttgaacaggctgtaatgatttcagacatgatgaccaccggattctatgctgcagagcttgcagacattcaatttggtgatactgtagcttgctttggtataggtcctgtaggacttatggcattagctggtgctcaagttaagggtgcttctcacctcattgctgtaggaagccgtccagcagctatcaaggttgctaaagaatatggtgcacatgatattgtagactatcacaacggcagtacagtagaacagatcatggaattgaccgatggaaaaggagtagataaggttgtaatcggtggaggaggtaaggataccctctctgaagctttgtctgttcttaaggtcggtggtgtaattggaaacgtattgcactatgacggtattgaaaccatacctgtagacggtctttcatggggtcaaggacttgctgacaagaccattcgtggaggagtatgtcctggtggacgtgccagaatggaaaaattagctaatcttattgaatatggtcgtttcgactcttctaaattgatcactcataagtttgataagtttgaagacattgaagaagctatgattcttatgagagataagccaagggacatgattaagcctgcggttattttagatgaatag

SEQ ID NO: 66 - DNA, 1872 bp, Methanobrevibacter ruminantium
  source 1..1872: mol_type = genomic DNA
atgatatctaaactaaagaaaacaataatatcatttataattatgggagtggttagtttcgcagtcactttattgcccatatctggcggaatgtcaatgttagccccagatttaggattaatatatgttttaggattactattcggcccatatggtgctttaggtgtcgcattggcaatcgtgacattaaatttaataaacggattcacacttatggaaacactgccctttgaaatattcacctttggagtctcatatttaggatacaggctttggtactctggatttaaaaccgatacaattacaaagccaaaactagataacagctaccacatctccctatttttagtaagcatcatcatctgtggatttatctattcaacagtccaaggaatctcttttaaccttatattctgggttgatagattttatataatgatcctcttttatttcatgagctttaccacaatggcatttctctatggaataataggcatttggatctgcaacagatatgattgtttcgaaacaccaaaaaaatcaaaaagacatgttgacaagagaatatatcaggcaatattctgcatgataatcatcacatcaataatcctagccacatcatttataactactgatgatacaacggtgcgaatcatagagttgatagttttgggaatcttcctatttgcctatctgacaaagccattcgaatatgatataacaccgaatgacaaggatacaatcagcggaaggataatgcggaatttcattataatcacatttatccttggagttttgggaatagcaatttccatgatcagctacagtgcatatagtcaaagcgataacgtctacttagtattaatgtggggacctataataaccgatacggtattgctcctgttcctcattccttgcatttttatcttaagatatattgaagacaaagtagttcagcctatctcatcattttccaaaatcgaaggattcattaaggaaaatgagaagattgatgaagacggattggtaaagacctattccaagtataccgatgagaagacagagattggaacacttgcccgctcatataccgaactgataaagcacaataacaactatatcgaaaatattcgagaaatagaaggggaaaaggaaagaatcaatgcagaactggacattgcaactaaaattcaagagtcatcacttccagaaaatccaataaaaacaaatgactttacagtggaaggctattccattcctgcaaaagaggtagggggagacttctttgattactatatggtagatgatgaaaatctggctatagtcattggtgacgcttcaggaaaaggaatcccagcagccatactttcaatgataactcaattcatgatcaaaaactttttaaaacaaactttaaacccttcagaggttttatattctttaaataatcagttaagtgaaaataaccctgaatgtatgttcataacattatggcttggaatatataatacaaggactaaaaaagtaagatttgctaatggcggccacaaccctccattagtaaaagaagacaagaaattcaagtatttggacattgatacagggcttgttttagggataactggagacttcgactatataaacgaagagataatactaaaggacgagctgatagtatataccgatggaataacagatgccacagatgaggattccaatatatatggcgaagatagacttttaaaattcttaaatgagtttaaaggcgatgaagtccctataaaaccattgatatcagatgtaaacactttctctaaaggtgttgaacagttcgatgacatgacattgctatgcctgaagttgaataaataa

SEQ ID NO: 67 - DNA, 300 bp, Methanobrevibacter ruminantium
  source 1..300: mol_type = genomic DNA
atgaatgtaataaaaaattacaatggaaaagaattaacaatggcagtagatggccgtattgatacaataagtgctaaagagctagaggaagaaattaatgctgaaatgggtaattttgactcattaattatggatttaggcgatttagaatatacttccagtgccggtttaaggattttgattgcaactcaaaagaaattaaaatcagaggacataccatttgtcatcagaaacgtcaatgatgcagttaaagaaatatttaaaatgtccggttttataaaaatcctaaatattgaatga

SEQ ID NO: 68 - DNA, 8064 bp, Methanobrevibacter ruminantium
  source 1..8064: mol_type = genomic DNA
atggatttgtttaatttgtcttcggctcagaagatgctattgttttctgagataaataatcctcaaaatgattctttctatcttaaatttagaaaagattatgatttaggagattatgaatatgttaaatcagctatagaacttatttctcggaaatatttgaatctgcagattaaatatgatgagaatgctgatttcaaacaatattttgtagatgctgatgaagtaaatgtcgattcatttgatttttcaggcagtgaccttgatggaatcgatggtgatattgggggctctggtgtcggttcatttgatggtgatattggtggatctgatgtctcttcattcgatggagaccttgatgagtttataaagaactatttggataagccttttgacgatatattcgattctccattatataaatgggctgttttaaaaacatctgattctacagtacttataggggttgttcagcatatcttgcttgatggaacatcattatattcaatcgttcctagcgaaattgaaagatgcattgactctcttaaaagcaatgaggaattcattccaattgactattcatatgagacatatgtcaatgacgaactggaatatctcaattcaagccaatcacaggaggataagcaatattggcttgatagtctaaagggctatagtcaggactggtattcctttgatgactctgaacttggattctacgaaattcttttagagaaggtcccggatttcggatattctccattcgtcactgcactggcacttagctttttatatttctcaaagtctaaggagggcaacgaatcatttaaggatatggtatttaacacttcagttcatggaagatacttctcccaaggggatgcattgggaatgtttgtaaacacaattcctttaaggctaagctatgatggggatatgacctttgacgaattgcttgcctattcaaaatccgtcttaaaggagggcttaggccatgcaaagctccagttcagcgagtatacaactgacttaagaaatgagggcattgaccctgattgcatttcaatgttttcaatcgtatccaactccactgacatgaactctaagtttttaacccttcaaaaggacattaagttcccattgcactttaggataaacaagaattactctgataagaagggactccagtcaatcttcatagagtatgataaggcctgcttccataagagggaaatagcttccattgcagagggattgaaatatttaataagacagcttattgacgattctgctaaaagatgtgccgattatattgtccatgaggctgaatttttcaagggagaaaactattataacaatctgatcaattcatttgacaatccgacagcaatttcacctgatttaagtggagataaggtaagatttgtcaatatatccaagcatatagacattgacaagctaaagaacttatctaacagatatcatctctcaaaggaaaagctgctccttgcgattttcttatatgacttaagcaaattctcattttcaaaggatatattgatagcatataaccgtgttgcagcaggatatcacttcaacacagatttgactgttgaagagtatttgaatgacttcaagcaatcctttgaggaatataataattatcctcttttaaataatagaaaattaaactttgaaagcgaaatattattcttcattaatgattatgacgctaaagactataagcttgtgtttaattttgaaagcggaaagatcaatataagctatgacgaatcattctattcaaaggaattgatggaagctttcttggattcaatggatgtcctattgggtagatttgattcatctgatgagcctcttaaggagatttcaataagacgtgagcttgaattggatgagggattcgagattgagcttgcaaatgaaggtacagtaaaggaaatgtttgaaaatattgcaagtgaaaatccggataagacaattctttactgtgaagatggccagctcacatatgatgaattaaacagaaaagcaaataggattgctaatggattactcaagcgtggagtaaagattgaagataagataatgtttatgatgagaaggaacagtgacttgattgcagctgttctaggaattgttaaggcaggagctgccttcattccgattgatccaaattatcctaaaaacagaatccaacagattttagatgatagtgattctaagtttgtgattacctcatctgaaatagattatgatggggataataggattgatgttgatgaattgcttttagatggcgattattcaaacgaggataacgttgattctaatcctgatgttgatttgactccagatgattctaatccaaaacttgatgctgattctaatccaaaacttgatgctgattctaatccaaaacttgatgctgattctaatccaaaacttgatgctgattctaatccaaaagttgacctgaccccagataatttatgcttcctgatttatacttcaggatccactggaaagccaaagggagtaatgataactcaccgtggaattacaaactatatcgcaaatgttaaggaaaatgttcctatttatgaattgaaccataaatgcagcggctttgtatcaatctcaacagtttcatttatcgttttcctaagggagatattgggaactgtcctaaacggattgcctgtggtctttgccaatgacgaacaggcagttgacccattggagtttgctgaacttttcaacaatagcgatgctgatgctttcggttcaacacctaccagattgcttgaatacttgcagcttgaagagattcaggatcttgttggaaaatgcaaggtcataatcgttggaggggaaggattccctcctgtattatacgacaggcttagaaagcatacagatgctgacatctataattcatatggaccaactgaagtgaccatcgcttcacattataagcttatcgattccaatgaggtcactgcaggttgggagatgctcaatgtggttgataagattatggatattgatggaaaccagctccctccttatgtcactggtgaaatctatgttggaggtgctggaattgcaaggggatacctgaacaatcctgaacagactgaaaaggtcttcttgacattaaacgatattccatattacaacactggggatttaggtaaaaaggatgcaaatggcgaattatatgttgcaggacgtaacgatactcaaatcaagcttagaggattaaggatagagctgtctgaaattgaaggggcaattgcaaattatgagaatgtctccctttcaaaggtccttgtcaagaagcttaataatgtggagcatctatgcgcctatttcactgcatcctctgagattggcttgggagacttaaagcagcaccttattgattcattgcctgaatatatggtgccatcatatttcacacagcttgagtcattccctaagacacctaacggaaagacagactttaagaatctgcctgaccctgaaatcgatgctgatgaattcataagccctagaaccgaccttgaaaaggagctctttgacattgtatctgatattcttggaatggatgagtttggggtaaacactgatctctttagcattgggctcacttcactttctgtaattaagctgacctctgcaatctataataagttaaatgcacagatgaatgttactgaaatattgaaatataagacaattgaaaggatcgcatctgaaatcaagattgaagatgatgagtcaagggacattatggaattgtatccattgacttcaaatcagcttggagtctactttgactgcattaaggatttggagaacactgcctacaaccttcctaagaaaattgaatttactgaaggaattgatgtggataggctcaagtcatcaatcataaaggctattgataatcacccatatttgaagactcgaattgtaatgaataacggtgaagtctatcagcaaagaagggatgagcttaaagttgatgatttaatcgagatttcagatgatgagaacctcgatgacttcgtaaaaccattcaagcttgatgagggaccgttattcagatttaagatagttggagactcaatactccttgccgacttccaccatatcattcttgatggaacttccttaaacatactgtttgatgaaattgcaaagatatatgatggaaaggattatgagctagaggagctggacggattcgaatactcattggatgaagtcaaggtagagcaatccagcctgtacaaggaagcggagctcttctttgcagataagattaaggaatttgataatgcaagcctgattccacaggacatcaacggagacgagtcaaaaggcaaggctgcaatctgtgacgtattccttgaaaaggattcaattgacgatttctgttctaaaaagaacatcagccagaacaacctattcctggcagccacatcctttgtaataaacaagttcgtattcaatcgtgacactctgattgcaacaattacaaatggaaggttcaatccaaatcagcagaagacattggccatgatggtcaagacccttccattggctttaaaattaaattccgattcaacccttaaggactatatcgaatatgtcaatttagaatggctgaatgtattgtcctattcctcatatccattaaccgaaatctcaaatgagttcgatatcacccctgaaatattctatgcatatcatggtaagatcatagaggagattgagattggaggaatgactgttgaaaggcaatccattgattatgagggcttgaaattcaaggtcaacatcaatgtcgttgaagaggacggccaatatagaattttctgccagtacaatgaccagctatactctgaaaccttaatcgacacattccttgactgcatcaggattgtcttagacaagttccaaagatttgatgagaatacattgatgaaggacatttcaatcattgaaaatgatgattggagcgttgatgatttggaatatgatgagattccagaggacaggctaaataagatattcgaaagtcaggttgaattgcatcctgacagagttatcttatatgccaccgatggggaattcacttatcgccaattgaatgaaaaggccaataggattgcacatagcctcattaaaaaaggcgtcggccctgaagatagggtaatgtttatcttaaatagaaacagcaatgttgtagcttcaatattcggtatcctaaaagcaggaggggcattcattccagtggattccgaatatccttcagaaaggattgagcatgtcctgacagacagccagtcaaaattcatcattgtggatgatgtgattcggaagaagggcattgacctatcagattacagcgaaaacctattggatgttaatgagcttctatctgaagaggatacctctaatcctgaccctgatgtccatggaaataatatggcttaccttatctacacctccggttcaacagggcttccaaaaggtgtaatcttagagcatggaaacattgcaaactttgtctatcctgatccaagaaatgtctgtacatatgaactggtccacaatcttgaaaaagaggattataaggttctttcaacaacaactgtcgcttttgacgtattccagcaagagattatgggctcccttttaaatggggttcctatggtatttgccaatgacacagaatacaaggaccctattgaaatgatggacctaatccataggactggagctaatgtttatattgcaaccccttcacgtctgcttcaatatttggaaatcgaagcgatgcaggagacaatgtatggatttaaggtatatatccatgcaggagagccattctctgcaagattatatgatttgctttcccaaaactccaagggtaagttctttaacatgtacggaccgacagaaacaacagtttactgtaacggacagctgcttgaaagctcagacattcacattggaaaggagctcttcaatgtccatgagatggttatggacttcgattccaatcctttacctccaaatgtcatcggagaattatatattggaggaaagggcgtttcaagggaatatctaaaccgtccggagaaaaatgccgagtcctatgaagtgatcaatggaatcagattctatcattccggagactttgtcagggtcactgaagagggaaattattatgtctttggaagaatggataatcagatcaagcttagaggattgagaattgaaatcggagagattgaagttggcctttcaaaattccctggaatcaagtctgttgctgttgtcgtcagaaagattaagggcaacgatcatttatgcgcttactttacagtccatgatgagtataaggatgaaaagcgtggagaaaacggatattccattgacatcgatgatttgaaagcctcccttgctgaaaaattagtatattatatggttccgacagtctatatggagcttgaagagatgcctcaaactgcaaatggcaagacagacttgagaaacttgcctgagcctgtcctaatcacagaatacgttgcacctgaaaatgacattgaagcattctttgcaaacttgttcggtgaaatcttaggattggatgaggtcagcgccactgataacttctttgaaattggtggaacatcacttttagttactaaaatcactatggaagcattgaatagaaattataacctaagctatggggatgtcttctcaaatcctactccaagggcattgtctgaattgattctatcagatgagaccgctgagaaaaaatcagagttgtcttatgattactcagaaatcaatgcgcttcttaagaagaacaatcttgaaaacataataaatggcgagattcaagaaagcttaggcaatacattgcttacaggagccacaggatttttaggaatacatgtccttagggaactgattgaaaatgatatcggagacatttactgtttcataagagccaataaggtcttaagcggagaggaaagattgaagtcattgctattctattacttctctgatgaatattccgacatattctctgaaaggctccatgtcattgaaggggacattaccagtttcgatgactttgaaaagcttgtccatgaaagaattgacactgtaatcaactgtgcagctaacgtaaagcatttctcctctggaaccgatattgaggatatcaaccttggaggggttataaacggacttaagttcgctaaaatgaagaatgcaaaatatgttcaggtatctacatacagtattgccggtgaaagcataaacaattatcctccagttgatgttaagtttagcgaaaatgacctcttcatcggtcaggctgtggataatcaataccttaattccaaattcctggcagaacgtgcagtcttagaggctgccgtcaatgatgacttggatgttaagatcatgagggttggaaacctgatggcaagaagttcagacagcgagttccaaatcaactttgagtcaaacggattcattaatcgtctgaaggcatttgtgacaattggaaaaatgccatattcaatgcttatgaacaatgtggaattttcaccgattgacatgactgcaaaatccattgtagctctttcaaaaactcctaaggaatgtactgtattccatccatatgatcatcatagcgtttgctttggtgatataattgaaattatcaaacctttaggattggatatcgaacctgctgaagaggaagattatgaaaaggctttagatgaggctcttgctgataaggacaagcaagacggtgtttctggacttattacttcaataggatctggaaaggttaagaagatctgggtccctgttgaaaatgtatacactattcaggcattgtatagattaggcattaaatggcctttcgtatctgaggaatacatatataattttgtaaaatacttgaatgatcttgatttctttagtgtttag

SEQ ID NO: 69 - DNA, 1461 bp, Methanobrevibacter ruminantium
  source 1..1461: mol_type = genomic DNA
atgtatgaaaggaattataaattgttgagggcaaaattctctgaatttttccttcccacattatttacatcaatggcaggtaacatatgcctatttgttgatggtttgattgtaagttttttaattggagccagtaatcttgctcctattcagattgtagctccagtaatcacatttgtcaatcttatttattggatgatcggattgggaggaagcgtcctatgttctgttgcaaaggcagaatttgatgatgaaaaaagcaatagctacttttcagtatcaatcatatccctcatatccatcggggtattgattacggttataggactcttgttttcaggaagcattgcccagttcctatgctcttcacagcctgaattggtttcacaagtgtcccaatatttcattgcattggttattggaatgccattcttatgttatatgatgagcttatcttatttcataagggcggatggtatcccccaactgccattcagggctatacttatagcaaatattgtcaatatttgctttgacattatttacattaagtttttcaatttgggcctaacaggggcggcgcttgctacctcaaccggttatcttgtaggttccattttaatttcatattacttctttaaaaaggaacgtactttggaatttataaaattgaaagctaacgctttctttaaattcattaaaaagatagttacttcaggattttcttctgcgtcaactcaactctatctgactttaaaattgcttgtcataaactttttagttggcctttacgttggaaagtcaggggttgtcgcattcggaatttgttataacagtctgttcatactatacatattcctgattggaactgcacagacaatgtctccaatcgtatctgtttactttaaggaggaagactattctggagttgactatattataaagaggtcccttaagatagtggttgcttcaagtttggctctgtctgttttattcatattctatcctcaggccttgcttttcttgtatagtgttaaagacccggcagatgttcctgtagtattgaatgcattgagaatttttgcaataagttatgtaggaactgcaattacattcttatataccttctatgctcaagcaattcaaaagaacagattatccacaatcatttcattgcttgaaggatttctattgccaatttcagcagcagtcatattgtcttttgcaattggtggaaatggaatttggatttcatttgcaatagctgagctattgacaatattattcatattcgcttattcaagaaacatcaataaaaagacaaatggggaatacactggatttttcataaacaagcacaatgatgatgaaagggtatttgaatatacaatcaatggaaatattgaagaggcagtaaatctccttcagaggaagtcccaaaaattaccttatctggggtga

SEQ ID NO: 70 - DNA, 237 bp, Methanobrevibacter ruminantium
  source 1..237: mol_type = genomic DNA
atgcttgtaaatatcattaacattaatgatgtagtcgatacgattgatatcatcgttagaaagaatgttgataatattttaatttcagttaaggacactggggttgatttcaatcctgtggtggaaaatgaagagcttaaattcgataatatatctgtgttgaataaaattgcagataagattgattattctagagttttaggcttgaacagtacagtgataactataaagaattaa

SEQ ID NO: 71 - DNA, 1062 bp, Methanobrevibacter ruminantium
  source 1..1062: mol_type = genomic DNA
atgtttaacaactataaagacaaactgaccggagatagaaagatcctaatattgtttgtaatattagccatctttaacatagccttatacatcaacatattcaagtatatggttgacatcaaggacataaacatggcggtcatacacgactttgtcacaatcaactgtgcaatcataatcctaggatttacttcaaccaggctccccaatcttaaaaagcgtgacagttcaatttatgaaataagctatcttatcatcataggcctattaagcataaccatttcattctttaacaagtccatcaatggggaatcattatgggctccctatttggaaatgttcaggatcctatctgtcgtcctgattttaacattcctagccactaaaaccaaaagctttaaggccgtagtaaggggagaccgctcccgaaagacaatcatctcacagataatcctatgttcagtccttggaatccttgcatcatatttcacaatggacatcaacggccttccagccaatgcaagagcattggttgtaatgatatccggattgcttggagggccatatattggaatacctgtaggaataatctctggagtctggagatattcaatgggaggtcctacagcattggcatgcgccattgcaacaattctagccggaatcactggaagcatcatccacagatggaatgggaatgaattcatatccccagtcaaggcagggcttttaatgtttttttacagcggctttgagatgtttctgcttaccatattgaccccaagaccaactggactcatcgttgcaagcaatctttatggcccgatgacatttgcagcagtccttggaatcctactattcagcctatttttagatgagaaaaaagagaaagctgaaaccgatactgatgatggagatgaagataaaaagatagaactaatgtcggaagaattggaagaatataaaataaaagccaaccaaaccgaaggggaactaaaagagtataaagataaggttgaaaagctagaacaggaattaaatgaaatcaaaggcaaaatataa

SEQ ID NO: 72 - DNA, 2919 bp, Methanobrevibacter ruminantium
  source 1..2919: mol_type = genomic DNA
atggataaaaagatttttatagttagctttattctgctagctattttcacaataggggctgttggcgcttctgatgtatcagagctgacagcaaatgatttagatgataatgctttatctctaaatgatggtgaagatttgcttgctggagatgaatctggtgaatctggcaaggaatcttattttaataatgataataactataatgatgaaaatagggtaaatgcgaataatcttgattatggtgctggtgataatgatgcatctaaagacaaggtcctatctgataatgtttccgattatatctatgccactacccttagcgtatctgtcgatgacactcctcaaagccagtatcctaccgccactgtcagcttaaatgatttgagtggcaatcctgttgctgaagccagcgtttccgtcagtgtcgatggtgatgattatatgactgtaatcaccacaacagatggtacatgccctctttcacttgataactatctgtctgtaggcagtcataaggttggggcagagtattccggcgatgggacttatggaccttcaagcgcttccaccacattcaatgtattggaagaatattcctcttatctaaatacagatttgttcatatatacaggcactggcagggaagggggctatacttctgttacaggtaagctgactcatataaatcagcctatatccaatgctacaatttccctttatgtcgacgatgacttctattctaatctgaccactgataagcaaggcgaaatcgaggggatgttattcaatataagcgtaggccgtcatgagcttaggggagaatatgtaggtgatcgaggatttgaaccctcaaatgccaccaaatacttcaatgtcttgcctaaggattcagtttccagcaatattcaaatgacactgaatgcctctgatgctcaagtgggaacacaagctaatgcatatgtcttattggaaagacaatatggaggccctatggaggatgctacaatttccatcagcgttgatgacgtattttatatgaatgtgaccactaacgccctaggttatgctttctttgatttgtctgatgacttgtctgtaggcagccataagctttctggagaatatcctggcaatgagtatacaggctcatcaagcgcttcaatcactttcaatattttaccagtggacgattccagctataacttcactgttaccgaatatgcaaattacttagacactaataccacagttcttgatatttcatcaaaatactatgtcaacggaagctttaatgtttcagttgtctctccaaacggaactctgtccactttcactcaagactgcagtcctgatggccataataattggtcaatggctgattttggaattgatggcattggaagctatatcatttccggatctttaatctttaagaatgagacattaacccattttgacaatcagaccttccatgcaatctgcatcaggccgatatatatggaaagcactgaagccaacaatccgttggatatcctggtggtatataattcaagcgatgcaaccaaggtctctgtgaatggctccggcctatttgaaggacgaaaaatcactgatggtcctatagtctggaatcttacagacttaaacatcactgagcttggagactataacatcagcgttatgtcatatgacagcaaaggcaatctcattgacagatttgactataatctgaccattggccctaatggggacgactataaactctatgcaaagatagatccaaactcttacagtactgatgatgtggctgtagcattatattgtccaaatgcatcatggggaaatgacatagaggttcatatttatatgggcaaccctcttgaagttctcacctttttcccagatagcgttagtcctacagaagcagcgtcttttaagaaatacacattagctgatttgagaattgaaaatagcaatgattatagggttgagattaaggactttgctctcaaccaattcccagggatttcattcaacataaaagtctgctatagcaatatgattctcgtcagcggaaacggaagctttgagattgactttgatggtgcgtcagtcaatgcaaccctaacagattcaaatggaaatcctatttcaaatgctagcgtttcagctttagttaatggagtagagtctaactgcactacagatgataatggtaatctaataattccatttgaaggcaatacaactgtaaaattgacttatattgataataatggagttgaaataaaaggcaccgggaagtatgtcaaggaatctgtcattaagaatagaactgaaaccaagattatctatcaaaacatgacaaccactacagtcaattccaatgtagacggaaggataggcaagtactttgaagtaagtctgcaggacgccgatggaaacccaattgcaaacaagactgtattcataggattcaatggaaaggtctacaaccgtaccactaactctacaggtggcgtaagcttacagatcaaccttggatatgctggaaaatatacatttgccatagcattccttggagatgatgattatatgggctcatttgaagttgctttaatcactgtaaacaagcagactcctaagattacagcaagctctaaggcttataggcctaattccaaggctaagtctttagttgctacattgaagtctgcaaagggcaatgcaataagcggcaagaagataagctttaccattaatggaaagacctattcaacaactacaaatgcaaaaggacttgctacattgaatgtttctttaagtaagaaaggaacttactcctgtactgctaaatatgcaggagatggaatgtataaggcaactagtactaagtttagtgtaaaaatagcttaa

SEQ ID NO: 73 - DNA, 1464 bp, Methanobrevibacter ruminantium
  source 1..1464: mol_type = genomic DNA
atgactgtaaaagtctttataagcagtaatcaaaatgaattctttgaagaaaggaagttaatcaaaaaagagctcgaatctgattccatgtttaaaaactatgttgatgtttttgtttttgaagaaaatgaagcaagatccttatctccacaggaaaatttcatcgaaggattatataattccgatgtatatatcggtcttatcggatcatcttatggcgatataaaggacaatggattatcctctacagaatatgaatatgagattttcagcagacttaagaacaaacagaatatctatttttttataaaggattccaatgaaagagaagataaggctctggatttcattgaaagaattaaaagcgatacaagctttaaaatttttcacaatactgtagagctcattgaagagataaaaaggagcctaaaggcacatataaatcagagtctaagcaatcaggaatttgactttcaattgttagcagaatccagttgtgacgatgttagcaaggaagctttagatttgctttttgattccattgattatcagcctatactggatttattaggtaatcgtgatatggagagcatattagaaatcttaagcttgggaaagaaagatttgtcaggaacttttcgtttaaacaatgccggtgccttatttttagcagaaaacattgaaaagtttaacattgagcatgaagtgaaactggttaggtttaaagggaataccaaattggaaatgattgacaaatgctataccaccagtcctttctttattcttttaaaggagtttgaacatttctattggaaaaacattaaagtgggctctgtcattaacggcttgcgacgtgtaaatattccagaatatccctttaatgccatcagggaggctatgataaatgctttggcccatagggattatagctttaagggcagtttcattcaattttatatctatgacgataggattgagataattagtccgggaaatcttttgtatccattaaaggtttctaatttgaagaatattgaagtccctgtgcaccgaaataagaatatttgtaatttgttctccaaaaccatttttatggagcacgttggctctggaattcagcgcatgtgtgatgagatgagaaagtctggcttgagggaacctgaatttataaacggcgagggattctttaaggtaatattttggggacctaatggaaaattgatctatccggaagaggctgtggataataatgttttggacctaactaaagtagggttgaatgataggcagataagagcattgtcaagaatagttaatgaaaaagtaaaatattcctatgaaagatattctaatgagtttgatgtgtctaaatcaacttctaaacgagatttaaatgatttggctaagaaagggctagttattgaaaataaatccaatagaagaaattattattttgttgaataa

SEQ ID NO: 74 - DNA, 528 bp, Methanobrevibacter ruminantium
  source 1..528: mol_type = genomic DNA
atgatagacgaatcaatactcaatttatttaaagacgaaaaaataaggtccatttgggatgataagacaggagattactactattcaattgttgaccttatttcaatcattaccgaaagcaaaaatcctgataaatattggtctgatttgaaaagaaagatgaaaaaggatgaatacaacctattgaataaatatatagttcagatggaaatgccctcctctaatggcaagatgcgtttgacagatgcaggggatattgaaacggttttgcgaataatacaagcagttccatcaccaaatgcagagccttataaggaatggctagcccaagtggccaacgaatgccttgaagagtatataaatcctgaattagctattgaaatggcaataggcgcttatcgcaaaaagggctatagcgaagagtggatcagtcgaaagctctttagcatggagataagaaatggccttaagaaagagggttttaaagaaaagacaaatagggagcatgttttagatagtttagcttaa

SEQ ID NO: 75 - DNA, 1230 bp, Methanobrevibacter ruminantium
  source 1..1230: mol_type = genomic DNA
atggtgaaaagagaattatatatgaataaaatcaatagcttcattgataaggatttaataaaaataataaccggtgtaagacgtagcggcaaatcttacttttttaaattaatcattaatgaactaaaggaaagaggagtggctgaagaaaatattcttttaatagattttgaacttcctcaatacagacatataaaaacaagtgaagagttagatgagattgtattggatttcattgattcacatcctgaaaaaacatatctcttttttgatgagatacaaaatgtttccgagtgggagctgtctgtaaattcatattataaattatcaaaaagcgatatttacattaccggttccaattttaaattattatctaaagaattagctagctttttaacagggcgttatgtttcaattaacatgtatcctttttcatttaatgaatttattgattataaaaaggagattgggtctctgcctataaatagcaatgaattaaataccgagcttgaaaattatttcgatgaatattttcgctatggcggttttcctacagcgatttcttctaatgaccataaggagataatattgaatgatttatattcatcaattattttaaatgacatcgtcacaagatatgagataagaaatgtaggcctattcagtaggataatcaagtttttaattgaaaatgtaggaaatttgatatctgccaattccttgtataattatttaagaggacaaggtatggaaattaccaaaccaacaatatacaattatctaaattatttggaaagtgctaatatactatctaaaattacaagggaggatttagtaggcaaaagagaaattaacggttctgaaaagtattatttgatagaccaaggattttataggtcccagttggagattaaacaagaaaatactggcagaatcatagaaaatattgtttacttggaattacttaggagaggttacacaatcactataggatgcattggaaaattggaagttgattttgtatgcaaaaggaacaatgagaggatatatattcaagttgcatattatttaagcagtgatgaaaccattgaaagggaatttgaacctttaaggagaatatcagataactatccgaaatatgttttatccatggataagacagaccaatctcgtgaaggcattaaacatttaaacataattcaattcttaagatcttctgaagatatttga

SEQ ID NO: 76 - DNA, 6606 bp, Methanobrevibacter ruminantium
  source 1..6606: mol_type = genomic DNA
atgatgaaaatgactaaaaagaatctttttttaattagtttaatactactaattattcttacaattggtgctgtcagcgcagctgatgatttatctgcatcatcagatctgacagttgaagattctggagaagccatagctacggctcctgaagaatctgttctgattaatgaaaataatggagattcgattgctgataaggggcttagtgatcctatctcaaatgaaactgcgaatatcgcaatagatgaaaagactacaaatgataaagctatttctgaagaggataattccatttattctaaagacaaggctaatgttcttcgtgaaaatgaaacacctgttattttgactataaatgctccaaatatctattatggtgaaaccgctaatgtaactgtttctgcaaggtatggggctgggcctttagccaacagtagcattaatcttgctcttgatggcgcagctggtgaaaatattttaatttttgatgacggtattgctcaaaagaattatactggtttagctgcaggcaatcatgctgttgtagcatcctttagcggatatggtccttatccttctgcaagtgcttcaaaaagctttgaagttttaaccccgacagtcaatatagagatagaagctaatgatatctattatggggaaagagcttatgtcactcttcatgtaacctatggaaaccagccttttgccaataatactatccaagtatctcttgatggccaaagcagtacaagttttatcgtagaggatgatggcaatattcaagtgacttattccaatttggctctaggcagtcacactgtttcagcatactttagcggatatggtccttatccatctgcaagcgcttcaaaagacttcaaggtttcaaaaaaggaaactgctgtatcattgagcgtgtccaatcctcagcttgataagggtgatgagcttcgtttcactcctagcgtaatttcaaacggattttatgttatggctaattcctattccattatggttgatggcatgagtaattattcttattggactgaaaacggcacttatttcctttcaacttcctctcttagtagtggaaatcatactcttactgtaagttatgctggagatgcgagtttcttgccttcatctgcaaatgccactttcacagtcaattcttacaaggccactttatcattaatgatgattgaaacagagctttatccgggggatgattgttatattttcattgatctctatgacagcaatactcatcagtcaattgcagctaatattacagtaagcgttggcaataattcttatctgtatcctattcgagtgaattcaagctttaatcttcctactgataatcttgctcctggagtttacaatgtaactgcattctttgatggaaatggtctatatgatcctgaaactgcagttggaaccttgactgttctttctaagaaggaaactactttatcattaagcatatccaatcctgttcttagtattggggatgagcttcgtttcattcctagtttaactggagatgggtcttacatttggggtgcttcctatacaattaaggttgatggcatgggcaatcagacttgtaggcttgttaacgatacttatttcctttcaacttccgattttgcgattggtaatcatgcccttactgtaagttatgctggaaatggtgaatacatgccttcatctgcaaccggttatttcgaagttactcctaaaaaggccaatttatcattaaacatgttatcaacagagctttatcctggtgatgactgttatctttacatttatttgactgacagcaatactcatcagtcaattgcagcgaatattacaataagcgttggcaataattcttatccgtatcctattcgagagaattcaagctttaatcttcctactgataatcttgctcctggagtttacaatgtaactgcattctatcctggaaatgatctatacggtcctgaaactgcagttgaaaccttaacagttatggaggaaaacgctacaatcaaaacagaaacctatctaagcataattatggcttctggagataaatatcttggagacaatataccattctcagttagccgaactccatctggagtttcactctttggagataattacatctttagcattgacggagttgagtctcaagatatattctatgagaatttctcctatttcattgtaactgagaacctttcccttggaaaccataaccttacagcatattatccaggagatgagatgtacttgccttcatctgcaagtcagaacttcacacttatctctaggcctaaatcagatgtcttattaagcatagaggcaaatgacactttcattggagaggatgcgactattataatcaatatgattgatgaattaggcaatcctattgatggagctaacgtttacctttatatggataataaggaatttgctcttccgttagtaaatggtgtcgctcaattctcctactctaatttatcattaggcacatatctagttagcgcattatttaacggaactgaatactataatcctgcaaacgcttctgcaagctttgaagttctaaatgcaaacctaactgtaaccaaggataacttcttccaattcttcaataataacggagtattgaatacaaatgcaactgacttaaaatttgtaggtgaatttaatgatttaggcattacaagcataaaaatcaacaagccagtttccattgtaggtgaaaatgcaaatataatcaacattccagtgattgtctcttcagatgacgtatcccttgcaaacattgcatttgcctacaacggttcagagcctataatatatgcaaacaatgtggctaatctagaaatcataaacaatgcattctcctataaatccccttcagataaaagctatgcagtaaacattacaaaatctgaaaatgtaacaataatcgacaattcctttaatgtagtgggtggaaacaatacctatggtattaatatagatgcaattggctttgaaatcgattccaacgatatctatgttgaatccacagagtattatgcctcagcaatcaacatcaacggtccaagttcaggaaatgttttaaacaacaccattaatgcatacgctcctatgatggtctatgcaatcaatacagacccatctagcggaacccttgaaacaagctacagagacaatgtaattgaaggagaatcctactttgcaatcggtatttacgacgattcagaaacaatcaccggtaacgaaatcaaattgactgctaactatgcaataggaattgtagctctctctgaatctaacattgaagacaataaaatcaagttagatgctacaaatgtcggtgacgaggatgttgaagatgatgaagttgacgttcagactgcaggaattgtaatcaagaacaatgttcaagttacaggaaacaatatcgattcaagcgacgcatccattgcagttgtctcaggaagctccaccattaacaataatgcattgaatggtcatgtaaccgttggaggagacagcagcgacaataatatcgtaaacaatatcatcaacacagaatcagaatatgcagttgaattgaccacaacaaccggaaacactgtatacaacaatgagatccatgcagctgatactgtaggtaacgatgctgtaaatgctgaaaatataggtgcaaacactgtagaggaaaataacgattgggtaaacatcactaacttgatattgacagtgaatgatgattcaactgaagtcactgcaaaccttactgacatttggggaaatcctataagcggcatcataaatgtttcactaaacggtgcagatccagccgaatgcacagtaaatgaaactggattatatgtgattccaatcacccaaaactcaaccgtttacgcttcttatataaatgtagacggcagtctttcctttgataagataaaagtaattgtatttaacttccctgtagaagttcttcctaatgctaccattgcattgactgaccttgatggcactgttgttgctaatgtgactgaccttgagggtaatgctatagctaataaattgcttgcagttaccgttaatgatattccggttcttggtgctcaaactgatgatgaaggtatttattctattgatgtagtaggcaatgccactgttgttgtaagttacattgatgctaatggaattactgttagcagttcaattcaaataattaacaatgttgaaactgaaaccggaaccataattattcgtcctaatgctactattgcattgactaatgttgatggcactgttgttgctaatgtgactgatcttgatggcaatgctttagctaataagttgttaactgtcactgttaatggtgcttctaagcttggagctaaaacagatgaaaatggtatttattctatcgatgttgatggcaatgccactgttgttgtaagttacactgatgctaatggaattactgttaccagttccattaatgtggttgttaatacagtaacagagactgaaactttacgtcctaatgctaccattggtttggaaagggatggaaatgttgtcattattactttagttgattctgatgataatcctatttctggtgctgatgtggttgtttatgttaatgatattgaaactttagttgatcctactgatagtgaaggtaaaaccaacgtatcctttgaaggaaacgctactattgaagttatttatcttgatgataatcttatagctgtttctagctccattgaaattattaacaatactgaagttgagattgagagtgaaactttacgtcctaatgttaccattggtttggaaagggatggaaatgttgtcattattactttagttgattctgatgataatcctatttctggtgctgatgtggttgtttatgttaatgatattgagactttagttgatcctactgatagtgaaggtaaaaccaacgtatcctttgaaggaaacgctactattgaagttatttatcttgatgataatcttatagctgtttctagctccattgaaattattaacgatactgttgaaggcgaaaccattattatcaatcctgacgctaccattaagttacatcatgttgataataaggtcattgttaatttgactgaccttgaaggtcatcctttagctgataaggtgatttacgtatatgttaattatgaagagatagaaggtgctaagactgatgagaatggtctttattctgttgatatagaaggcaatacatctgttattgtcacttatgtcgatcctgttggaagaagggttaccagttccattgatgtggttgtaaatactgaaactgagaccgagactgttgttattcgtcctaatgctactattgcattgactaatgttgatggcactgttgttgctaatgtgactgatcttgagggcaatgctatagctaataaattgcttactgttactgttaatggtgctcctaagcttggtgctcaaacagatgaaaatggtatttattctgttgatgtagatggcaatgctactgttgttgtaagttgcactgatgataatggcataactgtcaccagttctattatagttgtcaacagcactgagatagtggaagttgaaaagatagtaaaccaaacagttgaagttgaaaagattgtctatgtaaaccagactgtagaggttcctgttgaggttgaaaagatcgtttatgtaaaccaaacaaataataacactattgaggttgagaagattgtctatgtaaaccagactgtagaggttccggttgaagtagagaagattatttacatcaacaatactgtagaggttcctgttgaagttgagaagattgtctatgtaaatgaaaccgacaacagcaccattggaactgaaaagattgtctatattaaccaaactgttgaaaagatagtttatgtaaatcaaacagttcctattattccaaatagaactgccactaatattatatgtgataatatgactactgaggcagttgctacagttgacggaagaataggtaaatactttgaagtgactttggtggatgctgatggaaacccattggtcaataagccagtcgccattggattttcaggcaagatctataaccgtataacaaatgagacagggggcgtaaagctacagatcaaccttggatacaaaggttcatacacctttgccatagcattccttggagatgatgactataacggttcatttgcagttgcaaacgttaaggtaactgatcagaatgctaaacttacagcaagtggaaaagcctataaggctagcgctaagactaaagcagtatctgctaccttcaagtctgcaaatggaaatgcaataagcggcaagaagataagcttcactgtcaatggaaaaacctattcagcgactacaaacgataagggagtcgctaaggtcaatgtttcattgaataaaaaaggaacttacacttgcacagccaaatttacaggaaatggaatgtataagacaacaagcactagtttcaaagtaaaaatattttaa

SEQ ID NO: 77 - DNA, 9162 bp, Methanobrevibacter ruminantium
  source 1..9162: mol_type = genomic DNA
atggtgattatgaataataaaaagctttttattgttagtttgattatactaactattttgacaataggcgctgtcagtgcagctgatgatggcctggccacatcagatgagataacagtggatgattcgtcagtagccgtttctacggcttctgcagagtcagatatttatgaaactaatggagatatagttgctgactatcaaagtgattctatctcaaatgtaactgtggatgatgataatactaaagatgagataatacgctcttctcctgctaaggacaatcttcttcttgatgatgatgacgatcctggtgctgtaaatgatgatgatgaaggggatgacgatgaagactaccttgatgatatctcagtgtctatcacaaatgaatatgacgtaaccgatcaggatgcggttatagtttccatattcgttccagatgttgaagaaggagaggatggcattgaaggatattttgtcgtttgtcttgatgacgatgatgagatattcttaggtcctttcaatcatacaatcactcctgatgactatgggactgatgttacttttactgcttctgatttagagattacagaagctgcgaattattgggtacgtgttttctatgttagcgatctggctgaacctcttatcgataatgatgaggaagatggatacaatatgatttttgatggggattgtattgcaagagattacactcaattttatgtaatcgtccctccagatggcagaataagcatttttgacactagtgctatctataccgtttactgccctccaggaagtgaaggcacagtcaccttaactctaagggatgaggaggatgtagagacttcatttacccaggaaattgaagatgctgatgatgaaaatcaattatattgggatttagattatatgggattgaacactatagatgccgccggcaactatgaggtaacaatcactcttgaaaatggcactctcatttgtgaggatgatataagaattatggatcctatagaaattcctgaagtctcttacatcaactctacagactatgaccatgcaactttagtcgctctcattaagattccaagtgagcttgatgatgatttggaagaactcattgatggaacagtcattattcaaatagacgatgaaacagtcttcgaaaagacattaagcgaatttgtcgaaggagaaagccctgatgacccattttgggtttacccaaaaatacattggagtgatgaactagacacttcagttaaattatactatgtcctcaacaatcaattggatatagatttagagcctggaacatatgatgtgacagtcaagcttgaccttgacggatgggatgaagtctcaagtactgaagaggttcgcttggtagaaagcaatgtagtcatcgatgaggacattggcgcaagcattgaaatctttgaccaagaggatatcctcaatgataatgaggtaagaatcatcgctatcactgtaaccggcgataagagtggaagagttaatttagcagtagaaggatgtcctgaatgggaatgtccattagatgaattggagaatgaaggcgacatctattatattaattccggctttgatattgaaagcggtgaacatgaggttgtcgtctcctatgtcctaaatgatgatagatctgtttcaaacagcgctatccttaactttatcgtctatccaagaattttcatttgtggaaatggcggtgaagacatagtaaactatttcgctgatgaggatagtgcaattcacatatatcctaagggagatgacgtctccaccataaggattgtggtaacaattggagatgaagttgttctagattccactatagatgatttaggattaagccctaagataaacgattggggagaaacctattatacagtaggtcctgctaatttcaacaaaaagcttgaatttggccattatgagccagtggttgcttattattatagtgatgcatatgagcttagcactgaggatggggaactttcattcattgacattatcggaatggtccatgtagctgacattgaagatgatgaaactccagtactggctgtttgctctgaccgtgatggtcaaattggagtatatattcgccaatatactgaagatggcgaccaagagttagagccaaaatactttgaagttgaaaaacatggcttcataatgcctaccatagaccaattaggccttgatgaaggacaatatcacattgatgttgcatatgccgatgacgaatggatctttggcaacgatttaatcgttgtaaacagttccgaatactttgtgctctatggctgtgactggctatacactgaagagagtgtagtctatgtatggtgtccggatgatgctgaaggaatcattagcctcactaacaatgatggaacaataaatgtcgatcatgaaattacagatgaggataagggcaaatatgtcgaattcaccttagaggaattaggcataagcggacctggctggtatgaaatcagcgtaagggtaaatggcaatgaaatcgatcatattggatttgatgttccaagccctatctacatgcctaattataatgtatatcttccagaggaaggatacgaacctgattattcaatgattattgccaaacttgaactcaattcagaattagaaggcaacattaccataaaccttgatggaaccattgtcttcaataaggatattgaggatatggaagctattaaagatggctccaaatggatttacaccatctacacttctgatttggatgaagcagaagaaggaatgcatgatgttactgtcaccttcaacgatttaaatgaagaaagatccatagaattccttaatagaacaactgaatctgatggtaacttaagcatcataatgcttggaggaacctattgcattaactggaatgatgtaattgctgaggtcattgctccaactaactataatggcagacttgtcctaaggcttcaaggtgaaataatgcaatcttgggatgaattgcattgggtcaattgggataactacaatgacactcacaatatctattatatttatgtagataatttagataaaatgtgtattgaaaatccaggagaatacactgtttctctagagtactattcagatagggaagatgagaatccatcccttcaaaatagcgaggaatatagatttgtgagagatgaagagccttcaggtgactttgaatgggaggtctatcattgggcagactatgaagatgaaaacagcctgctcgttacagtcagatataatgataatatagttgacggcagaatagaaatcaacattgaagatccaaatggcataactttaacagattcaagggatgtcggcgaaggatatgaggacacttggcttgtttcagacttgggaattcaagaatatggagtttacacaataagcgcaaaacacattttaggtgatgatgaggaaatcatatttgaaaatgaacctgtatatgtaactaaaatacagattagaggtgaagaggaagtttatgtagacgacccattattcgtattggccatatatcatgccggcgataggactacagtatatctaaatggcgcaggaattgaaggcagaagattgcctaatggaggtcctcttgtatggtatctctctgatttgtatatcaatgaacctggggagtatgactgcaccattcaattgtttgatgaggatgacaatttatttgcacagaccgaatattacttaaatgttattgaaggggatgacggctatagattgattaaaaaccttgattgggactatttcacttcaagcactcctgttgctgcattatactgtcctgaaggttctgttggagacatatcaattgacatttacgctccagatgacaatgatgatgattaccgcagccgtgatatagtaaatacaatactagattccattggctctgaagacgttggtggcttcaagatatggactttaggcgatttgggaattaacgaaggtggctggaactatggatttgtccttaatgacgctgatggtgacaccattaccgatgaaaatggtgaaaactgtgaatttggcttcggagcagtgctctatcatggaatcggcattgccatatgggatcaaaatcctgttgcccttgataacgaatggcttgtggatatctactctcctttagacaatgacggtgatgtaattcttatgattggagatgaggtctacttcagtgacactttgcagaacttagcgatgtatcaatatgatgaagatatagagcaaggctgtgcccacttccactttggagcaaacagcttcaaccgcacaatagaaacaggccattatgaagaggtcatagtctactatgatggatttgatggatatagtacagacagtactgctttcgattgtccaactgtcttagactttggcaagcctatgaactttgactggtctgtcaaaggcgcttattatgaatattatgataataatgtgattaacgtttggtataatgaggagataaatggcggtcaaataaaaatcattgcaagagctgaaaatggcactgaatacgaatctgtaaaagattataatgacaatcgcaataacgagtggaccatcactgactttggcataagcgaaatcggaaaatacaaccttaccttgatatacattaatgaaggcgatgaagagattgtccgtgacgataaggtattgcaggttctaaccttcgaccctcgttttgctaactgggtaactgtggaccatccatatgacgtccttgcaatataccaagctacagaagaaatcagggtctatgtaaacggcgaaggcccatatgaaggtattaaaatgcctaatgatggtcctttatcctgggatcttgaggctttaggaataagcgctgcaggtgaatatgagattcttgtagagtcctatgacggagaaggcaatctcctcagcagctttgaagatgtattgtatgtaagtgatgagatgaatcctaatgaatacagggtagagtatgcaaatgattgggacttctactctttagacagtcctgtatttggattgtattgtcctgaaggaagcgaaggccctataacaattgaagtctatggtcctgatgataatgatgctcttttaaacacaatcaatgataatatcgaatctggagatattggcacaatcaagagctggactgtcggagaattgatcactaacttaaatggctgggactacagatttgtaatctccgatgcaaatggcatcattaagaatggaaatgatgaggatatcggagaatttaacagaggaatcaacttccatgactctatagattatataagtattaatgaatggtcttaccttgatgatgaatggtttatagacatctttgcatacactggaaatgatggagatgttgccgttgagtttgatggtgcaactgtatataatggcagattgagcgatcttttattcttccaatcagatgaagatatgcaaaggggcattgcccattaccacatccctgtatcatatctctctaatgaaggaaatccaattgaagcaggcctgtatttaaatataatcgttaagtattatggtgatgacggctataacactacaggctatacattacaatcatacattgatgaaaatggtttcgattgggctaatgtaaggttaagcgttggtgacgatcctaatacaatcattctcacattaaccaactcccattgggaacctttagcagataaggaggtatatatttctgtaaacggaggagaaagacaatggggattaactgatgagtatggtatagccattttcacaatagatggtggaaattgcacagttcgtggagagtatgagaatgcagagaatcaatggtccgcctatgaaatgactctatgtgtatttggggagcctatatatccaaatgctacaattagattagaatttgttgacggtgaggttattgtaactctaactgatggcgatggtgcacctctggctaataaaggtcttggtctagctatcgatggtatcgtagttattggccctagcactgatgattatggtatttatagaatgggtatagaaggcaatgcaactgttgaaattagctatcaagatgaaaatggaattgttgtttcaagttccattactatagtcaataatactgagactgaaactgtttatgttggccctaatgccacaatccgtcttgaaattgttgatgataatgttattgcaagccttagtgatggagatggcgcccctatagctaatgagtttattgatgtctctgttaatggagttcctgttaatggtgcaatgaccaatgccagcggtctttattccatctctgtagagggcaatgcaactgttgaggtcagctatactgatgataatggaattacagtttcaagctcaattaggataatcaacaatattgagactgttcctgagcctgttaatgttcttcctaatgctactatcggtctttcaaaagatggtgatagtgttgttattagtttgaaagatggttctggtgctgctattgctggtgctagtgtgaatgtttctgttaatggtggagatgtcactttagttggtcctactgatgctgatggtaaggctagtgttgaaatcagtggtaatgctactgttgtggccagttatgttgataataatggtataactgtttccagttctattgtgattaattctgagactgttcctgagcctgttaatgttcttcctaatgctactatcagtctttcaaaagagggtaatagtgttgttattagtttaaaggatggttctggtgctgctattgttggtgctagtgtgaatgtttctcttaatggtggagatgtcactttagttggtcctactgatgctgatggtaagactagtgttgaaatcagtggtaatgctactgtagtggccagttatgttgataataatggcataactgtttccagttctattataatcaccaataatacagaaattgtggtaattgaaaagtctcatactgctgatgctcttttcaatgtaattattcaagaggataaacttggagtatggctatacaataacaatgaggaagagcttgcaaataaaaacattacagttgtatttgatgatgatgaagaaggacaaaactaccttactgatggacaaggatatacatctattcctatcggcgatcattctattataaaactttcatacactgatgaagatggcgctagcgttttctacacagttcatctttttgaaaccggcgaggtagtcgatgctgattatgtagtcatatacataacccctcttgacgatagctcacttgaagtaagtgtctctgtcaatggtgaagaccttgaggaaggtgaaattacatattatcttggtgaagatgccgaaggaataaccgttgacctagaggatggtgtatatgtcattaattatgacaacactgtaaatcagacaattgctgttgaatacattgatgacgatgatgtaagttggtatgcctactatgaagtggtcgtatacaacaatactgtcactgaaacagtttacctaagccctaatgctactatcagcttatctaaatctggtaatgatgttcttgttagcttaactgataatgatggtaaagctattgctaatgctgacttggatgtattagtaaatggtgccaaatccactgctaagaccaatgcaaaaggtgaggctaccattgctattaatggaaatgctactgttgttgtaagctataaggacgctaataatatcactgttacaagttctatcactgtagtgaatgagactgaaacagttgtgattgagaagaacaataccataattgagtatgtaaatcaaacagttcctcctaatgctaccgtttccctatcccttgttgatggaaaggttgttgctgaagtaactgatggcgatggtgttcctttagctaataagcttcttgctgtaactgttaacggcgctcctaaacttggtgctgagaccgatgcaaatggtatctattccattcctgtggaaggcaatgcaactgttgttgtatcatgcactgacaataatggggtaactgtctcaagctcaatcactgtccttaacaatagcgagactgttgtagttgaaaagaacaatacaatagttgaatatgtaaatcaaaccgtatatgttcctgttgtttcaaactcaagctttgatatagttggagatgaaaatggaataagcgcaatcctgcttgatgaagatggcaagcctattagcggtgctgttgttgaacttgatgtaaatggagcaaaatccaatataactagtgataagaatggtgaaattgtgattccaacagataagaatggaaccataaccatgacctatactgatgagaacggcgctaagcttatctacacaaccaaggtgattactcaaacagagataatctatcaaaaccaaaccatagaggtccctgtttatatcaatgtaactcctaatagagcttcaacaaaggtcatttacaacaatatgtctacaacttcagtcaattccaatgttgatggaagaattggagaatactttaaagttcaattggttgactccaatggaaaggcattggctaataagactgtatacattggattcaatggaagagtttatgtgcgtcagacaaatgagaccggcggagcacagctacaaatcaacctcggttatcaaggagattacacatttgctatagcattccttggagacgatgattataatggatcctttgaagttgctataattaaggtaagcaagcaaagcgctaagcttacaactgctgctaaaacatataagacaagcgctaagaccaaagcattaagctctacattcaaatctgctaaaggtaatgcaataagcggaaagaaaataagtttcacagtaaatggaaaaacctatactggaaccaccgactcaaaaggtgttgctacagtcaaggtatctttatccaagaaaggaacttatagtttcactgcaaaattcgcaggagatggaatgtataaggaaactagtgttagctctaagctcactttaaaataa

SEQ ID NO: 78 - DNA, 849 bp, Methanobrevibacter ruminantium
  source 1..849: mol_type = genomic DNA
ttgaggaacattttcaatgagggtgaattggataaggattcagtatgtgcaaaaattgcacatactgccagtgatggtaaaatctataaaaccaatttttacaatctcgacgccatgatttctgtaggatatcgtgtaaatagcattaaggcaacaaggtttaggcaatggtccacatctgttttaaaggaatatatggttaaaggatatgtcttggatgatgttttattgaaaaatggcactcgctttggcaaggactattttgatgagctcttggaaaagattcgtgaaataagggccagcgaaagaagggcatatcaaaaggtgactgacatattctcccagtgcagctatgattacaatcccaaatccgaagttgcaagagaattttatgctaagattcaaaacaagcttaattttgcaatcaccggacatactgcagcagaaatcattagtgagcgagcagatagtgaaaaagagcatatgggtctaaagacatggaaaaactctcctgatggaaagattcttaagtctgatatatcaattgccaagaattatttaagcgaagatgagataaaaagcttaaacagattggtcaatatgtatttggactatgctgaaaaccaggcttatatgcataagctaatggggatggatgactgggctttaaagcttgatagctttttggagtttaatgattttgaagttttggataataagggccatattagcatgaatgaggctcaaaagattgcagatgctgaatttgataagtttagagtaaaacaggataagttctatcagtctgactttgacaaattattggaagatgttaaaagattaaaataa

SEQ ID NO: 79 - DNA, 3561 bp, Methanobrevibacter ruminantium
  source 1..3561: mol_type = genomic DNA
atgaagtttaataaaaataggggcatatctgccatatcaataattttaattctatttttaagtatttctatggcatctgctatagaaataagtgcagatgatgctgatatggattctggagacttatccgtttgtgaagtcagcacatctgattgctacggcgagactctaatcagcgctgatgcatccggtgctgattcaagtgatgaaattataatcaacgaaacaattgcagatgaaaagacagactatcgcagctcaatccttgctgatggtgagaagaaaaaccttcatgttgaagtctctaatgatgttttcacacctgataacgattatgagttcatgctctatgatgaggattttaatcaaatcggaggatatttggatatatatcttaatgatgaactaacatactctgattttaccgttgatagtagtgaaagttcttctattagcttaagtggtctagagtgcggattaaataagataactttcatatatgatgaagatgatgtttataatcgcctcaatcaaacaaaagaattttacatttatggagaaaatcctgaatttgtcatgatacctcattacgataccataacattaaatggcaattattcttctagagtatatctgaaggaatatgatgaatggggatactatgatgaggataatgagggcgatattgaacctatcgatgataaattcaatgtatacatatataaagaaaatcctggtgatgaatatgaacttgtttgggaagatgagttcgaagctaatggaaccattaatttcgatgatgccatcaaaaccactggaaactatttgattagatatgtctttaatggaagctccgattatagctatgctccatacaactcatctaacattataagatgtgtcaatgtcataaccgattttatcattaatgatacctactttattccggataagggtttcggattctcagtttatctggttgataatgccactggagacataatagataaagaatttaagcttatggtttattatattcttgatacttcaaatcctgtaagaatcgttgaagaggaaatggttaaaggaaataaaacctacacatttgattgcagcgaaattccagagaatattacttatttattcatcggatgtatttttgatggggatagggatgaatattcctctgcagataaagagtatgctcttgaattgactgatagtagaatagaaacttctattaacgctaacattggtgattctgtcataggaaattcaagcagtttccgcgtatatgtccaagatgaggagaattggggacaaatcgatgcaactttagacatttatcttaatgaagaatattcccaaactgttactgcatatgcctatcttgaaaacgaagttcttattgagaatcttaaaaaaggtgaaaatactcttagaatagtatataacggaactgatatttatcaaaattctgaaaagtcttataactttacagtatctgataagagagctaacattgaagttgacgttagcaacataatcgttggagatgtgacaaaaatcactgttaatctgactgatgaggatggcaatattctcaataaggaattcaatgtctctatttataagggcggctcttattatgatgaagacagtgaattaatatactcccaagtttatactggatctgccaacatatcacttccagaccttgaaattgatgattattatgttagagcagaatttgtagatgaaagctttgtctattctcaagcagaagatagcgagtacttcaatgtttattctaaaggcagttacatagaccttggtaaaacttattggcctgataatgatgatgtggttttaaacataagccttaggaattatattgaagaaaatattaatggagaagtccttttccaattcaatggcactgattatccattgacctgcactgaagatggggcaatcttaaaccttggcaaattgcctgtaggcaaatatcaaatcttcgctaaatttgatggtgatggagaatatgaagcttccaatttaaccgatcaattaagaatagttaaagcaacaatcattaatgtggaagcttgtgatgtcttaaaaggccaatctgaaactgtaaacatcacattcactgacggcgacggcaatccattggatgtcaaaatgttagatattaacatttgggatactgatggaaactggctggattatggacaattgagaaattccattgaaattaagaatattcaaaccgattatattatccgtgctatgttaagtgatagttatggagagattggttattctgactattatccttcaagcgcatatggattcatcagagtcttaaacggaaccgaccctactgtaattacagttacaaacactgctaacattgatttggctatcgatggccctaaagtgattatcacccttacagatgaggatggaaaagctatttctggtgctaaattaaatgcagctgttggaaatatggaatctattctaacaactgacagcaaaggccaagctgttttggctataggtgcaaatgacactgctaaagtgacttatactgatgagaatggtgctggtgttagtgcttccattgtaaacaatgtgattaacactacagttactgaaatcgttgaaaagaacataactgttcctgtaactgcaaatgccaccattgatttggctattgatggatctgatgtagtcgtaagccttaacgatcttgatggtaatgcaattgcttctgctagcttggatgctactgtcggcacaactaactctaccttaaccactgatgacaaaggtcaagctaaagttgcaatcggcgtaaacgaaaccgctaaagtgacttatactgatgagaacggtgctagtgttagcgcttccattgtaaataatgtgattaacagcacagttgtaatcaacaatacagttaagagaaatgcaactaagatcatttacaataatatgtctactgtctctgtcaattctgaggttgatggaagaataggagaatactttaatgtgactttagttgactccgatggaaatgcattggcaaataagactgtatacattggattcaatggaagagtctatgtccgtcagacaaatgagacaggcggagcacagctacaaatcaacctcggttatcaaggagattacacatttgctatagccttcttaggtgatgatgactacaacggatcatttgaagttgctatcattaaggtaagcaagcaaagcggtaagcttacaagctctccaaaaacctataaggctaaagctaagactaaaacagtttcagctacattcacttcctcttatggaaatcctatcccgggcaagaagataagtttcatagtcaatggaaaaacctactcagctaacaccaatgataagggagttgctacagtcaaggtttccctatccaagaaaggaacttatacctgcaatatcaaatttgcaggaaatggaatgtacactgaatccattgcaaaatctaagataactattaaatag

SEQ ID NO: 80 - DNA, 1461 bp, Methanobrevibacter ruminantium
  source 1..1461: mol_type = genomic DNA
atggagtataaaaagatgcttgccgaaattgatttttcaaaggatttgattggtttttttgaagataaaaacttatgcataattaatgaatctcttcttgatggtactttcggtctttcaagggatattttgtttgataaacgtattctctttaacaatgattctctaatcgatagttttctcttaaatgctaaagcttataatttgaataatgaattttttattttattaagcaatatcattagaaatgactttcaagaagccatttccaataaatctaataatgaaattttggattttgaagaaactcttgagaaagagagcccattttattctggaatacctgtatccaaagaaatgtttgtaggtcgtaaggatagcatacataagatattaagaaacttcccacatatttttaagggacagactagacatttctttttaactggggataggagaatggggaaaacatcccttattgattttataggagaatatatgaaatcatatggtgttgtaagtgtttatatttccaataagggtaatgattctgttgaatttttagcttatgagattgttgaagggcttattgatgaattaacccttcctgatgaatcccttaaaacaaagattgttgacttctttcaagatcatgtggaaagtgtggagtttaaaggaacaaaaataaagctaacggtagataaaaatctatctgtatcttttaaagaagatttcattaatcatttaaaatcaatctatgatgaatttggaatggataaaaaaggaattctgatagttgttgatgacattaatggcctttcaaattcagaggagtttgttcattggtataaaagaatggctgatacaatacaagtttctcatataaatttgcctgtttattttttacttgctgggtatcccgagaaattttataatcttacaaggcttgatgagtcttttggaagcatttttgcttacgataacttggatagattatccaatatggaagttttggaattttttgaaagttcttttggtgaaaaatccatgcttattgataaggatgccttattctacatgattttgttttctcaaggtcagccattaatgatgcaagagctaggagaatcagtattttgggaatgtcctaatggccatattgataaatatatagcaatcagaggaatcataaatgctgcaaatgttttagcaagcaggcagataaaatatactttaaatatcctaagtgaagatgataaggcaattttcaagtctttaatttcagatggaaagttttttttcaattcatcagatatctgtgatgagggatttttagagtctatgtttgatttaagtctgattgaagtttccaaaaaagaggattatgacttttgttttaaaaatactttggtctttatctatttttgggtagaagcaatacaaggtcttattgagaaataa

SEQ ID NO: 81 - DNA, 609 bp, Methanobrevibacter ruminantium
  source 1..609: mol_type = genomic DNA
atggaaactaaaaacctaatcataatatgtgttacattaattattcttgtatgccttggcctatttctcatatcccatatgaacggtcaggaagaaacccatataaccattctaacaagccaataccttacagaaggagacacattaaaactaaagctatgcgataaggatggaaagggaatagccgatcaaaagattagcttaaagatccaatcaaaggatggaaactttaatgacgatatagtcattaaaacagatgagaatggtgaaagccaaattcaaaacctgcaaaggggaaattatactctcatagccaaatacgatggaacaagccaatatgaaggctatggattaacctatgaattcattgtaagccctaaggaagttgagcaaagctctaaaaccactagcacaactacaactgccacatccaataatggagattatgcgagtgactataaggcagatgatgttatagatggttgggatccttcagaacatgaggtttctagagagtatttaggagagggtgagtatagagtcaattatgatgatggatattctagagtgattgacagtgatggaaatgttttaagctatggatattag

SEQ ID NO: 82 - DNA, 2523 bp, Methanobrevibacter ruminantium
  source 1..2523: mol_type = genomic DNA
atggcaatggtatctgcttctgatattagtgcagatgattctgtatctttagatgcagcagattcagacatcgtaagcactgattctataagtgttgactctgtaaacacatattctgcagattcagctatatcttctaatgaagataaagacaattatcacccttccaatctaaaggatgatgataataagatttcaaaaatcaattatgaacttaatgacaccgtcttttatggagatgatgtcataataaacgcaaatcttacagatatggacggaaacataatcgatgagtttttccaagttacagtttatgatgaaggcaatccattgcagtcaaacagcttgaaaggcaaggggaccatgattgttcctacagtctcattgaccgagagcagttattatgatgttgccctaagttttgcaggcaatgaggaatatgcttcctgcaatgaatttacaagctttaacgtgacttttaaggaaaattcatatcttgccatttctaattatgattcatattctaaaataaattcaactaaaataaacttcatcatatatgatgtggatgacgaatatatcaacgacacagctgacatttaccttaatggagaatattatacaagcgtccttacaaatggaaatgagaatgaagtgaccattgaaaacctccaagtgggagagaatactgttttagttaaatataacggctctaatatatataagggctcagaagactctgctaccataatgggatatgaaaaggatacctccattggaatcgatgctccagatgtccttattggaaacgatgcacggataaagattaatctaactgatgaggacggcaatattgtaaatggcagagtggatgtggaaatttacgaatactatactggtgacgacgaatcttatgttccatttaaagacgattatgtcgtgaatggagaggcaataattgttatttatcaatccaaattgcgtgcaggcgttacatatttcataagggctgattatgaaggaaatttaacttatttcagatcagttggctctgactactttgattgttttaacagaagcactgaaatagtaatcgatggaagaatcgcatctgatgataaggatatcactcttgagattggtctttttgaccaaagacaagtgatgattgcagggcttgtcaatctaacagttttcgacaatgaatccaatgtggtcattgacacaatttctgttgaaacaagcgctgatgattatgtcaatgtgacaatcggcaaattgccttatggccattatatgatcaatgcaagctttgaaggtaatgaagagtatgaaggatgcgaattggaagctaatttgcatgtctttaaggcaaccaacctaaccattgaagttcgtgaccaaatcaaaggagaatcccaaatagtcaacttctctttagtctcatctgatggcggattaaatgaaagcgcaagtcttatcataagaaatatggaaaatgacttgatttatgatggtataatcaactttacagatggtaaggcttcctataacttagacaaccttgaagaaggtcttattatcttagcagattataacaatggaatggacttagtaggaccatttgaaacagtctatgattcagcttccaaatttgcaactgtaaggattataaaacagctcaatggaaccattgagtttgagcctgtcaatgattccatcattgtaaacttaaaggacattgatggaaatccaattgcagaggctcctcttagtgtggatgtcaacggacaagtatttgaattaattaccgatgataacggtcaggcaatgcttgacaacattccaaacaatgtcacaatcgaggttaaatacacagataaccaaggtcttgtagcaagcaataagattgttgtccttgttaaggaacaaatcaagcaaagggctgcaagcaagattgtctgcaagaacatgagcactgtagctgtagctacacctgacggcagagtcggtgagtatttcaatgtcaccttaaccgatgcagatggaaatcctttagtcaataagacagttatgattggattcaatggaagggtatatacccgtacaaccaatgagactggagaggttaacttacagatcaaccttggttataagggatcctatacctttgctatgtgtttcttaggtgatgaggattataatgcatcctatgaggtatgtgtgattaaggtttcatctcaccagcctaaattgaccggaagcgctaagacctataaggtatctgcaaagactaaagcgatatctgcaacattcaagacatctaatggaaatgtaataagcggcaagtctttagttttcattatagacggcaagctttataatgctaagaccaattccaaaggagttgctactgtaaatgtttccatctctaaaaaaggaacttattcctgtaccgtaaggtccagtgatgatggaatgtatgcagctaccagcactaagtttaatgtaaagatagtttag

SEQ ID NO: 83 - DNA, 840 bp, Methanobrevibacter ruminantium
  source 1..840: mol_type = genomic DNA
gtgtttattttgaaatttgaaattaaaagaagtttaatattcatttcaatattagcaatattgatcttatctattggaatggcatctgcttctgaagaaatttctgattctgtttcaactgatatagcatctgaagatgttacaagcgaaattcaaacagataatgtagaaattactaatctagatgaagactcttctttagatgatgctgatttagaaaaggatacaggcgataaagtcaaaaaggcaaagaaaagaattaatactaaaatcatctaccaaaatatgagtaccaccgctgtagttaatgaatatgatggcagaactggggaatactttaatgtaactttagtggatgaagacgacaagcctgtagttggcgaattgattcaaattggattcaacggtagaatttataatcgtaccactgattcaaacggtggagcccaacttcaaatcaaccttgcttattcaggtccttatacctttgctatctgctatttaggtgaagatacctatgaatcttcctttgaagttgcagtaattaatgttgctgctaaaaagatgactttaactgttccttccaaaagctataaggcatctgctaaaaccaaaacattaactgctaccttaaaggataataagggcaatttaattaaaagcaaacagatcagcttcactgtaaacggtaagacatacagtgcaaagaccgattccaaaggtgtagctactgttaaagtaagcctttccactaaaaagacttacagcttcacagcaaaatttgctggagacaagtcatttggtgcggttactaagactggtaaggttactattaaataa

SEQ ID NO: 84 - DNA, 14478 bp, Methanobrevibacter ruminantium
  source 1..14478: mol_type = genomic DNA
atgcaagcaattattccagttaaagacaattttctaattttagtgacaaatatgaagaaaagtgattttaaacgtatattcatatgtttagttcttcttacttgcttgattggtgcagtaagtgctgctgaagacgtttcagtcgatgatgttagcacagatgctgtagcagttgacacaatcactgaagatgcaagtgaccctacagatataagtacggtcagcgagccagtctccaatgatgttcaagcaaacacaagccaagaactaaacaaagaacccgctaccaagtctacaaatgtcttgaaagatggcacatccactaacatttatgtggcgactactggtagcgatgaaaatgacggtttaactcaatctactgctgtagctagtcttgctaaagcagttgagattgtaaatgctaccgctggtacagattttactattaatgttgcaaacggtgactataatattagcaaaatcgaaagtcctgcagctaaaaacgtaaatcttattggtgaaagcaaagaaggagcgattcttcacgcttctgatacatatggtatcaacgtttacgaagataacattgcatggactattgaaaacttgactatctgtgatttcaatagtactaccagtacaagtgcggctgtaagatgctttgctatagacagtgttttcaatataaacaactgtatattcaaaaatatcggttctaaaaacggtgctatttacataacttccactggaacaaggacaatctccaatgttcttatagaagactgtttcggtacttattcaagttcatcttccataattcacttatatggtgaaggtccagttactttggataatattgaaatacgcggttcctatatggatccttctgtaggtacagcaacatatttaaggtctgttatctatgccgaccaagctcaaaccaatgttactttaaagaattcccgaattgttgacaatatcggtgctatgggttcattgatcgaagctaaaggagcatttaaagtcattaacaccacttttgaaggtaattatctcaatacttcttctaatggtgtaaatggtggtactttcatgttctatagtggaaccagctccaattctgcatccaacattgacattagccaatcagtaattaaggacaatgtccttgctggtggaagcatcggtctcttcaattgcgtatatggtactcacaacattgaccacaatgtaatcatgaacaacaaatatgcaaatggaaacgacgttccattaggtagcttcagcggagctgcaatcagcactgacgacaactactggggaaccaatgaaaggcctaacaccaaaacaactgaatgggttatattaactgtagatactcctgaaatggcatttgttggcgtatcagaagccatacctgttaatttaaacacctataaaactacaaacaatgaaacaggtgctgtggaaggcatgcctgatgttgactttggcgtaacatatgctcttaatcaagcaaatccatctactgtaaccgttgcaaatggtcaaggaaccattaactatcttgcaactgttgatggaaatgaaacattaaccttttccactggagatgctttctcctttgatgtgaaggcggatattgcaagtttaatctatgtagatggcctaaacggcaatgctacaggtcctggtgacagtgaacatccttataagaccatagcacaagcaattaatgtagctgccgatggaaagattatcgttatcaaatcaggcacttacacagaaaacagtttaataattgcaaataacattactttaaaagctgataaaaacgcagaagtaatcattgatgcaaacaacgaaggaagaatatttactgtacaaaaagacgctataatcagagacttaaccttaattaatggaaagtccactggcaatggaggcgcaatatctcttgatagcggcttattaactttaaacaatgttaaaatctacaattcaactgcccaatctggcggtgcaattgttagtttatcaggttctcaattatcagtttccaattctgagttcattgacaataatgcaagcaatggcggtgctatatatgtagcaggcgttgctgatattacaaacaataagtttatctccaatgatcctgaagatggaggtgccatatatgtagcaggcgttgctgatattgaatccaacgaatttacttccaaccatgctactaatggtggagcaatctacattgacagtgaaaacaatcaaactatcaaggataacactttcacttccaacactgcagataagggagaagccatttatattaaaaacgctaatgtgagcttatctggaaacacaatgggtgaaaatgattcaatatatcttgatggtgcaagcttaaaaaccactcttactttcttaggcggaaaaaccattgctgctgaatttggacaaactctcaatttaacagctacccttaccgatgaagatggaaacaatataaggggcggaattgtaacattcaccgctaacggtgaaaccattgcaactattgacttatccactgacgctcaattgaaaacccaatatactgttcctaatgatgccgctggtgatataacaatttccggttcatacagtttagacaatggcggagctgtcatatccggtaagatacaccctgcagttcctcattggttcattgaagggggaagcggatacgaaacattggctgatgccattgatggtgcaagcgctggagacattatctactacgaccttccagaggactacactgaagtgattagcagcaagaccatcaacaaggcattgaccattaaaaacaatggtaccggtgtcgttactttagatggtaatcttgataggatacttagcataagctctgcttcagtcaatttggaaaatctgattttcattaacggggccactgccactaacggaggccttatctatttatccggttcagcatctaatgaccttaatataagtggatgtacatttaaggattctaaatttaccactacaagtacttacacatatgctgtagccatttatgctaatggcggaaacattaatatcaaggacagtgaattcagaaacttaactgctcctaaaacaggaatgatctatcaatcttcaagttcaggtgctataactatagaaaactctctattcgataacattacaggcgcatatgatggaggcttaattaactcaaatggtgatgtatccctagttaaaaccaatgtgaccaacattttcggttccacttctacaagtgattatggtttaatttacattaggtcttatggaggctttttattcatatctgagtgtcaatttataaatataagtaatgctggtgcccatcctgtctattacagaggaagcggcggttataacattacccaatccttatttatgaatattaactcaaataagataatagatgcaagtgcaaaaggttatgtaaattataatatatttgcaaacaattccaataattatgttttatatggaagttcctcttcaaaaatttctgcagattataatttctttggaagcaatagcaagcctacaagttatgtaagcaatgttaattacacttactggactattgtagaattgtcctctgcaagcgatacagcatatgtaggaaatcctacagacattgctatacagtttgtaggaaccgatggaagcgaaaaccttactcttgaaggcataatgcctgaatacacattcactttaaatgttacaaacggaactatcgttcctaacactgtaactcttgaagataacgaagctaatgcagaattcactccaacaagcgtgggaaaggtaaacattacagccactccaggtcctgcccaattgactcttaatgtaatcgacccatccatattgctcgttgtatccacagatggttcagacactaatccaggtactttaaacagtccatataagaccattgcacatgctttaactcaagcgaatgcaacaagaaacgtcatttatctcttatcaagtgatgatgcttacgcagaacatggattaacagtttcagacaatataactatccgagctgaagacaatactgttacaattgatggcggacaagagggacctatattcactgtcacaggcactttaagcatagaagacattatcttaagcaatgctaaggttgatgaagataatggcattggtggagctatctatctaaatggcggtaatctaactgtcaatggcgtggttttctctgattgtattgcagcttacggtggtgcaattgctacaactgcaggttcaaatttaaccgttattaactctgtattcagtgataataaggctaaatatggtggagctatctatgtggctggtgaagctaatatctcaaatagcgaattcagcgacaataataatgagattacttatggcggtgccatctatgtaaacggtactggccctgtagttatctctgcaaacgaatttgataacaataaagcaaacaaaggagaagcaatctacattgaaaacggtgctgtaaatgtatctgaaaacacaatccctgcaaacgaaacaatttatcttgcaggaggcagcataaactctgttctcatattccttgctaatggcactataagtgcagaatttgaagaagaggttaacttaactgctacccttactgatgatcaaggaaatgccattaagggaggtattgtaacattcactgctaacggcgaaaccattgcaaccgttgacttatctactgacgctcaattggaaacccagtacactgttcctaatgatgcaactggagacattctcatttccggttcatactctttagataatggtggagtagttgctacaggtattgttcaccctgcagttcctcactggttcattgaaggcggaagcggatatgagaccttggctgaagctgttgatgcagcaagtgctggagatgtaatctacggtgatgctggaacttatgatgtaagtgatcttataattaataaggctgtaaccattaaagcaaatgaatcaggttctatcgtcttaaatggtaatggtaaccaaatattcaatacccgggctaatgtcattttagataatttgacattcatcaatggttcagcaagttccaacggtggatttatttatgtatacagcgattccttggtaataaacaattcagtattcaaggatttaaaagctactggaggattaggctctgcaatctatgttgctactggaagctcaaacatcacaattgaaaattcagctttcgacaatattaaggcagctactggtttaataaactgcagatccaaaacaacaacatttactctagtcaaaaccaatttcactaatattgatgtaagcactaatggattattctatttatacgaaggaggacttcgtgcatacgaatctcaattcataaatgtttcaggtggagacggtgcagtagtttacttctatggtcaaagtgataatatagttacaaaatgtctattcgacaatgtaacaaccacaaaaaccactggaattatttattccaacagtaaatctgctaatataacttataatgctttcttaaatgtcaattatggagtttactcttcatcatcctatggtgaagtcattactgcagattacaactattggggaagcaatgacaagcctggcacaagccttgtaaattcaaacagcaaattaaataactgggtggtcatgactgtaagtccagacactcttgacagcttggattcaggcgctactcaagcattcactgtagacttcactcactacactgatggcactgcaaactacacaatggctgacaccattccagagcttacagtctctgcaagtgcagtcaaaggcagcttagaccaaagcgaagttgaaactcaaaacaatgtcgcaacattcacttacactggaagccaaaacggtgaagaaaccgtaactttcactaatgcaaatctaagcattcctgtaaagttcgttgttggtgaaggatactttggaattgtttatgtagctaagaacggcagcgatgaaaataagggtagcgaagatgctcctgtagcaactattgcaagagcagttgaaattgctcaaagaggttctggccaaatcattatcactgaaggcgtctataatgaaaacaacatcactataaatagcgaaatccctatttccattaaaggtcaaggagatgtggttattgatggtgaaggattgtcctcattaagcattttcactattaaatccggtgaagtttcaattgagaaaatctcattcagaaacaataaggctaaatttggtgcaggtgtaaatgttcaaggcacttccggttcatcattattggatgcaaatgtcttaatcaatgaatgtaactttgataatcttagctcagatgcttcaggcagtcaaggtggagcaatatatgcaaaatacttaaaaggaaacctagtaatcaacaattccaactttacaaactctattgtaaaaagtgggggtggagctttaactgttgcatactgtgcatatgaagatgctcttgacttggtgatttccaattgtaactttgaaaacaacactgctaataatggtggtgctgcatacttaatggctaatacaatcaatattgtaaacactagctttattaacaacaatgctacatacagccctggtgcacttgaattgtataattgtactggaactatggacaattgttctttcataaataacagtgctaaaaatacagctgctgcatttaaacttgaatttgttaaagatcaacctataaccagtttaatagttactaactccatatttaaggacaatgttggtagagatgaagtcgctcctgcaatattcgttgacagggcaagcttaaacatctccaattccattctattaaatcctttgaatattaataccagcacagttaccggatacggtgctgtacctggccaaggggtaaccgttgcaaacagtaactggtggggaaccaatgaaaatccatctaacttaactgcaggcagtggtgacaatgtcaatactacaatagacaattgggtaatcatgaatgtcagcccaactgaagctatcggatacactggtgaagctctagaaataactgttgactttaaatacactatgagtgctgatggcactattgaaacattagcaggtactttaccagaagagtttactgtaaatgctaatgcggctaatggtactttagataaaaccacagcagataccagcaatttacaagctaaattcgcattcactcctgaatttgctggagaaaacatcgttaacatatacacaacagaatccaataccgtacctgttacaataatggtaactgaaaaatacgcaggccctatctatgtaactaaagacggtgacgatgaaaatgaaggttcagaaaacttacctgtagcaaccattgcaaaagcaattgaacttgcccaaggcaaatctggcttaatcttcattggtgaaggtacttatgttgaatccaacctcacaatcagcaaagacttaaacatcactgcacttggagaagtgatttgggatgctaacggtcaaagggcattctccatgtctacaggtagtgtatccatttcaaacattacattcataaacggtaactacacccgcaatggtcacttgatctactgtgctggtgacagtctcaaattcgatgaatgtaagttcttaagcaacggtggaaatgtaactggtaccaacggagtcatctatgtagaacttgcaagtgcaaacttcaacaactgttacttcgaaaacaacactgcaggtactggaacaagctatggtttgatttccgctaaagattcagttattatagtagatggctgtacatttgtaaacaactttaataaaaacggctgtatttatgtaagcggatctaatattgggtccatggctgtcataaataataccaaattcattggaaacaatgctacctctgcaagcggaggttctggtggagctatctatgcaagcggttcaatggcttaccaatactctaacggtactgtaagacctggtgctcaatctgctgtctatgtaattgactgtgactttatcaataacactgctttcggcggtaaatactacaacgctgaaggtggagctatctttgtaaatgcaaatgcaacattatatgcatctaattcaagattcatcgataatactgctcttgattatgaagaaactaataaatcaggtcgtggaggagctattgcggccacaacaggtaatgtacaaatttcaaattgtatattccaaggcaacactgctaacaatggttctgttatcgccatgaaatttgcaaacaaagaccttacaactgtaaatgtcttaagcataagcaactctgtaatcatgggccctggcgaaaaattaattgtctctgacttcactaacggttctttagttgccaacaacaactggtgggcagcgaatgaaaacccatctgatagggtaagcgaaggaatcactgtagacagttgggtaatcctaactgcagatccaagtgaaatcactggaactcttgatgaaattataccaatcgttgctaacttcagacacaccaacagcactgatggaactatcggtgatttggaaggagaattcccagaactagaagtattcggaatgactttagatgaaggtgaaattactgaatccaaccttactgtagacaatgtagctaccctttactacactccagaagaaactggtgaaaccactgtatatgctatttcaggcaatgcaatggttccaatcaaagtaactataaccgacactcctcaacctgttgcagatgttatctatgtatcaccatccggtgctgataccaatgcaggtacatatgaagctcctgttgcaaccattgcacacgcagtggaacttgcaggtgctgaaggtgcttcaggtttagtcgtcattgaagaaggtatctataacgaaaacggcattgtaataaactctgctatacctattaccattacaggtaacggaactgttataatcagaggaaacaaccatgtcgttaacggaaacggagctggaagatttggcgatgtaagcgaatccacaagcataataattgtaaacacaactgaagctgttgttattgcaaacattgcatttgaagacaacattgcagcaaacggtggtgcaatactcattgcaggaaccagcagttccaacttattcgatgctgatgtattggttgaaaactgtagtttcaataacttgcaaggaagaaatggtggtgctatctatgcatactacgctattggcaacctaactgtagccaattgtgaattcacaaacatcaacgcaacttgggctgctttatgcgcatatcaagctgcttatggcgaagggctcactgtagagataaaagattcaagctttacaaacaactctgcaaacaatgctcctgcactttacttgcaagcaactaatgttgtaataaaagattccaactttacagacaacaatgcaacctaccaccctggtgctatctacttgcagaacactactgcaacaatcgacaattgtattgttgcaaacaactctgctaaatacgataaggcagctattgcaatccatggaggcaatatccaatacaacccagtaattgtaaaaccttctgaagtaacaattacaaactctattattgaaaacaacatcggtagggataaagcagctcctgctatctacttggaaaactccatcttaaacatgtcttactcttctgtagtaaacgaaatcaacattaacaataccgttactgcaacctatggagatgaaaaacctggacttgttttaatcaacaacaactggtggggaaccaacgacccaagcactaccatattcggtacaaacatcactatggacaattgggtcatcatgaatgtagaagcaaacgctactgaaatccttgctggagaagaagtaaaattaactgttgactttaaccatgtaaacactaccgctggtgagattgaagaattaaccggtggagttattccaagagaatcctacagtgtagcactttctgtagataatggtactgttgcacctgaaacattaaccattgctaacggagctactggcgaagcaattttcactgcagctaatgctaatgcattaataactgtaacaagcgaaaatgcagttgaaactatattgattaatgttggagaacaaccagttccattcactggagttgtatatgtctccaaagatggtgatgacgctaatgaaggttctgaagatgagcctgtagcaagccttgcaagagctattgaaatcgctacagctgaagaaggatctggtcaaatcatcattaaggaaggcacatacattgttgacggatacaacattaccaaagacttaaccattactggtgaaggagatgtaatactcgatgctcaaaaccaaggcaacagattattcaatatggcctatggtactactgtatccaatttcgaattgcataaccttgttcttgctaatgtaactgctatgtatggcgcagttgtttacagctatgcagctaatgcagtcttagacaacattacagttgctggaatcaaccatgaaatggctaggctcatttcaaactatggtaatttaacaattaaagactctgtatttgcaaacaacactgtaagcggaataatcacccactctggaaacaataatttaaatattgtcaatacaatatttgaaggcaacaatgtaacatatgattcatctatcatgggtgtggtttatgtttcatcaggcagaggaaacataacaatcgaagattccaaattctatgacaaccttgtacgtcaatccacagtacgcggttacacagatactaacattacagtcaaaggtactgaattcattaacaacactgcagacaactctccatattactgctctggcggagctatttttgcacaagctaatttggatgtaacagaatccatattcatcaataacaatgctagaagagaaggaggagcaatttatattggaatcaatggtgtggcaaacatcaccaaatccgagttcatcaataacacaatctatgataatgagtactatggagatgcaatctacactaaaggtacaactgccatcaattactgtatattcttgacaaatggcacaagatatgcagtttacaatggcggatccaaagaagtaaatgctcaatacaactggtggggcactaacgacgatcctcaaggatttgcttactctgcagatgcatctaactggattattatgactgtaaccgctccaagcactcaagatattcaagcaggagacgaatatgaattgactgttgacttcaaccattacactgatggcagtgacattttagaattgccagatagcttagctcaagaattgactgtagaattcacttctaccacaggcacatttgacaatcctgtagtaactactgaaaatcaagtggctactgcaaaatacactgtagttgcaggtgaaaacagtatcacagtaaaatccactgatgctgtatggaacactagtttcactgctggagaaaaggctaaggctaagatgaatgtttcaatggaaaacaatacaattattgtaacccttaccgatgaggaaggagctcctattgcaggcaaaaccattagtgtgctcattaacgaagacacattatccaacgaaaccaattcaagcggtattgctgcaatttcacttggcactttagatgctggcacttatccagctacaatcagcttagctgacagcgaatatcaagctccagagctaactgtatttgtacttgtagaagagactcttgtagacaaccctataggtgcagtcattgaattggctcttgctgaaaatggcacttccattgaagtgaccttgaaggacattaacggtcagcctattggcgatactattgttagatattacattggaagcactgatggagctctccttcctattgatgcaaacggtaaaggatcatttgacattgacaatacagtcaatcaaaccattaaggtcagctacactaaggaaggcactgaatggtcttcatattatgactttattgtaaacaatgaagtaactcctgttcctgttgccaataacgctaaattcgatgtaattgttcgtgaagatagcattgatgtattcttatacaacgataacttagacgatttcgaaggcgctaagattatggttactatcggtgaagaagatccagttgaatatattgctggagagaacggaaatataaccatccctatcaatggcgataccactgtagagctttcatacactgatgaaaacggagctactgtctaccacactgttaaagtttccactagtggtgtggatccttctgctgaaattgaaattatcgtcgaatctcataacgacacttctattgaagtaagcgtaactgttgatggtgatgatgtcagtgatggtgaaattacctattacattggtgatgatgacgatggaacagttgttcctattgaagatggaattgctatcataccattcgacaatactgtaaatcaaaccatcgaaatcacatactcagatggtgacgctacagagtcagtatactacactatagttgcattcactcacgaagttcctgttgagcctcctgtagctaatggcagctttgatgttgaaacaactgatgatgctattgttgctactttagttgactctgatggtaaacctattgctgatgcaactgtttctgctatagtcaatggcgaagagcaaaacttcacaactgatgcggatggtaagctaagcgttcctattgatggcaatgcaactgttgagcttagctacacagatcctgaaaacggtgctgtcttaaaatatgtaactgatgtggtaactaaagaagttcctattgaagttcctgttgttgctaacggcactatgagtgtagaaacaactgatgatgctgttgaagctaccttagttgacagtgacggaaaccctattgaaaatgctactgtcactgctgtaatcgatggtgaggaacaaaacttcacaactgatgcagatggtaaggtaagcattcctgtaggtgaaaacgctactgtagagctttcatacactgaccctgaaaacggtgcagttgttaaatacagcactaaagtcgtaactaaagaagtggaagttcctgttgacgttcctgttgttgctaacggaacattaactgttgaaacaactgacgatgctattgtcgctacattagttgacagcgacggcaaaccaattgctaacgctactatcattgcagttgtagatggcgaggaaatggaaatacctaccgacgaagatggtaaatgcagcgttcttatcacaggaaacaacactgtagagttcagctacacagatcctgcaaacaacgctacagtttcatactccactaaagtggtcactgaagtcgaagaagtaatcgttcctgttccagtagttgctaacgctacaatctccttaagcactgaagacggcagctcaatcgttgcaaccctaaaggaccttgacggcaacgcaatagcaaacgctacacttgatgctaatgtcaatggcgaagaaactaagttaactacagatgcaaacggaatagcaactattcctgtatctgcaaacacaacagcagtagtctcctacacagattctaacaaagctactgtaacaagctcaatgagcctaacagtaatcgaaaccatcgtagaaatcaacaagacaattgaagttcctccagtaagaaacgcatctcaaatcgtttgtgaagacatgaacacaattgcagttgcaaaagatgatggaagaatcggagaatacttctacgtaaaactagttgacgcaaacggcaatgcattagtcaacaagtccgtacaaatcggattcaacggcagagtatacaaccgtacaactaatgaaacaggtgatgtaaaactacaaatcaacctcgcatacaaaggaacctacacattcgctatcgcatacctaggcgatgacaactacaacggttcatttgtcgtttcaaagattacagtaaaacaacaaagtcctaagattactacaacttccaagacttataaggctagcgcaaaaacaaaagcattgaccgctacctttaagacagcaaatggaaacctaatagctgataagactattaagtttactgtaaacggtaagacatactctggcaagaccaatgcaaaaggtgtagcaactgtaaaagtaagccttaacactaaaggaacttacagctttacagcaaaatacgcaggagacgacacctttaaggcaactagtgcaagcggtaaattaactattaaataa

SEQ ID NO: 85 - DNA, 8031 bp, Methanobrevibacter ruminantium
  source 1..8031: mol_type = genomic DNA
atgaactttaaaaaacttttaatgatttcattaatcttattatttgtcttatcagtaggatttagcacagcaagcgctatagactctgataatctattagatgaaaataataatattaatgttaattatattgattctgataattcagattctattttaatttctgacaattcaaatgatgctaaatcaaataatttaatattaaataattctataaataaaaaagaattaaatgataattctaattctaattctaatttagagtgtgattcttcaatcaatgaaaatttagatttagaaaataattacaaaattaatgaaaaatctgcaggtcttaaagacaatacaaatacaatatacgtatctgtagacggaaatgatgaaaatgatggtttgactctagaaacagcagttgcaaacatatcaaaagctgtctcacttgctggagaaggatacaccatccacatatccagcggtacttatgaacaaaacaagtccacacaactgtctcatgcatttaactttattggagaggatggaacaataattaaaagaataggcacagcaaatgcctttacatacacttcagacactaaaaagacaataagctttaaaaatataatattttcttcaaccactccaaatccaagcaatccaatattaagcatggctggaggcgccgatttgcaaatagacaactgtacatttacagatgcaattgcaggtagaaacggccttatcagatatttgggatcaagtacaggaaagattacaaacaccaatttcattggattgaccggctctacaagcgcttcatccagctatatcactgcacttgcccaatctaaggtaaaggttgagaattgtacctttgcaaatatcaatgaaccaggctttttaaattcacttgtttatgtcaataacaatgagactaatttaacattggtcaactgtgtttttaataatataaccggcaatttgaatgctgttgttaataatagagggtatatgcagattaaaaattgcagtttcactgatatttcattaagcggaaacagcccaagaggaattgtatggtcttcagaaaccatttcaaaaaattcaatcacttatataaactcatctgtattcattaataattctgtaaatacagaagtggttgtaaacagttcagtcattcaagccaaatctcctactatagttgaatacagtgcatttttagacaatgatgttgtttttataatcaacaatgacaatgacactgatgtaactgcaaattacaattggtggggaactaatgagggccctaaaaactgcagtgtaaatagagaatcttctgctagttctaatccttcctcctctagtgaagaaaagatatctctagtctcagatggagttacagttgacaattgggccattatgacagtagatctagaaacttcaggcctgattgcaggtgaagactatccaatcataatcaatatcaataaatacatgaatgaaaggggagagatagactcttcagtagaatatggaataagcggtgccgaaatattattaagctctcaaatagggaccttcaattccgatttcataatttacaatgaagataatggaaacataattcaaaatcaggcgaaagtctatacaaataatggagctgtaacagttttctataaagctaccgaagaaggttcagatacacttaatatcagttccggatatgaagaaatagtatacaaccttgaattcggacaatcaattgaatataatgacatttatgtttctaaagatggaaatgacaacaacgatggtcttagtaatgaaacctctgtattaaccattgcaagggcattggagataggagaaaatctaaattcaaatataagaattcacataggcagtggaagctatcatgagagtggatttgaattaaatggaacttacacagttcaagatggtgtcttgcaagttaaaagaaccacatactcattcatcggatatggaaatgtggtaattgacggagatggccaaaacaaaagcctattcacagttcgaaacaattcagtttcatataaaaacatcagatttacaaatgttgacggtgccacatacggtggggcaataaatggtgacaacttatatcgaaggactgcgtatattgatttgacaattaataattgtacctttgatgacctgcatgttaaatctagtggaggcgctatttatttaaattacgtcagtggaaggatctccataaacaataccaaattttataatcttactaccaattcaagttggggtggggccataagcgctgaagaggcctttgatcttgcaagagttaaggtgactaactctgactttagggacaattatgcaaacaatgcccctgcaatgtatttgagggtgagcaatgtaacagtcttaaatagcaattttataaataacagcgctaaatattatcctggagccattcacttttataatgcctctgcaattatagaaaactgtgtcatagcaaataactctgctaagaaggattctgctgcaataaagataagcgaaggcactaatgatgttggaaataagataatcatcaaatcatgtatcattgaaaataatagcgctcgagatgagatttcccctgcaatctatgttgaaaagggtgcattggacatatcctactcatctgtcgttaatgacttgtccattgcaacaagaacctattactctaatctatatggtctccaacaaggcgttgctatagcaaataataactggtggggacttagcaatccatttggagaaaatgagattggaggaaactattcatcattattaggtggcgtatttaacggatctaacattactgtagacagttgggttattttaaatgcagtcttaaatgatacaggtgttttaaaggttggaaacattgtaaatattagtattgactttaatcatgtaaacactacaagaggagagatagagctcttgtctggaggcaagatacctaaagagtacactttacgcttaaacgcaactggaggtatcgtttatccaaactatatgaagacagttaagggagaggctaattccaagtttacagttagggatttggataatcttggagatgactttgcatcctgcggatttgatattatatccgacaatgagattacccatatagtctttgaaataaacaattataaaggggtaatttttgtatccatgtctggaaatgatgattgcaacggctctatggatgctcctgtaagaacaatcaataagtctatagagcttgctcttgatgaggagtttggttctcatgagatatttgttcttccagggacctatgaggcatatggcatagaattagacagcacataccttagcattacaggttctggcagggacagcacaattctggatggagtaggatatacaggaggaatcttcaatatatttgaatcagaattgactgttaaaaaccttaccgttataaatggagtcaatacagtctcctctggtggcgcatttacaaatatgggcaatttgactttagagggtgtcaatgtctcaaactgtcaagtaaggaatgcaaatggtgcagcaatctattctgtcggcaatcttaatcttataaactcaagctttgttaagaacacagcattatcaggcaattatgcaaacggaggggttatttatgccgatggatattccacttcccttccatatcctccaagcttgaacataactgactgtgaattcatttcaaatgcagcacaaggatcaacattcggcggaggagtaatctatgcacagtaccttgacggatataagtcaatcaaaaactccaaattcatcaataacactgcagaattcggaggagcaatattcctgcaggactccgaaggggatttcataattgacaatacaagcttcattggaaataaggcaacaggccaagcaggttccacaaatccatactatggtggaggagccttgaacctgattggaagaactgacggccgagagggcaatttcattattacaaacagcctttttataaacaattctgcaaagaacagccgtggaggaggagctatcctagatcggaatgttgatttgaatataactaattctgtatttttaaacaatacagatacaaataagagcgttcaagtatttaaggacactaccgtttatttccctagcggaggaagaataagcttggaagacaattggtggggagctaatgagttgagcagtttatctacagttgctgctaatgtgactattaacagatgggtggttatgaatttatctgttgagttgattgatgatcttgattcatggggtcttaatttaggaaatagtttagatgatggcttaaacactgatttaggaaatacactaactgaaaataatcttaataattatctagtaaaagttcttttaaatgagtacaacgatggaactctaatagacaatcctaattactatcctcttctcagattatacactttagaatcttctgatggagaaataaatccttcctttggcattctgcaaaacaattgtgcaactgccttattaagctctagcaatagggaaaatgtgattagggcaactattgatggagaaactttggaattcaatacaattgacctttacacaaaaacagttcttgatattgaatttgactctccaattaaggcaggggaaaatcttactgtctatcttaaccttacagacatagatgataatccgattaatggaactgtaattttaaacatctcttctgatttgtatgaaacagtagaaacagtgaatgtaaatgagggcaaaggatttaaagagttcagcggattgaaagtaggtgtttacacagttttagctaattattacggccaatcaatttatttagactcaaatgatagcaaagtccttgaaataagtcctatatccagttatttggatttagaatctaaggagattagtatattccttggatttggaaatctaactggaactttaagtgatgataatggccctatttcaaatagaaatgtttcattgattattgatgatgatacaatattaaatggattaactgatgaatcaggacaatttctaattgatttaagcagtttgaaagttggaaattattctgatttggaattggtctttgaaggtgatggtgatcgcttgtcatcatccgaccttgttaatataactgttaagaagattgttcttaatttgaatttgattgtcgaagatgattctattgttgttaatttgagtatagatgattctgttcttgattatttaggtgtggatgattcattagatgatataagtcttgaaggattgacagtattggctttcattaatgagactgatagagtctctgatttaatcaataaatctgcaattacagatgataatggaattgcaactattgacattagtgatcttaatcctggcaatttcacagctttagttagcctaaaagaaaatgataattttgaaatagattcaaataaggatataaacttctcaattgatagatataaaaccaatttaactgctattattgatgaaaataatagttatattcttattaatttaactagtgatataggtcttgatagtaaaactgtaagtgttactattggtaatgagtcttttgatgttataactaatagttctggcctatatggtcttgatattagtgatttggcccctggatattatgattgtttatttgtatttgatggtgatgactattatgattcttcatctgattctttaaatttcacaatcgaaaatcgtatgagtgaattaactgcaattattgacgataattatgaatctattctcattagcttgacttgtgatggcattggccttgctggtaaaactataagtgttactattggtaatgagtcttttgagcttataactaatgattctggtctttatagtcttgatattggtgatttggttcctggatattatgattgcttgtttgtctttgctggtgatgactattatgattcttcaagtgattctttgaatttcaccattgacaagtattcaagtgatttaactgctctaattagtgaagattctatccttattagtttgtctagtaataatctaggtcttgataataaaactataagtgttactatgggaattgagtcttttgatgtaataactaatagttctggtttctatagtcttgatattagtggattgggtcctggagattatattgattgtctgtttgtctttgctggtgatgattattatgattcttcaagtgattctttgaatttcacaattgacaaatacgacactaaattggatgctaaaaataccattggcagttttgctttagtaaatctcgatgctaaattgacaagtggtgaaaatgctcttaaagacaaatccattagtcttcatattgcaaataagaccttcactaaaaagactgatgatcaaggtaaagttgtatttgacttatcttcatttgatccaggtaattatattgctctattgagctttgctggtgatgaatattacaaaaattcaactgtttctgttgaagtcattataaacaagttgaatgctgatttaagcagtgaatttaaggataaaaaattatatatttctttaagtcataaaggcgctcctgttaaatatatgaatcttgctatagagataatcgattcatcaaataagagtacagtatcaaatgcactaacagataatgaaggtcatttcattatggatttaagcgatttaagtcctgatagttatgtttctatcataagggcaattggagataagatttataatcctgcaagtgatgaaatagaatttgtcattgggggagatactccatctaaatccactagaactgctgcagacttacaaaaacttatagatgatgcaagtagtggagatattatagatttaggtgaatatgactatcttaatgtttctaatattaatattacaaaggatattgttcttattggaaacaatacaagcatttcaagttcaggagatggaaatccaatattcaatattgctacagggttaagtagtgttaaaatcagtggaattgactttaatgcatcaaatggggatgtgattgttaaggcaattgctcaaaacggaactgattcattgtcaatcattgttccagctattgaaatcaccaataacacagtgatgggagacaatatagttccagaatccatcactatattagaattggattcagataggggagttcttgctccgaataatgagatttatattgccaataacactttggaaatcggaatgaaaccgtttgaatttaaggtcaagagctttgaaaatgattcaagtgctaatgtgcctatcggcggtgggttgaatggcaaaaagacttccatcatccattatgagaatatggacactgtagcagtcaatatggatattgaaggaagagttggaaagtactttgaagtcaatctaaccgattcagatggcaatcctttggcagataagaaggttcaaataggattcaatggtgtagtatacaatagaactacaaacgccacaggcggggtaaaactgcagataaaccttggatataagggaacttacacatttgccatctcatatcttggggatgatgaatacaatggaagctttgtagttgctaagataaaggttagcactcaaaagacaagtcttacaagcacatcaaagacctataaggcaagtgcaaagacaaagactctcactgcaacacttaaagactcaaaaggcaatttaatagctggaaaaacagttaaattcactttaaatggaaaaagctattcagctaagacaaatgcaaagggtcttgctagcgttaatgtaagcatctcaagcaagaagacctatagctttacagccaagtatgcaggagatgatatgtatgcatcttccagtgcaagtgctaagcttgtaattaaataa

SEQ ID NO: 86 - DNA, 10176 bp, Methanobrevibacter ruminantium
  source 1..10176: mol_type = genomic DNA
atgaagattaaaaatattaaatatctactgatatctttagttcttctcatgtttctaataggtgcagcaagtgcagcagatgatgctgttactcttgaaggggatgctgcagctgttgattcaattagtgaagatgctagcgctcctataactactacggttagtgaagatgctagcataggtactacttttagtgatagcgctatcgaaagcgattctattcaatctaatgatgatctggaactaaagaatgtaactgacgttaaacaaaaggattcctctgatgctttaaaagacggagaatccactactatttttgtatccactgggggtaatgacaataatgacggcttaagtttggaaactgctgttgccactgttgaaaaagcaatcaatataacaaaaactggtggaactgatttcaccctcttgatttcaaacggtgattataacattgaacaaatcaccatccctgtcggcaaatatatttctattattggtgaaagcaaggagggcacaattcttcatgcttccggcgattatggatttgacatttcatacggatgtaattttgaaaacctgaccatatctgacttaaacagcacttcctctacaagtgctgccataaggattattatggataattatgatattaatataaataactgcatatttaaaaacattggttctgcttatggggcggttcatgtttattccaatggaaaaacctccatttccaatgttcttatagaagactgctttgctaccaaatcagatgactcttccataatccatgtttctggaaaaggtccggttagtttggataatgttgaaataagaggctcttatatgctgcctcctgcttttccatggagtaccccttatttgggagccattatctttttaagcagcgctgatcctgatgtgactctaatgaattcaagaattcatgataataatggttctatttattccataatcacatctaaagggaaaattaaaattatcaacactacaatttccgataactgccttaacgcttcatatgcaagcatattttccagtggagtaaattccaatactgcaactgacataactgtcactcagtcagtcattgcagacaatattcttgctaataatgctgtaggtctcttagacgcccgatttggtgtctttaaggttgaccacaatataatcatcaacaataagaatgcaaatggcaatgatctgtcagtaggcgacctttctggagcctcttcattctccattgacgataactattggggtactaatgtaaggcctaacgataaaacaagcgaatgggtcatcttaactggagatgtagctgaatgcgcatttgtaggggtttgcgaaaacattaagattttcttaaacagctatgtgactgaaagcggcgaaataggtgttatagatggcatgcctaccgttgagttagctgtgggatatgctctcaatcaagagaatccatctgctgtgaccattaaagatggagtgggaactatcagttaccttgcttctattgctggagaggaaactttaatcttatccactggagatgtctttgaatttaatgtaagctctgagattggttctttaatttttgtcgatggctctgttgaaacatctggtgacggtacacaggaaaatccggtaaagaccatcgctgaagctttaaatatagctgcagacggtaaaatcattctcattaaaaatggcacttataaggaaagcaatttgcttgtggataaggacattaccataaagccatatgatggcgccgatgtaatcatagatggagacaatcaagacaggatatttacagtcacttccactgctaccataagtgatttaagcttaaccggaggaaatgccactggtgatggaggtgcaatctatctgaatggaggcaatttaactttatccttcttaaatatctctaactgtattgcaagtgacaatggtggtgctatcgcaactgctgccggatctgatttatatctttccaattcaatcttcactgacaatttcgcaagcaaaggccaatccattttcattggaggggaagctgaaattttgatgaatgattttgtagctcatatggatgtattaagtcctgatgcatctttcaatgccattagtataaacacagactctcctgtaagcatcgtttcaaataactttaatgacaatggcgcaattaagggacaagcagtttacattaaggatgctcctgtaagtttgtctggaaacattatggatgatgaaatcatttatcttgaaagcggaagcgtaaattccaatctcatttttatggatggaaaaacccttaccgttgaaccgggagctgatgttaacttaactgccactctaactgacgataagggaaatctcatcagaggaggagagctcactttcactgcaaatggtgtggctgttggagaccctattgatataagcggcgacaatgaattaagaattccttatactcttccttctgactcagagggagatattattatttccggttcatacagctttgacaatggcggaacaatcgtaaacggtacaattgagcctgatattccatattggtttattgaaggcggaagaggatataaaaccttaaatgagaccgttgagaatgcagttgctggagatgtcatctatggcagtccaggcacttatattgcaaatggcattttcattacaaaagaccttaccattaaggccaatgaaactggagatatcatattggatggtaacggatctagagtatttaccataaaaaatcaagccactctaagcttagttaacttagacttaagcaatggaggatctgaaggcggaggatttgtttatatatatgcggaaggtggaaatcttaacgtcatcaattccactttaagggatttgaatattgttggctatcctgagtctttcgaaggaggagctataaaaacttatgcttcatccacaataaatattgaatcttcccattttgaaaatattaactcttcagcttttgctccaattctttctggtttaggtggtgttaagcttagccttaccataaaggattccagcttcactgatattaagggcactgccatgtatggcttaatgaatgctccaggtaaagtgaatattgaaaggtctaattttacaggtataattggaaataccactaagcaaactggacttatctttgcagactccacttctaactatttaattaatgaatgtctcttctctaatatttcaacagattctgttatccgatttaagaataatggaaatataactgttaccaaatcagtattccagaacattcaagacacagggggagctctttatatatataatccagggtctgccaaggtaaattacaatttattcatagataatacaaatcttaatgccgatagcaatagggacatctattcctatggctcaaatgtcgatttgtcctataacttctggggaaataacagcaaacctacagaaagccagatctatgatgtttcaaaagctccttactggactatagaggaattgtccatgaattccgactatatatttacagacgaaactgcagatattgctgtacagtttgttggaaccgatggggaagaaaatctcactcttgatgatgtaatgccagaatatagctttaatctggaagccactaatggaactcttgatgcaaatactgtaactcttgtggataatgaggctattgtcacattcacccctccttctcttacaggaactgtaacagttacagccactccaggccctgctgaattgacatttgatgttattgagacttcaaaattgcttgtagtgtccactgctggtagcgatgaaaatgcaggtagctttgaaagcccttatagaaccattgcatatgccttaactaaggcaaacgaaacaagaaacattatctatcttatatatactggtgaggactacaaagaacatgacttgactcttgctggaaatctgactattatgggtgaaaatgatgaagtgaccattaatgcaactatcggcaggatattccttgtaactggcaatgtaagcattaaatctttaactttgtctaatggttttgatcaggactatggtggagcaatctatgtagatggaggtaatttaactctagattatgttaattttaattctaacagagcttacggcttaggtggtgctattgctactagttcagaatctaatttatatatttccaattctatcttcaccgacaatttcgcaagcttcttcggaggtgccattggaactgcttctggctctaacttaagcattgataattgcatattcagtgataataaggctagttacggcggtgccatctatcttgctggagaatcccttatcttaactagcacatttgatggcaatcatatcttgctggatgatggaagaggaggagccatttatgtaaacaccacagactctgtagtgatctcttcgaacgaatttgaaaacaattttgcatatactggagaagtgatttacattgaaaacggtattgtcacattatctgaaaatacaatagacggtgataccatttaccttgcgggaggtagcgtaaactccaatcttgttttcatggataactccactttaaaggtagaattgggagagacagttaatttgactgcaagccttagtgacgattgtggaaatcctataagaggaggaagcataatatttacagtaaatggcgaagccattggagaccctattgacataagcggagacaatgaattgaagaccacttacacagttccaattgatgcaagtgaagatatgatcatttccggttcatacagcttggacaatggaggaatagttaaggcgggttcccttcacccttccgttcctcattggtttattgaaggtggaatcggatatgaatatttatctgaagccattgatggagctgaagctggagacgtaatctactacgaccttccagaggactacactgatgtgattagcagcaaaaccatcaacaaggcattaaccattaaaaacaatggtactaatattgttaccttagatggggatggaaataatgtctttacagtaagcgctgatttggatttgattaacttaaactttgtcaatggtggaaataccaaaggcggattcatatcacaaagttcaaataaccttaatattatcaattccagctttaaaaatagtgcttccagtagctccgcagctgcaatcctaagctcaaatggtaatctaaacattgaatcctgtctatttgaaaatataagttccagcgcttcaagcaatggtggaattatctgttattctggaagcagcggaaatttaaacattaataattcagcattcaataacttatcaggtaaatatgacggtttcatcatatattccagcacttttacaaatattgcaaactccaatttcacaaaccttttaggtccaactagctctggctattggggaggcatttataacagcaaatccttgaatcttacaaattgccaattcataaatgttacaggccctaaaggtgcagccatctattcaacaggatcacttaatgtgacaaggtctgtctttgaaaatattattacaactaattcagtaatttattcatacagttccgattcctttataaattataacatctttgcagataacaataaggccattgattcaactagagcaaatgcagattacaacttctggggatctaatgatagaccaagttcagatattgtgagctcaagcatataccatgactgggtcattgtagagctttcttcatccaatgataccatattcttaggatcaactgaggatatttctataggatttttggcaactgacggagaggaaaactccactctagaggatgcaatgccaagctatggctttgaattgactgtcacagatggaaccattgaaccttcccttgtaattcttgaggataatgaggcaaaggcagtttatactccttctgctgtaggaactgtaacaattacagctagccctggttctgctgaattggaacttaatgtaatggacaaatccactatgcttatagtgtctgctgaaggttctgatgaaggagacggcagttttgaaagtccatatgcaactattgcacatgctttaagtcaagtaaccgaaactagaaacattatctatatcctatcctctgataaggcttataaggaaagcggattggtcctttctggaaacgtaattattatgggtgaagacaattcagtaaccattaacggtggaaatgaaagcaggatattccttgtaactggaaatgcaagcatcagtgacttgatcctatctgaaggaatggctgatgattacggtggagcaatctatgttgatggaggcagcttggccttaaataatgtgattatttcacagtccaaagcatctcttggaggagccatctatatcaacacaagctctgatgtcagcataagctcaaatgtctttgaagataacgaggctgaaaagggagaggcgatatacattgaaaacggcgctcttaccctaactgaaaatgctatgggtaatgaaacagtttaccttgctggaggtagcgtaaactccaatcttgttttcttggcaaacagcactctaaatgcagagtttggaaagaacatgactataactgccactctaactgatgattgtggaaatgttatccgcggaggtgctgtggtcttaacagttgatggcgaaactattggaactgttgatttaagtggaagcgatcctcttgaaattgatttctatgttcctcaagatgcaagtgaagacatgcttgtttcaggttcatacagctttgacaatggaggaactgtctccacaggagctatccatccttgcatattttactggataatagaagaaggtagatacggatttgaaaccttggatgaagcaatagacgcttcccgtgacaatgatgtaatctattatgaccttccagatgattacgaagaaatacttaatgacaaagtcattagccataacttggtgattaaaaacaatggtactggaattgtgactttagacgctgacagaagaagaatgtttgatttaagtggagatttggagctgaataatttagtctttataaatggggctactaataaggatggcggatttatctatcaaaattcaggaagccttaatattataagttccatatttaaagactctctttcatcatacagcggtgtggtagtcttttcaaatgggggtgacataagcatcgatggctccagatttgaaaatctgacttcaaggaagggacctattgactttgagtcaaatagcggaagagtagacattagaaattcagtatttgaccatataaccggcaactatgatggatttgttatctattgcaaatctgatttgaatattgaagattgcaatttcactaatctcaacagtacaagggctacaagtacaaattattatggagctatctgtcatgaaagcggcagcggtgatttaaatataagtggctcttacttcagtaatatttatggccctactggaactgctgtctactacaaaggttccggtacatataacataagtaaaaatatctttgaaaacatcagctccggagcaaatacttgcataatctatggcggaagctctggaaacattaactataatgtattcctggacattaactgtggcattaccacaagcggaggaaatattgattataattactggggaactaacgattatgccggccttggcataaatggaaccgtccctaataattggataattatgaatgtggtagcaaatgattccgatgtgattgctgaaaatgaagttccaataactgttgacttcaatcattacattgaaaatggcgagattaaggaattggaagacagtttggctaaggaattcactgttcaattcacttcctctacaagtgaattagacgttgatgaagtgaatacaaccgatcaagtggctattgcattctgcactgctgttgtcggagagaacaatatcacagtcaagtcagataatgcagtagtcgaaatcaccttcaatgcaagcgaacctcttgaatctcatatgtctgtagatatggatgatgacaacaatctcattgtcacaatcacagatggagaaggcaatggaattgaaggcaagacagtatgtctattcattggtgatgaagtcttaaatgccactaccgattcagaaggtaatgcagtaatcgctcttgatgaagtagatgatggtgcttacactgcaaaaataagctttaaggatccagagtataaggatatcaatgaaaacacttttgttgttataagaactaatgagcttattgaacctgtagcagcaaatattagcattgaattatctattgaagatggcaaggtcattgctaatgtcactgatcttgatggagttcctttagcagaaaagcttcttacagtaagcattgacggcgttcctgttcttggtgctaagactgatgagaatggtatctattcaattgatgtcagtcctaatgcaactgtgactgtttcctgcagtgatgttaacggtgctgttgctagtgcttctatcacttatgttgaaaacaacaacactgaagaagtggttgttattgagcctgtaagcgctaacattactattgtattgttagttgctgagggtaatgtcgttgcctatgtgactgatcttgatgacgttcctttagttgaaaaacttcttagcgtaagtatcaacgacatccctattcttggcgctaagactgatgagaagggtatttggtctcttcctatagaggctaattcaactattgtagtctcttgcagtgatgttaacggtgctgtagctagtgcttctatcacttatgttgaaaacaacaacactgaagttgttgttgagcctgtaagcgctaatatagttattggattatccatagttgatggcaaggtcattgctaatgtcactgatcttgatggcaatactttagcagataagcttcttagcgtaagcattgatggcgttcctgttcttggtgctaagactgatgagaatggtatttggtccattgatgcagaagctaattccactgttgcagtctcttgcagtgatgctaacggtgctgtagctagtgcttctatcgcatacattgaaaacaacaagactgaagagataattgtacctgttcctgttcctgttcctgtagttgcaaatgctacaatatccttaagcactgaagatggcaaatcaatcattgcaaacttaaaggaccttgacggtaaggcaatagcaaacgctacccttaacgctaaagtcaacggtattgaacaaaacttaactacagatgcaaatggaatagcaactatcccagtatctgcaaacactactgtagaagtttcatacacagattccaatatggctactgtaacaagctcaatgagcttgactgtaatcgaaaccatcgtagagataaacaagacaattgtagttcctcctattagaaatgcaagccaaatagtctgcagtgacatgaacacaatttctgttgctcaagaagatggaagggtcggcgaatacttcaatgtaaaacttgtagatgcaaacggcaagccattagctaataagtttatccaaatcggatttaacggaagagtctacgaccgtacaaccgatgaaaacggaagcactaaattgcagattaaccttgcatacaaaggaacctacacattcgctatagcatatcttggcgatgataattataatggttcatttgttgtttcaaaaatcaaggtaactcaacagactccaagcttaaagacaagctccaaaacctataagactagcgcaaaaacaaaagcactgaccgctacctttaagacagttggaggcaagccaataagcggtaagacagttaagttcacagttaacggcaagacatacagcggcaaaaccaatgctaaaggtgttgcaactgtaaatgtaagcctaaacaagaaaggaacttatagctttacagttaaatacgctggagacgatatctttaaggcagttagtgctagcggtaagttgactttaaagtaa

SEQ ID NO: 87 - DNA, 1323 bp, Methanobrevibacter ruminantium
  source 1..1323: mol_type = genomic DNA
atggaaagtcaaagtatattaatcaaaaatgcaagcatattaaatccaattggtgatggaaaaacagaagagtttaggaaggatcttttgattgttgatgataagatatctcaaattgatgaggatatagatgaatccaatgcagataagattatagacgctagtgataagatattgatgcctggatttgtcaacacacatactcatatttccatgtctttgcttagaggcatagcagatgatttggaacttgatacatggttgaatgaccatatatggcctatggaagcacatttaagtgaagagtactgctatatcggagctcttcttggtgcatgtgagatgattaagtctggaaccaccacattttcagacatgtacttctatatggatggagttgcaagagctgttgatgagattggaatgagaggggtcctttcctatggaatgattgattttggaattgaggaaaaacgtgaaaacgaatttaaggaaaacatatccttgattaagaagcataacaacactgcagatggtaggataactgctcgattcggtcctcattctatctatacagcttcagttgaccttttggaacgtgtcagaaaggaagctgacaagtacaatgtaggcattcacattcatatgaacgagacattgaaggaaatcaatgactctaaggaaaaccatgatggaaaaaggccttttgagctattggacagcattggatttttggctgatgatgtggtagctgcacactgcgtatggcttgatgatgctgagataaaattgattaaggacaatggagtttatgcttcccataatccatgtagtaatatgaagcttgcatctggagcagctcctgttgctgagctattgtctcaaggcatttgcgttggccttggaactgacggtgcaagcagcaacaataatcttgacatgtttgatgagatgaagtttgcagcacttcttggaaaggcctctacacttaatcctaaggtattgactgctgaagaggtggttaatatggcaactatcaatggtgcaaaggcactcaatattgatgcagggaccattgaagtgggcaaaaaggcagatattattcttgttgatgcaaatagtcctaacatgactcctatgagcaatacactttcatctaatcttgtatattctgctaatggatctaatgttgatacaactatctgtaatggtaggatccttatggagaatagaaagatggtgactgtggatgaggagttaatattatccgaagcaaaaagagctattaaagagatgaaagagttaagagaggctgatgaatag

SEQ ID NO: 88 - DNA, 1656 bp, Methanobrevibacter ruminantium
  source 1..1656: mol_type = genomic DNA
atggaaagtaaaattatcaaatcagatgttttgattataggttcaggaggagctggttgcagagcagctatagaagtatccaatgagggcaaagaagctttaatagtttctaaaggactttcattccgctctggttgtacaggcatggctgaaggtggatacaacgctgcacttggacttgttgaccctgaagacactatcgaagcacatataaaagacaccttaaaaggtggagcataccttaatgaccctaaattagtagacatattggttaacgagtcaccaaaacgcttgagcgaccttgaagagtatggtgcattgttcgacagacaagagtctggagaattaaaccaaagaccatttggaggccaaacctatagaagaacatgcttccagggagacagaacaggccatgagattatgactgcccttaaggaggaaatcctaaagagaaacataaaaactatggatgaagtgatgattacacagcttatacttgaccctgctgaatcctttatgccaaaggtcatcggagcagtaggacttgaccttaagacaagtgaaacaatcttcttccaggctaaggctgtcattcttgcaagcggaggtgctggtcagctataccctgtcagctcaaacacaacccaaaagaacggagacggacttgcaatagcatggaatgccggagcagacctaatcgacatggaagaggttcagttccaccctacaggaatggtctatccagattcaagaaagggagtccttgtaaccgaagctgtaagagcagaaggaggaaagctcataaacagcgaaggtgaaaggttcatgggccgctatgacgatagaatggaacttgcaacaagagatgttgtagcaagatcaatttataatgaaatcatggaaggaagaggaaccgagcatggaggagtataccttgatgtgacccaccttgacggagaactaatagaggaaaaacttgaaacaatgctagagcaattccttgatgttggagtggatataaggaaagagccaatggaagttgccccaactgcccaccaccatatgggaggacttagaataaacccagacgcaagcacaaatgtggaaaacctatttggagctggagaagtctgtggaggagtccatggagcaaacagactcggaggaaatgcacttgcagacactcaagtatttggtaagattgcaggatcatctgcagcatctgcaacagacattgctgagttcagatacaataatgaagcagtagaagatgaagagaacagaataaaatcattaatcaaggaaggctcaataaacccattggatatgaaaaaggaaatccaaaacctgatgtgggagaaagtatccattgtcagaaatgagcaaaaccttaagtccgcccttgaaagacttcttgagatgaaaaatgaacttaatgaccttaatgtagatgatagaacccaattcaatgagtctctcataacagctcttgaagtcacaaacatggttgagatatgcatccttatagttaaatcagcaatacttagaagggaaagccgaggagctcacttcagagaagacttcccagagactaatgacacttggaaaaagagcatagtcatgagcaaaagcaagataaggtttgctaaaagataa

SEQ ID NO: 89 - DNA, 642 bp, Methanobrevibacter ruminantium
  source 1..642: mol_type = genomic DNA
atgaatcaagaagaaagattaaaaggaagtccaatagaaagagtagaaacagcattagaagcaataaaagcaggaaatggagttatcgtaacagataacgaagacagagaaaacgaaggagacatgatcttctccagcgaacatttaactgaagaacagatggcacttctcataagagaaggaagcggaatcgtatgcttatgcctaacccaagataaggctgatgctcttgaacttccattaatggttgaaaacaatacaagtacctatggtacaggatttacaataacaattgaagctgcagaaggtgttacaaccggagtatctgcagcagacagagtaactacagtaaaagcagcatctgcattggatgcaaaaccaagcgatttacaccacccaggtcacgtattcccacttagggcaagacctggaggggtccttgaaagggacggtcatacagaggcaacaattgaccttatgagacttgcaggacttaatccatgtggcgtattgtgtgaaatcacccttccaaatggaacaatggcaagaatgcctgatgtaattgaattttcagcagagcatgacatgcctgtagttacaattgaagacataattgcttatcgtaaggaaaatgacatctaa

SEQ ID NO: 90 - DNA, 2064 bp, Methanobrevibacter ruminantium
  source 1..2064: mol_type = genomic DNA
atgaaaattaaaaagagttttgtcattttatgcttaattatctgtttatttactattgcaagtgttgcagctagtgatataaatgatacaaccataagtgatggtgacaatctaatcaaagaggcagatggggacttattaagccttgaagatgataataatctaaaagaattaaatgaagagtcagataaaaatttactagtccaagaatctgataatgataataataatccagagtcagataaagatttactagttcaagaatctgataatgataataataatctagaatctgatgagggcttattagtacaagaatctgatgatgatttaaataaaaaagcagacggtagtttgtttagctcaaaatacggagataacgctgctcctataaaaattaacactagctacctaataaaagaaataaacagctacctcgagaaagacaactacactgccctaaaggaagaaataaacaactacctgaagaaaagcaataacaatgccataaaagaggaaataagcaagtatatcttgaaaaatagctataaggccttacaaaaagaaataaacaactatctagaggaaaacaatttcagcaccctaataaaagaaattaacaactatctagaggaaaacaactacccttccatcgaggatggaattaaaagctatcttcaatcaaacaattacagctctcttcaagatgtccttagcgatgtaataagcaagataataaattcatctaaaaaagaatcagagccaattgacgatggaacttttaccgctttgcagtataaaatcaattctgccccaaatggcgctacaataagcctagataaggattatagctatgatgaaggattcagcacaagaggcattgaaatcaagaaaagcattacaatcaatggaaacggacacaccataaacggactgtccgcatcaaggatctttctcattcattttggattgactggaaacaataaggtcacattaaacaatatagtattcgccaatggaaagacagacctttatggaggagccatatttaactatggaaatctgacagtaaacaagtgcacattcaaaaacaactatgcaaaaacctgcggaggagccatcaattctgtaggcgaaatgattttaaaaaattccaattttaaaaacaacactgcaggaggagatgccggagcagtattttcatttaaaataggaaatagcacaaatatctttaaagacatctataaagataaggtcattgatggaaatatggactttattatagattatatattgaacataaacataaactatggatgggacagcataaataattgcagctttagctcaaatgtggccaaaggccgtggaggaggagcaatctatgcatttacccacataaagattaatggctgtacattcaattccaataaggctggcgaacatggaggcgcagtatttgcaaataaaaacctaaatatttcaaagtccaagtttacaaacaataaggcccctaaatatggaggcgcagtttatttcagatgccatgaattaagcggaagctatgtaaataagacttgggtttccaaaatgaaatattatacagcaacaatcaaggattcaatctttacaaaaaacactgccagcaaaggaggggcaatatatgaatttaatcatacagtctctgataaaaaacgtcttaaagtaagcaaatgtaattttacagacaataaggcatcacttggcagagatgtattttccggaagctgttcaaactgcatatacttctatgtgaaaataagcactaaaagcgttacagttaaaaagactgctaagagctttactttaactgccacaattacaaatggtactaaaaagcttaaaaataaaaaggtcacatttaaattcaatggaaaaacctataccactaaaaccaatagcaatggagtggctaaagtaaaaatcggtaaagcagttattaaaaagcttaaaaagggaaaaacctattcagttcaaatcacttatcttaagaaaagtgcaaagacaactgtgaaggttaaatag

SEQ ID NO: 91 - DNA, 384 bp, Methanobrevibacter ruminantium
  source 1..384: mol_type = genomic DNA
atgagtttaaaaagtaaagcaaaaaagatcggtaaagcagtaattttcgtaaaattgtttgaagatttaatggcaaataaggacaaaagggaagaagacattgctaaattaagaatacacattgaagaatggaaagctgaagctccagatgatttaaatgctattttagcagctatattaatgaaagctccagattcttcaccagatgaaatcaaagcagaattcgaacaagctaaagccgaatatcatgctgaagatgaagatattctcccatggtttgaaagccaaatagaaaacattacaaaagagggagaagaagctgaagaagaggctgaagaagaagcagtcgaagtggaagttactgaagaagagcctgaagaataa

SEQ ID NO: 92 - DNA, 237 bp, Methanobrevibacter ruminantium
  source 1..237: mol_type = genomic DNA
atggataataaatttataatattgctttgcttagtgactgtttcagtttttataagtgcttcatttgcttttggcaatgttctaagcaatgcagataacggatctgtgcaaacttacaatagtcataaggatatttcctctccaaatatggattataagcatcctggtgaacttatttatgggggctgtggtggaaatcaaaatattcaaaccgatgggcatatttgcgagaaataa

SEQ ID NO: 93 - DNA, 165 bp, Methanobrevibacter ruminantium
  source 1..165: mol_type = genomic DNA
atgaatttgatatcagtcattatatatctcataattcttatttttggagtatgggtgctttataggggctataaaaaaggaatggagtttggaaagttccagtatgcatttattgtttgcttaagtgccctgtttatttgcttgctttatagcctatttaattaa

SEQ ID NO: 94 - DNA, 747 bp, Methanobrevibacter ruminantium
  source 1..747: mol_type = genomic DNA
atgggccctgaagatacaatatatgaaagccaatcccttgaagatacaatatacaaaagaaaatcagtacgctcttatgaggatgctccattggataacgagacaataaatgaaataagagattttatagaaaatgcaaatcctctcaatcctaatatagaatggagctatgagattcttcctaaagaaaaaataagcacaatgatgagatggaaggctccacattatattgccatcttttcagaggataaggaaaactattatcaaaatataggattcatattccaacaggtggacttgtttctacaaagcaaggggataggcagctgctggataggaatgggaagtccaaaggattataagaatccacatggtcataagtttatcattttgatttcatttggaatgagcgaaagaatctacagagaaatgaatcagtttaaaagaaaggatattgatgcaatatccgataataaggatgaaagactgattccggcacagtttgccccatcttccatgaatacccagccatggtacttcactcataatgatgacggtagcttcgacttatacagggtaaaaaggggagtccttagaaacaggtttatgggaagatggaataagattgacactggaatagcccttgcacatctttatgtggcaaatagggacaactttagcttctatatgaaggacaatcctaaagaattgaaaggccatatatatgatggaagttttgaaatttag

SEQ ID NO: 95 - DNA, 672 bp, Methanobrevibacter ruminantium
  source 1..672: mol_type = genomic DNA
atggacaataaactatttttacaggcatttagcaaatttttcattggcctaattataatatgcgcacttctttttattcccgctggaactctcaactacccgaacggatggctatttatagcattactcttcatcccaatgttttttgctggaatcatcatgtttatcaaaagtccagagcttctaagaagacgattgaatgctgatgaagaggaagaagagcaaaaaatagtgatcttaattagcgcaatcatctttcttcttgcttttattcttgcagggctaaactttagattcggatggtttaagctcaatagcttgattataatcattgcttcagtcatatttctccttgcatatatcatgtatgcagaggttcttagggagaatgaatacctctctcgaacagtagaagtgaatgagggtcaaaatgtggttgacacaggactctatggcattgtgcgtcatcctatgtacacttccacaatattcctgtttctatcaatgccattggtattggatagcatattttcatttatagtcatgctgatttatccaataatcataatctttagaataaaaaacgaagaaaagcttttagaagaagagcttgatggatatgtggagtatgaaaaaagggtaaaatatagattaataccatatttgtggtag

SEQ ID NO: 96 - DNA, 990 bp, Methanobrevibacter ruminantium
  source 1..990: mol_type = genomic DNA
atgaagtggaagattggagatgtagaaatagacaatcaagtggttctagcccctatggccggagtatgtgactctgcatttagaaccatagtcaaatctatgggttgcgggcttatagaaaccgaaatggtttcagataaggcagtcatgtatggcaattggaaaactaaggaaatgttatatatgacagactatgagcgccctatctctcagcagattgtcggatctgatattgaatctctcacttttgcttccaaatacatccaagacaatacaaatgttgatatcatagatatcaatatgggatgtcctgtaactaaggtgacaaataggggcaaggctggaagcgcattgctaaaatctccggataaaataaaatctattgtagaatctattgtagactctgtagacattcctgttactgcaaagattagaagtggatgggataaaagctgcataaatgcagttgaaatagcaaagattattgaagatgcaggtgcatcagccattactgttcatcctagaacaaaggaccaggcttattctggaaaggcagattggtctataattaaaaaggttaagcaaagcgttaatattccggttattggaaatggagatgtaagaacttgttttgatgcaaaaagaatgttggatgaaactgattgcgatgcagtgatgattggaagggctgcactaggcaatccttggcttattagagattgtgtaaattatctggataatggggacttgcctatggaagttacaatagaagagagaatggatatgttaaaaagacatgtgaatctattgcttgaaaataagggagaagagtttgccattcctaagatgagaacacatgctgcctattatgttaaaaaattacctcgcactattgagctaaagcagatgatatttaagatgaatacaaaagaggatctttttaatctattggatgattatgtggattcattagatgaattaaaaaggtaa

SEQ ID NO: 97 - DNA, 939 bp, Methanobrevibacter ruminantium
  source 1..939: mol_type = genomic DNA
atggaaattttaaaacctgaagagttaaaagagaaatttaatgacccatggattgctccatatgaaaaagtcataaccatggctgatggagataaagtagaacttatagaataccatccatgccctagcggttcaaactggctgttataccaataccaacacagcagcgaacttatcatagatgctaaaagggatggaaacaagcacacctatctttgtaaggtaggcaaaaagccattagaccttaaggcaagcataaatgctgctggaattgaagaggttgcaattgacgaagaaaagaatgaagtcaaagtcacccacggaggtctagctggcgctggagtaggtgctggaatgtgcagaggcatgggagaaggtgtcaaatacatagagcttcttgaagtcggaggaggaagcaaggaaggaaaagccacagtagtaactcctaaatacgaaaagcttgtaatcggaatagacgatacagacgttaaggatgcaggtgcaacctggactatggcacataatattggtcttcaattaaaggaagaaggctatgaataccttgaccatattatcgttcaattattccctcataatcctcataagactcaaaactgtgtttctatagcgcttacatttgctgtactcaaagaagaaaaagaaaatctaataaacaggcttattgaaatactcaagcacgacacattgtctgataagactgcaatagccatccttgaaggaattggaatcccacctaagcttagggaatatgctatggctacaaaaaccggcatgatggatgttgaaacagctgaaaagctagcagaagaacttaacattccacttcttgcagttacaggagaacaaggcaaagtaggggcacttgcagcacttggcctttatgatgatgttgatgaggctgttaaggtttattattaa

SEQ ID NO: 98 - DNA, 432 bp, Methanobrevibacter ruminantium
  source 1..432: mol_type = genomic DNA
atggtaaaatataatataggagcagttgttgctgaatttaattatgatatcactcacatgatgttagagcttgctaaagctgaagctcaagttcgtgactgtgaaataacaaagattgtaatggtccctggcgtatttgacatgccacttgctatcaaaaaacttacagaagcagaccaagaaggaagaatcgaccttgactgtataatcactcttggtactgtaattgaaggtgcaacagatcatgaccaaattgtagctcaacatgcatcccgtaagatagctgacttatccttagaatggggcaaaccaatttcccttggaatcagcggtcctggaatgaccagattagatgcacacagaagagttagctatggtaaaaacgctgttgaagcagctgttaaaatgtgtgacagattacaagacatataa

SEQ ID NO: 99 - DNA, 1200 bp, Methanobrevibacter ruminantium
  source 1..1200: mol_type = genomic DNA
atgtctattaataagtcaaaatctaatttaagcctaaaaaataaacttaaatctttatttagtggcaattccaataaaagcagatatcaatccaaactaataaggggggacttcgattcactccatgacttgaatatagcatatgtcttgaagggctttcctacactttcacagacttttgtttcaaatgagcttagatatttggttgaagatggcttcaatgtagttgtattctgctatatggatcctgcagacttggttgaattggattttgatttggaagtaattcgctttgatgagtcagatgaccctactgggaaattggagcaattactattggactatgagatagacatagtgcatacccattttgtctatcctccctgtacagaatatacatttcccgtttgcgataggctgggaattccttttacagtatttgcacatgctgttgacatcttcaaatatgatgtcgataaaattaatagggttgatgagatatccaaaagcccattctgcaagggaattcttacattgagcaactatcacaagaatcatttgattgaaaggggagtggataaggataagattcatattacaaggcaggctactgactatgagatagaggagcttgaattgaaagagaggaatgtgagaaatattgtaagcatttcccgttttgttgaaaagaaaggaattgatgtcttgattgatgtggcagacattctaagggatgaggattatgagttttccatctatggatttggaggacttgaaaaggcatatcaaaggcagattgatgagttgaatctagataatatttccattaaggggcgtttggacggtcctcaagaggtaaaagaggtctttgataaggcagatatattggcgtctccatgcagaatagctgaaaatggcgatagggatggaattcctacggtcatatttgaggcaatggcctatggagtgtgtgtattgactacagaggtttcagcaatccctgaagttattgatgatggaaggaatggttttattgttcctccagacagtcctgaaatatttgcagataagattagggaaattgctaatttgtccccagaggaacgctttgaaatagctaaacaggcacaagtggatgttcaggacacttccagtgttgatgaaactatgaaaacactttttttaacttggagtttgtaa

SEQ ID NO: 100 - DNA, 1188 bp, Methanobrevibacter ruminantium
  source 1..1188: mol_type = genomic DNA
atgaattatgctttaatggtttacaactatacaacaaacttaggcaatgagatacagacaattgctgctagaagattcctgcctaagatagattactatatcgatcatgagaagataaatctcttcaatgaggaggataatgtaaagatgattatgaatggatggtatcttgactgtgaaaaggcatggcctccatctgaatcaatcgatcctctccttatctccatgcatttcaacaccacttcaagcaataaggaaaggttaaaagctcttttaagcgatgaaagcatagaatactttatgaaccatgcccctataggttgcagggattattcaacagttgagtttttaaatgagcagggaatagatgcatacttttccggatgccttacattgacattggataatggcaaaactaaagaggaaagggaattggataaaggacaggattatattgttgtaaactctgaaattgcagatgagatcatttcttttttaaaggataagacagataaaaagatctataggattcagcaagacatgataccatcatttgacacatcatttccagaatccatgccattatggctttataaccttagctccttttatgattatgaggaaaagctgtttatggctgaaaatcttttaaggatatatgagaatgcctcttgtgtaatcaccgacagattgcattgcgccttgccatctcttgccctagagactccagtgatgctattgaacaataggggatttagggaaaggtttgatggattgagcaatttattgctggagagtgacattgatagctatgaatccaattataatatctttgatgtggacaatcctcctgaaaatcccaaggactatttgaaaatacgtaaggatttgattgaaaaatctaagaaattcaccggacatatcaacaattcttattactctgatatttcacagagggaaatatttgaaagaaataacttattattgtctagaaatgccattggaactagggattatattaggaatgtcttaaaaagaatgaggcagcatgagaaggacatttccaaaaaggaagagatcattaaaaatcaggaagctattattgataagcagaaaaagatgattgatgagatgaaggggtccaatagctggaagataacttctcctcttagaaagattagaaaataa

SEQ ID NO: 101 - DNA, 996 bp, Methanobrevibacter ruminantium
  source 1..996: mol_type = genomic DNA
atgaccaaaccaaaagtttccatgattttatcagcatataatgaagagagattcatcgataaggccatatgcagtctaacaaaccaaagccttaaagacatagaaataatcataataaacgatggatccaccgataaaacaccagaaatcatagagaaatatgctgaagaagacccaagaatcactgtaataaaccaatcaaatattgggcttggagcaagcagaaataaaggaatggcaattgcccaaggagaatatgtgggatttcttgatggagatgactggtacagattagatgctcttgagatagcatacaatgaggcgaaatcaaaggatacagacataaccatgtatcagatgataaattatgatgatgcaacaggacgaatatacgaaaacgactggtttaatctaaacaaccttgatgaaagctttgatggtatagtatttacacctgagaaaacaaaagactttctatttgacttatcagtaagttcatgccaaaagatctatagaaatgattttttaaagtcaataaatgcaagctttccagaaggaatctattttgaagacatgcctttcttcttttatgtctatcttaaggcagagagaatttcaataatcagacatcatttttattacagacgaaagcacaatgcttcaatcacccatgtggtagatgcaaattatctggatactgtggaagcgggatgcgaactaatgagaagattcatagacaatgggttctatgatgactataagttcgaccttatcgcatacaagataaatggtccaagaatggctcttatggacataactgaagatgctaaggaaccgttgttcaatctaataaaagaagactatgagaagataaaaaatacagaatattatcaggattatcttgataatctaggtccaaagaagaaaaagttctttttagatgtaattaagtatgacaattatgaggaatttaaaaagaacaatccagaatattag

SEQ ID NO: 102 - DNA, 1551 bp, Methanobrevibacter ruminantium
  source 1..1551: mol_type = genomic DNA
atgaaagacaataacaaaaaagaacaagcagaagacctattaatagcaaacaaattccctcctatgaatgatgtaagtggaatcatacttgcaaaaagagccctgcttagcggcaagagatatgatgtttgccatacagtgattaaagagccccttgataatgactttaacgaaattgcagaagagattatagataacagaatcattataaagaatttcgaatatgaaatgagtaaaaaggagcttaatgagacctttagaaattatataacagagggattgaaaaaactggaagagacaaatcccaactataaaacaataactacacgttcctggggattccagcctaattttttagctttggaatataaattaaagcacccagacacattctggactgctgaattctcagatcccttaactgtgaacattgaaaacaagccaagggatagaagattcaagttagacaataaggaatacatcgatagaatcaataatgaaatcgacaaggtcaatgaaagaaccggacaaaatctggagcatattaaggaaagcgacttcatatacttgatatgcgaatatatagcatatgtctttgccgacaagatacgctttacaaacccaaaccaaagggagataatgcttaatcaatgcccttatgatgtaaaggacatggtcatggcaaagtctgaaatcaatcctcaccctacccttgatgagaaatactaccacatcaaggaagttgactataagattgatgatgactgcataaatataggatactttggaacttattttggaaagagaaactttgaaacaatcttctatgcctgcgaaagcctaaatgaggacataaggtcaaaagtaaaattccatctcttcctaaaccatggagataacctaaaaagacttacaggcaacttaaagataagcaagaacatcatagtgaatgacaaggtttcattgcttgaatttttaaatctatctaccaaattggacattctccttgtaaatgatacagagacaaagggaaactttgagataaatccataccgcccatctaaaatagctgattatattggaagcggaagagacatatggggaatctgtgaaaaggacagcataatggatggattagatgaaataaaatataaatcttatattaatgacttctattcagctaaattgaccttcaatcagatagttaaagattctagtaagatagatgatggattgaaagaaaatccattcgaggataatgattatttagctaaaagagccagtgcaatgagtgaagatgagatagttgaactgataaatgaaaataattacctaaagggtagaaccaatcatttaaatcatctttttaatggaacaagaggaagaggcttgtttgcagatgaggcaaagaaactgaacttgaaaaatgaaaaattagagatggaaaataagaaactaaagaaagaaaacaagaagtataaaaaggatttgaagtatcttaagtcttcaaaaggctctttaaagtaccaaattaaaaagatagtgaaataa

SEQ ID NO: 103 - DNA, 987 bp, Methanobrevibacter ruminantium
  source 1..987: mol_type = genomic DNA
atgtacgaaattgcagtaattcctggagatggaataggtaaagaggtaatggaagcaaccataaatgttttagaatcattggatgtggactttaactttacttatggtgaggctggagacgaatgtctggaaaagaacggagtggcccttccaaatgaaaccatccaacttgcaaaaaatgcagatgcctgcctattcggagctgcaggagagactgcagcagatgtcatcgtaagactaagacaggaactgaacctctttgctaacctaaggccagttaaaagctatccaaatacaaatgccctctttgaaaatcttgactttatgatagtgagggaaaatacagaaggaatgtatattgcaaaggaagaggaatatacagccgaaggagcaattgcaagaaggataataacaagaaaggcaagcgaaagaataatagaatatgctttccaatatgcaaaggacaacaataagtcaaaggttacaggagttcataaggcaaatgtgctaaaaatatcagatggtctctttagagatatatttaatgaaatagcagacaagtataaggatgaaatagattcagaggatttttatgtcgatgcaactgcaatgtatctcataacaagacctgaaagctttgaagtgattgtaacaaccaatctctttggagacatactatcagatgaaggtgcaggacttgtaggaggccttggaatgattccatcaggcaatattggagaaaacggagcattgtttgagccagtccacggttcagccccagacattgcaggtcagggaattgcaaatccattggctatgatgctttcagcagtcatgatgctgaactatcttggtgagagtgaagctgaagagaagttaaataatgcaatccttgaactattaaatgaaggaaaatgcctaactccagatttaggtggcagttcaacaactatggaagttagtgaggccataaaaagcaaattataa

SEQ ID NO: 104 - DNA, 483 bp, Methanobrevibacter ruminantium
  source 1..483: mol_type = genomic DNA
atgaaaggaaaagtttggaaatttggaaatgatattgatactgacatcatacttcctggaagatatttaatctatactgatgaggaaaagctatccgagcattgcatggaaggattggaccctgactttaaaaataaagtaagcgctggagatttcatccttggaggaactaacttcggctgcggatcaagcagggagcatgctccaatagcaatcaaaggctgtggaatatctgcagtaatcgccgaatcctttgcaaggatcttttatagaaatgcaacaaatgtgggagttcccctcctagaagctcctggaataagttctgccattgaaaatggagaggaaatagaagtggatatggaaaaggggattatcatatctgaaagcggaaaggagtatgaatttaagaagctgcctccattcatgttggaaatccttgaagaaggcggattgattaattatcttaaaaaacagaatgaataa

SEQ ID NO: 105 - DNA, 1278 bp, Methanobrevibacter ruminantium
  source 1..1278: mol_type = genomic DNA
atgtcaacaattgctgaaaagatattatcaagagcttcaggacaaggacaagttgaagctggagatatagtcatggctgacattgacatagccatgatgcatgatttgactggacctcttgcagttgaatcatttaacaagataggaactgaaagggtctgggacaatgaaaagatcgtcatcccatttgaccaccaagttccagcagattctcttgactctgcaaacaatcatatcctaatgagaaagttcgtaaaagagcaggatataaaaaacttttatgatgtttatgaaggagtttgtcatcaggttctacctgaaaaaggccatgtgattccaggaactgttattgttggtgcagactcacataccacaacatatggtgcccttggagcattttccactggaataggctctacagacatggctatggtattgtccaccgggcaattatggtttaaggttccagaaaccattcaattcaatatagagggaatccttaaggaaaatacatctgcaaaggatgtgattcttaatataattggacaggtaggggcagatggagcaacctacaagtcctgtgaattcaagggagagaccatatccactatgaacatttcagatagaatggtattatccaatatggctatagagatgggaggaaaaaccggaataattgagcctgataatgtaacctatcaataccttaaggacagggtaaaggacgaaaacaaaaacagattaaaggcattcattgaaaagtccaatcttaaaacagatgaggattcatccagtcttgaaacaatggacattgatgttagcgaccttgagccacaaatcgcatgcccacataatgtagataacgttaagccagcaagcgagctaagcgacattgaaatagaccaagtgtttgtaggttcttgcacaaacggaagaattgaagacctaagggatgccgcaaagatattaaaaggcaagcatatagcatccggccttagaatgctcgtgattcctgcatcaagggaaacatatatgaaggcattggatgaaggattaatcaagatatttgtggaagctggagcccttgtttcagcaccatgctgtggaccatgccttggaggccatacaggactaataggtcctggagaggtcagtctttctacatcaaacagaaactttaagggaagacaaggaagtcctgaaggtgaagtttacctatcaagcgctaaagtagctgcacaatcagcaattgagggaagaattagtgttcctaaataa

SEQ ID NO: 106 - DNA, 1260 bp, Methanobrevibacter ruminantium
  source 1..1260: mol_type = genomic DNA
atgaaaatttgtattgtaggacaaggatatatcggattgccaactgcagcattatttgctaaaagtggctgtgaggttgttggcgtagacataaataaggaaatcattgaaaagctaaaccaaggaatagcccatatagaagagcctggaataagcgactcaatcaaaaatgcggtagaccaaggccattatcatgcttcattaactcctgaggaggcagacacattcataataaccgttccaaccccatatttgcctgaggatcttagctgtgacttaagctatgtaatatccgcttgcaattccattctccctgtccttaaaaagggaaatgtcgttatcatcgaatcaacaatagctccaatgtctacagatgaggtaatcaagcctatctttgaaaatgaaggctatgtcattggagaggacctatatcttgctcactgccctgaaagagtattgcctggacaaataatggaagagcttgtaaacaacaacagaatagtaggtggaatcactgaagaatgtactaaaaaagctgcagatgtctatagaacctttgtaaaaggagaaataatagagactgaagcaaagactgcagaattatcaaaatgcatggaaaacaccttcagagacgtcaacatcgcacttgcgaatgagcttgctaaaatatgtgcagagattggcgtaaacgcccttgacgttattgaaatggcaaacaagcatccaagagttaatatccatagcccaggccctggtgttggaggccactgccttgcaatcgatccatatttcatctatgcaaaggctccagagacagcaaaaataatcaagcttgcaagggatacaaataacagcatgccaggttttgtaatagagaataccggaaagattctaagcaaattagacaaagatgcagagaagataagcgtatttggagtggcctataaaggaaatacagacgatgcaagggaaagccctgcatttgagataattgcaggactgaaggctgcaggatatgaagtggtcatacatgaccctcactttgacaatccagattacttagactttgatgatgcaatcaaggattcttcaatgatacttatcttatctgaccataatcagttcaaggatatggattatgatagcataaagaggaatatgaagaccaagctcatatttgacactaaaaatataattaaaagtgtaccagaggatgttactttagtcaattatggcaatttgtataagtttatacattaa

SEQ ID NO: 107 - DNA, 861 bp, Methanobrevibacter ruminantium
  source 1..861: mol_type = genomic DNA
atgaggattttaattacaggcgcttatggaatgttaggatctgacttaagagaggttctaaaaaatcatgatttaattgcaacaggctctaaagacctagacatcacagatgaagaaagatgtattgattttattgctaaagaacgtccggaaatagtcataaatgctgcagcttacactgctgtagatgactgtgagactcattatgatgatgcatatgcagtaaatgccctagggcctcgtaatttggcaatagcctgtaataagattgatattcctttggtccatataagcacagactatgtctttgatggaactaagcgaactcctcttatagaaaatgacaaattaggtcctcaaagcgcatatggaaagaccaagcttgctggagaggagttcattcaggaaaacactcaaaaatacttcattcttcgtaccgcttggctatatggaatccatggaggaaactttgtaaagaccatgttggatttggctaaggaacatgatgagataactgttgtaaatgatcagatagggtctcctacattctctcttgatttggcaatggcaatatgtgaggttctagacagcgataagtatggcatctatcaccttacaaatgatggggaatgttcctggtatgattttgcaaaagaaatctttagaatatctgatattgatgtgaaggtcatacctgtaagcactgaagagtttccaagacctgctccaaggccacattattctgtattaagcaatgtaaaatggaaaagcgcaggttttgttccaatgagagattataaggaagctttgaatcaatatatttctttatataatttttttgtaaaaataggtaaaatttaa

SEQ ID NO: 108 - DNA, 873 bp, Methanobrevibacter ruminantium
  source 1..873: mol_type = genomic DNA
atgaaaggaatcgttttagctggtggttctggaaccagattatatccaattacaaaggctgtttctaagcagttattgcctttatatgataagccaatgatttattatcctatatctgtcttgatgctagcgaatattaaagatatattaataatatcaactcctcgtgatttgccaatgtataaggacttgctaggggatggaagcaatttaggaatgtccttttcctatgctgagcaagagaatcctaacgggcttgctgaagcattcatcataggggaagactttattggcgatgacaatgttgctcttatattgggagacaatattttccatggacacagatttactgaaatcctagaaagagctcgtgatcttgatgatggagcggtcatattcggctactttacaaacaagccagaggcttttggggttgttgagtttgataatgaatggaatgttctctccatagaagaaaagccagaacatcctaaatccaattatgttgttccgggactttatttctatgataatgatgttattgagatagcaaagagtgtaaagccttcagataggggagagcttgaaataacctctgtaaatgaggagtatcttaataggggcaagcttaaggtagagctcctaggtagaggtatggcttggcttgatacaggtactcatgatgggcttcttgaggcagctaatttcattgagacagttcaaaagagacaaagtttgtatattgcttgtttggaggaaattgcttattccaagggatatattagcaaagaagagcttttaaaattagcagagcctcttaagaaaactgcttatggtgattatttaactaaattagcagaaagaaagatttaa

SEQ ID NO: 109 - DNA, 579 bp, Methanobrevibacter ruminantium
  source 1..579: mol_type = genomic DNA
atgggcaagtttaatataattaaaagtgaaattgaaggtgtatttacagttgaacctaccgtttttgaagatgaacggggctactttatggaaacttataatgagaatgactttaaggcagaggggattgatttaacctttgttcaagacaatcaatcaaagtcatcaaaaggagtacttagaggcctccatttccaatacacacagccacaaggaaagctggttcgtgtaataaagggagaagtcttcgatgtgggagtggatcttagaaaagactcacctacatatggaaaatggatgggggaaatactctctgaagaaaacaaaaaacagttatttataccaaaaggatttgcccatggctttttagtattatcagatgaagcagaattcgtttacaagtgtacagacttctataaaggagatgatgagggaggaatccaatggaacgaccctgatataggaatcgaatggccattgggagaccttaaggaagaggatctgattctatctgaaaaggacaagctattgaagccaatgaaagacactccaactgatttctatatggaagatgaatga

SEQ ID NO: 110 - DNA, 1008 bp, Methanobrevibacter ruminantium
  source 1..1008: mol_type = genomic DNA
atgacaaaaattttagttactggcggtgcaggttttataggtagtaactttataaaatatatgcttgataagtatcctgattatgaaatagttaatttagatgctttgacttactgcggaaaccttgaaaatcttgaagatattgaagataatccgaattattcctttgttaagggaaatatcatggatgaaggtcttgttgatgttgttgtaagcagcgtagactacatagtcaattttgcagctgaaagccatgtggaccgcagcatagaagacccgcagatattcatcaaatccaacataatcggaacacaggtattgcttgatgcagcctataaataccaaatcaaaaaattcctacaagtatccaccgacgaagtatatggaagcctaggcccagagggatacttcaccgaaacaactcctctccaggcaaacagcccatattcagcctcaaaggcaggtgctgaccttatggtaagagcatatggagagacattcgacctcccaatcaacataacaagatgctcaaacaactatgggccttatcagttcccagaaaaactgataccactaatgatctccaatgccttagaagacaaggagctcccaatatacggcgacggaaaaaacataagagactggctacacgtctacgaccactgctcagctattgaccttgttctccacaaaggaaagataggagaagtatacaacattggcggccacaacgaaaagcaaaatatagaaatagtaaaacttattcttaaggaacttgataaaccagaaagcctaataaaatttgtaaaagacagattaggtcatgacagacgctatgcaatagattcaaccaaaataacagaagaattaggctggaaaccaaaatacacatttgaaacaggaatagtggaaacaatccattggtatttggacaatcaagactggatggaaaaggtaaaatccggcgaatatcaagaatattatgaaaagatgtactctaaaaagtag

SEQ ID NO: 111 - DNA, 984 bp, Methanobrevibacter ruminantium
  source 1..984: mol_type = genomic DNA
atgaaagtatcagtagtaacacctaactataatggtcttaaattcttaaacgcctattttgaaaccttagcttttcaaagtaggttcatagaagagatcatcataatcgataatgcatctactgatgccagctgtgatcttatagaagaatacataaacagtcctagctataagattgacataaaacttataaaaaatgataaaaatcttggatttgctcctgcagtcaatcagggcattcgcttggctaaatccgaactaatctattctgtaaacaatgatgtagaacttgaatttaatactatagaaacattaattcaatctatggaaagatccattgaagaggggaaaaatccattctccattcagtcaaagatgatacagtaccataatagaagcctaattgatgatgcaggtgatgaatataatctacttgcatacactaagaaactaggcgatgggagtccgattgacaactacaatgaaaaaagggagatattctcatcctgtgcaggtgctgcattgtatagaaaatccattttggagaaaataggtctttttgacgataatttctttgcttatgtagaggatatagatctttcattcagggctcaaataaatggttatagaaactacctagagcctaaatcaatcatctatcattatggaagtgctacaagcggaagcaggtataatgagtttaagataaggcttgctgcacgaaataatgtttggatgatttataagaatttcccaattcctctaaagattgttaatttcatcttcatatttcttggatttttcataaaatacctcttctttttaaggaaaggattcggttcaatctatttgggcggagtaaaagagggcttaagagaaagaaaaggaatagaaaagacccactttgaatggaaaaactggaaaaattactttaagatagaatggaagatgattaagaacacatttggctactttaaaaaatag

SEQ ID NO: 112 - DNA, 897 bp, Methanobrevibacter ruminantium
  source 1..897: mol_type = genomic DNA
atgagaaatatagacttatcaattattgttgttaattataacacctttaaattaacaagggacactatagattcttgtttagctgaacctactcattatacatatgaaatattccttgtagacaacaaatcaacagatgacagccttgaaaaacttcaagaatactttaaaagtgaaacagaacgaggaatattaaaaatcattccaaaccaatccaacgatggttttgcaaaggcaaataatattgcaatagagcaagcaaaaggggatttcatacttcttttaaactcagacacccttatgaagcaatccactatcgacaagtgcatggattacataacagacaaaggccacgatgatatagatgcattaggctgtaaggtttcccttgccgatggaagtcttgacaaggcctgcaagcgcagctttccaaatcctgcaaactccttttataaattgtttcatataaatgtagatagtgacaagaacgattataatctggatgatcttgatgatgatggtatttatgagattgattgccttgtaggggcatttatgcttgttagaaggactacaatcgatgaagtaggccttttggatgatgctttcttcatgtatggagaggatattgattggtgctatagaatcaaacaggcaggatggaagatagtttacttcggccaggcagagataattcactataagggagcaagcagcgaggataaaaatactaaaaaaagaaatccaaagattatttatgagttttatagggcaatgtatgtcttttataaaaagcactatactaaaaaatataatttccttgtaaacattgcagtctatattggaattggagttttgctagtttttaacttagttagaaatgccttcaggtcttga

SEQ ID NO: 113 - DNA, 1401 bp, Methanobrevibacter ruminantium
  source 1..1401: mol_type = genomic DNA
atgattaaagaaaatcagagaatattaaatgcaatactagtcatcatagacattattgtaattcttatctcactaggccttgcatactttgtaagattcaagaccaccatattctcagtaggaggctcccttccattcagtgactatttcatattcacaatcgtttgcataattcctacttatattctattatactacttctttggtctttataagccattccgtaaccaatcatcaatattctctggtgctgaggacattgtaaagtctgacataatggcattcatcatcctggttgctattttgttcatcatcaatcagcctaacttttcaaggatcatgctccttcttttaagcctatttggaatgattctcacaatcgctgaaagggtattggtcgttcttgtattgagaatgatgagaacaaacaaccttaacctgaagcatatgcttatcatcggagacaatgacttggcattcgagtttgcacataagatcaactctaaaacctatttgggatacaatattgccggatttttaggaagaaaggaaaatataggcaaacgatttgaaggaaccaagtttataggcagctttgatgacttgcctcgtgttctaaagacccataagtttgacagggtggtcatagccattccccttaagtattattaccatctaaacgaaatcgtggatgcatgtgaggaagagggaatcaaggcagaaatcattccagactattataagtatcttccggctaagccttcagttgacatgcttgatgacatgcctatcatcaatatccgctatgttccattggatgatgccttcaataagttcaagaagatagtctcagattactttgtatccattgtagctattataatcacatctccaatcatgattttaactgcaattgcaattaagattgagtctccaggacctatcatcttcaagcaggaaaggataggctataacggtaagcccttcatgatgtataagttcagaagcatgaaggttcaggatgatgaggaggagaaatcccaatggacaactaaggacgatccaagaaagacaagaataggcactttcattagaaaatggagcatagatgagcttcctcagtttttcaatgtcctaaagagggatatgagcgtagtcggtccccgccctgagaggccttattttgtggaggagtttaagaaaaccattcctaaatacatggttaagcatcaggtaaggcctggactaactggacttgctcaggtaaatggttataggggaaacacttcaattaaaaagcgtattgaatatgacattcgctatgtagaaaattggagtttggcgctggatgtaaaaatcatgttttggacagtatttaggcgtaataagaatgcttattaa

SEQ ID NO: 114 - DNA, 2472 bp, Methanobrevibacter ruminantium
  source 1..2472: mol_type = genomic DNA
atggaaaaagaatttttcgaaggaatgaatttggaagaagacattagcgatgaggacttccagactattgtagaaggctgggaaaaagtccaagatcaaatgtccaaagaagaatttataactaaatttaatgaacacaaggcagaatttaaagacgcttctttcttcagcgacatagactttttaaacatgattgttaatccattagtgggtggtggcgatgatgagccaggacctgctattgtagaaggcgaattccagaagatatctgatgttgaaccaggcaatgaaggattcaatgttgttgcacgtataatgagcattggaaacagcagaatattcacttccagaaaaggaaagcaaggaaagctttgcaacttgcagattgccgatgacaccggagagctaagacttgttctttggactgaaaacatcaagcatctcaagcatgtcactgaaggagatattgtagagattacaaatatcgaatgtaaagaaggcttcagaggaggtaaggaattctccctacgtccaagatcatctttaagacctattgaagagggcagtgaaaactatccggaaaacattgctgctttccctgtctatgaggaaaagattactcagattgcagacattaagcctgatgaaaccgtaagcatcataggaaggctaatcagagttcctaagccacatgcctatgaaagcaacggcaagaaaggtaaggtaacctcccttgaaattcaggatgcaagcggaaagacctcatacacattatggaacaatgacgttaagctaatcgacatcttggaattgaaggaaggggacattgtcaaaatccttaatgaacaatccagagaaagaaacggagaaatttccttaagccattgggatggaagaatcgtcaaggctgaaggcgactatgacattccagaatatgaggaaaacatcattaagattgcagatgcccaagagatgcaggatgtaagcattatcggtcttgttacaaaggttcaggacgtaattcaattcacaagaaacgacggctctgaaggctttgtaaaatcaatcgagctttcagacgacgaaggaagcatcagagtaaccctatggggagacgacactaagatacctatctccaagggagacattgtcaaggtcattggaggaaatatagaatatgatgatttctcaaacggctacagggtaaacaccaattggaacactgagttaaaaatcaaccctgaagagcatagcgatttgatagaaaccttaaaaggtcaagcagaaaacttaggacctattccaatcagcgaggttcaatctattgaggaagacggtgaggaagttgacattatcggtagaatcatcaccttaaatgacacccacaccttcccaagggatgacggcactgaaggtgttgtccgctctggtgaaatggctgatggatcatctcctgacggacttgtaagggtatccttctgggatgacaaggctaaggttcctgaaataggaaaggcctacaaggttgaaaacgccagaacccgtatgggaatgtatgcagtggaagtcaatgtaggaaagaccacaagattcattgaaatcccagaaagcgaagcaggtgaccttccttcatttgaagagttagaagagtccatctacatcagcaaaaaaattgaagaattggatgaggatgacatgaacattaaagtcttggctagaatcctggaagttcatgaacctcgggaattcccaagggatgacggcactaaaggattggttggaaatatggaggttgcagacataaccggctccattagagtaaccttatgggatgataagaataaccttccatacggcgttggggacgctatcaaaatccaaaatccacgtgtaagatataattcaaatatggactatttagaattaagcgttggaaacggaacaaatatcttaactccatctgacagtgagataaatgatattccagacattttagagttacaaaatacattgtatcaaaccaaggagattgctaacctttcagatgacgacactaaaatcagagttacaggcagatttgtagacatctatggtcaaaagatgatcattcctaaatgtcctcaatgtaacaatacattagagcctgaagatatcgatgctgaggaatgcagcttctgcggcaattatattgacgagcctaagtaccttttaatgcttccaggtaaattagaggatgacacaggcgacattcaagttacattcttcaatgaattggttggagaattgcttggcatgaaacaggatgaaatctttgaactctatgagggagaaggtggagaccttggtccattggaaggaaagattgatgatttggaaggcattaccttagaaatccttgcagatgttacattcaatgaatatgatgaggaaaataggttaagaccaagaaagatctttaatatggaatggtaa

SEQ ID NO: 115 - DNA, 936 bp, Methanobrevibacter ruminantium
  source 1..936: mol_type = genomic DNA
atggtagaacttgaagacttacctaatgttggagaaaaaactgcagaaaagttaagagaggctggatttgctgatatgatgagattagctactgctactgctaaagaattatctgtaaaagcggaaatcggtgaaggtgtagctgaaaaagttattgaagcagctcgtaaggcagaaaagatcgattttgaaactgcatttgatgtaatggaaagaaggagagatgttggccgtatcactacagggagcaaaaacgtagacgaattgatcggcggtggaatcgaaacccaatctatcactgaagtattcggtgagttcggttcaggtaaaagtcaaatctcccacgaattagctgttacagttcaattgcctaaggaaagaggcggacttgaaggggaatgtgtattcatcgatacagaaaacacattcagaccagaaaggattgaacaaatcgcagatgcttgtggaatcgaccgtgaagaggctttacaaagaatccacatcgcaagagctttcaactcctctcaccaaatattgatggctgaaaagattaatgagcttatccaaagtggagtaaatgtaaggcttgtaatcgttgactcacttatggctcacttcagagcagaatatgtaggaagggaatcattagcaaccagacagcaaaagcttaaccaacatttacatgcattgcaacaaatcgctaacacctataatgttgctgtattccttactaaccaagtacaagcaagaccagatgctttcttcggcagccctacaaaagctattggtggacacgttttaggacacgcttcaacttacagaatctggcttaaaaaaggtttagctggtaaaagaattgctaggctcgtagacagccctcacttacctgaaggagaagcagtatttaaggttactacagacggaattgttgactaa

SEQ ID NO: 116 - DNA, 918 bp, Methanobrevibacter ruminantium
  source 1..918: mol_type = genomic DNA
atgttgattgctatggactttagaataattatactctcaataatcataatgattctgcttggagtgcttcttaaaaaaatagaccttctaaaagaagaagatgtcgaaacactcaataatttagtaatcaatatatgtctaccttgtctaattttcaatgctttatacactgctgatgtttccttgcttccatctttgagtattttaacactttccactactatcactagtttaatcgtaggagtattcacttatattctacttaaattatttgcttgggataatgttaaaatatggagcatacttgtaacagtggtcttgggaaatacagggtttttaggctatccgattacacaggggatctatggcagcgaaggccttatacgtgcagtcttctgtgactgctccacctcaatcacatttgtaatattgagcgttatcctgatattgatttttgatggtgaattgaaggtggctttaagaaagatagctacttttgttccattatggtctatcgttttaggaattctctttaatatattcgccattccgataacagatgtcggaactactgtagttggttatttgggtgatgccactatccctcttattatgatctctttaggcttgtccttgaatataagcgggcttaagaacaatcttaaggaagtgagtcttgcctcattcattaagcttatattatatccctttgtggctttaggggttatggccttgcttggaatcactggattcaatcatacaatcggacttattgaagcggctatgtcatcagctatgattgggcttgttttagccataacttataagttggatcctcatttgacttcagattgtatttttacttcgactttgtttggcttagtgactattcctttgtttttaatgtttatagtttaa

SEQ ID NO: 117 - DNA, 1983 bp, Methanobrevibacter ruminantium
  source 1..1983: mol_type = genomic DNA
atggcagaagaaataaacaacgaagaaattagagtgggagtatatgtttgccactgtggtgtaaacgttggtggagtcgtaaactgtcctgaagtagcagcttacgcagaaactttacctaacgtagttattgcaaaagattacaaatacatgtgttcagaccctggtcaaagtcttatccaagaagacatcaaagaacacaacttaaacagaattgtagtagcagcatgttctcctagacttcacgaacctaccttcagaagatgtgtagaagaagcaggattaaacaaattcttatttgaattcgctaacttaagagaacaagactcttgggtacacatgacccaacctgaagaagcaactgcaaaagctaaagacttaactcgtatggctgttgcaaaagcaagattattagaacctcttgaagcttctaaagtagcagtagacaaaaaatgtctcgttattggtggtggagtagcaggtattcaatctgcattagacttagctgatatgggattcaaaacctacatggtagaaagaaacccaactatcggtggaagaatgggtcaattagacaaaaccttccctaccttagactgttccatgtgtattctcgcacctaagatggtagacacatccaaacacgaaaacattgaattaattacttatgctgaagttaaagaagtagacggatacatcggaaacttcactgtaaccgtagaaaagaaacctagatacgtcaaagaggatgactgtaccggatgtggacaatgtcaagaagtatgtcctatcgaaataccaaactactacgacgaaggtgtaggtatggtaaaagctgcatacatcccattcccacaagcagtacctctctgtgcaaccattgacaaaaactactgtattgactgtggtctttgtgaaaccgtatgtggtccagatgcaattgaccgtgacatggaaccagaagaaatcgaactccacgtcggtaccatcattgcagcaaccggttacgacccatatgacccaaccgaaaaatacgaatacggttacggcagatacactaacgtaattaccgctatggaaatcgaaaggatgatcaacgcatccggtcctaccggtggtcacgtacaaaaaccatctgacggtaaagaacctaaacgtgtagcattcatccactgtgtcggttcaagagacgaacaaatcggtaaatcctactgttccagagtatgttgtatgtactccatgaaaaacgctcaattatgtattgaccacgaacctgacactgaagtaacctgttactacatggatatccgttcattcggtaaaggattcgaagagttctacaaaacttcccaagaaaaatacggtattgaattcatcagaggacgtcctgcagaaatcctcgaaaacgatgacttaaccttaaccgtaagagcagaagacacattactcggaaaagtaactgaatacacctacgacttagttgtattatctgttggattagaacctccaaaaggatccaacgaactcagacaaaccttaggtttatccagaactaccgacggattctacatggaagctcacccaaaactcagacctgttgacaccttaactgacggtgtttacattgctggtgtagcacaaggtcctaaggatattcctgacgcagtagcacaaggttcagctgcagcatcaagagcatctatcccaatggctaaaggtgaagtagaaatcgaacctattactgctgacactgataccaccgtttgtggtgcatgtgaagtatgtgtagaattatgtccattcggtgctgtaagtattgaaggtgaaggcgctgacaaacacgcagctattaacgttgctttatgtaaaggatgcggtacctgtgtaggtgcatgtccatccggtgctatgaaccaaaaccacttcaagaccgaacaaattatggcacaaattgcagctgctcttgaagacgttgcaaaatag

SEQ ID NO: 118 - DNA, 666 bp, Methanobrevibacter ruminantium
  source 1..666: mol_type = genomic DNA
atgaaaaaatttgaaagtgtcgattttgacaaaaccgaaaaaatagttgatggaattgctatcgaagataatgaagctatggatatagtggttatacttgaacccggctcagggcagtatgcattcttggcttcaagaaaggcaccatcaaagggtttcaacgcttttattgaaaccgaagctgcaaaagaccataaaacatttgtcactgcagtgctttttgacaatgaatatgaaattctccactctagaagggacattaatgaggttcctattctcaccactaatgaatactcatgcagaggatgcacagcattgtacgatgcaatcggaataactattgaaagtattaaagatgaaatcgacaataaagtcttgtttttaatcattaccgatggaatggaaaacgcttcaagaagattcaatgaagatcaaataagatcttatattgatgagcttgattacgagtttatctttgttggtgcagacatagacagttaccgtgaagcatctaaaataggaatcaggcaatcccacaccgcaagcttcaagaaaactggtgaaggaatagatgacttatttaaaacaatttctgatgtgtctgacattcatcgcgacaatatgaaattagaggatgtcgattggaagcacagacttgaagattag

SEQ ID NO: 119 - DNA, 1497 bp, Methanobrevibacter ruminantium
  source 1..1497: mol_type = genomic DNA
atggttaaaagaattcctgatgaagaacaaataaaattaggcattagaactttagattttaacattccagaggatcatatttctcgttttgttgtggatttcattgacgaatattatcctcttttaggaatcaaagaaaataaaaagaagaaagggcgtgacagttttcctgtgaaagagatgttaaaattgcttatttatgctaaaatcgagcatattgatagtatgagattcttagcagacatggtaaaatatcatgacgtatataaattcgttggaaatggaatttgtccttcagaacgatcattacaacgatacagagaaaaatacggcaaatattacaatgaattgttaaaagcaaccttaaaaaaagcttcagatgtggattacactgatttcaacgaagtttccattgacggaaccatcaaaaaagcatacaattcaaaaaataaagtgatcacagaaaaagaaactgaaatattaacccgttacttcgaaggaggccgtgtaagtcaggaagagctagataaactccataaaccggcccgagagattcttgaaaataaaaaaatcagcaaccaagaaaaattatacctcttggatgacattaaaacacaattcacactgtctggtcaaaaatcagtgccagtaaccgacatagaagcacgttggatgaaaagcaagaaaggaaactcacaaataagctataatatccaatctgcagtcgattacgatacaaaaatgatttgtgcaataaacgtcgtacaagcccctacagaccattaccaattgccaaaaatcgtagataaggcaataaacaacacaaacgtaataccaagattcgtattggcagatacaatctatctgaatgaagaaagcttatcatatcttgcagataatcaaataaatggagttataccagatagaaagcaatccaaggaaaaaatcggaagattgaacaagaacccatatcacaaggatcacttcaaatacttccctgaaattgatgcatttgaatgtccagaaggccaaataatgtattttttcaacaaatacactgaaaaaaatgatgatttggacaagccagacaaaattaagcgtttatattccaattatggtgcttgtaaggcttgcaattgccgtgaaaactgcctttcatccacccaaacccacagaacaatcaccgaatatggcggaagtttaaagaaagcaatgtgggaaaaaatggaaacagaggaatataaggaagaatatgcaaaaaggtcatctgtcgaaggaccttttggcattttaaaggaacaattccatatagaaagcgaagtagtgataggaaaaacaaagacagaagaaagaatactattagatgccgtggcttataatttaatacgattatttaacttagaacaagaaataaaaaatgataaagaagatatagttgatttctgtgagaaaatttctgtccaagagaaattagaggtcagagcaaccatattttaa

SEQ ID NO: 120 - DNA, 294 bp, Methanobrevibacter ruminantium
  source 1..294: mol_type = genomic DNA
atgagttttgaagacttgattgaagactatgtcaaagctaagatagatttgaatgtcaagttcggatctgtattggatgaattgaatattgaatacgaaagcttttgcttctatgatgaattcaaatccgtctgtcttgatttggaaatgcataataaggaattgtctgatgaagagattgaaaatatcattgaaaagacaggatttgacttcctaaaggtggaaatcaaaggcaaaaagtttccttttggaaatggtgaagaaatcgattacacctatgtattcgagtgttaa

SEQ ID NO: 121 - DNA, 999 bp, Methanobrevibacter ruminantium
  source 1..999: mol_type = genomic DNA
atgaaaattagtttaaataatgtatctttagatattgacttaaagaacagtcaaaaatttaaaaatatggaggtaattcctattgaggctttaagcgctggtaaaaaggaatttatcacacttaaggcgggcattcaagaagggtatgtgaagatttccgaatgtgaaagcagcacagtaaatactgtcatggctcaaaacaagtcttccactccacttgttttaatagatggcgaggaagtaattggcgctatgcaaaatagaataatgaacaggtctttaattgttcctggaaataccactatgcctatttcagtaagctgtacagaacatggaagatggcatactcgtggaaacagtcctaaagcaagggaattttctcattctgacttctttgcagactatgaaacacgtcatcgtaagtctgaaaccttatataataattctgactgccagtctgaagtatgggcttcaatcagcgaccttgaaattaagaattcctacagatctccaacaagtgcattgaatgatagctatgtccatcacaggccaagacttaatgaatatttaaaacatttcagcatgctttacaatcaaattggagctatattcataatcaatggccaaatcaaaggattggaattgttctataatcctttcctctgttcccagtactatgacaagattcttaaaagctatatcatgaatgctattactaattactacagtaattgtagttcaaatagttcaaatattgatgtaggggcatttttggcagatttaagcgactccaaattaaaccactctcctaatcaaggtcttggtcaacacattaagttttcaaacaatcatgggaccggctctgcattgattaatgatggggaattcgttcacttgaattactttaaaaccaaatatgatgtttcttacaagaagcagagaaaaaatgtcagaacttttggttccttcgatgacttattgagtaaaatggatgaataa

SEQ ID NO: 122 - DNA, 1272 bp, Methanobrevibacter ruminantium
  source 1..1272: mol_type = genomic DNA
atgtatcaatacgaaaatgaagttactaaactcaatgaattaatggaaactcataataactggatgagagatagcgtaaaccttattgcaagtgaaaacactacaagtaatgcagttacaggagctgttgcttcagacttagctcacagatatgctgaaggacaagcattcgaacgtttatatcaaggatgcacatatatcgatgaaattgaagacattgtaaaaaggctctcaagagaagtctatgactgtagttatgctaatgtacagcctgtatctggtgtaactgctaaccttgctgctttctttggatttgcaaaggctggagacaagatgatggctatgaacattccatttggaggtcacatctcccatgcaaacgtaagtgcagcaggtatcagaggattaaaaacccttgaacatcctttcaacccagaggttatgaacattgatattgatgcaatgaacaagatgatattggaagaaaagccaaagatcattctcttcggtggaagcttattccttttcccacaccctgtaaaagaggctgtagatgcagcaaacgaagttggggcaactatcatgtatgacggtgctcacgttctcggtttgattgcaggtaaacagttccaagatcctttaaaggaaggagctgaagttatgatgggtagtacccacaagaccttcccaggtcctcaagggggaatcatcctatcagacgaatcaaacaaggaactaatcgacaatgctgttttcccaggtgtagtgagcaatcaccacttgcaccacttagcaggtttaggaatcgctacagctgaaatgctcgagttcggtgaagattatgctaaacaaacaatcaaaaacgctaaagcattggctggagctcttgcagaacaaggtttcaatgtattctgtgaagatcttggctacacagaatctcaccaagtcgctatgaatgtaagcgatgtcaaaagagcaacaatattggctaaagagctagagcaaaacaacattatattaaacaaaaacctcattccaggtgacaatgtaaatgacagtgatgacccttcaggtataagaataggtacccaagaaatcacaagacgtggaatgaaggaaaaagaaatggaagaagttgctgagtttatctggaaagttgcagaaggcgacaaagtagatatcaaggatgaagtaactgaattcatgagtcaatacagaactattcattatgcttttaaagaagaagaaggttataagtatattcaatactaa

SEQ ID NO: 123 - DNA, 702 bp, Methanobrevibacter ruminantium
  source 1..702: mol_type = genomic DNA
atgagaataggatgggcttttactggtgcaggacatttgcttagggaaagtgtagaagctatggaagaagtggcaaaataccatgatataaccgtatttttatcacaggcttcagaggaggtcttaaggatgtatggtttatatgaccgtgtggttgctgtaactggcggaaggtacagagagcttgcctgcgattccaatcagaaatttagctttccaataactggcaggctttctcttggaaaatatgatgctcttatagtttctcctgtcactgcaaatacagttgcaaagatagtttatggaatttcagacactcttgtgacaaatgcagtggctcaggctggaaaagggagagtcaaaacccttatggttccggtcgatattgaacccggggatgttgatacagttcttccttctaagctagagctttcaaaatgtcaaaaatgtgatgtgtgtgatgcagctgaagtctgtccaaatggggcaattgtggctcatcaggagattgatctcttgaaatgcattggctgtggtgcatgtaaggacatttgtcaatatggtgcagtttctgccggtaagattataacaatgcatatgagagacattgatatagagaatactcaaaagctatcaaaaatggaaggaattgaaatatttgcaagtcctcaagagcttttactccattttgattataaataa

SEQ ID NO: 124 - DNA, 402 bp, Methanobrevibacter ruminantium
  source 1..402: mol_type = genomic DNA
atgaaaaataatagaaaaaataatcaaaataaagagaataatcatttaaaatcattgcatttaaaaaaatccaatgaaaaaataacagacctaagaatagcagatagctttttaagtcgttttcttggattgatgtttaaaaaagatatagattatcctttattgtttaagattccacagaatattaataataggcatagatcatccattcatagctgctttatgagatttgaattaaaattagtttttattgataagaacaatatcatatatgaaataagtgatttgaagccatggagatattatgcacctaaaaaaccagccaaatatataatagaatttgataaaaatggatttagtgattatgatttaaaaataggtgatgaagtagagttaaaataa

SEQ ID NO: 125 - DNA, 1209 bp, Methanobrevibacter ruminantium
  source 1..1209: mol_type = genomic DNA
atgagtagaaatatttttgttgaaaaattaaatcaaacttttatcgaagatcttgatattgaaattgtagaaagaaaaggtattggtcacccagacagtatcagtgatggtattgctgaatctgtaagtgaagctctctgtaagatgtacatggatgagcttggtggagtattgcaccacaatactgacgaagtccaaatcaccgcaggtgaatccaaccctgtattcggtggaggacaaatcatcaaaccaatcgatattctcttaaccggtagaggagtatctgaatacgaaggtcataaattgcctcttgattatgtagcaatcgacgcagcaaaagaattcttagacaagactgtaatcaacttagacgtaaaccgtgacacaatcgttgaatgtaaaatcggacacggttccggagaccttgtagacgtattcaaaagggaaggagcaccttcctccaacgacacatccttcggtgtaggatacgcaccattctccgaagttgaaaccatcgtctttgaaaccgaaaccttacttaactccaaagcattcaaaaaagaccaccctggagtaggtgaagacataaaagtaatgggacttagagaaggagacaagatcacattaacaatcggttgtgcaacggtatccaaataccttgcaaacagagaagaatacatcgcatgcagagacgtattaaaagacattgtagctgaccttgcagtaaaatacacagacagggaaattgaagtattcgtcaacacagcagacaacgacaatgcaacagacgaatcaggctactacctaaccgtaaccggaacttccgctgaaatgggagacgacggatctgtaggaagaggaaacagggcaaacggtcttatcaccccatgcagaccaatgtccatggaagcaacctctggtaaaaacccaatcaaccacgtaggtaaaatctacaacatcctctctaacgaaatcgcaaacgatgtagcaaaagatgtcgaaggagtaaaacaaatcaatttaatgattctttcccaaataggtaaacctatcgaccagcctaaagcagcttcagctggaattatccttgaagacggctatgaaatgggtaaggtaagcccacaagttgaaaaaatcattgacaattggttagaaaacattaccgacattactgaaaaggtagttcaaggtaaagcaagaactttctaa

SEQ ID NO: 126 - DNA, 3432 bp, Methanobrevibacter ruminantium
  source 1..3432: mol_type = genomic DNA
atgccaatagaagaggcagaaaaatcatatgactttaaaaaaatagaatcaaaggtccaaagcttttgggaagatgaggacatctatcaaaagaccaatgaattgaacaaaaacggtcctcaatattccttcttggacggacctccatactgtagtggtaaaatccatttaggtactacttggaataaggttattaaagacacattgttacgttacaaatcaatgaatggatttgcacttagaagacaagctggttgggacactcacggattgccaatcgaacataaggtagagcaattgcttggaattgaatccaaacaggaaatcgaagagaaatatggcatagacaagttcgtaggcaaatgtaaggaatttgcaatggaaaacaaggttgcaatgactgaacagtttaaaagccttggagtttggatggattgggacaatccttatatgaccttggatcctaaatatatggaatcagcttggtggacattaaagaagactcatgaaaagaacttgcttacaaaggacaaaagggtaatcagctggtgtcctcactgtcagactgcacttgctgcagctgagattgactatactgaagacacagacccttccatttatgtccgtttcccacttaaggaaaagttcctaaatgaagaaaactgcagtgaatttgcaaatgattctgatttggccaacttaaaacagtcattccttgtatggacaaccaccccttggacactccctggaaacttggctatctgtttgaatgaggatttcgaatattcatttgttaaggtagatgaaagattaaacgagtcagatgacgaaatattaatcattgcaaatgaacttcttgaaactgttttaggtcctatcgaaatcatacataagaataagattccaaatcctaaatatgatccagaaaataaggagtccaaagagaaaaaatacctcattgaagaggaaactgaagtgatgtatgaaataataaagacagtaaaaggctctgagcttttaggtcttggctacgtctatcctttagctgaagaagttccaaagcaaatggaaatagaagctgaaaacagtcttgttcacacaaccttccacggagaccatgttgaattgggagaaggtaccggatttgtacacacagctcctggacacggtcctgaggactttgaaatcggtcaagaagtaggacttcctatccattgtcctgtagatgaggcaggatgctttaccgaagacggaggagcatatgccaatggatacaccaaagacctaaatgacacaatcattgcagacttgatagcaaaaggattgatgtttaagaatgatacaataacccacagatttggggtctgttggagatgtaagactcctatcatttacttagctactgaacaatggtttattaaagtgcctgaaatcaaggaaaagatgctttctgaaatcgacagagtcgaatgggttcctaaatgggctggtgaaggaaggttccatgattgggtagctaacgctaaggactggaccatttcaagacaaagatactggggtattccaatccctatatgggtatgtcctgactgtggagaaataaaggttataggctctgtagaagagttgaaagagctttcaatcaatgaaatcactgcaagcgatgaggaattggttcacagaccttatgttgatgacattttaatcaactgcgattgcggatgtgatagcccaatgaaacgtattccagatgtattggatgtatggattgactctggagttgcaggatgggctgcattatactatcctcgtgaagaggaaatgtttgataaatggtatccatatgactttatctgcgaaggacatgatcaaacccgtggatggttctattcacagttaggtacaggtgtaatcgcattggatcaagccccttacaataaggtattgatgcatggattcgtattggacgaggaaggaaagaaaatgagcaaatccttaggaaatgtagttcagcctgaggaagttattgaaaaatacggtgcagatgtacttagattctaccttttatgggcttgcaagccatgggatgaccttaaattcgtttgggatgaattgaacaatgttaaaaagatgttcaacatcttatggaacgtttatgtattctcaacaacctatatggcacttgacgaattcgacccagcaaaatgcgtacttgatggccctgatgcaaatgtcacacttagaaatgaggacagatggatcttatccagagtaaactcacttgctaaggaggcaggagatgccataaatgacgtacacttccacttggctacaagagcaatcaataatttcatacttgaagacttaagcagatggtatgtaagattaatcagaggaaggacttgggttgaaagcgatgatcctgacaagttaggtgcatattatacactttacaatactcttaatactttaattcatttgatggctccaataactcctcacttgtctgaggaagtttatgaaaacttggttaaaaaccttgatgataatgcagttgaaagcattcatatggataattggatgtttgatgaatgcttaatcgataaggagcttgaagctgaaatggaccatattagagaaatcattgaggcagctgcaagggcaagagatgttgcaagatacaagttaagatggcctgtaagtgacattaccgttgtttctcaggatgaatctatcttaaacagtgttgcactccttgaagatgtaatcaaagaccaatccaacactaaagaggttcttacagcaaatgagtttgaaaaccttacattcattgcaaagcctaatctcaagaccttaggcccaaggcttaagggagatatgggaattgtccaaaagttctttgcccaagccaaggctgaaggaataggcaattcaattaaagaagagcttgactcaagcggaaaatacattgtcacaggtgaagacagagagggcaatcagaaagaaatcgaactcagtgcagatgatgtcctttatgaaactgagcttccagatgatgtagttagcgcagaattcaatggaggaaacgtatttgtaaatactaaaattactccagaaatcttatctgaagctatggctcgtgagaccatcagaagaatccaagacatgagaaaagacatggacttagatgttgaagctaatgttggcgtaatgatcaatactgatggagagtttaaggagctcattgaaaagcaatctaatttgataagcgatgaagtaagagctaaatcccttgtaatattcgatggaaaagcctgtgaagtctgtactgataagggtatgggcagagagtatgaggacatttctgtagaatattctaaagaatgggagatcgaaggtcataaggttattatttcagttgtaaaactttaa

SEQ ID NO: 127 - DNA, 2211 bp, Methanobrevibacter ruminantium
  source 1..2211: mol_type = genomic DNA
atgactttaacagattctgaagtaaaatatattgaaggaattctcggtagagaaatgaacgaattggaagagggaatgttagatgtaatgttttccgagcattgttcatataaaagtagtagaccatttttaagaatgtttcctactgaaggagaaaacattgtcctagggcctggagacgatgcaggtcttgtatctattacagatgaatatgctcttgctgtaggtatggaaagtcataatcacccttcagctattgaaccttacggaggagcaggtacaggtattggaggaatccttagagacattatctctatgggtgcaatgccaattgcccttttagacagccttcgttttggtcctcttgaagaccaaaagtcaagatacttgtttgagcatgtcgttgaaggaatctccgactatggtaacagggtaggagttcctaccgttgcaggtgagattgaatttgacgaatcattcagaacaaaccctcttgtaaacgtattatgtgcaggacttgtcaaaaaggatgagatagttcttgctgtagctccaaatataggagatgtcttccttcttatgggaggaaccacaggccgtgatggaattcacggagtgacctttgcatctgaagagctcacatcagacagtgaaaccgaagacagacctgcagtacaggtagctgatccattcaccaaaaagagagttcttgaagcttcccttgaaatcctagaaaagatagactgttccggagtaaaggacctagggggaggaggccttacctgctgtgtctctgagcttgtagataagtctaaaaacggtgcagttgtagaccttagagctattcctttaagggaagagggaatgaccccttatgaaataatgctttcagaatctcaagagcgtatgatttttgtcataaaccctaaagatgtggaattggcacaaaagatatgtgataagcatgaaattccttctgcagtgattggagaagtcactgaaggaagcaatatggttgtaaaggacttcgatgcagaagaagagttacaaaccttgtgtaatgttccaacaatccttttagcagatcctccttcaattgacaggccaacagtagagcctgctaaatcagaagatcttgttgaagtgattgacggacctattgatgaatcattaattaagatattgtcctctccaaacattgcaagcaaggcatgggtatataaacaatacgaccatgaggttcaaaccagaaccgttgtaaagcctggagatgacgcagcagtattgcagatagatgacgagacagctgttgcacttacagcagactccaacactgttcacacaaagctttccccatatgatggaggggcaggcagtgtagctgaagcaataagaaatgttgtttcaatgggtgctaaaccttatgcaattgttgattgtcttaacttcggaaatccggaaacaccagaaatcctctggcaattcaaggagtgcattagaggaatgtctgatatagcagagaaattcgaagctccagtcataagtggaaatgttagtttctacaatgaaacagaaggtattaaaatcaacccaactccggcagttggagtcattggagttgaaaagctatcaagcatcagaacacttccattcaagaatgaaggagataagataataatcattggaaaaacctatgatgagcttggtgggtccgaataccacagagcagtccataaccttgaacaaggagaagctcctaaaatcagaatagatgatgaattggctgcagctaatgcagttcttgacctcatagaaaatgatggagattatgtaaaattccttgaaggtgaagacaagctcaatataaaagccacacatgacgtatctgcaggtggaatagcaattgcattgtctgaaatggttatgaaaggcaagttaggctgtgaaatagatatcagcaatgtcccagcggaagaaaatattagcgataatgacttgttattctctgaatcccatggaagatacatcattgcagtagatgccgataaggcagaggaaatagtaaattccatagatattgatgctgcaattattggtgaagtcaaaggagattctttaataatcaagaataatgatgaaaccattgttgattttgctatagatgagttagataatgcttataatggtgttattgaaaagtatatggcttaa

SEQ ID NO: 128 - DNA, 1227 bp, Methanobrevibacter ruminantium
  source 1..1227: mol_type = genomic DNA
atgaagtttatatcaaatttaattccattagaagaagcattatcaaaaataaatgataatataaaacttatggatacagaaaccattgacttaaaggactctcaaggcagagttttagcacatgctgtatcttcttatcacaattcacctccatttgacaaatcagctatggatggatatgcagttattgctgaagacacttttggagcttccaataatgttataaaagagttaaaaatcatcgataggattggtgcaggtgatttttccaataagtcccttcaaaatggtgatgctatagttatagcaacaggggcacctattccagatggtgcaaatgctgttttaatgaaggaatacacttatgaggatggtgacaatcttgaaatccactctcaagtgactcccggtgaaaacatatctccaaaggctgaagacattgccaaaggagatgagattttaggagaaaatgttttaatcaggcctcaagagatgggcttgatagcttccgcaggatacagtgaagtggaagtctataaaaggccaagagtaaaactgctgattacaagcaatgaattggtggatccttcccctaatatagatgatgctaaaataatcaattcaaaccaatacacaattgcagctctcatcagaagtgcaggagcaacagtagatattgaccatggaatcgatgactttgatgaaattcgcgatgcaatcgataaggcaagcagggaatatgactgtgtaattacaaccggaggaactgcaataagcaaaggggatgttgtcattgatgcagttgaggacttgggagaagtattgttccatggtgttgcaatgaggccaggtaagccggtaggtgctggaatagtcaacggaacccagatattcatgctttcaggacagcctgtagctgcaatgggtcagtttgatataattgcaagacatttcctatttaaggttcaaggccttgattattcccataagattgtaaagaggacatcttcaactaagatacactcttccctaggcagaaccgattatataagggctgtagcagatgatgagactgttcatcatgttttaaacagaggttctggaatcataaggtctatggttgaggcaaactgctacataatcattgatgaaaaccatgaaggcattgagataggcgatatggtagacttgattttctttaatgatatggcttggcctagtctttaa

SEQ ID NO: 129 - DNA, 660 bp, Methanobrevibacter ruminantium
  source 1..660: mol_type = genomic DNA
atgaataaaaaaataatttttttagcatgtgtaatagggatagcacttttgtcggtaagttacattagtgctgaaagtgatgtggacacctctgattgggtgaatataactgtaaacgatataaacttccaaattcctccagagtatggaggtggaaggaatgcaagcggagattatctttttaacaatgtatttaccttcggactcgtagctttggaaaacaataaaagttttagaaataattacggctatgaagcgacaaatgaagagaattatgatgttgaagagatggaaatcgacggacatcatgccgtagcctactacagcaatagaagcatagtcaatcatactgtaacttatttatattttgaatcaaatggaacattctatgcattgtcctatgatggagatgacgttaattcctctatgaaaaaaatcgtatcttatagtcctaaatccaaattgagtaaggaagagtttaatgaaaagctaaataaggctcaagaggagtatattgaagatcaaatagaacaagaagaggcttatcaatatgaacaggcatatcgtgagggatataatcaaggaagaagcgatagcagaggaggcgaactcttgggttattatttcttctataaattaggtcaaaggagtcgttattaa

SEQ ID NO: 130 - DNA, 1158 bp, Methanobrevibacter ruminantium
  source 1..1158: mol_type = genomic DNA
atgaacggaatatattattatgtaatagcctttctacttatttggactattgcaattgtatttaagggcagacttgaaaattatggccttgaagtcaattttccccttttgatgtggaagacacagagattgagaggatttatagacagaatcgccaatagggctccacggttttggaaatggtacatgaatataggaatcgtcatctctactggatttatgattctgatggctgtggccttggtatattctcttaagaccctgatggacgctcctacagtcagcctggttattccaggggtggaagtgccaggatctccaatattcattcctttcctatctggtcttatagcccttgcaacagttcttatagttcatgagttcagtcatggaatattggcaagggtggagaaaatcaagattaattcaataggtcttctattatttgcaattcttccaggagcttttgtagagcctgatgaagaggaattgaagggattgaaccgtccttctagaatgagaatatatgttgcaggttccatggctaatctgaccttggcagctattgctcttgttatcatgatgctcatatcctcctttgtagtccctgcagtctttgaggatgacggcattgtaataagcaggctcactgaagacggcaatgcaatcaattatctctctgagggaatggtgataaagggaataaacaattattccgtaagcgatggggcatcctatcaaaaggctgtaagcacattaaggcctaatcaaacggtgactgttctaacggatcagggagagtatagcttccaattgaagtcaaatcctcaaaacaagtctttaggatatatgggagttcaggcacaggttaatcaaataatttctccggattttgataataagttctacactcctttattatggggaataatgtctttgacagacttattgttctggatatacttcttgaactttgctgtcggcacattcaacctgcttccaatgaagccattggatggaggtcatttgtttgaggaccttttatcctatattacatcagagaatatctataagcctgttgtgactttcatgtccttctttatgggaataattattgttgttagtttggttgttggatttgttggtgttccattctaa

SEQ ID NO: 131 - DNA, 1227 bp, Methanobrevibacter ruminantium
  source 1..1227: mol_type = genomic DNA
atgaaagcaaaagctgaaaaaatcggtgatggagtatactggatcggtgtacttgattgggacttaagaacttaccacggatataccttagacggaaccacttacaatgcttacattgtattcggcgaaaaggtagcaatcattgacaatgcatatcctggaaaaactgaagagatgatggcacgtatcgatgacgctttcgaacaagaaggaagggaaatcaaagtggactacatcgttcaaaaccacgtagaaaaggaccacagtggtgtcttatacgacttatggaaaagattcgatgcacctatctactgcagtaagatcgctcaaggaggattgctcagacactatcctaaattggaaggtgcagaattcaacattgtcggaaccggcgacgctcttgaccttggaggcaaaactttagcattcttagatgcattcttgctccactggcctgacagcatgttcaccttacttgcagaagacggaatcctattccctaacgatgcattcggtcaacacttatgctactccaaaagatatgataaggacattccagaatatgttcttatggatgcagcacaaaagttctatggtaacttaatcactccactatctaaaaaggttcttaacaagtttgatgaaatcattgaattaggccttttagaacaagttaagatgattgctccttcccacggtcaaatctggacagacccaatgaaaatcattggcgcttacagtgactgggcaaccggtaaaagagcagaagacaaagttaccattgtctatgacacaatgcactattccacccaaaagatggctcacgaagttgctgaaggaatcatggcagaaggatacgatgtggaaatgttcttcttgcacgaagacgaaagaagtgaaatcgtaaaaagcatattaaccagtaaggctgttgctttcggtattccaacaatcaacgacttcccattcccaagcattggagacattatctactacttgaaaggtcttcacttcaacagaacaggattcaagagacccgctgtaacctttggttccatgggaggaagaggtggagctgttgaattcattgcaaacgagctcaccgaatgtggatttgaagttctcgaccaacaagaaatctactatgtacctgcagatgaagacgatgaagctagcttcaaattaggtcaaaaattagtagaagaagctaaaaagttagaactttaa

SEQ ID NO: 132 - DNA, 795 bp, Methanobrevibacter ruminantium
  source 1..795: mol_type = genomic DNA
atggaaaatgaagagaatattagtcaaccaaaagcaattcaaatttttgctaaggctccaggggagcttggcgtaaatgttgtaaagagcccagtgaaattaactatcctttccatgctaaaggacactgatatggaatttgatgaaatcgttaaaaacactggtaagtcaaaatcaactatttctgtacatttaaagtctttaagggaagatggaatcgtaagctacagatttgatgcaaacgaccacagaaagaaaatattctacatcagctccaaattcttaggagaagtagaatctggtgatgagaaggaattggaagaaagacaagccgaattcttggtaaagaatattttagatgtagacaacttcaagttctcttttctattgttccacaccttaagatccaacttgattcaagagggaattaacatcaacccagtattaaaccaaacaggaaagaatattggtgcagcaatgtatgaaaagctttatgacgatgacattaaagtcttctgtgacaatattactgaattctgggcagataatggattaggaaaacttgatatagttttaggagatatcattaatgttactgcatatgagtgttttgaatgcagtttgcttcctaagaagggtaaacctgcttgctacttagatgcaggtatatttgaagctcttttcgctaattatcttaaaaaagacatagcagtaactgaagttaaatgtttcacaatgggtgacgactgctgtcatttcttagttgaaggcattaatggtgaatctttaacttaa

SEQ ID NO: 133 - DNA, 1983 bp, Methanobrevibacter ruminantium
  source 1..1983: mol_type = genomic DNA
atgtcaaattcaatattttgtcccgactgcgggatgcttaaggaaaactgtgtatgtggaaggtacaaagcaaatcgtgataaggtaaagtacaccaaaggtactagatccaatccacagtataagaaacgaaaaacatttaattattctaataaaaaaagagcggaaaatatgaaaaatacatcatcaaacaaatcaaaaggtttattccaatatgaagagcccaaagggctctatcaatatgaggatcttgaacctgttaaagtagaggaagaggacgactttggaagttcaaaggtctatgacatagctgaacatgacttgcctaaggagataatagatggcttaaaagaggactatcctgaaattccagatagcattatagaaaacttcccatttgaaaggccaagggaaggacaattggatataattgcagatattgaggaggccatatcaaaaggattcaaatacatcatccttgaggcaggaacaggtacaggaaagtcagctgtagccacaacccttgctagaatgtatgagtcagcatatattcttacaatgaccaagcagcttcaaaggcagtatgcagacgagtttgactttccccttgtaaagggaagaggcaattttgactgtataaaagacggatttgaagtcacctgtgacatgggggcatgtaagacagctccaaagaattccaaattcttctgtccatatggaattagcaaaaacccaacacttacaggagacttggcatttcaggactcctatggtggagacattttcttccagacaaatgaccactgccattactggcagcagaaggcaaatgcaataaactctccaatcacccttatgaattatgactacgctattttggagttgaattatgtaaagcatttcggtaaaagaacccttctcattcttgacgaggctcataacattgaagacaagctgatgaaaaccatggaaatcaatctttataatcgtcagcttgaaaaggacataaagaaggtcataagccctcagactcttaaaacaagagagatgggcgaatggataatggagattgatgcaattcaaggccattatgcagatattgacataaaggacctccctacaaacaaggcagacaggatccgttcaacttcagcaaggctgaaggacctaaagaacaagcttgaaacagagcctggaaactgggtaatcgactcaaatgaaaatggagtttctttcaagccacttaaagtcaatcattatgccaacgattatttattcaagcatggtgatgttgtaatattcttaagtgcaaccatcctttcagctaagatgttttcaaaatggctaggcttaaatcctcatgaagtctatcatataaaggtggacagcccattttcagttgaaaaaagaccaattgaactaaaccttgcaggcaagatgtcaaaaaacagggtaaagcagtctgcccctaagtctatcgaaatattaaacaagattctaaaaaggcatgaaggagacaaaggactgattcacacccattcatacaaatgccagcaatatataataaacaacctttataactccagattgattgcacatggctctaacaatagggaaagggtcttaaaatactttgaggaagatgataaccctcttgtgctggtcagtccgtcaatgagcgaaggtgttgaccttccatatgacaagtgtaggttccaagtcatttacaaaatcccgttcccttatcttggagaccctcagataaatatgagaaggaagaaggaccaaagatggtatgcatataagacagtaatgacattgatgcaggcctatggaaggggaatgagagcagaagacgactcctgtgtaacttatatattggattcagatattcaaatgcttttaaagagcccattgtataggtcattgattccagagttctttaaggaagcgattattgttaatgatgatcgtattatttaa

SEQ ID NO: 134 - DNA, 699 bp, Methanobrevibacter ruminantium
  source 1..699: mol_type = genomic DNA
atggttataaaagaaaagatagaaattgaaggaattccagtggaagtccatagaaaaagaatgaaaaatgtctatctgcgtgtattgccagatgccacccttcgtgtttccgccccagagagggtatcaaatgattatataatagaatatgtcacttctaatttggattgggttaagcagactcaagagagaattcttaaaaaccctccaaagcctaaaataatgtataagaatggagaggtccataagatttggggagaggaatacaagatacaactaattaccaatgacacaataaaacatgccttttatgatgctgacgaatctatagtttatcttcccgtaagaagaagatccacagttaatgaaagggagaaagcactatttgaactttaccgctctgaaatgaaaagaaacattgattgctttttaaataagtgcgttccaattgttggagagcaacctaaggaaataaaattcagaaacatgaaaaactggggaaactgcagaagaaataagacaatcacattaaacataaagttggcttcaaagcctccaatctgcacagaatatgttcttattcatgagctctgccatatacttgaattcaatcatagcccacggtttaaggcattgatggatggcttctgtcctaactggagagagattaaaaaacttttaaacgaatctgatgattaa

SEQ ID NO: 135 - DNA, 834 bp, Methanobrevibacter ruminantium
  source 1..834: mol_type = genomic DNA
atgcttacaaaaagaattattccttgcttggattgtgacctgcaagtgcctgaaggccgtgtggtaaagggagttgaatttaaacagatcagatatgctggaaacccagttgagcttgctaccaaatattacgaagatggagcagatgagatagtcatcctagacattacagcttcccacgaacgtagaggaaccatggtggatgttatagaaaggcttactgaaaacgttttcatcccaatatgtgtaggtggaggaataagaaaggtagaagattataccagaatgctaaaggcaggtgcagacaaatgctccacaaatactgctgcaatccataacccacagcttctaacagacgcttctaaagtggttggatcccaagctgttgtaatcggaatagatgcaaagagaagatatgtggaagaggacccagagcaagctaaaggaaaaaccatagtggacacagacgatggagaggtatggtttgactgcagcatctacggaggaagagagttcactggcatggacgccattgcttgggctcaggaatgtcaggacagaggagcaggagaagtccttttaacctctatggatggagatggaacaaaggacggctatgaccttattctaacaaaggcaataaatgacaatgtggacattccagtaatagcctctggaggagttggaaacccacaccacatactcgaggcatttgagatagcagatgcaagtgcggcccttgctgcaagcatattccactttgatgagtatccggttcctgtggttaaaaaatacctgaaggaaaatggtgttccaattagggagactttttaa

SEQ ID NO: 136 - DNA, 1077 bp, Methanobrevibacter ruminantium
  source 1..1077: mol_type = genomic DNA
atgtctagtcaaaaaatcaattccttaatcgatcttaatcttacccaatattcaggccaaacttcacagtctccatggagacataattctatggaaaatattgataagtttgatgagctaatttacttaaaagttccttcaattattgatggacttgatgataaaactatcaatttaaatggacttccagttcttttaaacctatcacaagataaagataatataaatggttttgaatatacatatagtttacctcaaaaagtagaaaaacaagcattttctatagggcaagacaatctttcaaagaaggaacttcaatccattgaaagagaaatagactcaaatctaaataacatctatgacttggaatttgaccttgaaaagttctatgagtttcttttagaggatgagaagctggctccttcagttgatttttgtaagggattgagactatttattgcaaaggatccttttgaatgcataatatcctcaatttgttcagctaacaattcaattgctcgttggactgcttcaatagataagataaagttaaactggggagaaaaggtggaatttgatgaaggtatgttttatggttttccatctcctaaagactttttagacttttatgaaactcctattgaacagtcagaggctgatggacgtaggtatgaggtggattgctacacaaaaaatcttaaatcatgtggagttggatatagggctccatatatgaaaaaggcaagtcagatgcttattgatgagatagatatgaatgatgtttcaaaaatggcttatgatgaggcatttgatcttattttaagattgccgggagttggtcctaaggtggctgattgcatattgctgtatggatttggattccaggaggctttcccatctgatgtctggataaagaggatagtttctcatctttactttgatggggaagatatctctgcagataagactagggagtttggaatagagcgctttggtgattatgcaggatatgcacagctttatctattccattatgcacgtaaatctggtttaatggatgagattaagaataaatag

SEQ ID NO: 137 - DNA, 444 bp, Methanobrevibacter ruminantium
  source 1..444: mol_type = genomic DNA
atgaaattagtcattcaaagagttacaaacgccagcgtagaagttgaaggagaaattacaggccaaatagaagaaggattaatggttttagtaggttttggccagacagatacagaaaaagaagttgattacctagctagaaagcttacaaaacttagaatattcccagatgaagagggcagaatgaaccgttcagtaaaagatataggaggaaaactcttgcttgttccccagtttaccttatacggcagaaccaaaaagaacagaccttccttccataaggccttagccccaaatgaggctaccaaactctttgactactttgtagaaaagtgcagcgaagaggttccctgtgaaacaggagtatttggtgcattcatgaaagtgagcttgttaaacaatggtcctgtaactatactgcttgaaaaagagtttgaagactaa

SEQ ID NO: 138 - DNA, 450 bp, Methanobrevibacter ruminantium
  source 1..450: mol_type = genomic DNA
atgaatggtgaaagcttccagggaatatgggataattctcccttaattgcatggattcataatctctctaagaatcatttcaagtacctaaaggcaaaaatcaacgagtttgatttaggccatgagataaggtatatcatgatgatttacgacaatccaaatatttctcaagatgatttggtgataatgtctggtcaaagcaagggaaacattgccaagtcattgaagaaactggaggatgatggatacattaaaagagaggtaaatccggagaataggagaaagtacatgttaagaaccacttccaaaggtgatgagttggttcctaaggttaggcagatttctaaggattgggaaaaggaagttggaataaccgaagatgataaggaagttattgaaagaataaaagagatagctattaatggaatgaaattaacggaggatttatga

SEQ ID NO: 139 - DNA, 1392 bp, Methanobrevibacter ruminantium
  source 1..1392: mol_type = genomic DNA
atgaaattcgattcagagacatctgtattgcttgtatcattccttacagcattctttgcagtgtttttagctgcaggtatagtcataggagttccagcaattgcaaatgagtttggaatgaacaatgtagttcaaaattggattattacaatcgcattgcttgttgtagctatgtttacgcttcctgctggacagttgtccggtaagttcggtgtcaaaaggtctttgcttgttggagtattaatctttatcgtcggttcaataggagcatgccttgctttttctgccgaatcattcctcttctttagggtgattcaaggaatcggaggggcattttcaaatgtggcttctatggctatggtcgttcaggcaatcaagccacaaagcagaggaaaggcccttgggcttactgtaactggggtttaccttgcaggatccctttctcctgtaatatgcggattccttgtttataactttggatggagatccatgttttactttacaattccattcttccttatttgtattgcgctaatgctttggaagattccaggggattggaaaacctatgaaaatgataagattgactctataggatacatgatttatgcagtgggaatattgctcttcatctatggatttacaaacttgataaacgcttggggtttgatttgtgttgttgtaggctttatattgcttcttgcctttgcatattatgaaacaagagtggacactcctgcatttaacatgagattgtttaagaatactaagtttgcatcctccaatgttgcggcattatgcagctatcttgcagttgcagcactcactaccatattgaattatcatttccagtatgtaaggggatggaacgctcaaatgtctgggcttatattgattgttacccctataatcatggcatttatggctccaaactccggtaaattgtctgataggatacatcctcaaaaattggcagctattggaatgaccattgcaactgcagccctagtgattttgatattcttagatgcaaacactccaatttggctgattattgttgctatggtacttcagggggttggtatgggactatttacaactccaaatacaaatgcgatcatgagctctgttcctcctaaggagactcctaatgcttcagcagcacagtctgcaatgagaacaatcggtcagacaatgagtttagggcttcttacccttgtatttgcttggattatgggcagtcttaagctatcttcacagtatgcaggaatggttgttcaagcatctcagatagtttgtattatctgtacaataatttgtgtagtggctatatttgcttcattggttggtataaagtctaaggatgagtttaatattgaaaagccaagttaa

SEQ ID NO: 140 - DNA, 1392 bp, Methanobrevibacter ruminantium
  source 1..1392: mol_type = genomic DNA
atgaaattagatttagaaacagttgtagtggcggtatcgtttattacttcattttttgcagtatttttatcaaatggaattgtcataggggttccagctattgcacaagagtttgcaatgaataatgttattcaaaactgggttcctacaatattcttccttgtggtagctatatttacagttcctgcagggcagatatcaggtaagtttggtgttaagaagtctttgcttggaggagtgcttgtctacctctttgcttcaataggggctgtgctttcattctctactgagtcattcctccttttccgtatccttcagggtgcaggggttgcattcttgaatgtgtctgctatggctatggttgtacatgcagttaagcctcaaaataggggaaaggcacttggatttacagtgactggggtttatttggctacatcattgtctcctgtaatttgcggattccttgttcataatctcggctggagatcaatgttctactttgtaattcctttccttgttatttgcgttcttcttatggcatttaaaatacctggagaatggaagacatatgaaaaggacaagatcgatatgatcggatccattctatatggaatcggaatattggcattcatctatggatttacaaccttaacaacaagcacaggtcttatcctaaccattgcaggacttgccatgcttgttgtatttggagcttatgagctaagacagaagtctcctgtattcaatatgaacctatttaaaaataagaagttcacatcttcaaatatagcagcattgtgcagctatattgccgttatggtggttacaacaatcttgaattatcatttccagtatgtaaggggatggaatgctcagactgcaggtatgatattgattatcactccaattatcatggcaataatggctccaaactctggaaagctttcagataagatacatcctcagaaactggctgcaataggcatgtcaattgctactgtggctcttcttattctcacattcctggatggaaacactcctatttactttgtaatacttgctatgatcttacaaggtattggaatgggactattctcctctccaaatatgaatgcgataatgagttctgttcctccaaaggatgctcctacagcatcagcttcacaggcaaccatgagaacaataggccagactatgagtcttgggcttttaacccttgtatttgcatgggtgatgggcagcttgcctcttgcaactaaatatgcaggaatggtggttcaagcatctcaaataatctgtggaatctgtacagtggcttgtatccttgcaatattcgcttcattggtaggtgtaaagtccaaggataagtttaatacagataggccaacatag

SEQ ID NO: 141 - DNA, 1017 bp, Methanobrevibacter ruminantium
  source 1..1017: mol_type = genomic DNA
atgaatgacttgacagacagactttttcacttttttaaggaagaaataatattctctatttctctgattttagctattatttcttgtttttttgttcctcccagtgtagattatttaaattatatcaattgggaaacaattattcttctttttataattatgctctttgtagagattttaaagaatctgtctgtttttgaaatattggttcgtaagctattgaaaaaagtaaaaaataccagaggactggttctatttttagtcttcacctgcttttttagctccatattcattacaaatgatgtttcattgattatatttgtaccatttacaatattggccttaagaaaggttgatagacttgatttgataatatttgcagtgtctatggagacaattgcagctaatgttggctgtatggttcttcctattggggctccacataatattgtaatgtatatggtttctcatattccattccagtcatttttcttgattcttttgccttatatcgttgtatctgcagtgtttttgattattctatccttctttgttccaagcgatgcagtaaacttgcctaaatttggcaaagttgagattaataaggaaggcttctttaaaagagtcttatttggtgttgattatttccttcttttgactttcatagcactatttgtattgataggaaacttggaaaacattacattctttaatctgttgtttaaaaagtggataataggcaatgaggttatttggggcgtagtggcatctcagtttatttcaaatgttcctgctgcaatcttgctcagtggattcagcactaattatgaggcgataattgttggaatcaatattggagggcttggaactcttattgcgtctatggcaaatcttatttcatataagattcttgtgagggagcatggggagtttaaaatcagatatttgattatatttacatttttaaatgtggttctgctctttatcctattgggagtttatgtttttattcattaa

SEQ ID NO: 142 - DNA, 591 bp, Methanobrevibacter ruminantium
  source 1..591: mol_type = genomic DNA
atgttattcgaaaaggaaaataccgaggaaaagattataagagccacattcgatattgttcaaagggaaggattacaaaaggcaacaactaaaaagatagctgctgaagcaggtgtaaatgaagtaactatttttagaaagtttgaaaacaaaaagaacctcataaaaaagactaaagaatattataccaatcagctcatcgccaaactagaggaaagctttgaatttaacgaaaccgacagcattgaagaatatcttaaaagaagcttcaataagattttagaattttcagaagaggatttcaacataatcagagttgcaatgcaggaagttaagaatgatgatgacaaaaagctccttatcactacaattacagacacaataataaacaaattggatgagttctttaaattgcaattggaaaagggaacaattaaggatcttaattccaaagcagtatccctaatgtgctttagcataatattccagtctcttatcttatggcagatatataatgatggagatttagctgcagactattatgcagatgaatttttagatataatttttaatggaattaaggttcaatag

SEQ ID NO: 143 - DNA, 3285 bp, Methanobrevibacter ruminantium
  source 1..3285: mol_type = genomic DNA
atgaaggtcttaaagatagcaattatcatgcttattttaatcatatctctgggagcggtttcagcaacagagaattttaataatgatttaagtgataatggactaaacgataacacattaagcgacaacagcttaaatgaaaataccttaagcgacaacactttaagtgataaaagcttaagcgaaagcacaatcatccaaaatgatcatgataatttaaaagatacaaataataatgataataataaagctctaaaagatcctgcgaagacatttacagacttacaaatggaaataataaatgcaagtgaccttttagaattgacagacgactataaatacaacaatgaaactgacaatatcacattaacaatctctaaaagcaatttcgtaattaacggaaatggccatacaatagacggagacaatcaatgtggcattttccaaatcaacggaactaacataaccctaaaaaatctcaatataataaatgcaaactctacaaaggacagcgccctattactcaacccaggctctgagcttgagacaaacaatgtaaccttcatcaacgacagctcagacaaaagagtaatatttgcatttggagcaaaatatacaagcaataatgataagtttatagactgcacatccctcaatgatggagtaataaactcataccttggtgaaataactatcaacaacggatattttgaaagctccaagccattggactgggctttcgtcaacagtttgggaaattcctcaatctacgttttaaacacaacatttgcaaataccacctccaaatacgctacagcaatcaagggagatcgagaaacagtaattcatgattctaaattcattaatctctatgcaaaccttactgcaggagcaataggattaaaaagaattgaagaggctgaaattgacaattgcacattcattaatgtgagttcacaaaaaaatggaggggcaatattccttgacatatattcagatagcgaagacgtaccaataatgatttcaagatcctcctttgttaattgctacagcgaattcggaggagcaatcctctctttagggggaaaaatcacattggaggaagacaatttcacaaacaatggggcattctttgacggaggagcaatctattcttccttctcacagcttacaatttcacagacaatctttgacaataactctgtagaattagatgatgatagaggttcctttggaggggcaatattctctgacattagcgcattgattatattgaattgcagcttcagcaacaataacgcccaaactggaggagccctatatacatatgattcaggctactacattgcaaactccactttcaaagacaataccaacaaagagagtgagtttgatgatatcttcacagacttcgatggggaaatcgccacacttgaaaacaatagctatagcggagaggattcaatatgcctgaacaacgaaaggtatgaatcagtaatcgccgtttctggaatgaactttaccctcatagaaaatgaaatcaatgtgacaaaccctcctcggaaatttgacctacgtgaatggggatgggtgactccagttaaaaaccaaggctacatgggttcatgttgggcatttggaactgtaggagctatagaatcttcaatattaagatttttaggccttgaaatggacatctctgaaaacaacatgcaagacagcttattgcaatattatcgctatggaaccctaggagcagaagaagggggagagtataacctaggcccttcctatgcattaagttggtttggagtattcccttcagaatatgacgtttacgatgagcttggaaagatttcagcaataatcgcaacagatgacagcatccatttgcaggacgcagtctttgtgcctcctcttatgaattccactgacaaggataaattaaagcaatcccttttaaaatatggcgctttagcagtaagctactatgccgaaaccgatgaacctggattaaatgagaatacctcatcacaatacagcctaaaaaatgatagtaaccatcgcgttcttttagtgggatgggatgatgactattccaaggacaatttctatatgacccctccaggagacggagcttggataatcaaaaacagctggggagaagaattaggagataagggatactattacatatcctattatgacgcaagttttgcaaccctagtgccttctgtcggattcccaataatgaatacagtcatttacaataaaaactatcaatatgacatcggaggcacattggaattcactgatatgggaaatgaatacgtcaatgaatttgaggctttggaagatgatttcattgcagcagtcggaacatacttcattgatgctggcgtcgattacaacatagagatctatgtcaatgatgaattgaaatacagccaagatggaacttcaccattttttggattccatacaatccaattggattcatatgtccctatcaaggaaggggatgaatttgacgttaagatcacatcagactgcattccaattttagaaagtggaagacagcattatatagaaaacaagtcagctgcaaatctaaatggagaatgggtagaccttaccagtgacgggaaagtctgtgctataaaggtatatactacagatgaagacaagaaaaaggaatcttctagaatcaatacaagaatagactgtaaaaacatgacaaccactgcagtggcatctgaagacggcagaataggagaatacttccaagttactttaaaagacgaaaacggaactgctttagccaataaaccaataaagataggtttcaatggaagggtctatgatagaacaacagatgaaaacggcagtgcaaagctacagataaaccttgcttacaaaggcacatacacctttgcaataggattcttaggagatgaggaataccttggagcatttgaagttgctaagattactgtaaaagtacagacccctaaattgactgccccaaataagtcatataaggtaagtgcaaagacaaaaagccttactgcaagcttcaagacagcaaacggaaaggccgtaagcggtaaaaagataagtttcacagttaatggcaaaacatactcagctaaaaccaattccaaaggaactgctactgtaaatgtaagcctaaacaagaagggaacttatagctttactgtcaagtttgcaggtgacgatacatttgctacttctagtgcaaaggctaaattgacattaaaatag

SEQ ID NO: 144 - DNA, 138 bp, Methanobrevibacter ruminantium
  source 1..138: mol_type = genomic DNA
atggcaagatgtccaagatgtggttccgaagcacttgaagagatcaatttcaatacatataaatgccatgaatgcggctatatgattagaaatccggatgaccttgaattggttgaaagagaaaatggtgatttatga

SEQ ID NO: 145 - DNA, 429 bp, Methanobrevibacter ruminantium
  source 1..429: mol_type = genomic DNA
atgaaaaaggcaattattgaaactgaaaaaggagatatcgtattggaattattccctaacgaagctcctggaactgtagcaaactttgaaaaattagcaaacagcggattctatgacggattaaccttccaccgtgtaattcctgactttgtaatccaaggaggatgtccaagaggagacggtaccggaggacctggctggaccatcaaatgtgaaaccgaaggaaacccacacaaacatggaaccggagcattatccatggcacatgcaggtaaggacactggaggaagccagttctttattacccacagtccgcaacctcatttagatggtgttcacaccgtatttggacaagttatcgaaggaatggatgttgtaaatgctatccgtcctggagataagatgctaaaagttactgttcaaggataa

SEQ ID NO: 146 - DNA, 276 bp, Methanobrevibacter ruminantium
  source 1..276: mol_type = genomic DNA
atgttagaacaatatatgcaatttatgtggttaatcatttttgggaatatagagaacttgattttatcttcccaaggagttgtacagggagtggatcctaagattttaggtggattaagtattcttgtagttattatgtggtttgtaatcggtacagtcattactgatgttgcaatacaatattccaatcttattaattttattggcggtcttgcaatatttcttttaggttttcaagctgtttatgaggctgttaggaacataaggggtggataa

SEQ ID NO: 147 - DNA, 270 bp, Methanobrevibacter ruminantium
  source 1..270: mol_type = genomic DNA
atggattggaaaccttatgctccattcactgcattgcttatttttggaaacattgaaaaccttattctatcatctgaaggtgtaatagcaggtgttaattcatttgttttgcttatattgagtttgatagccgttgttgcttggcttctcttaggaacatatggtacaaactatgcaatcaagtatgctgattatattgaaattatcggcggaatcgctattattctattgggtttagaatcaatgcttgaagcctttggaattctttaa

SEQ ID NO: 148 - DNA, 1041 bp, Methanobrevibacter ruminantium
  source 1..1041: mol_type = genomic DNA
atggctagaataatacttggcaagactggacttgaaatagagaaaaacggatttggagcactccctattcaacgtgttgactttaatgaaagtgcagagattgttcgaaaggcttacaataacggaataaacttcttcgacactgcaagagcatatacagatagtgaagaaaaacttaactatgcatttaaaggattcgataaagagtttccacgagaaagcatcattattgcaagcaagacccaaggggaaaacagaagagacattgaaaaggatatcaagactagtcttgacaatctaggaaccgactatatagacctttatcagatacacaacccatcattctgccctacagaaggggacggaagcggagcatacgatgcattgttcgacctctacgatgagggaacaataagacatataggattcacctcccacaaatatgaacttgcagaagaagcaatccacagcggattatacgaaaccatacagtttcctttctcttaccttacagggccaaaggagcttgcaattgtggagatggcaagggcaaacaatataggattcattgcaatgaaggcaatgagcggagggcttatcagaagctctaaggcagcatttgcatacatcaatcattttgataatgttgttccaatatggggagttcaaaaactaagcgaacttgacgaattcctatcatatatggcagacgacaccaaattagataagcaacttgaagagataattgcaaaggaaagagaagaattgcagggagacttctgcagaggctgcggatactgcatgccatgccctgaagacattcaaatattcatctgcgcaagaatgtcattatggattagaaggttcccagctgaaccaaacctaaatgaagagactcaagagaagatgagaaagatagaggactgcacagaatgcaggcaatgtgtcatgaaatgtccatatgaacttgacattccagagcttttaaagaagaactatgaggattataaaaagatcctatctggagaaattaaggtttaa

SEQ ID NO: 149 - DNA, 1176 bp, Methanobrevibacter ruminantium
  source 1..1176: mol_type = genomic DNA
atgaatacacaggaaatcattgatattgaagataaatatttcattaatacatttaacagggtcccaatagtccttgaccatggagaaggagtaaaagtatgggacatagatggaaacgagtatttggactttttagcaggtattgctgtaaactgcttaggtcacaaccatcctaagcttgtaagcgcaattcaagagcaagcaggaaagcttattcacgtatcaagcatctattataacgaacctgcaacagtttatgccaaaagattggtggatgcaactggctttgatagaatattctttgcaaactctggagctgaagccaatgagggagcaatcaagcttgcaatcaaatacagcggcaagcatgaggtcctatactgtggagactctttccacggaagaacaatccttaccctttctgtaactgatcaccctgaatacagcgcaccttatgttgaaaacctgccaaaaggatttaagaaagttgaattcggcaatttggacagcgttaaggaagcaatcacagatcaaactgcagcaatcatcattgaacctgttcaaggtgaaggtggagttcatgttgcttcagaagagttctacaaaggattgaatgacttatgcaaggaaaaaggaatcctaatcattgcagatgaggtccaatcaggatttggaagatgcggagcattgtttgcacatgaattatttggccttgagccagatataatgactgttgcaaaaggaatcggcggaggattcccaatggctgcatttctggccaaagaggatgtagctggcggatttgtaccgggagaccacggtacaacctttgcaggtagccctcttgcaggtgcagctgcaaatgcagtatttgatgcattcgaagaagagaatattgtagaaaacagtaaaaagatgggagaatactttaaggaaaaattagctcctcttaaagacaaatacgacttcataactgatgtaagaggttccggtcttttagtagggcttgaattaaactttgaaggagcagatatagttggaaagatgcttgaagaaggattcttaatcaactgtacagcaggtaatgtattaaggtttgcacctcctcttgtagttaaagaggaagagattgatgcacttgttgaagctcttgataaggttttttcttccttataa

SEQ ID NO: 150 - DNA, 645 bp, Methanobrevibacter ruminantium
  source 1..645: mol_type = genomic DNA
atggaaataaaaagaatcaacaggtatgtcatttacctattttcactgtttttaatatcattaggggcctcaatatcaatcaaggcaaatctgggaacatctccaatcatctgccttccatatgtttcaagccttatcttgaatatgagcgttggaacagtctgtttgatatttaatgttatattcatacttgttcagataatcctccttaggggagactttgaaaggagacagtatcttcagataattgtaggaacaatcttctccctttcaattgacttttcaatgacgcttgtaacttttttaaatcctacaaactacattagccagtttgccgtccttatgctaagttgtgtggttgttgcatttggcgtattgcttgaggttcaaacagaggtggtctttcttcctcccgatggaatcattgtggctatttcaaaggttctaaataaggagtttcctaaggtaaaacctttctttgatacatcattagtgcttacagcagctattctttcaatagttttcctaggctaccttgcaggagtccgtgaaggaaccataatttcagctgtaataattgggcctatcgttaaagtgcttcagaagttctttaatccttatatcgaggctgtaattgaaaaataa

SEQ ID NO: 151 - DNA, 438 bp, Methanobrevibacter ruminantium
  source 1..438: mol_type = genomic DNA
atgacaaatagaaaagactggggattgacagtaagagggatagttcaacaggaagataagatattaatccttagaagacatcccaagtcaagaaacaatcctaataaatacgagcttccaggaggaaaagtggatcccggagaattctttgatgaagcattgattagggaattcaaggaagaaaccaatcttgatgtaaatatagtgagcttatttgagacagtacaagatgaattcataagtagaagaaccaatcagccgataagcactgttcagttaatgatgaatcttgagataatgggcggagaagtggaaataagttcagagcatgatgattttaagtgggtgagcatagaagagttgaaggagctttataaaaatgatatggttacacctacattaagattgactttagaaaaaagagattttaagatttaa

SEQ ID NO: 152 - DNA, 1284 bp, Methanobrevibacter ruminantium
  source 1..1284: mol_type = genomic DNA
atggatttaaacataaagacaaacgacaaaggccatttagatattggcggtgctgatgcttgtgaacttgtagaagagtatggcactcctatctatgtaatagacgaagaaagagttagagacaactacaacagattttataatgcttttactaaattttatcctaaatttaaagtattctatgcatgcaaagcaaatacaaacattgcagtgctcaaaatcctcgaagaggaaggatgctgtatcgatgcagtttcccctggagaagtctatatctgtaaaaagatgggattttccggagacaggatactctttacaggaaacaacattagaaacgatgagatggactatgtaaacagcgaagacgttatcctaaacatcgattccgtctctgcccttaaaaggttagctgaaagcatcgatccacaaggtaaaaagatctctttcagagtaaaccctatggtaggtgcaggccaccacggtcattgtatcactggtggggaaatgagtaaattcggtattatggaaaccgaagctgtagagatttacaaattagctaaggaattaggattcgagcctgtaggtatgcactctcacatcggttcaggcattcttgacccggaaccattcaaattagctatagaatctacaatgaacattgcaggtaaggtccaccaagaagctggaattgactttgagtttattgacttcggtggaggagtcggtattccttacactccagaagaagagcttttagacttagagcactttgcagaggaaaatataaaattattcaaagaaaaattagaagagtttgacatgggagaacctattttataccttgaacctggaagatacattgtaggtgacgcttctgtaatacttgttgaagtaaacagcgtaaaggaaagttatagaaaattcatcggagtcgatgcaggattcaacactcttcttagacctgccatgtatgattcctaccatcacattgtagttgcaaacaagatgaatgaagagcctacccaaactgtagacgttgctggtaatgtctgtgaatcaggagacctctttgcaagggacagaccacttccagatattgaggaaggtgacatattaggaatattgaatgctggcgcatacggttataccatggcttccaactacaattcaagaccgcttccagcagagatccttgttaaaaacggagaatcctttgttattcgtgaagcacagacctttgatgacatatttgaaaagcaatccattccagaacacttgaaatag

SEQ ID NO: 153 - DNA, 864 bp, Methanobrevibacter ruminantium
  source 1..864: mol_type = genomic DNA
atggtagatttaaaaggtttaaaattctctaaaatgcatggaatcggtaatgatttccctataattgatgaaagtaaaggagaacaaatcaaagaagcagataagccagaagcatgcagacagttatgtcataggaactttggtgtagggggagacggagtattgttcgttgtcccatcagacgtcgctgacattggatacagaatgttcaatcctgacggatctgaagctgaaatgtgcggaaacggcattcgctgctttggagactttgtctacagaaacaagattgtggaaaaggaaacaatgactgttgaaaccaaatcaggtatcaaaaccattgagataactgtagaggacggagagcctgttctctttaaggtaaatatgggcaaatccacattcaaggtccctgaaattcctatgattgctgatacagatgaattcgttgatggggatttggatgtgatagataccactttcaaggcaacttgcgtaaatgtgggaaaccctcatgccattttgtttgtagacaatgtagatgatattgatattgacaaatacggaccggccattgaatgccatgaagttttccctgaaaagatcaatgttcattttgttgaggttttaagcaaaaatgaaggaaaaatgagaacttgggaaagaggagctggcgttacccttgcatgtggtaccggtgcaacttcaacagcccttgccggtgtaaaattaggtctttttgataagaatgtacttctccacttacctggaggagaccttgaatttgaggtctatgaggaagatggtgagcttggtgcatttatgaaaggccctgcagcattagtattcaatgctgaaatccaatag

SEQ ID NO: 154 - DNA, 171 bp, Methanobrevibacter ruminantium
  source 1..171: mol_type = genomic DNA
atgattttatcaagaaacattttgaattatttgaaagaaggaaaaacacttgaagaagcttgtgccaaggcaggtgttgttcaaaatgagctgaatatttggaagctttgggcggataaaggtttgcagccctataaagatttctttagagaaattgaaaattatagatga

SEQ ID NO: 155 - DNA, 729 bp, Methanobrevibacter ruminantium
  source 1..729: mol_type = genomic DNA
atgaatttggaagagagaaattcaagggaaatagaggagttcttcaaatcaaaaggagtgaaagtggtaggttttgctagtcttgaaaacattagaaatgttcctaaggagtatccaaacagcattttaatagggattccaattgaaaaggaagcattgaaaaccatctataccaatgaccaatcattgtatgttgaatccatgaaggaagtggctcaaaaactgaatgacattatccttgaaggtgaggattacatcaaaaacaccatgaattacaatgccttggccatttcaagagaaagggtggcgggggaattgaaagaccttgccagcaagattccccataagacaaccggaacaagatctggacttggatggataggaagatgtgcattgctcatcagtccggaatatggtgccgcacttagactctctacattgcttacagacatgcccattaaagtgggaacacctatagatgactccttatgtgaagattgcacagactgccaggatgcatgtcctgtagatgcgataaatgaagtgaaatggaactcaaggcgagaaagggaagagtacttcgatgcggaaaagtgctttgagttcataaagaaggaaatgaaaagaacaaacggcaagagcttatgcgccaaatgtggtctggcttgcccttacactaaagaatacttaggaatagaaaccgacaggaatctaattaaggaaatatga

SEQ ID NO: 156 - DNA, 651 bp, Methanobrevibacter ruminantium
  source 1..651: mol_type = genomic DNA
atgaaaactaaaaacaccaaaacaagaccacaattaacaaaagacctgaaaagtgaagacttcatggaatactattttttaaaggaagagttaaaggaattctgtagaagagaaggattgaagattggcggtagtaaaaatcagttagaggaaagaatcatttactatctggatactggcaaatcattagatgaatctgtcaaagatggaaataaaaccaaaaatcacaaatctgtcaaagatgataataaaactaaaaattgcaatcataaaatcagtaattctgattctcaagaaatcacattggattccattttaggtgagaacttcagatgcagtgaagataaacgggaattctttgaaagggaaataggaaaaggatttaaattcaaggtaaaattccaaagatggctgaaggcaaatcctgataaaacatatcaggatgcaatcaatgcctactatgaattgcagaactccaacgagaaaaccaaaatagacaggcaattccaatacaaccaatacatacgggatttctttgaagacaatgagggcagatccctggatgatgcaattaaatgttggaaatacaagaaaagtcttaaaggccataaccggtatgaagactctgatttgaaaatattgaaatcataa

SEQ ID NO: 157 - DNA, 585 bp, Methanobrevibacter ruminantium
  source 1..585: mol_type = genomic DNA
atggggaaatttgaaatagaaacagatgatttagtatacatcccttcagatgacacttttctattagctgaaaaccttgagataaaggaaggccaaagtgtccttgaaataggaacaggatcagggcttgtctctatgtatgcaagtctactaacagatgatgtaacagcaacagacatcaactacaatgcccttgagcttgctgagaagaacttcaagctaaacgatatcaacacaataaggcttgagttcggagacctatttgagcctgtaaaaaatgagaagtttgatgtaattctatttaataccccatatctgcctaccgatactgatgacattattgatgatgatttgaattatgcatttgacggtggaatagatggaagaaaagtcatagatagattcattaatgaagtgtcacattatttaaatgatggaggaattgtccagataattcagtcctcattatccaataatgataagacattggatatgtttgataggaatggatttattgcagaaatagctaaaagcgaaagctttttctttgaagagattgttctgattaatgcctataagatttaa

SEQ ID NO: 158 - DNA, 897 bp, Methanobrevibacter ruminantium
  source 1..897: mol_type = genomic DNA
ttgaaggaagaaatatcattagcaaagcaaaccaaaaggatacttcaggaaaatgatattaagttaaacaagaaccttggacagaattaccttatcgacgactttaaaagaaagaaaataatcaattatgcaaatctaacaaaggaggatacagtcctagagattggccccggaataggaactcttacaatagagcttgctaaaagagcaaaaaaagtaattgccatagagcaagacgagactatttttaatatccttaaaaaacgtctagaaaaggaaaaaatcaataatgttgagcttataaacggcgatgcagttaaagtagactttccagagtttaataagatagtctcaaacctcccttatcagatatcctcacctatcagcttcaagttccttaatcacgactttgaccttgctatactcatgtatcagaaggaatttgcagacagaatgaatggaaaggtgggaacaaagcaatattcaagacttagcgcaatgctatactttaaggcagatgtcaagttcttaacaaaggtatctccagagtcattcattccatctccaaaggtagattcggcggttatccaacttaagccaaagaatattgattcaataagaatcaatgataaggaatatgaaatagataaagaaacatataagacatattcgaaagtggttaaggcattgttccaacacagaaacaagaaggcaagaaatgcattgattgattccagacatataattggctttaaagataaaaaggaattaaaaagcattttaaacgatttggaagatgaaaatccaagaataaaagaaatactattagagcgaaccattaatttagctccagaagagattatggaactaactatactcttaaaagaccaattataa

SEQ ID NO: 159 - DNA, 750 bp, Methanobrevibacter ruminantium
  source 1..750: mol_type = genomic DNA
atggataatccaaacattgataatcctgctccaaagaaagaagaaaatgtgattatattagattatcttaaatttggatatataaatcccgaaagaccaactgctcgtggaaagccaattgcacaagctcttggcgttgataaattcacattaatcgaagtcacaccaaaacaaggaattgatttggaaattcatgaaaaagtttacataggttctggaaaaagagacaagatcaaccgagtaaagggattgcttgattatgaaaagcttactgctacaagcagaatcgaattggaatatgcaattaaggaaatcatccaatcaaaagaggagatttacattaagttctttaatgaaatagattccttaaacatcaagatgcacaagctagagcttattccaggaatcggcaagaaacatactcaaatgattcttgaagagcgtaagaaagagcctttcaaagactttgaagacctaaagaagagagtccctcttcttggagatcctgttgacatgcttgcaaaaagagtaagccttgaactcgacaccacacaagtgaaaagaggcaagaaaaaatactatatgtttactcaagttccaagcaaacatccttccaataaaaagagatatagaagaggaagaaacaacagaaacaggaacaacagaaacagaaagccaaataaaaataggaataaaaaacctaataataaggctaataataaagcaactaataaaccaaaaacagaatga

SEQ ID NO: 160 - DNA, 3177 bp, Methanobrevibacter ruminantium
  source 1..3177: mol_type = genomic DNA
atgaattttaaaacaaaaggaagcttgattcttatttcattacttttcattttaataataggtattggaatggcatcagcatccgaagatataaatacagatatagacacggattatcaatctgatagcattgatgtgtctgatgtaagtttaaatgatgaacagatagcatctgaggatagtttgcctaactatgaaattgcaaataaatccaaggacaaactatatgatgaaggagaagaagaggaaggcggcataacaaatgacgatgatgatgaaaattatagaattgatggaatctatgcagattatacaattacaccgtctgaaaatggaactatctttgttgaaggagaaagaatacaaataatatttaattttacagatcaagactatgagcctgtttccggagactggtttattaatttttatggtgaaagtacagatgtcgacatatatcatccatttgaagcaaccgggctcaccgactatgtcgttccaatttatttgcctccaggagactatgtcatattcttttatgaaggcgtggtttttgatgattttggtggaatagaagatgaaggaactcaattagatgtaacttttgaagatgcagaaggaaaccaattagataatccggaattctctatcagaaccaactacaacaaaaaggtatatgcaaatcttaccatagactacagtgtagcagaacttgaaaatctagtggaaggagacgatataactgcaaaaataagcttaatggatgaattcaataacaaaatgactgaaaaggttaacctagagatttacaggaatggagaaaactatgattctaaaaaggtaaacgttgtagagggccaaaataacaacatcatctttgaaaaccttcaggaaggaaactattcattggaagttgcaagcattgacagcgttccaaaatacactaacatcataacaaaagcagtcaacttcacagtcaaaagcaactatgacccagacaactaccaaatcatcctcaatccagaagatgagaaaaaacttgtaggagactcatatgaaatgggtgtaaaactactaaatccatctgaagaagcagaagaaggaagcattgacttatacctaaatggaaactttgtaaaaacattagaacttaactatgatgaagatggttactcccaccacattgtagaaggccttcagcttggccctaacaatgccacattcctataccaaatcagagatggagtaaacgtaagcgaatcagtaaacctaatcagatacgaaaccgagtccatcatagaccttgaaagctcagatatcattatcggtgacgatgcaaagatcaaggccagcctaagttaccttgacggaatcgtcaaaaagccaatcaacgaaaacttcaagctttatatcaaaaactacgttgaggatgaagatgaggtcgaatttgtctatgatgaagagtttaccataaaaggaagcgaaacaataactcttagcgacctagaggaaggaacatactacatttcagctgtatacaatggtaaaaactacaaatacctagcaactgaagaagaaagcacccttgaagtattccctaaggaaacaagagttgacgctgtcgcaagaacctattcaactgaagagaatgttattgtaggcatagaattagctgacctatctggaaaagccataaaaggcactgtaaatgttgtccttgacaacaagacaagttaccaagtaaacactaccgatgacatccaacatcctgtggaattggaccttggaaagttaggctatggcctccacaatattgaactaaactacacaggagacgatagcgaaggatggcttccaagctacaacaatgcagaattcctagtaatctatccaagcttcatgagcattgaagatggagacgtcacctccggaagcgacctgactgtcaacataagcttgacaggccctgatgatgaaggaataaacggaatcattacagttcgcatttacgacaataccggaaaatatctaataaatggagacttcaacacaacaaatggagtaaaaagcattgaactcaaaaacatcactaaggattatatcatctatggacgctactatggattggatacaagcaaaatagaaataggacctagcaatcattatttaagcagcgaagcttatggattcattagaatagctgaagggaaaagcgaaaaaaccgaatatgaccttgaattgaccaaggtaaatgacaacacagtaattgcaagccttaaggactccgattcaaagcctgttgcaaatgcagagctaacagtaaaagtgaatggagtagaatccaaagcaaaaacagacaataatggaatggccaacattagcttcagcggaaattcatcaatcaaggtaagctatactgatgcaaataacacaactgcaaaggcatctatggaaataattatcataaacaatgttactgaaaagattgtaaaccaaacagtagaggttccggttgaaatagagaagattgtctatgtaaaccaaaccgtggaagtccctgttgaggttgaaaaaattgtatatgtcattccaaacagaacagacactgcattcgaatacgaaaacatggttacaactgcagtggcatctgcagatggcagaacaggagaatacttcaatgtcagactaatagacgcaaccggtaagccattagcctacaagcctattaaaataggattcaatggagtcgtatacgaccgtacaaccgatgcagacggaagagcaaaacttcaaataaacctcggttataagggagattacacctttgcaataggattccttggagatgacaattacactggagcatttgaagtagctaagataactgtaaaacttcaaaagccacagttaagcactgcaagcaaaacatataaggcaagtgcaaagacaaagacattgactgccaccttcaagagcgaacatggaaatacagtaagtggcaaaaagataagctttacagtaaacggaaagacatacagcggaactaccaattcaaaaggtatagccagcgtaaatgtaagcctatccaagaaaggaacttatagctttactgtaaaatgggcaggtaatgatcaatttgcatctgtaacaaagagtggaaaattgaccattaaataa

SEQ ID NO: 161 - DNA, 345 bp, Methanobrevibacter ruminantium
  source 1..345: mol_type = genomic DNA
atgattgggaaaaaaacattagaaagtgaaccgataccagcagctaaagttaaagaaatattagaagagttttcagaaaaatatgagctcaactatgaacagaacttgaccttagctcatgtgactaatctaaataaactttccctagaagatgctgaaaaattaatcgaagagcttgaagcattcatgacccataaacaagcaatccgtgtagcggacttgcttccaagagacatggcagacttaagattaatttttgcaaaagaaagaaacgctccttctaaagaagatatggagcaaattcttgaaattattgaaaaatatgaaatttatgttgaggaataa

SEQ ID NO: 162 - DNA, 291 bp, Methanobrevibacter ruminantium
  source 1..291: mol_type = genomic DNA
atgcaaagatccagaggatttaaaagtagaagtagaaaaaaattgaccaagaaagttagacctggtcgtgctaatccgatcaccagaagaattcagcaatttgaaaacggtgatatggtacacattatcatcgacccaagtattcaaaaaggccaacctcattccagattccatggaaaaactgctaaagtagtagataaaaaaggtaaagcttacatacttgcattaaaagatggtaataaagcaaaagaattaatagttactccagaacatttaaaattacaagagtaa

SEQ ID NO: 163 - DNA, 1269 bp, Methanobrevibacter ruminantium
  source 1..1269: mol_type = genomic DNA
ttgaatcaagaaatactaaataaagcagaagaattaataaatcatacaaatggaaatatctgtaatcactgtttaggacgtaaattctcagactgtgttgaaggagatggaaatgaagatagaggtgctaaaataagacaagcacttaatctagagccttacaaagcaaatgaagataatcctgcaaatgatgaaaaatgcctaatctgcaatgatttatttgaagacctcaacactgtccttgatttggtgaatgaaaaaatagatctccttaaggtggaatttgacacctttgtagtgggatgcaagcttccaaaggaaatagtggaaaaggaccaagagataagtgacgaatttgatttcaatgttgagataatcaaaaaggaagtcaacagagaaatcggcaagctccttgaatcaaatctagagcagaatgtagactttgatggagaggatgtccttgtaatggttgactttagaagaatattaaaggaagacattgaaaatccaatcaaggtccgccttcagataaacccaatcttcatagaaggaagatatagaaagcttatcagaacaattcctcaaaccaaatggccttgcagaaaatgcaaaggaaaaggatgcgaggaatgcaatttcacaggcaagcagtacccagaatctgttgaagagctgctctctgaagtggttctaaagcacaccaacggatacgaagccaagttccatggtgccggaagggaagatatagatgttagaatgcttggaacaggcaggccatttgttcttgagataaaagagccaaagataagaaagatagaccttaaaaagatagaagaagaagttgcaatctctgcaaaaggaaagacagaataccttaatctcaagtttacagaaagaagaagaaaggcagaaataaaggagtcatctccagatacctataaggtctacagagctcttgtaaaatgcgaagattacatcaaggaagaagaccttgaaaagcttcaaacacttcacataatccagcaaagaactcctataagagtctcccacagaagggcagataagataagacaaaaggaagtcaaggaaataaaggcagaattcattgactctaagacctttgaaatgatcattaaaaccgaaggtggattgtacataaaagagcttatctcttcagatgagggaaggtccaatccaagcgtaagtgaagttttaggcactcaagccatatgtgcagagcttgatgtgattgaagtggggattaaataa

SEQ ID NO: 164 - DNA, 1335 bp, Methanobrevibacter ruminantium
  source 1..1335: mol_type = genomic DNA
atgttaggaagtttaggagaaaaccttacaaacaccatgaaaaagctagctggaatgagtgttatagataagaaggttattaaagaagttgttaaagacattcaaagggctttaattcaatcagacgtaaacattcagcttgtattaaaattatcaaagacaatcgaaaagcgagcacttgaagaggagcctccaaagggaataaccccaagggaacatgtaatcacaatcatctatgaagagatggtcaatctcctcggaagcgaagctcaagagcttaagattacagaaaagccatttaaaatccttttcttaggattgcaaggtagtggtaaaaccaccaccataggcaaattatgcagatacttgcaaagaaaaggtttctcaccagctgtcgtatgtacagacacttggagacctgcagcatatgagcagttaaagcagcttactgaagaaatgcaaattcaactttacggagacccagacaataaagatgcacttgatttagctgaaaaaggtcttaaacactttaaaaatcaaaaaatcatcatcttcgatactgcaggtaggcataagaatgaggaagacctcatcgaagagatgaacaagttagacaagatcattaatccaagcgaatccatgcttgtaattgacgcaactatcggtcagcaagcaggggaacaggctaaagcattctcccaagcaactgacatcggttcaatcatcatttcaaaattagacggtacagctaagggtgggggcgctctctcagcagtagctgaaactggtgcgccaatcaaattcattggtaccggagaaggaatagatgattttgaagcatttgaccctgaaagattcatttcaagactccttggaatgggagacatcagaagccttatcgaaaaggctgaagaagtgattgatgaggatgaagccaccaagaccatgaacaatatgctcagcggaaagttcactctagtggatatgagaagccagtttgagatgatgaacagcatgggacctatgcaacaggtcatgaacatgattccagggcttggaggaaagatcccaaaagaggcaagccagatgaccgaggataagatcaatggatttaagataatcatgtcctctatgactgaagaggaaatgctcaatcctaagataatcaagcaatccaggattcaaaggatagctagaggcgctggcgtagaggaaagcgatgtaaaagagctattgagatattataacaataccaaaaaggctatgaaaggtattggacgaagaggaatgggtggaggagctatgaataggattatgggtcaatttatgaaatag

SEQ ID NO: 165 - DNA, 567 bp, Methanobrevibacter ruminantium
  source 1..567: mol_type = genomic DNA
atgcttgaaaatttagttgaatcattaagaaatgcacctgttgttaaaaaaggagattacgattacttcgttcatggaataagtgatggaatacctgcccttaatccatgtgttctaaaagagatttctgaagttctcgctgaaaggattgatttggataaagtcgataagattgttggggttgaagctatgggaattcacattgccactgctttatccttagaaacaggccttccattgcttgttatccgtaaaagggaatatggattggaaggagagcatgaaatcttaaagcacacaggatatgcaacttccaaattatacatcaatgacttaaatgaaggagacaatattgtcttggtggatgatgttgtaagtactggaggaactctttctgttgtaataaatgaattaaaggctattggtgtgaatatccttgatacatttgttgtagttgaaaagggagaaggaaaaaagatagttgaagataaaactggagaaaatattgtaactcttgtaaaattggatgtagtggatggaaaggttgtagctgattctttaatctaa

SEQ ID NO: 166 - DNA, 1008 bp, Methanobrevibacter ruminantium
  source 1..1008: mol_type = genomic DNA
atgtcaatatacgatatggaattaaagaaggttattcgaaagattaactccttaaatgtaaagaatgtaggtttgcagtttccggaaggtctcaagatgcaggcggtagctattgctcgagagattgaaaagaacacagaggcaaatgtaattatatctgcggatccctgctttggggcatgtgatgtgtcagataggaaaatgaatggaatagttgactttattgttcattatggccatacccccctcccacttagatatagcattcctacaatgtttattgaggcaaaggccaatgtgaatataaagcaatatttagaagatgccttggaaatgcttgaggactattctaaagtggccattgcaacaacagcacagcacctacacttgcttgatgagatcgttgactttttagaagaccatggaaaggaagttgtaataggctcttcaagaagcacaaggaaaggacaagtattgggatgcaatttctcttcaatcaagaatctgggggcagatgtttatctgtttattggaagcggaaatttccatcctttagggatttatatgtttacaaattctcctgttttggcaattgatccttatagtggcgacattcgtgaaatgagcggatatgcagataggattcttaggataaggtttgctagaatcgtcaaggcaagggaagttaagaaatggggaataatcgtttcctcaaaggaaggccaatatcggatggccttggctaaagagctgaaaaaacttcttgaagatgagggaatggaagcattcatccttcttatggatcatatcaatccagatgttcttcttccgtatatggaacttgaaggatttgttgttacagcatgcccaaggatagcaatcgatgactctcagatgtataagaagcctgtaataactccaaaggagttggagatagttctaaataaaagggaatgggaaaagtatcaattagatgagatattatttgaggatcgttattatcagtaa

SEQ ID NO: 167 - DNA, 462 bp, Methanobrevibacter ruminantium
  source 1..462: mol_type = genomic DNA
atgaatttcgaattctccattcttggattgtttttattattgctcctatttgttccaaacataatctggactaaatttatccctaaagattatgaaaattattcaaagagagaaaataagatattgttaatccttgaacgtattggtgaagtggcaactgttgtatttgccttgttttgcggtgctaaatttagctggtcattattattaattattatttttattctaatggctttgtatgaggtttattggattagatactttatgtcaagccatacaatgaaggatatgtgtgatagtcttttaatgattccccttccaggtgccacattgcctgtaattgcattctttttgtttggaatctattcaaatagcatatttttagttatatcttcaattattttggcaattggacatattggtattcattataatcataaaaagcagtgtaatcttaattaa

SEQ ID NO: 168 - DNA, 567 bp, Methanobrevibacter ruminantium
  source 1..567: mol_type = genomic DNA
atgaaagtagaatctggagattttgtaatgcctggcgactttttaagtgtaagtgaagaattcctgccaggtcctggagcatatgaagatgatggaagtgttaaatcaggtgttcctggaaatgtatttgttgataatggtgaaaaggaaatctctgtaatttcaaaatccggcggtccaaacttattgaaggttggagatattgtatatggtgaagtgaaggacgttcgtggccaaagagccttgattagtgtatacgctaaaaagggaaccgatcgtcaattggctcttccttatatggcagctattcacatttctcaagtgactcctggatatattgacaagcttactgacgcttttagaatcggagatttgattgaagcaaaagtagttaagattatgggagataatttggacttgaatactgaagacattacttctggtgttgttaaggctatgtgtacaagatgcagagcatttatggagcctcgtacagagtctgaagtatactgtccggtatgcaatagaaaggaaaaaagaaaggtttcaaagaattatgattattaa

SEQ ID NO: 169 - DNA, 279 bp, Methanobrevibacter ruminantium
  source 1..279: mol_type = genomic DNA
atggaaattgaagttattaaagaatcaaaattagaacttgaaatgattattcatggtgaaaaccactctctttgtaatgtcttaagaaaatatcttatggaagatgatgatgtggaatatgcggtttacggaatcgatcaccctcttacaggtgcaggtaagccggttatgaccatcaagaccaaaagatcaaaaagacctagaaactctcttttaaaagcagctacaagattaaaagaagaaactgctgaatttaaagagttaattgaagaattataa

SEQ ID NO: 170 - DNA, 417 bp, Methanobrevibacter ruminantium
  source 1..417: mol_type = genomic DNA
atggcttataagattccatctttaactgtagacatatttatttttaacgatgagaaagagtttatactaattaaacgtaaaaatgacccttataaggatttctgggcattgcctggtggttttgtcgattatggtgagacaacagagcatgcagctgtccgtgaagctaaagaagagacaagcattgatgttgaattgattaaactcttcaatgtctattcagaccctgatagagatccaagaagacacacagtaagcgtattctatttagctcatggagatatgaatgatgccaaggcagatgatgatgcaaaggacattggcattttctcatttgatgacttggataatttagatcttgcctttgatcataggatgattttaaatcaggtcaaagagtattttgataaggaataa

SEQ ID NO: 171 - DNA, 396 bp, Methanobrevibacter ruminantium
  source 1..396: mol_type = genomic DNA
atggagttctgtccaaagtgtaatggtatgatgatgaacacaactgtcaaggttaaaaaagaagaccttgaagaaaaagttgatgaagaaaatcaatcaaaccaagaaacagaagaagaaaaagttgtttttaaatgcatgacttgtggctatgaaaaagacccttctgaagttgatcaggaccaatataaagttaaggaaacagtagaatccagtgatagtgttattatgagaggagatgaaagcggaatgcgctctactgtaagagagatttgtcctaaatgcggtcacgatcgtgcttcctatgaattgttacaaacccgtagtgctgatgaggcaccaaccaggttctttacttgtgaaaaatgtcatcacaagtggagaggatatgattaa

SEQ ID NO: 172 - DNA, 1620 bp, Methanobrevibacter ruminantium
  source 1..1620: mol_type = genomic DNA
atgtctaattcgcaaaatgatggtttagaagatgtttccaagggaaacaatgaatctgctggtgaaaatacagattcaacttctaataaaaaaactagatttactaaatctaaatctatttcagaggtttttaaggaattagattctcaggaaaccaatgattccatcttagattctgaagatgctgcttctgaattagaatctgaagataaatattctaatatagaaaattatctttccgaggcagaatctgaagaagaaattttagatgcttcttctgaggcagaatctttagatgctagttctgatgtagaatttgaagaggatattattatcgattctactgcagaagaagaaatagatgaaattattcctattcataatgaatataaggatttagatgaatctgaagctttcaatacagaatctattgatgaagaagaaatttcagaatcttctgaattggataattatgttgaaagcattgttaatgaaaaagatgacttaagctctgatgaacttgtcgattctaaagaaaacttagatgctgtcggtggagatgaaggctctatgagcgttaaagatatcgaaaacgcttcatttgaagctgaagatacctcattagatgctgaagattacgaagatgactctattgacagtgaggatatcgatcaatcttatgaagaagagcttcttgatgagaatatgaaagttataaaggtaaataatgcttcttcagaggatgttttatcaaagaaaaataaaggattccttagctctttcgggtctataaaaatggattcttcctttattatcacagttcttagtttcattgttggactgggaattttaatcatgggtatattctatctcaactccagttctgatagagttgtagataatgttttatctggtgaaactgcaggtcttgcagtctttttaattatcattggtcttttaattatcggtttcagtattttaagattcctttcttctacaaaggccgatcagtcttcttctatgctggatatgtttaaaagcataagggacatcgactatgatgatgttaaagatgataatataagtcgcgatgactttgattctgtattttctagcgtttttggcaaagaaaaacgctctgatttttccaacgacgatggcgataaaagctctgttgataaaaacctttttgatgaggatgacgaaatatccgatgaagatattgatgccttatattccgactcaaatttaaataaaactgcttcttctactaaaaattcaacaggcattcaagacactgacaatataattgaagaggatcttgatgacgattttgatatgattgattccgataattccgaggattttgataacgatactgatttagaggatgataatgtgtctgatttaaaagataaatattctaaatacaatttcgatgatgatgatgctccatccaaacctcagtttaaaaaatcagtggacatttcaaaattcgatgatgatggtttatctgaagaggaattggaagctgaaagaagaagaaaagcggaagaattggaagaaaagaaaagaagaatcatccaaggaactaattttgataatagcttaagaaaataa

SEQ ID NO: 173 - DNA, 735 bp, Methanobrevibacter ruminantium
  source 1..735: mol_type = genomic DNA
atgtttaaagctgagttaagtgattctagtattttaaaaagcagttttgatgctatttcatctattgtagatgaagtgcagattcaaactgacagtgaaggttttcgtttagatgccttagaccgtagtcatattacatttgttcatttagaacttaaagcaagtttatttgatgaatttgtttgtgatgaacctgaaaaaattaatattgacactgatgaattgatgaaagtattaaaacgttccaaatccgatgatcgcgtattgatgtcattggatgaaggtaactttatccttacctttgaaggagaagctaccaggacttttaaaatcagattgattgatattgaatatgactctccagcacctccatccttgaactatcctactgaatttgagattccattctctcttttaaaggattccattcaagatatggatattttctctgataaaatcactttaatggtagatccagagtactttaaagcatttgctcaaggtgaattcggagatgcaaatattgaatatcttcacggtgaaaagatagatgcaagcgctaaatccattttctctttagaaaagataagagaaatgcttaaggcagataaattttctgatatcgttaacatcagccttggagatgacatgcctgtaaccttaaccttaagaagagttgcaaatgatggtgagcttagttttttgcttgctccaaggatagaatcagaagaatag

SEQ ID NO: 174 - DNA, 1614 bp, Methanobrevibacter ruminantium
  source 1..1614: mol_type = genomic DNA
atggatggagacttttttcaattattgcgaagggttcaaaaggaggaacggactaaatccactttagcaagagtggataaagatttctataaacaactctattcctatattagagatttagaacgttctgttgctcaaaatcctttcgatactgctcaatcaaatctattgaacaatgctcaaaggattgctactgagatttgtcaatggagagaatcaaagatcagtacggctgcaaacaataatatttataggtctttccatcttttcaaaaaaggaaaccctcagtttgatttgattgatacaactccattgcatcttacacctgaagaggaaactttatatttcgccttgatggacgctcttaagactcatagatataatatttcattggacaaattcggggatgaaaaagccgattggggtgctgatgattatgaggacgaagaagaggatgattttgaagaagtcgcttccgttgtaaaaagccgtgttaataaaggggttgtttctgatgaagagttcttcaatgaggggggttcttctaatgagtccgttactgatggattcagtggagagtctatttccattgaagagtccggtgctgatcctgtagttcaagagcctgctgtagaaactcctgttgaagaaagttctggcagtggttttaagcaagaagttcaagagtctgctgtagaaactactaataccaatgtaggtggatctgatgaggttttagataggttaaatcaaattaaaaattcaactgttgttacagatgaaaaatacgaacctattgaaaagcaaatcaataatcaggctaaagtagttccaaatgtctccatgtctaataatcttaattatgaaagtaaaaattataatggtcaagataatgagtttgattctaaacttaaaccagattatgaatctgatgtagaatcagaacctaaaatagagtctaaacctaaggtagaatctgcacctagaattgagtctaaacctaaggtagaatctgcacctaaaatagagtctgaacctagattagagtctaaacctaaagtaggatccgaacctagagtggagtctaaacctaaagtagagcctaaaactatcgaagataggcctaaaaggaaaagttcatcaacattagactttgacagcatctttgcaaatccagacagtcaatttgatagcatacacaattttgaacctgattatgaagcggatttagcaaacattcaagcaagttccagttttgcagagcctagcgaagcagatttaatgttttcaacaaaacctaggcctaaaaaagagcctaaacctaaatctcaagttggatctaaagaagagttcgaatctagacctaaagtagaagaaccaagtcatgctccaactgctaaagcagaaagaccaagatctcaatctataaaagcttttgctaaaaaggaagaattggaaaacactacagttgtaatatacaaaaatattgattcatttatgggaattgatgaaaagatttatggtccttttatagcaaatgatgtggttattttaccaaatataactgcacaaatacttatagacaataataaggcaggtctaattgatatttaa

SEQ ID NO: 175 - DNA, 279 bp, Methanobrevibacter ruminantium
  source 1..279: mol_type = genomic DNA
atgaagatgcctaaagaaaaaagaacatactgtccacattgtaaaagacacactattcacgaagtacacacttccaaaaagagaaaagctagtgaattaaaatggggacaaagacaattcagaagagttaccgcagggtacagaggttatccaagaccattgccaggtggtaacaagccggttaagaaattagatttaagatacaaatgtaaagaatgtggaaaatcccacatcagaaaatctttcagagtaggaaaacctgaatgggtatctaactaa

SEQ ID NO: 176 - DNA, 180 bp, Methanobrevibacter ruminantium
  source 1..180: mol_type = genomic DNA
atggctagtaatggtagaggaaactttttaagagttaaatgtttagattgtgacaacgaacaaatcattttcgatcgtgcagcttctgatgtaaaatgtatcatctgcggtaaaaccattgttaaatcccgtggaggaaaagctaaaatcatggctcacatcgatgaagttttagattaa

SEQ ID NO: 177 - DNA, 783 bp, Methanobrevibacter ruminantium
  source 1..783: mol_type = genomic DNA
ttggtaagaaaaagtcaagaatggccaaatgaaggagaacttattgtaggaactgtatataaagttcttaactatggtgcattcgctaatttagaagaatacgcaggtaaagaagcttttattcatatttctgaagtttcttctggttgggttaaaaatatccgagatcatgtaagagaaaatcaaaagattgtagctcgtgttttaagggttaatcctaaaaagggtcatgtagacgcttccttaaaaagaatcagggaagaccaaaggaccaaaaagattcagcaatggaaaattgaacagaaagctgaaaaattcttggaacttgctgctaaatctttagataaggacttagatactgcttatgatgaagtaggctatgagcttatggatatctttggagatatctatggcgcttttgaaagtgcagctgaagaaggagctgaaactcttactgaagagggcattagccaagagtgggctgatgcaatcactgaagtggctgtcaagaacattcaacctcctgaagttcacattacaggatatgttgacattgaaagctatgctccacatggagtggaaatcattagggaagcccttttagcagctgaagacgaaaatattgaagttcaatgtgttggagctcctcgttacagaatcactgtaacttccactgactataagcttgcagaaggtcaattgaaagaggccgccaataaggctattgacattgtcattgaaaacggtggaaaaggagaattcttacgtgaaattgataattaa

SEQ ID NO: 178 - DNA, 171 bp, Methanobrevibacter ruminantium
  source 1..171: mol_type = genomic DNA
atgaaaatgaaaatgaaaaagtgtcctgtttgcaatatttacacactaaagcctcaatgccctaattgcggcggagagttaagggtgatttatcctcctaaattctcagttgaggacaagtacggtaaatatagaagacaattaaaaaaagagatgcttaataaggaataa

SEQ ID NO: 179 - DNA, 789 bp, Methanobrevibacter ruminantium
  source 1..789: mol_type = genomic DNA
atgagaacaacccaatttaaagtattagaagaagttaaattaaacaatccaatatttattgaagcacttcctggtgtcggtcatgtaggaaaattagctattgaccatgtaattgatgaattggaagccactaaatttgtagagatttattctccatacttccctcctcaagttcttgttggagaaggcggaattgttgaagatatgaagaatgaattatactacttgaaatctgctggcggagacgaaagggatttcattttccttgttggaaactgtcaaggattaaatcctgaaggtcaatacgaactctgtggttccatacttgattttgtagagtctcttggagcaaaagagttttacacattaggaggccttgctaccggtcagcctttagaaggtgtagaagaccgtgttttaggtgctgctactgatgaggaacgtattgaaatgctcaaagaagcagatattgaaatcagatctgctgatggcggtattgtaggtgcttctggtttattcttaggattaggaagacttagaggtatgaaaggcgcttgcttaatgggcaaaacccctggctatttcattgatgctgaagctgctgaagccattttggcaaaattagctatccttgtaaagcttgaggtcagcactgacgagttagaggaaagagctaatgagattcgtgaaatgatcaataaggctcaagagatggagcaggaaatgatcaatagggctatgggccaacagcaagcacaaactcaagacgaccttagatatatcggttaa

SEQ ID NO: 180 - DNA, 1188 bp, Methanobrevibacter ruminantium
  source 1..1188: mol_type = genomic DNA
atgcttcaaattgcagtaacaggtaaaccaaatgtaggaaagtcttctttttttaattcagccactgcatctcaagtagaaatggctaactatccattcacaaccatagatgcaaataaggctgtaggtcatgtcatcagtgaatgcccatgtaaggaattaggggtcacatgcaatccaaacaactcccaatgtatagatggaacaagattgattccaatagagcttatagatgtagcaggacttgttccaggggctcatgaaggtaaaggtttaggaaacaagttcttggatgacttgatgcaagctaaggtattcatccatgtaatagatgcctcaggaggtaccgatgcagagggaaacccagtggaactaggctcccacgacccattggaagacattgaattccttgagcatgagatagtcatgtggatgtatggaatcgtcagcaaaaactgggtaaggcttatccgtaaggttgaagcagagcacttagacttttctaaggtcatatttgagcaactgtcaggtacaggtatcctaattgaagatgtaatagaagctttaagaactgtaagtcctgattatggaaaatgggaagatgaagaccttatagaatttgtaagaaaccttttaaacattgcaaagccatcaatcgtcattgcaaataaggcagatcttcctggagcaaaggaaaacattgaaaggatgaaggaaaagtatcctcgtgtcattgcaacatctgctgaatctgagcttgcattggtaaatgcaacaagggccgggctcatctcatacatctcaggagacaacagctttgaaatcctagagaaggacaagctaaaccctaatcaaatcaaggcattggaatacattcaaacaaacattcttgacgtttatggaagcactggaattcaagaggcattaaacactgctgtatttgagcttttaaatatgatagtggtttatccggttggggatgagcataagttcactgaccaaaagggaaatgtgttgcctgatgctttcctagttcctaaaggttccacaccacgtgaatttgcatatatcattcacacagacattggtgataagtttatgcatgcagtggacgctaggaagaatatgagaattgcaagcgattatgaaatccaagatagagacattattaagattgtaactagataa

SEQ ID NO: 181 - DNA, 1119 bp, Methanobrevibacter ruminantium
  source 1..1119: mol_type = genomic DNA
atgatgcatccacgtccaagtccaattgccgcttctttatacactttaagagatttaaatgcagatgtaattattatgcacggtcctcatggctgctgctttagaacaggaaggctccttgaaagcgatggggtaagagttgtcacaactgctatggctgagaatgatttcatattaggagctgcagacaagctagaggaaacattgcaggaggcttatgacacattcaatcctaaattgataggaattgtaggaacatgtgcaagcatgatcatcggcgaagacctgaaggagccgattgaaaacttaaatcttgatgctgttgtcatacctgtagagtctcacggaggctttggagagggagacaatacagaaggtgctattgcagtgcttaacgctgctgtagaatgtggtgtcattcctcaagaggaagcagacaggcaaaatgagatgcttcgtttagcaactgtggttgaaaaaacaagaggcatggctcagggaaagtatataaagcctaattttggagacaataaggaaaaagttgcaaagattgttgtaaaagcagtaaaagaaggaaaaaatgttgcatttgtattaaatgcgaaaaaagaaacttcatatctttttgcagacattttaaattgcgatttctctaaacttttccaagatactgattcaaatataaagtccaataaagatatagaaaaccttcatttcattgcaaatctggatgagaacatcggccttccaagaataaggcagcatgcagtaaatattacaaaagaactgaatgaaacaggaatagatattgaatgcatcacaggtggccttgatgagtatccaatcactccaagaaaggcagaagagtatcttaacgagctaaatcctgatcttgttatcgttgcaggagttccacatgcattgtatgtagaggagcttgactgtgaaaccattgcagttacagatggtcctagacttgttcagccacttaatgaattaggctattctcatgtaatagcagaacttgatgcccattctaagacattaggtgtagatgagatagttgattcagactttggtatgatgatacgttcagctattgaatgggagcttgaataa

SEQ ID NO: 182 - DNA, 594 bp, Methanobrevibacter ruminantium
  source 1..594: mol_type = genomic DNA
atgattacaattattgattataaaagcggaaatcttagaagcatttccaatagttttaaaaagataggttcaaaagcagtcataacaagcaatcccgaggacattgcaaatgctaatcatttagttcttccaggggtaggtgcctttggaacagctatggaaaacattgagccatacaaggatttgatttatgagcatatcgatgatggaaagccatttttaggaatctgtttagggcttcaagtgctcttgtcctcaagcgatgagactcctggagtcaaaggccttgatatatttaaggggcatgttgaaaagattcccgaaggcaggaagattcctcatatgggttggaatcagttaaaacaagtcaagccatgtcctatacttgatggtgtggatggcaaggacttttactttgtacattcctattatgcagttcttgatgatgaaagcaatttgtctggaatctgtgattatggtgttgacttgactgcatcagtttcaagggataatgtatttgctacccagttccaccctgaaaaaagtggagttccaggcttaaaaatccttaaaaactttgtaaatttagaataa

SEQ ID NO: 183 - DNA, 621 bp, Methanobrevibacter ruminantium
  source 1..621: mol_type = genomic DNA
atgggaaaatttaaatttatatttattctagttttagctctatttttaatatgtggaattgctgcagttgtagatgcgcctgattcctttgatggctctttaaatcttatacctgtttctgattctagtgtaagtcagtctgattcatcagtaaatcagtctgattgtgaaaatgggacttgttcagttgacttaaacaaatctgaggataattcttctaaagaaacttcagatgatgaaattgattatgattcaaagtattatgacgattctttgattgatggattgtatttctgcaatgacctagagcatgcatttaaggatgctaaacaacatcataagaatgtgatgatcatttttgacggagcagcctgcatttactgcgaatatcttaaggatgaaggattgacagattcagatattcaaaaggaaataaatgagaatgatatcctacttatgacttataccagcgatagcccagagctttctcaaaaattggagatttatggaactccaacaactgtaatatttgatgaaaatggaactgagttaggaagaatcgagggctatgagtctccagagcaattcttaagtgaactgaaagagtataatggcaaataa

SEQ ID NO: 184 - DNA, 618 bp, Methanobrevibacter ruminantium
  source 1..618: mol_type = genomic DNA
atggagataatgcctattatttcattttttataggggtaatttcaatattatctccttgcattctgcctaccttgccaataattgcaggatttagcctaaaagccgaatcaaaagcagaaatagtggccttcatattagggctatttagcatattcacaatcattatattcctgacaggattctttacaactattctttttaggtatattgtttatgtaagggtcattgccgcatttcttttgctcattatgggaatattgatgttttttgactataatctatcttttggatcggttaagtctcgtagtggtgagggaatagtcaattcatttattttaggatttcttacatcagtggcttgggcagattgctatagcggatatctcatttctcttataactatgcttgtatcaagcagtcctttatatgcagtttttaatattttcatttatgtttttggctttgcattgaccttgcttgtattgtgcttggccatttcaaaaatagatctagagaagctgatttataagtcaggctatattcctaagatatttgctgttttaattattattggggctttttatatgttttacacttcaattcaagtgtttttataa

SEQ ID NO: 185 - DNA, 693 bp, Methanobrevibacter ruminantium
  source 1..693: mol_type = genomic DNA
atgatttactcaaaagaaattgaaaatatgtgtcctgttcataagggagcagaccacggtcctgcaccaattcctgaagagggaagatgggtaaaatccaaggagatctcagacatttccggactaacccatggtataggatggtgtgcgcctcaacaaggatgctgcaaattgactttaaacgttaaggatggaataatcgaagaggcattggtagaaactcttggatgctctggaatgacccattctgcagctatggctggagagatccttgttggaaagacaatccttgaggctttgaatacagatcttgtatgcgatgcaataaacactgcaatgagggagctcttcctccagattgtatacggaagaacccaatctgcattttccgaaggaggccttccgattggagctggacttgaagacttaggaaaaggtcacaggtcccaggttggaacaatctattcaaccaaagtgaaaggcccaagatatttagagcttacagaaggttatatcactgaaataggtcttgatgaagatgatgaaatcattggatacaaatacattaatatgggggtcatgcttgaccttataaaggatggaacagatccaatggaagcgattgaaaaggcaagcgggcaatacggcagatttgaagatgccgttaagaaaattgacccaaggaaggaataa

SEQ ID NO: 186 - DNA, 999 bp, Methanobrevibacter ruminantium
  source 1..999: mol_type = genomic DNA
atgagtttatttgaaagttatgaaagaagaatagatcaaattgttccagtgcttgaaaaatacggcattaaagaccttgaggaagcaaaagcaatctgcaatgaaaaaggattcaatccatatgacattgtaaaaagcgtacagccaatttgttttgaaaacgcttgttgggcatacactcttggagcagctatcgcaatcaagaaagactgtaaaaaggctagtgatgctgcaactgcaataggagaagctttacaggcattctgcattccaggaagcgttgcagatgacagaaaagtaggtctcggccatggaaaccttgcttcaatgttacttagtgatgaaaccgagtgttttgcattccttgcaggtcacgaaagctttgcagcagcagaaggtgcaattggaattgcaaattcagctaataaggttagaaaggagccacttagagtcatcttaaatggtttaggaaaagatgctgcacttatcatctcaagaatcaatggattcacctatgttcaaacagagtttgactactttacaggagaggttaaggtagttagggaaaaggcctacagcgatggcgaaagagcaaaggtaagatgctacggcgctgatgatgtaagggaaggtgtagctatcatgcaccttgaaggtgtagatgtgtcaattaccggtaactcaacaaaccctacaagattccagcatccggtagcgggaacctataagaaggaatgtgtccttcaaggcaagaaatacttctctgttgcttcaggcggaggaactggaagaaccttgcaccctgacaatatggcagcaggccctgcttcctatggtatgactgacactttaggaagaatgcattctgatgctcaatttgctgggtccagctctgtacctgcccacgtggaaatgatggggcttattggtatggggaataatcctatggtaggtgctacagtggctgtagcagttgccgttgaagaagctttaaaatag

SEQ ID NO: 187 - DNA, 1407 bp, Methanobrevibacter ruminantium
  source 1..1407: mol_type = genomic DNA
atgtatacatttttaatttgtttatttgcattaatattatcttattttgtatatggtaagttcttggaacgtatcatcggagttgatgaaactgccaaaacgccagcatatgaattagaggatggggtcgattatgtccctatgaataaatacagggcattattggttcattttcttaatattgcaggtttaggtcctattttcggagctattcaaggcgcattattcggaccttctgcattcttatggatcgttttaggtactatctttgctggtggagtccacgatttcttcgaaggggcaatgtctgttcgaaatgacggtctatccatgcctggaataataagcaaatatttgggagatagggttcgcaagttctttgccgttttaataattataacatgcattcttgtggcatctgtttttgcatctggctcagcagatttgctttcaagtttaacaaatatagatattcatatttggctcgttgcaatattcatatatttcctcatagccacattattcccagttgataagattataggtaagatttatccaattttcggagctttgttttttataatggctgttttgcttatttctgcattgatattaaatccaaattattcattgccagaatttacaactgcagggctttatttaactgacaaagccattttcccattcctatttgtaaccattgcttgcggtgcaatctccggattccatgcatcccaagcgccaattgttgcaagatgcgttaaaaatgaaaaggatatgcatatggtattctatggtgcaatggttattgaaggaatacttgcattaatttgggcaactattgccatgtcatttttccatggacagcctcaattagccagtatttatggatccagcccttccattgcagttaaagaaatgtcaatagcattgattggtactgtaggattggttttggcaatcattggtgttgtaatatgtccaatcacatcaggggacacttcccttcgtagtgcaagaataacaattgcagatgaattaggtttaaatcaggataaactaaagactagacttaagatatccattcctttattccttgtgtcttttggattgactttcattgatttttccttggtctggagatatttcgcttggtctcaattgattgtagctattgcagttctgcttgctgcaactgtttatctgattgataataagaagcatttcattgttacatttgctccagccattttctgtacggtggttgctatagcttatatattgcaggcttctgaaggtcttagattggatcctttcatatctaatgttatttctgttatagttgcacttgctttaagcgtgtattttattttaaagtatagaaaacagccaaatactacaacatag

SEQ ID NO: 188 - DNA, 246 bp, Methanobrevibacter ruminantium
  source 1..246: mol_type = genomic DNA
atgggaatattttcattttttaaaaaggataaagataaagaaaaagtagagagtcatgaagaggttcattccattcaaataaatgcagaaaactgtcaaggatgtggaagatgtgtttctgtatgtcctaataatgcatatgaacttatagaaggcaagtctagcttaaaagagaattttacttgcagagattgtaaagtatgtttggcagcttgctcaaatgatgctatcacatttgttaattaa

SEQ ID NO: 189 - DNA, 783 bp, Methanobrevibacter ruminantium
  source 1..783: mol_type = genomic DNA
atgaaaatttttattaatgcagacacttacaaggaaattgcccaaataacaaaagaaaaactgattgaaacagcaaatgaattaggaatagaaatatccgaggacattaatgaagcagatatcatatgttccattggaggagacggtacttttctagaatcttcaaaattagctctgcaaaagccaatcattggaataaactgtggaacattaggttatttgactgatgtgaatcccgaagggattaaaaaagccatgaaagatataattgatgggaattattatatcgaagagagaatgatgcttgaagcagagattatcaaggaaagcggagagataataaaaatgcctccggcattaaatgaaatgtccatttctaaaaatatctttggagtggttagatttgatgccatagtagatggaaaacttataaattcatacacagcagatggaattttaatctgcacacctacaggttcaactgcatataatctttcctgcggaggccctattgtagatccgactgcagagattattacaattactccaatagccccacatacaataataaataggagcatagtcttatcagataagtcaattgttgaaataaagattacagagcttagagagcacacttcatcatatgccctatccgatggaaagtcaagtgaaatagagactggagatatcttaaaaatcaagaaatcagatgcaaaaaccaagattataaaactgaattggcaaagctttattgataccgttcgtgacaagataaactag

SEQ ID NO: 190 - DNA, 1371 bp, Methanobrevibacter ruminantium
  source 1..1371: mol_type = genomic DNA
atggatatagaaggttttgtaagaggaagacttaccaaaggcgaagatgaagaagagcttaagtctatccttgcagagagaataagagaatttaaagacatttcagaagaacattccctcttaatggctgaaagcgttatagatgaagtaaagacaactcttgagctaaacaatactgaagatgagttcttaaaggacatcatcacagttccaaaggcaaatgttggcatgggtaagatgggtgtaggttcccgtggtgcaggtgacttctttgtacatagaaagatagcacaaatcgtaaaaagtacaaatacacaatctgttgtcgaccctaatgctcaagatgatggcggtgttgtcaaggtaccagctccaggtgacgatgtctatataaccactgcagtggatggaatacactcaagattaagcgaatatccatttttaggaggtttccatgtaacaagagctaccttaagggatgtttgtgttatgggagcagatcctgtcgctatcctaagcgaccttcaccttgcagatgatggtgacattggaaagctatttgactatactgcaggtatctgtgcagtttcagagcttattgatgttcctcttgtagctggaagcacattgcgtgtaggtggagacatggttcttggagataggcttgtaagttgtgttggaagtgtgggagtctcacagcatcctccaaccgcaagaaaaggagcaaccgtcggagacattattctaatgactgaaggtgccggaggaggcacaatcactacaactgccctttacaatggctactttgatgttgtatgggatacaatgaatatcagctttgtaaaggcttctaaggcattgtttgatgcagacctggttaaggatgtccatgcaatgactgacgtaaccaatggaggccttaggggagacgctcatgaaatctgtgaaaccactggtgtggggcttgagttctatcatgataagataaagaccactgtagcacctaatgtattgaatatgctggaagacttggatattgatcctttaggagtttctacagattctcttatgcttgtagttcctccagagattgctgatgacgttgttaaaactgtgagcgatgttggagtttacattacagagattggtaaggtggatgatgaaggcagtcctcgccttattaaggaagatggaagtgtagatactttggttcctctatttagggaagctgcttacacaaagattaaaaagttagttggagatacaactcctgaagactttgaaatcatgaaggaaaaagttcaaaaggctgcagatgattctataaggaaaaaagaaagagtcattgattatattttgaataataattag

SEQ ID NO: 191 - DNA, 414 bp, Methanobrevibacter ruminantium
  source 1..414: mol_type = genomic DNA
atggcattagaaggtgcagaaagaatagatgaatttataagcgaagcaaaagtgtttttcttagcaactgttgacggagacaaaccaaaaaaccgaccattaggtttccatcttcttaaggatggtaaaatctactttggtgttggaaactttaaggacgtatacaaacaaatggaagcaaatccttatgttgaaattgtagcccttgtagaaactgatttcctaagatactatggaaaagctgtctttgaagaaacatacgacatggctgatgctatagttgctggaaacgaattcctgcaaggaatttataatgatgaaaccggttttaaattagctattttccacttggaagaggccactgcggaaatccgtgacataaccggtaaaatcaatgaatcatataatttctaa

SEQ ID NO: 192 - DNA, 396 bp, Methanobrevibacter ruminantium
  source 1..396: mol_type = genomic DNA
atgagcttatttaaaaattttattggaaattttaaaaaatctgatgtattggatttagctaagggctttaaattagaatatgaagccaataatttggaaaatatgaaatcgattgtagataaatttgttgattttcatcctgattcctattttgcttcttgctctatggtgatttatataattcaattgtataagaaagatcctttaaaggtgtctccaaatatgcttaataatttaagcattatggaacgcaatataaaattttatgataattcaagcactgactctttagataatgaagagttggaactaaggcaatggtttaaaaaggaagtttatgaaaacgttaaatatatggaatctgcaggattaagattttctgctgatgataaatag

SEQ ID NO: 193 - DNA, 159 bp, Methanobrevibacter ruminantium
  source 1..159: mol_type = genomic DNA
atgcaacttaataaaatttgtttagctgctatcgtattatttgttttattcactattttgaaatttgtgatgaaatggagttttaaattatttgctataggaattgtaatttgtattatccttgcaatatttggattcttcaaaggagatgacttatag

SEQ ID NO: 194 - DNA, 639 bp, Methanobrevibacter ruminantium
  source 1..639: mol_type = genomic DNA
atgtcaagcaattcagataaagatatattaaaagaattaagagatataacaaaagacaaggaaagctggaaatcaaatataaatcatgtcgcagttaaattgaatgatgatttttccctttcagtaaaggcaaaggtcttatggcttcttggagaaatgggtttaaaacacccattggagatagaagaatatgtcgatgacattgcagtttatttggaggatgatcatcctaaattgagggaaaggtcagctaatgcaattggaagaataggcagggctgataagaacttagtaatcaattatatggataaattgatgaaactgagtgacgatgaatcagaaagtgtaaggcatgcattcatctgggcttgtgaaaacatagctgtaaatgctccagaattgttttgtgaaaaattggatatattttatgaaatgatttcagatcctggtgaaaaggttcgcatagaagctcctgaaatctttagggtagttggaaaaagaaatccaagttgtgtaaagccttatttggataaattagagcatatagcagaaaatgatgagaaccctgttgttcgcattcatagtgctggtgcagttcgaattacaagaaaagccttaaaagaaagtgataatgcttaa

SEQ ID NO: 195 - DNA, 693 bp, Methanobrevibacter ruminantium
  source 1..693: mol_type = genomic DNA
atgggctttttttcaaatatgagaaaaccagaaggaaaattaggcaatattcaattaaaatcaatgaataaggaacatactccagtttcattatggggtttaaaacatctagacatttctccggaggatacaattttagatattgggtgtggcgggggaatgaacattaatcgtatggctcagactgcaaagaaggtttatggggttgattatagcatagaaagtgtaaatctttcaaaagaagtgaatgctgactttattaggagcggaaaggttgaagtttatgaaggaaatgtttcaaatcttccttttgaagacaatagctttgatattgtaactgcttttgaaacagtttatttttggccagatattgaaaaatcatttggagaggttaaaagagttcttaagccagatggaatgtttttgattggctgtgaatcaaatggggcaaacaatttagcaatgaagttctttgatcgtgtaatagacatggaactctatgaagataatgaattatatggatttttgaaaaataatgattatggtgatataaccatttatttaagggatggaaaaaacaaacaagagattattaaaaaggatgataaaacctttgtaattgatgatgattatgataatttttctatttcagatagatgggttcaatggatgactataactgctataaaatga

SEQ ID NO: 196 - DNA, 462 bp, Methanobrevibacter ruminantium
  source 1..462: mol_type = genomic DNA
atgttaagtttaattaaagacaataaaggctttttatctcttatagatgctattttatctatttttctaatttttatagttctaatctcatttaatatgattgtagatatggagatgcctagcttatccgaagacaacaatcaattcaagacaagtcaagatcttatggagctgatgtcttcaaagatagatggcagggattattccacattggagcgaatctcatatgttttatcctccaatgataattcgatagcctcaagaagggaagttaagaatattctagatgatttctttagcgctcatctgggttctgactataaatatgtttttatagagactaatcaattaaatggctatgtcttgtcatctgatggtgattattcaactgctgatgaggtttctctagctataagaaactatggaaattattcttataagctttatattttcaaggcttaa

SEQ ID NO: 197 - DNA, 1359 bp, Methanobrevibacter ruminantium
  source 1..1359: mol_type = genomic DNA
atgcttaatgcaaacacttatgtaacagaggaagaaggtatcggcggaactataagaaacagatgggaagacttctatgttgaagagattccggaagtaattccagatggagaaggtccaaacatttatatttggattgaaaaattaggaagaaccacccttgacgttttgcttgatattgcaagagacctccatatagacaggaaaagaatgggctttgctggaatgaaagataaaaaggccatcactcgccaatggatctgcatagcgaatatggattcagaggaacagtttgcacaagttgaggcattagcaggcacaattcataatactgaatttttaaaagtaattagaggtcgaaaaaagttaagaatgggtcagcttaaaggaaataagtttagaattcttgttaaggatattgatggcatggaatcagataacgaagaaactcgtaaattagccattgaagatgctgcaaaaagagcagatgccatcttaaaaaccttggagaagactggagttcctaactactttggctggcaaagatttggaaagccaagaacaaatactcatttggttggagaggctcttattcataatgatttaaaagaggctgtcagacgttatattggaaatcctagcgaagaagaaagtgaagattcaagaaaagcccgacaagcctttgatgatggaaattgggaagaatcccttgaattgatgcatcctggaatgcgctatgagaagatgatgttgaaagtgcttttaaaagaaaaaagaagagcaatcaggaagattgcagaggaagaaggaattgaaattgaagaagtagatgaatccaaagtggaattatcagataaggcttataaaaatgctattcatgcacttccaaagccacttcaaagaatgtttgtccatgcttatcagtcattcctattcaatgctgcagtaagtgagcgtgtagcaatgggtatggataaatatatcgaaggagatattgtcattgataaggaagagagaattgtaagagataagactcctgaggagtttcaggaaatggtatcttcctttgaaataaatcagacttgccctttgtatggtacaaaggttccatttgcaggtggagaagttggcaagatggaagaggaaatcttaaacagctatggattgactagagatgactttgaagtacctaaaatgcctcgtttaggaagccatggtcttagaaggtctatgagattccaggtatgggatgcaagtgcaacagcaactgaagatggtgttatgtgtgagttttccattgataagggatcatatgctactgctgttcttagggaagttatgaagaaggatgtttactag

SEQ ID NO: 198 - DNA, 1206 bp, Methanobrevibacter ruminantium
  source 1..1206: mol_type = genomic DNA
atggaagaacgtactggacttttttcaaatggagttatctggttcggagttgcaatctctgtctcagaaatagaggcaggaatacagcttgcttccatgaacacccttgattccatttggctacctttagtccttggccacatcataggaggcatactgctattttctacaggacttataggtgcacgtcttagattgaatgcaatggagaccatcaaatcaacctttggcaattatggctccaaattcttttccacattaaatgtattgcagcttatagcttgggtagctgtgctgaatgcacaaggggcttcagcattgatgggcttgaatttacccatatccttccctttaacctgcattatcctgtctgcaatcattgcagtatgggtttatgtaggacttagaaggtcatctaagattactaccattatgatgatagtgcttacagcattgctggttattctatctgtaaaactcttaggggtccatatatccaatgctttgcctattcaaaacattaattcaacagcattaagcttttggagcatctttgaaatttcaatagctatgccaatctcatggcttcctgtgatttcagattataccaaagatgtggaaaacccagtaaacggcacattggtctctgcaatagcatataccatagcaagcctttggatgtattttttaggcatagaaatagttggcattggaacaacaagcattgcacaatcaatcctccttgcaggtcttggagctcaaggagtgataattttagtgctttcaactgtaacctccaattttgtagctgcaaattcagcaggggaatcagcaaaggccatctttaatagaatcaatccaaagattgcaggagttgtagtgagtgcaataagtgcaatacttgcaatatctggaattatggatcattatattggattcttatatcttattgcatctgtatttgctcctatggctgcagtgctccttgtatctttctatctttcaaaggaagagactggaaatgctagaatatggtattggaacatatttgcatggcttgcaggatttattgtatatcaagcaactgtaaacctggattcaatattcctaggacctactttgcttgcagtgattgtatcagcaatacttgcgtacattccgatattgcttaaaaataagtctaaattgcctaatattagcaaatag

SEQ ID NO: 199 - DNA, 843 bp, Methanobrevibacter ruminantium
  source 1..843: mol_type = genomic DNA
atgaatgaaacaataaaaaccttaacaattcaagacatatcctgttatggacaatgctccatcacagttgcattacccgtaatttctgcttttggaatagaaacagcaatcctcccttctgctgtactctcaacacacacttcaggttttactgattttactgttagagatttaacagaagatcttccagaaatccgtaaacattgggaaaaagaaggaatatttttcgattcaatttacactggattcattgcatcagcagaacagttagattacataaaagacatcatagactcaagattaaaagaaaatggccttgtatttgttgaccctgccatggcagaccatggagaattctataatggatttgaccaagaatttgcagataaaatgggagagctttgtaaattaggtgatttcattctccctaacacaactgaagcatgctttatcctacataagccttggaaagaaagctttacaaaagaagaaatgctagagatggctaaagagcttaaagcattcactaaaagatatgtcatattaaagggatatgaagaagaagacaagatgggaatgatcgttttagataaaatagaagacactattgatatagtttacaatgaaaagataaattatgtatcccatggaactggagatgtatttgcttcatcatttgtaggatcaaccatgttaggtaagtccccttcagcagcagcaaagatagccggagaatttactaaaaaggcaattgaaaagaccattggcgatgagactcatacttatggagttaaattcgaacaggcaattccagagttgtatgatctgttaaaatcaatataa

SEQ ID NO: 200 - DNA, 675 bp, Methanobrevibacter ruminantium
  source 1..675: mol_type = genomic DNA
atggactggtcccctatttttatctcaatgaaaaccgcaagcctatcaatctttataacctttttcttaggtttgattgtagcttggcttctcgttaagataaaaaatgacactacaaaaattgtactggatggcattttcacacttccaattgtattgccacctacagtagtagggtttttcctgctttatatttttggtatcagaggacctataggaagcttctttttagacttctttgctgtaaagatagcattttcatggcctgcaactgttatagctgcagtggttatgtcttttcctttaatgtatcgttctgctagaggtgcatttaaacaagttgattccaatttattggatgccggccgtacattaggtatgtctgagtggaagatcttttggaaaatcttatttgcaaatgctttgcctggaatcataagtggcggaattcttgcttatgcccgtggcttaggagaattcggtgctaccgcaatgcttgccggaaacattgccggacaaactagaacactccctatggcggtttactctgaagtggctgctggaaatatgggaactgcctttgattatgttatattcatagtggccatatcatttatagcgatttttattatggactatttttccatacgcaaggaaaaccaatggaaaaactag

SEQ ID NO: 201 - DNA, 825 bp, Methanobrevibacter ruminantium
  source 1..825: mol_type = genomic DNA
atggattctaagaaaatattaatgattgctgtagttgctttaatagcaattgttgctgtaagttcatgctctgcaggtttccttgactttttaggaggagacaacgctactgacgacagtttaaatggaaaagaagttaatttagctgcagcagcaagtctaaaaaatgtatatgatgatgaattgattccaatgtttgaagcaaaatatcctggagtaaaagtaactccaacttacgcttcaagtggtgacttacaaactcaaattgaaaacggtttagaaacagacgtattcatgtctgcttccaacaaacaaatgaacgctttagctgatgaaggtttaatcgacaatgacaccaaccttcaattcttagaaaataaagttgttttaatcgtacctaaagattcagacttaaacatcacatcattcgatgacttaaaagatgtgaaaggtaccattgctattggtgacccagaatctgtacctgcaggacaatatgctaaagaagcattaaccaacctcggtatttgggacgctgttgaatctaaattctctttaggaactgatgtaactgctgtattgaaccaagtagctcaaggatctgctgaatgtggtattgtatatgctactgacgctaaatccaatgatgatgtaaaagtggtttgtgaagctcctgaaaactctttaaacacttcagttatttatcctgtagctatgattaaagacgctaaagatgcagatgcagcaaaagcattccttgaattcttacaaacccaagaagctaaagacaaatttgttgaatacggatttaccattcacgaataa

SEQ ID NO: 202 - DNA, 390 bp, Methanobrevibacter ruminantium
  source 1..390: mol_type = genomic DNA
atgattgaatgcagaaatatttctaaaggaaaagcagaaggggaattaatagtatcagatgaagcaatcagctttttaggaggcgtagatcctgaaactggtgtggtaattgatcctaatcatgaattgaaaggccaatccattaaagataaaatactttttattccaggtggaaaaggctccacagtaggatcttatgtaatatttcagatgatgaagaataatacagctccaaaagcaattatttgccttaaggcagagcctattatagcaacaggagctataatgtctgatattcctatggttgattctccatcaagtgttgaagaattggttaatggccaaatggtagaagtagatagtgataatggtaaaatagagattttatag

SEQ ID NO: 203 - DNA, 1239 bp, Methanobrevibacter ruminantium
  source 1..1239: mol_type = genomic DNA
atgccttctttatacattaaaaacgtaaatattataaatccattcagtgaagagcctctagatgaaaggcatgtcctaatcaaggacggcagaatcgaatcccttcatgcagaggagtctgcattatatgccaatcatatagtcttggatggtgaggataattacctccttccaggctttatagactcccacgctcatgtcatggcaaacgggtttcataaagaggatacaatgaaaaatccacttgcattgcacttttacaatgctatagagaatatgaaagctacaattgatgctggggtaacaactgtacgtgacactggacttgcagatattggagtaaagatggcacaggaaaggaagatattccctgctccaagattaaacatttccattaagccattggctatcactggaggtcattttgacttttatctcaattcaggctttgatatggaacttgcatatcctggctttccaatcggtacctgcgatggggtggaggatgtcttgaagaaaacccgtgaggttattagggctcgtgctgactttattaaaatcatggcaagcggaggaattctatctcctaatacaagccctgaatttgcacagttcaataaaaaggaattgaagacaatcgtctctgaggctgaaaactataaccttaaggtagctgcccattgccatagcttagaaggaatacaaagatgtgtaaaggctggaatcaagtccattgaacatggtactttcattgatagaaagacatcagagctattggctaaaaagagaatctaccttactccaaccttaatcgttcatcaaacccttattaaggaaggtttccctgtttgggataattttgcagatgataaggttaaaaagcttaaggaagtcgttaagattcaaaaggaaaatatcgaaacagcttaccagtgtggggttaagttcctgatgggctctgactgtggtgtgattgaccatggaagaaaccttggagagttaaagcaattggttgatattggactaagccctcttgaggctattcaagccggaacaatagaaggtgctaaattcttcaatcaagagaatgacttgggatccattgaaacaggtaagattggtgatgttattttagttaaagagaatcctattgaaaatattgggtctttagttgataatgataatattttagctgtaattcaggatggaaaaatacttaaggataaacctatctattaa

SEQ ID NO: 204 - DNA, 249 bp, Methanobrevibacter ruminantium
  source 1..249: mol_type = genomic DNA
atgaatgaagcagattttattcaagaaattatgaaacaagctaacttaagtgaagaccaaggtggccaagtcaacgatattttccaaagcacctttttagctggaaataagaacaaagatactattgttaacttaattgcagaaaaattaggtgttgatgcagcacaagctgaacaaatctatgatatcgccataggtcttcttgctagtggtgttttaagcaaaataaaaggcctttttaaaaaataa

SEQ ID NO: 205 - DNA, 207 bp, Methanobrevibacter ruminantium
  source 1..207: mol_type = genomic DNA
atggcagaaaaagaattaaatgttgtcggtatgcactgtccttcatgtgtaatggctgttgaactttccatgaaagatttaaatggtgtagacgacgctaaagcaagtttagacactaactctgtaacagtagaatatgatccagacaaaattactgatgcagacttagttggcgctgtaaaagaagcaggatttgatgtagaataa

SEQ ID NO: 206 - DNA, 2481 bp, Methanobrevibacter ruminantium
  source 1..2481: mol_type = genomic DNA
atggctcaaaaagaattggatattcctgtagatggcatgcattgttcctcttgttcccttctagttgaaaagtcgctaggtaagcttgatgaagtggaatccatcaatgtggacctaaacaccaataaggcccatatggtgttaaaggataatctctctccagaaacaatcgataagacagttgaatctgtgggatttaccgttccaaaggaggaagtggtcattcagattgctggaatgcattgtgcctcttgcgtgaacaatgttgaaaagttccttcctcgtgtagatggtgtggttgaggcaaatgccaatctttccaatcagaaggttaccatcacatactatagggacatgctcaatctaaaggagattcaaaagacaatcgaaatgcttggattcgaatatatcggccttgacggcgaactggacataatggatgaagaggaaaggtatcaaaaggaccttagaggcaaactatatagaatcatagtaggtctggtctttgccggtatacttatggcaattatgcatttccatattacaattcctccattgactatgggacaactctctttaatcatagctattttcccattctgttatgtaagcatgcctatcttaaaggctggatggaactccttcaagcataagaacctagatatggatgtaatgtattcaatgggtattcttgtggcatttgtatcaagcgtattaggtacattcaatataattctcgactcaagttttatgttctatgaatctgcagtgatgttgccttcattcctcactataggacgttatcttgaggcaagagcaaaaaggaaaacctcatcatcaatcaaggagcttattggccttcagccaaaaacagcaacattaattacaagtgatgaagagggcaatagcatagaaaaggaaatagatattgaggatatcaatattggagacatattgcttgtaaagcctggtgaaaagatacctgcagactctattgtagttgacggtgaaagctatgttgatgaggctatgattacaggagaaccggttcctaagcttaaaaaggagggaatcgatgttttctcaggtacaataaaccaagatggtgcattaaagatagaggctcagaagattgggtctgaaactgtcttatcacagatcattcaacttgttgaaaaggcacaagggtcaaagcctcctgttcaaaggcttgcaaataagattgtcagctggtttatacctgttatccttacaattgctatagtcgtattctgtctatggtactttgtagcaggtgcaggcttgttgttctcactaacatgccttatctctgttcttgtagttgcatgtccatgttcccttggccttgctacccctacagcagttaccgttggggtcggtagggcagcagaatatggtatactaatcaagaatggagaaaccttggaaagctctaaggatgttgatgtatgtgtattcgataagactggaaccattacagaaggcaagcctgaggtagcagacattgaaacatttgatatggctggtgacaagttccttcaagtcctatcaagcgttgagaataattcaaatcaccctattgcaaaatccattttaaacagatttaagagtgataatcttaaattaacagaggaaggcaaggatgatttggctttacttgaagtaagtgactttgaaaacataactggtaaaggtttaaaggctaatgtggtagtggatgaaaataattcttcagttctcgccggaaaccttaaacttatggaatcagaaggtgtggaagtcacagatgaagtattagataagttcaatacctttgtgtccgaagcaaaaacaaccattgtaatggcaatagatggcgagataaagggaataatcaccttaatggataagataaaggataactccaagtcagctattgatgagctccataagatgggcatagaaacctatatgcttacaggagacaatgaaaagacagcttccactgtagcaaatgaagtaggcatagataatgttatagcaaatgttcttccaaacgacaagttggataaggttcaagagcttcaaaaggaaggaaaaagagtcttgtttgttggtgatggaatcaatgatgctccagctttatcccaagcagacgtaggtgtggctatgggaaacggtaccgacattgctatggaaagcggtgatattgttattatggaaggagacttagaaaacgttgtagcttccatacagttctccaaaaaggtaatgacaagaatcaaggaaaaccttttctgggcttttgcatataatatgctcttggttccagcagctgcaggtttgctattcctattatttggaatagtatttaagccagaatgggctggacttgcaatggcattaagttcagtgactgtaatcagcttatcattgttattaaaacgttatgtgcctccaataaaaaggaataaggtttaa

SEQ ID NO: 207 - DNA, 1479 bp, Methanobrevibacter ruminantium
  source 1..1479: mol_type = genomic DNA
atgagaataaaatacctatcaaagcaagatattaaaattatcttacattatcttggatacatcatgatcggcataggggcaatactgctatttcctctgccaatcgacttattctatagagaattcaattatgtttatggagtaattccgcctttaatttcaatcatattaggagttattttttctcaaggattcagagaatatgacaaacttaaattcaagcatgggatgatcatatcaagcatatcatggctatgggcaggtcttgttggagcaataatcatgatgctgattttagatgtctcattcgtagacgctttttttgaaaatatctctgcatggaccggaagcggattgaccatgttcagcgatgttgaatccttgcctatgtcaatactatttttaagaagtgtggaacaatggatcggtggacttggagtggtaatcatcttcataagcctactcattaagcctggaacttctgcattcaagctatacaagtctgaagcaagggaagatagaataaagccaaatataaaaaatacccttaaaaaaacaatgcagatatatgccatttataccgttataggggtcatcttatatcttatagcaggacttcccctctttgattccataaatctgacattcactacaatatccgccggaggaatgtcaataaagaatgcaaatatcggattctaccaaaatgatattgtttatataatcactatctttctaatgatattaggggctacaagctttacagtccattataaaatggctaaaacaaaaggaaaagccatattaaaggatatacaattccaactattgattgtaagcatcatacttagtgcaatagcaattgcaatcattacaaaacttgctcctatggatgtggttttccatgtcgtttctgcaattacaacaacaggagcaaacattgcccctccaagtgagatggcagcatgggctccccctgcactgataatcataatagtcttgatgctgatgggtggttcttcaggttccactgtaggtgctataaagcttgttagagtaattacactcttaaaaagcacacatcttgctgtgacaaatatagtttctcctggaaggtttgtaaagatcaagatatctggaaaatcaataaatgaaggagaaatgaaagaggcatcttcatatatggcagtttatatattctttttagccatatcttggataataatgacttattatacaaatgatccattcaatactttatttgatgtggtgtccactttaggtaatgtgggattaagcacaggaataatcagcggagagcttggcactattccaaaggtagtgttgatatttttaatgtggctaggaagactggagataattcctatacttttaactatccaaataggatttgagacatttaaccaaagtttaagatttgttaaaaggagaatgatgaggaaaattaagcctaattaa

SEQ ID NO: 208 - DNA, 1656 bp, Methanobrevibacter ruminantium
  source 1..1656: mol_type = genomic DNA
gtgttttaccccaaaatagaagaagtaaaggaaatagcaaaggatgattcgtataaaagaatcccaataagctatgaaatattttcagacactaagacttcaatagaagtcttaagaagacttagaatcttaagcaaccattgctacatgcttgaaagtgtagaagattctaaaaattggggtagatacagttttcttggattcaatcctatccttgagttgacttgtcaggatggagaactggtcattaaaggaaaatcaagcttcagtgattgtggaattgaagatgaaaaagataaatgctttagcataaaaactgataatcctggagaatatattagagaaataatagaagaaaacaaatctccaaagcttgaaaacatccctccattttcaggtgggcttgtaggctatttctcatatgattatatcaagtacagcgaaccctcactgatattggatgcacagaatcaggacgcctttaaggatgttgacttgatgctctttgataaggtaattgcatttgacaactacaagcagaagatagttgtaatcgttaatatgaaagtaaacgatgaagatatgctaaaaaatgaatcaatcgaggaaaactatcaaaaagcctgcaatgacattaaggacatagtgaatattataaaggcagataatatagtggatctcttgaatgacgactttaaagaccagctaacaaacaagaagacaatcaagtcattagaggaaatgaaaggactaaaaaccttagaggaattggacagatgcagaaaggaaattaccaaacaccttccgattgaactcaagtctgatttcagatatctcttttcaaaagaagaatactgtgacatggtggagcgggcaaagcattacataagagagggagacattttccaagtggttctttcaaacagaatagaagcagacattgaaggaagcttgtttgatgtatatagggttcttagaacaacaaatccttccccttatatgttctatttctccagtgatgatatagaaatagcaggtgctagtcctgaaactcttgtaaagcttgtaaacaatcaggtttacaccttccctcttgctggaacccgtccaaggggaaaaacagatgaagaagacagacaactggaagaggaactgttggcagatgaaaaggaaagagcagagcataatatgcttgtcgaccttggaagaaatgacataggcaaaataagccaaataggctctgtcaaggtaaacagatatatggatatagtaaggttctcccatgtgatgcacataggatcaactgtagagggaattttaagggaaaattatgactatctatccacaatagattcaatcctacctgctggaaccttatctggagcccctaagataagggcatgtgagataatcaatgagcttgaagacaataaaagaggaatctatggtggagcaattggctatattgacttaacaggcaatctggacacttgcattgcaataaggatagcttttgcaagagacaataaggtatttatcagatcaggtgcaggaatagttgcagatagcgtccccgaaagcgagtttgtagaatctatcaataaggcacaggcagttatggatgctttaagattagcagatggagggatagaatga

SEQ ID NO: 209 - DNA, 627 bp, Methanobrevibacter ruminantium
  source 1..627: mol_type = genomic DNA
atgattctattagtagacaattatgacagtttcgtttataatttatatcaattcattggagaggctttagcaaatataaagggatacgatttagccagcaaaggagatttgtataaaatctatgaagagattaaggtaattcgaaatgatgaaatgactgtagaggaactaagagagttaaatccagattatattatcctatctccaggtccaggcaaacctaaggatgcaggaatctgtaaggatattgtaaaagagtatattaattcagatgttccaattttaggtgtatgccttggccatcaagccatttgtgaagcccttggcaccaatatcatacatgccaaggaattgatgcatggaaaaacctctattattgaattggatgaggataagatattcaaggacatttcagacccaattcaaatagcacgatatcattccttggctgtagagaatgatagtttgtctaatgatttgattgtattggcaagaacagatgataatgagataatggcggtaaggcataaaaatgctaatatttatggtctgcaattccatccagagtctgtattgactcctgagggattaaagataatagagaattttttaaatattaaaaattag

SEQ ID NO: 210 - DNA, 1008 bp, Methanobrevibacter ruminantium
  source 1..1008: mol_type = genomic DNA
atgattaaagaagctattttaaaagtatacaaagatgaagatttgacttatgatgaagcttatgcaactatggatgaaatcatgagtggtgaggcaagcgaggttcaaatgagcgcttatctgactgccatgtctatgaaaggagaaacaattgaagaaatcacagcatctgctgaagccatgagggctcattgtgtaagattattaaatgatgaagaggttttagagattgtaggaaccggtggagacggttcaaatacattcaacatatcaacaacctcctctattgtcatttccgcagcaggagttcctgtagccaagcatggaaacagatcggcttcaagcaaatgcggtgcagcggatgtattggaagagttaggagtcaatattcatataagtcctgaaaaaagcttagcatgcctaaaagaaatcaatctatgtttcctgtttgctcaaaactatcatctttcaatgaaatatgttgcaggggtaagaaaagagctttcaatcagaacaatattcaatattttagggccattgacaagccctgcaggggcttcaatggaagtcttgggagtttatgaaagggagcttatagagcctcttaccgatgtgttgaaaaatcttggagtaaagtctgcaatggttgtctatggattggatggaatggatgaaatctctgcaagcgataagactgcagtatgcgaacttaaggatggaaagacaagaacatatgaaatttccccagaggatttctctatggatattgcatctaaagaagaccttgttggtggagatgcaaatgaaaatgcagaaatcacattggctgttctaaatggtgaaaagggaccaagaagaaatgcagttttattaaattcagctgcaggtctttatgttgcaggtaaggtagattccatagaagatggagttaagctagcagaagagataatagattctggaaaagccttaaatcagcttgaaaagttcattgaagttacaaacagataa

SEQ ID NO: 211 - DNA, 777 bp, Methanobrevibacter ruminantium
  source 1..777: mol_type = genomic DNA
atgttaaagaagatagttgctaaaactgaagagagattaattgaagctaaaaagattaaatccttagataagctaaaagaggaagtatcaaagttagaaataaataatgaattcccttttaaagaagccttaaaagaccctgaaattgctatcattgctgaagttaagaaagcatctccttcaaaaggattaattgccgaagactttgattatatcaagatagcaaaggaatatgagcaagctggagcttctgcaatatcagtcctaacagagccatatttcttccaaggatccaacgatttcctaaaggaaatttctcaaaatgtatcaattcctcttttaagaaaggattttaccattgatgagtatatgatatatgaagcaaagatattaggtgcttctgccatccttttgattgtttcaatacttgataatgttcaattaaagaattacttggatttggcacatgatttaggtctctccgcaattgttgaaacccacgatgcagatgaaataagaactgcagtagatgccggtgcagggataattggagtaaacaatagaaatttagctgattttacagtagatattgaaaatagcatcagattaagaagtcttgtaagcgataagatcctattcatttccgaaagcggtatcaaaacagctgaagatgtaggcagactaaagaaaaacaatgtggatgcagttttaatcggtgaaactttaatgagaagtgatgataagaaatctatgattttggagttgaagaatggttag

SEQ ID NO: 212 - DNA, 654 bp, Methanobrevibacter ruminantium
  source 1..654: mol_type = genomic DNA
atgcttaaacttaagatttgtggactaagaagaaaagaggatatagatattgtaaataaatacaatattgattatataggtttcgtatttgcaggcagtcctcgtaaggtatcatatgagcaagctaaagaattatctgctcttttaagagaagatattattcctgtaggtgtatttgtaaatgaacatatgaaacttattgtagacttatacaaggaaggaataatcaagattgctcagcttcatggagatgaggatgaggattatataaagaacctaaaagctaaatcattagagcaaactggccatgaaataccagttattaatgcaattgaaatcaataatgctaataattatgataatttcaatgataagttattggagtggcgagattcagtatctgactattttatcttagacagtggcaaaggctctggaaagacatttgactggagtcttcttgataaaaatagcgaattttttaaaaattccatctttttagctggtggtttaaacagtgaaaacttagactctgctataaaagagttcaacccatatgcagttgacttaagcagttcagtagaaacagatggctttaaggatgaagagaaaatcaaagagatagttgaaattgtagaaagatatagaaattaa

SEQ ID NO: 213 - DNA, 1185 bp, Methanobrevibacter ruminantium
  source 1..1185: mol_type = genomic DNA
atgagtagaggtcgatttggagttcatggtggacaatacatgtctgaaaccttaatgaatgaacttcttaacttagaaaaacaatataatcattttaaagaagaccctgaatttatagaagagttaaacactcttttaaaggaatatgcaggaaggccttctttattatactatgcaaaaagaatgacagaggatcttggaggagcaaagatctatctaaagcgtgaagacttaaaccatactggtgcacataagataaacaatgttcttggacagtgtctgcttgctaaaaagatgggcaaaaccagagtgattgcagaaaccggtgcaggtcagcatggtgttgcaacagctactgctgcagccttattggacatggaatgtgaagtctttatgggtgaagaggacacaaagcgtcaagcattgaatgtattccgtatggaacttctaggagctaaggttcatacagtaacaacaggctctaaagtccttaaggatgcagtaaacgatgcttttagagaatggatttcaagagtggatgacacccattatgtaataggttccactatgggtccacatccatttccaactatagttcgggactttcaggcagtgataagtcaggaaatgaaagaacagattctagagctagaaggcaagcttccaaatatggttattgcctgtgtcggtggaggaagcaatgcgatgggttcattttacaatttcctggatgatgaggaagtggagctggttggagttgaagctgcaggaaagggaatagacactgaataccatgcggctacaattgcaaaaggagagcttggaatattccatggaatgaaatcctatttctgccaaggcaattatggtcagattgctcctgtatattcaatatcagcaggtcttgactatcctggaattggtcctgaacatgcctatttgcatgatataggaagagcaaaatatgtctcagctaccgacgatgaggcagtggaagcctttgaatacctatcaagaacggaaggaatcattccagcaatagaatcctcccatgcaatagcccatgcaatgagggttgcaggagatatggataaggatgatataatcatcattaatgtttcaggtcgtggagataaggatgtggcagctattgcccgatataagggagttgaattatacgaataa

SEQ ID NO: 214 - DNA, 783 bp, Methanobrevibacter ruminantium
  source 1..783: mol_type = genomic DNA
atggagaaagatataaagattagcgatgcatttaaagatggaaaagctttcatcggatttttaaccgctggagatcctacaattgaaaagacagttgaatatgtgctggcaatggaagaggcaggttgcgaccttgtagagattggaattcctttctcagaccctgtagctgaagggccagtcattcaggaagcaaatataagggcactatcaaacaatacaaacactgatgatgtctttgaggcaataagacaaataagagaaaagtcagatgttcctttagtatttctaacttacatcaatccagtgttctattatggatatgacaagttcttcaaaagatgccaggaacttaatgtctgtggaataatatctccagaccttccatatgatgaaaaggatgagatattggaggtaacaaagaaatatggtgttgatataattagcctgattgcacctacttcaaaggaacgcatacaaatgattgcaagtgaagcaagtggatttatctatgttgtttcatcattaggagtcactggtatgagaagtgagattaggacggatttaaaatcaataattagtgatataaaggaagttactgatgttccaacagctgttggttttggtatcaacactccagaacaagctaaaaatatctcaaaagttgcagatggtgttattgtagggagtgcaattgttaatattattgcagagcatggggaaaatgcaagagagcctcttgcaaattatgttaaatcaatgaaagatgctatttccaagtag

SEQ ID NO: 215 - DNA, 1389 bp, Methanobrevibacter ruminantium
  source 1..1389: mol_type = genomic DNA
atgcaaggtaaaacactagacacaagaacacgcaacttaatactcattctatttttaataggcgtattcatgggctcattggacacaggaataattggacctgtccttccctcaatcgaacagagcttccatctgacaagccgagaatcaagctggatatttacattatttgtaatcacattcatgattggttctccagtaatggccaaattttcagacttctatggaagaaaaaagatattcatccttgacgttcttctttttggaataggatcttgcctaatagcagcatccataagcatagaattaatatttttaggcagactcatacaaggattcggctgtggaggaatattcccagtagcgggggcatttgtaggagacggattcccattggaagagagaggaaaggcattgggaattcttggaagcgtatttggaatatcagcaataggagggcctcttgtaggagcagcattaatcccctatggctggaactggtgttttacaataaacattccaattgcaatatttctaattatctttgcatggtacatactgccagactcagataacgatagaaaactaaagatagactatttaggaatactaatattaagcttgctagccatattcttatcctacgggcttaatcaaatagactcaagcaattttatagcgagcctactctctctaaatgtacttccattcttagtaatattcataattctaatcccaatattcctaaaggtagagaaaaaagccgaagagtcaatcgtgccaatccatatgctaaagaataaggaaatatcaattgcatgcatagaaaccttatgctatggaataatctactcttcagcaattttcataccatcactggtaatcctttcaatgggattggacgaccagcttgcaagccttatgctgattccaatacttggagcaaatgcagttgcagcaccgattcttggaaaaatcctggataaaacaggctcaaagaagcttatggcaatgggaacaatgattcttgcaatagggcttattgcaattgcaatctatccaagcaatctaatattcttcataatagccggatgccttattggagtgggacttgtaacaataataggagcgccgttaagatatatagtcctcaccgaagcaaagccatatgaaagaggagcaggccaagccatagtaaatatgctatcaagtgcaggacagctgataggaggagccctgattggaggaataatcgcatcatttacaggaattttaggctatcaggtcagtcttatcatagctgcaatagttgcactgattgcatttgcattcaccttaagattaaaaggccgtgatgagcagatagctactatgaaggccaatcaataa

SEQ ID NO: 216 - DNA, 1365 bp, Methanobrevibacter ruminantium
  source 1..1365: mol_type = genomic DNA
atggcaaatgaaaatgtagagctaatgagaggagcaccggagatagcagttaagaaactggcaattccaatcatgatttccatgctcctaaccgcatcatataacataatcgatggaatattcgtagcaggcttaggccaggcagcaattgccggaataggctttgtaaccccaatattcatgatactaaacggtgtaagcgtaggtcttggaagcggtgcaacaagcagcataagtcgttttgtaggggctaaaaaccacgaaggagcaaacaagtcagccacccatgccctattgatattccttatagcctcaataatcctaacaatcatattcctcttcatccaagaacctctccttagaacatatggagcaagcggacaatctctagctgaaggactaaaatacggaagccccctatttctaggactcttcacattcatgtttgcaaatggaggaagcggaattctccgtggagaaggggacatgaaaagggcaatgtatgcagtaattgtatctgtaatattaaacacatgccttgaccctatcttcatctacacattaggtatgggctcagcaggagcttcccttgcaactatagtcagctctgcaggttcagccatagtcataatgtattggatacttataaagaaagacacttgggtccatgtggagctaaagaacttcaagttcgattcaaatatagcaaaggacattctaaaagtaggaattcctgcttcaatggacatgttcatgatgtcactagctgtcagtctttatctaatattcatctcaacaataggaggagaattcggcatagctgcattcacatcaggtcaaaggctatacctatttgcaataatgcctctaacatcaataggaagcgcagtggcagcagtagcaggaagcgcctatggagcaagaaacggagattacctatcaagaacacatatttacggcgctaagtttggaatagcctttggaacagcagttacaataatccttatagcctttgctccacagcttgcaacaatatttgcatacactccagaaactgcaccattagtccctgaaataacccaattcttaagaatagcaagcttatgcctcccactgacaggagctggaatgtgttcaagcttcctataccaaggaataggaaagggaacaatcagcctcatgtggacaataataagagaggtaatatttacagtaagcgcaacatacatccttggaatagttctaggatggggattggttggaatctggactggacttgctataggaagaataactgcaagtatattaaacttcacatttgccagatttacaatcaagaagattagagagaactttggcacataa

SEQ ID NO: 217 - DNA, 414 bp, Methanobrevibacter ruminantium
  source 1..414: mol_type = genomic DNA
atgccttttattgcattaatacaccacatatcccaaaataaactaagatatgcaagaaaaaaccctaaccatatagacatggttcatgagggtcgctatctaatggagatacacaaaagaaagaatttatcccaagatgatcttgcaaacatattcggtcaaagcaaaggaacaatagcaaaagcacttagaaagttggaagataagggatatgtagagagaatcattaaccaaaacaatagaagaaaatacattcttaaaacaacacaagaaggagaaaaactagctattttattagaagaagatttatcaagctgggaagaagctgttggaatagacaaactagatgatgaaacaaaaaatcaattaagaaagatagctagaaaaacagaagaaatactaaaagaagaataa

SEQ ID NO: 218 - DNA, 684 bp, Methanobrevibacter ruminantium
  source 1..684: mol_type = genomic DNA
atgattggaaacgattgggacaatgcattggaagatgaattcaataaagactacttcataaagataaaggaatttgtagaagccgaatacaaaacaaaaactatctatccacctaaagaagaagtcttcaatgcatttaagttatgcccattagacaatgtaaaagtggtaattttaggccaagacccataccatgaaaagggacaggcccatggccttgcattctccacccctgaaggccatccaatcccaagatctcttaaaaacatctttaaggaaattaaagaagagtacaactatccaattccagattcaggatgccttgaatcatgggcaaagcaaggagttttccttctaaacacagtccttacagtggaggaaggaaatgccaactcccatagcaaatgcggatggcagacatttacagacaatgtaataaaaatattaaaccaacaagattcccctatcgtttttctattatggggaaaacaggcagaattaaaaaaagaactcattacaaatcctaatcatttagtactaatttcttcccacccatcaccattctcagcaagaagaggattttttggatgcaatcatttcaagttagctaatgaatttctaaaggacaagggcttagaagagattgattggcaaataaaaaatgtgcagaccactttgatataa

SEQ ID NO: 219 - DNA, 732 bp, Methanobrevibacter ruminantium
  source 1..732: mol_type = genomic DNA
atgaaatatctaattattaacggttccccaaggaagaaaaacacatgggccatggtaaagcaagctaaaacaaacctagaaggtgaatttgaagagattcaattaatgaaaacaaaaataccaatgtgcaatggctgctttaaatgcataatggaaggggaagataaatgccctcactttgaaacagtacatccaatcgtagaaaagataaaagaagctgacggactcataataacaagcccagtttatgctatgaatgtcacaggacttataaagaacttctttgaccatactgcatatatctaccacagaccagaattctttgataagaaagctctaatcatagtatcaactgcaggggcaggtcataagaatgtagccaaatatatggatgaaacccttagacattggggatttaataagaaccataagataacttatgcctgcggcggaaaagacacaataaacacagaagagataaataagacagcgcagaagttccaaaaggacgttagctccaaaaaactccactcccctaaatttatggatattgtattttacaatgtttggagagcaatggcagtaagtaaagatccaataaaagcagataaggaatattgggaagcaaccggacttgtaaattatgattttgcaccaaatgtaaaattaggattctttaaaggaatatttgctaaaatagtctttgccatgatgaaaaaagtaattaaataa

SEQ ID NO: 220 - DNA, 1344 bp, Methanobrevibacter ruminantium
  source 1..1344: mol_type = genomic DNA
atggctaaaaagaatacaaaagaaaagatatttgactcttcaattgatttattctcccaatatggatatacaaacacatccatacgacaaatcgccaaagaagtaggaataaaggaaagctcaatctataaccactaccaaagcaaggaagcaatattggaatcaatattaaactattatatcagcgaaatgctaaaggaagaagctcctattatgcaatccaacgacaatctggatttaggatttgaatatttctataagcagggcagcgacagattcctatcaaaactctctgaagagagaatgatgaaaatcacaagaatatttctggtaggatcgtatcacaatgaaaagatgaaggcttttgtaaaggaaggaatcattgactatgcaataaaaggttgggaagagctgttcaatctaatgaaagaaaaagaaatcataagaaaagatgcaaacagcaaacagcttgcagaatctttctattcatatggaatattcctattatatgaacatttcatattcaactatcctgaagatgatgaaaagttcctaaaggacttcgaaagaagaacaaccgatcatatgaagataatatttaactcagttaaaataaacaatgaagaatctaaaatagacaataataaaaacaatccatcctccaatcacgataaagaaaacaaagaattagaaacagaaatcatgagattggaagaggaaaaggactacaaaaaagttgaaaatcttgtaagagatgcattttggaacatatatcgtccaggagcttatgaacactttatcgtctacaatctaagagaagacccaagcttcataaaggacctggcatacattatagaggaagatgatgaaataataggacatataaactattctaagggaaatctgaacctttataagaaaaacaatcaaggaatggagaagataaacgattggaatgaggaagcagttgttcttggcccaatagcaatcaatccaaaataccaaaaccagggatatggattcagattgataaagcataccttaagacttgcaaaaaacaagaacattccatatgtctttgtaataggggatgagaactattataacagatttggatttgaaagcgcatctaaatacaatctatttctggagggaacagatacaagcgaggaaaatccattcttcatgataagaatatttaaagacctttttaaagacaaggactacgacagaggaatcttctacaatccaaaagtctttaacgtcagccaagatgacgtagataaatttgatgaaaactttgagtataagcaaaagagggttcaagaaggacagttggaatga

SEQ ID NO: 221 - DNA, 1029 bp, Methanobrevibacter ruminantium
  source 1..1029: mol_type = genomic DNA
atgtttgatgcaaagtttcaatataccaataaaatcatcaataatttgatggaaatttccaccatcaaggaatttattttgaattcccaaattttgccttcctatgacattttactaagaaataaagcaataatcacatcttcttataattcaacatccattgaaggaaatccattggattttaaacaagtaacaaaattatttaatttaaaacaggaaaataaattagatgagcttaaattaaataaatctgaaatagaagttttaaattactttaaaacacttgaaaatttagataactatgaaaaaattgatgaagaaactattttagatattcataaaaatatcactgaaggaacccttaaagatcctaatatggcaggaaaattcagagattctccagtagtaattgggaatataaaaacaggccaacttaattatgtgcctccaagccctattaaagttccttatttaatcagggaattattggattgggcagacgttcaagaggatttaaatccaatcattcttgcaggaatcttccactatgaattcgttagaattcatccttttgtagatggcaatggaagaaatgcaagagcattagctactttaatacttcttttaaaagattttgacataaaaagatatttttcccttgatgaatattataatcaggataggcaatcctactacaatgcattgcaatctgcagataagtctcaagatttaactgaatggctagaatatttttccacaggatttttagtttcattatccaatgttaaaaaggatattgaaagcatatcccgttttgatataaaaatgaatggcaaaattaaattaaacgaaaaagagattaaaatattggagtttattgaaaaaaacaattccataaaaaataaggaagttcaggatctgcttaacttatctgcccaaaggtcccatttttatattaatgaattagttaaaaaaggattgattaagtcaaaaggcaaaggcagaagcactgtttatatatttaaatag

SEQ ID NO: 222 - DNA, 3303 bp, Methanobrevibacter ruminantium
  source 1..3303: mol_type = genomic DNA
atgaagttaaaatcaaagtattttgtatttttactcataatatgtatcctattcagtatttcaacagtttcagcgaatgataatgatatgagtataaatcaaaatctgcaaaatgatgcaaatcaagatataaatcaagatttgcaattaaatgaagcatatcaatcagatacaaatctaaaccaaaatttgcaggcaaataatcaagaaaatgatttgctaaaagcatctgaagataagacctataatgatctctataatgacataaaaaactgcgaagatacgttcaatatagaaaacgactataaatacactgaaagcgataaccacacctttataagcataaataaaaccaatctagtgataaacggaaataaccatgtcattgatggatccaataaagctggaggatttgaatttttaaaggaatcactaaatataatcatcaatgacttaactttcattaactgcaacgattacaccatagttaatgaagacggaggaaatatcagtttaaataatgtcaatttcactaacaatcacaataaattgggcattttgtattcagagggaatgatatcagttttcaatggagcattaactataaataactgtaatttcgattcaaacaataatactaacctcatatacacaaattttgcagagctaagaattacaaattcaaatttctccaacggaaaagggattggaagccctatttatgccaataggttcgaattgtatatagataactgcagctttgaaaatttcactgccccctatggaggagcaataaatttcaaaggaaacacctttgtcattaaaaattcaaaattcaagaacttgaatgccgaaataactgcaggagcaatttttgcaaagtatttcccaaaaacaaataaagatggcccctatattccgggtgaagacatgctttttgagaattgtgaattttccaatgtctcatcaactcataacggaggtgcaatctacttgaatctggattcaagttctgagggctttgcaaaaactatccatattaacaattgcaacataacagatgcctcatccgactttggaggagcaattgcaagccaaggagaaatcctagacttctccaatctaaatatcataaattgccatgccaagataggaggtgcaatctacagttcctgggcagatttaagtcttaaagattgcaatatcataaacaatagcgccgataaggacgcaggagcaatctactttgattatagcaaattaataattgataattccaattttacagataataaggtgaataatatctcttcaggcaaagaaagcatcatatacgccaatgacgtagatgcagagataagaaattccatatttgataacggaggagttgcagtctatgcaaacttcgcaagcaattccaaatttgaaaataacacttctacagatttattcctatggaataataccaattatattgtttctgttgaaaataagggaataaaacttaatctgacaaacaatacaatcaatgtagataaattgccttcaaaatttgacggccgtgattggggttgggctagccctcttaaattccaaggagacaatgtggcctgctgggcatttgcaactgccggagcattggaatgcgctcttttaaagcagactggagtcttatataatatttctgaaaacaatattcaaaatctccaattaaaatatttctccgaaggggatagaagaaacagtgccataggttatgcttacagtggtttaggccattcattaagctggtatggagccatcacatcagaagatgacccatatgatgaaagaggaatgtactctgacgttgcagaaaccgataagagaatccatgttcaggatgcaatgataatcttcggcggaagaaacgatacaaggaatctgatgaaggaagcaataatgaaatatggtgcagtatccatccaatatatgtatgctccttatgattacactgccaattacactgaagtggacctgcagccaggacatttcgttaccttaatcggatgggatgacaattgccctcctgaaaaagtaaataccaaaatggccatagacgagaccaatattcctccaggacctggagcttggctaatgaaagattcagaagattctaaattaggagaagatggctatgtttacctatcctattatgacctttcaatattatccaaggatttctacccagtcattcctcaagctgcaggtgtagcctatatctttgaaaacactaacgactatcatgtcaactatcaaacagacatcacaggccttgcaggatttgatgaaaactacagctattactccaatgagttcgtatcaaagtacgacgagtggattggagctgttggaacctatttcaacgaatcaggaatcgactattcctttgacatatatgtaaatggagaaaaggcacactcccaaaacggaacaagtgagtttgcaggattcagaacaatcgttttggacaaatatgttccaatcaaggcaaatgacacatttaaagtaatattcaaaagcaatgcacttcctttccaagcatattcaaggcaacactatatccctaatatgtctatgataagtgcagatggcagcaattggatcgattatgccgataagaatagaacagtctgtcttaaggtatatacaatagaaagcgataaggaaaacatatccagcagagcatctacaataatagactgcaagaacatgacaacaactgccgtagcaagtgcagacggaagagttggagaatactttgttgtcaccttaaaagaccaaaatggaacagccctaacaaacaagccaataaaaataggtttcaatggaagagtctatgacagagtcacagatgaaaacggaagcgcaaagctgcagataaacctcgcatataagggaacctacacattcgccataggattccttggagatgaggactatctcggagcatttgaagtggcaaaaatcactgtaaatcttcatagccctaagctaagtgcccctaataagtcttataaggcaagcgcaaagacaaaagaattgactgccacctttaagacatctaatggaaacccaataagcggcaagaagataagcttcacagttaacggtaagacttatacagcaagcacaaattcaaaagggcttgctaaagtcaatgtttcattatccaaaaaaggaacttatagctttactgcaaagtatgccggagatgaaacatataaggcaacaagcgtaaaatccaaacttacacttaaataa

SEQ ID NO: 223 - DNA, 1092 bp, Methanobrevibacter ruminantium
  source 1..1092: mol_type = genomic DNA
atgaatatttcaagtttattttcagatgaaaaagttaatacaggaagacaagtcgaactggatatcgctaaggcatttgcaatcatatttatgatttttttacatactgtcatgatagttgaagcatataatgtcggcttaagcccaacttatacttatataatcggcaatgtcttaggaaggccttatgctgcagtcgtcttcatgttctgcatgggagtcggtgtggtatattcaaggcacagccaatggaacttgatgattaaaagaggaattatcctatatctcttaggccttttggtaaatgtctttgagttcttcttacctcattatcttgccggataccttggcgttaatgctgaggctttccctctatttggaggactaataatcttttgtgttgacatcttggcatttgcaggtttggcatttatccttatgggaatcctaaggaaattcgaagtttcaaataaagctatgattataattgcagttataatgtctctaatcggcagtttcacaataggaattgactttggaatccctgcagtatgctcattcttcggtcacttcattggagctaaaaacggacataccgcatttcctttattcaattggtttatcttcccagttgcgggatacgtctggggacagtatttcatcagagccaaggacaaaagggaattctttaaatactggccgatcctattgattgtggcttttgcttacttcttcatatcctcacgctattggggaggagtcttttcagaggatgttcacttatattactttttaaacacattggatgcagtattctgcataataaatgcccacgcattcatcggattatgctattggatttcagattatctgccagattcaattaccaagttcttttcaacactaagccgcaatattaatgaaatttatattgcacaatggttctatatacctgtaacaataatcttaatcacttatttctccaaaggattagtatttgatgatttggtaactacaatagtttcaatatgtatgctgattatatctacagtcactgcactagcttataggaagttaaggactaaaggataa

SEQ ID NO: 224 - DNA, 1995 bp, Methanobrevibacter ruminantium
  source 1..1995: mol_type = genomic DNA
atgtatttaattagcttttttggattaggagttaaattaaccaatttcaatgatgttgcactattcatcatatttgtaagtctaatcaatgcaatcttatggcctatactcaccagaatcctaatgccatttctcgttttatcatttggaatagggacacttattctaaatggcctattattaaacttctgcggaccccttttcggcataaatgtggaaggccctgcaataattttagctccactagcaatgtcctttgttacaacagccctatctacaatattaaccattgaagatgaaggatcctattacaggtcagtctatagggatgctgaaaagaaaagaaaaggggaagtgaaagattatccgggactcataatcgttgagattgacggtcttgcatatgacgtcttaaaggaagcggttgataagggatatatgcctaccctcaaatcaatgattgataatacacataccctaagaatgtgggagacagacctatcctcacaaacaggggcaagccaggcagggatactgcatggaaataatgaagacatcaccgcattcagatggattgaaaagaaaaacaacaatcagatgatgcaatgctctggagtgactcaagtaacaacattggaagagagaatttcagatggaaatgggcttcttgtagataatggagccagcagatccaatctcttctccggtgatacagacaatgtaatatttacattcagcaaaatcctaaacatccgaaaactatacaacaaggcatggttttcagtattctcaaatcctagcaactttgcccgtatagtatgcctgtttatttacgacatgaccttggaaatcatatcccaaataaagcacagcgtaaagaacatcaggcctagaatcaaacgtggcatagcctatattccaacaagagctgcaaccaatgttttcatgagggaaatcaacacctcaacattgattggagacatgatggtcggcgacattgacgttgcatattcaacctatttaggatatgatgagatagctcaccattctggcgttcgcgatgaggactcttggtatgcccttaaaggaatgaacaagcagatagagcgtttaataaatacaaataagtacactcctagaaaatatgagtttgtcattcagtcagaccacggccaaacaaacggtgcaacattcaagcagagatacggccaatcctttgaggattatgtaaagtccctgcttccaaaagagatgaagatgtttgcaaaaatgtcatcaaatgaagaccattatgccgaatcattccttcctttttcaagaaagaacgatgatctgatagatgaaaaggatctagaagagttaggagactctgaagttattgtccttgcctcaggaaatcttgcaatgatctatctaacccaatgggactatagattaagcatagaagagataaataaattcttcccagaactgattcctggaatcgttgaaaatgaatatgtaggatttattgtcatcagatcagatgaaggagaccttgcaatgggtaaaaagggcatttacaatttagacactggagatattataggaggaaatcctcttgaaggatttggcaaaaacattgcaagacaccttaaaagaaacagctcattcaaatacacaccggatatattggtaaacagcttctatgactgtgaaaatgatgaggtctgtgcatttgaagagttggttggaagccatggaggagttggaggaagccaatcaaaaccattcatcttatatccgtcaggatggaatgtcagtgatgaagagattgttggtgctgaaagtatttataaaatcttaaaagagaatttaaagaaactaaaagagtacagtaatgataatactgccctagaaaaagagtacagtaatgatgaaactgccctagaaaaagagtgcagtaatgatgaaactgctctagaaaaagagtacagtactgctctagaagaataa

SEQ ID NO: 225 - DNA, 714 bp, Methanobrevibacter ruminantium
  source 1..714: mol_type = genomic DNA
atggatataagtgaaataattggagatgcaattgcatatcctatacataatattaaagctttagtaatttatatgattattggaatcattactggaatcttaggtggcgcaagtttcatgggcttacttatgagcctaacaggcaaaaacgctcttgctgctggaggatttggtatccttggagtattagttctcctcattggagcattattaattacaggatatggtttggatattgtaaaatttggtattgaaagaagagatgacggtcctggaattgacttagtaagacaagttttaaatgcagttaaattacttattgtcagcattgtttactacattgtccctgcaattattgcttgggtattgtttactctcttaggtaggggtatattaactgtacttattgttatgataatttctattatcttcgcatttgctgaatttatggcaatatgcagattagctaaatatgatagtttaggagaagctttagcaatcggtgaagctattggtgacatatcaaaagtaggtgtaataaaacttctcgcaactattattatagtagttgtcattgcaatgatcgtatgctttatcttattatacgtttataaattaaatagcctcattggaggaattttattgggtatatttgctgtatacctaacattcttcgccaatagggcagctggtttattatactctgatgcataa

SEQ ID NO: 226 - DNA, 750 bp, Methanobrevibacter ruminantium
  source 1..750: mol_type = genomic DNA
atgattatagatacacactgccatatctacaatagcgaaatggaaaatgcaaaggaaataatcaaagaagctcaaaaaaacgacatctgcctcatattaaacggcactgatcccaaaagcaataaggagattttagaactttcaagcaaatatgataatgtctatggagctttaggatatttctatactcttgcagatgaaataagtgatgaagagattgatctattggacagtcaactcaataatgacaaaataatagctgttggagaaataggacttgactattaccatacaaaagaaaataaggacagtcagaaggaactctttgaaaagatgttagatcttgctgaaaagcataaactaccagtcatagtccattctagaaaggcatcacaagacacctatgacatactaaagaatcacaatgcagttggatcccttcattcttaccaaggttcagcagaaatggcaagggaatttgttaaattaggcttttatataggaataggagggacaatcacctacaaaaacagcaagaaaataagaaaagcagtaaatcaagtaggaattagccatatacttatagaaacagattcaccatatcttccaccagaagataaaaggggagagaataatacaccactgaacttaaaatacattatagaagaattagcagaagaattagatattaaagaagagaaaatcattgaaataacaacagagaatgcaaagaaactgtttaaagtatag

SEQ ID NO: 227 - DNA, 717 bp, Methanobrevibacter ruminantium
  source 1..717: mol_type = genomic DNA
atggatgaaaagttttcaagaacagaaatgttagttggaaatgaaggaatggaaaaattaagaaatgcaaaggttgttatttttggtcttggtggtgtaggttcctttgtttgcgaaggacttgcaagaagcggtgtaggtaactttgtcttggtggattatgacaaggtggatgaaacaaatataaacagacaagtaattgccacaacaaagacaatcggccaatgtaaggttgatatcatgaaggagaggattctagatatcaatccagatgcaaatgttgagatttataaggaattctatttggaagattgtgaaatagacattattactagtgatttatcctatgccgttgactgcgttgacacaatcatggcaaagattgcaattatctgcaagtctaaagagcttggcgttccagttatatcatcaatgggaactggaaacaagttggatcctactatgtttgaggttgctgacatttatgagacttcagtatgtcctcttgccagaattatgaaaaaagaccttagaaaaagaaatataaaagattgtaaggtggtttattctcaggagcttccaaaaaacactaatgattgtgatataaataaaaataagggtaaggtaaaggtaaaaggaagcatctcttttgtcccatctgttgcaggtttaataattgctggtgaagtaataaaagatattgtcaatgctaaataa

SEQ ID NO: 228 - DNA, 471 bp, Methanobrevibacter ruminantium
  source 1..471: mol_type = genomic DNA
atgtttagaaaaatgagaagagcaaaacaagaattatccaaagaggaatgtatcgatatcctaattaacgaacctcgtggagtcttagcagttttaggagatgatgaatatccttatgcagttccattaagtcatgtctatgtagatggaaagatatacttccatggaacaataaaagacagccacaaaagagatgcaatcaaaaaacacgataaagtatccttttgtgtaatggataaaggaacaaagtcagatagttggtggtacacattcaaaagtgttattgtctttggaagaatgaaaacaatcaatgacaagcaaacaaaaatagaaaagctcacctatttaggaaataagttcttcccaagcgaagaggaaacaaaagatgaaattgataggcttttggatgtaacagaactgtatgaaatcagcatagagcatatgagtgggaaagtagttaaggaaaaataa

SEQ ID NO: 229 - DNA, 1350 bp, Methanobrevibacter ruminantium
  source 1..1350: mol_type = genomic DNA
atggcaatacatccaattgaatttagatacggaactccagaaatgaaaagaatctgggagcaggaaaacaaacagcaaagaatgttagatattgaatctgcattggctcaagctgaaggtgagcttggaataattccaaaggaatatgcagatgaaatcaaagcaaaagcaagcattgaatatgtaaccttagagcgcgtaagtgaaattgaagctgaaaccaaacacgatatcgcttccctatcaaaaggattaagcgaagtatgtgaaggtgaggctggagaatacgttcactttggagcaacctctaacgatattgtagacagctctaactcattgcttttaaaagactccattgaagttttagaagaaaaaatcgaaagattaaccaagataattcttaaattagcagatgaaaacaaaacaaaggtatgcataggccgtacacacggacagcatgcacttccaaccacctacggcatgaaatttgcaatctgggccgatgaattgcacaggcaatatgacaggttgcagcatgcaaaggacaatgtatgtcttggaatgatggatggtgctgtgggaaccactgcagctcttggaacccaaggatgggaagttcataagaaggtatctgaaattcttggccttaagccagccccaattacaaaccaagtccttcaaagggataatcatgtagagttcatagctacccttgcaaacattgcaacaacccttagcaaaatagctcttgaagttagaaacctacaaagaactgaaattcaagagttaggagaatatttcgaccctgaaaagcaagttggaagtagtacaatgccacataagatgaacccaattacagcagaaagaatctgtggtgttgctagaatagtaaaatcatatgtaaatgcagctatggaaaacaaccctctctggcacgaaagagaccttacaaactcttcctgtgaaagaatcatgttccctgaagcttgcattcttacagattacatcttaaaccttacaatcaagcttatgaacaatcttatcttctatgatgaaaacattgaaagaaaccttaatttcacaaatgggctcatcatggctgaaagattaatggcagagcttacaagagctggaatgggtaagcaaacagcttatggggtcgctagaaagaatgcgataaaagcaaataaggaaaagcttctccttgcagaccttatccttgaagaccctgatgcaagtcaattcctaagcaaagaggacgttgaaagaatcatggaccctcacacttatattggttctgcaccaatcatagtagatgagattctagaagcttctaaagactggttctag

SEQ ID NO: 230 - DNA, 807 bp, Methanobrevibacter ruminantium
  source 1..807: mol_type = genomic DNA
atggatttcagcgtaaaggattttaatgtacggctccggacaatacgtatttgggaagtagtcatagctcttgttgtagcattctttttaaccggatttacatgcgattattttggaatctactctggagaggcagagtatatcatattcttcttgtatatgatggtcttctttgcaatagcctccatcgggacacatgggtttaaagatgacatatacggtgtattcaaggcctccaatctgtttaaggtcattatgatagtcataccaaatatgctcttggctttctttatacagcagcatcttgctggttttgatgctatgtttaataatatcaatttattagctcttccagtttcagatttggcttatgaggcttcaaatcctctcttgttcctttttgaattcttttcagcaatcttcattgcgcctatttcagaggagctcttctttagaggaatcttattcaataggcttaagataagaaaaggagttatatttggagtggtggtatcttcaatcatctttggattatgccatttcaattatccagaccatttggctcatataatttacacttgcctatttggaatgtgcttatgcattctctatttgagaacagacaatctattgataaacatgtttgcacacttcctctataatctattgtcttatgtgatagtatacactccaataggggatctcttcttaggaggtccgtttatggatttcactgtcatagtcttgttgttttcaatagtatttgttccggcgtatatattttatttctctataaagctgaaatga

SEQ ID NO: 231 - DNA, 804 bp, Methanobrevibacter ruminantium
  source 1..804: mol_type = genomic DNA
atggattttaatgtaacagacttcaatgttagattaagaacaattaagcttagggaattattagtaggtattgtcattgcttttattttatccatagccctcttaatcatatttccagttatggatagttatgatgatttggctttgatggtttttgtattcttcttattcattttcttcctttatgctttaaaaggtacctctggtctaaaacaggatttcaataaactatttgaaagggacaacagtcgtgaaattctttatgtgctcattatcaatatgttgtttgcttttttagtcttggctatattttccactttcgatgcataccttactttagctgattcggagtgggtttctatccttgattttactcctactgctattgatcctgcagtttttctatttgaatctttcacttccattataatcgctccaattcttgaagaattggtctttaggggagttttattcaataggttaaagattagaacaggcattcttccggctatgttaatctcttcattcctatttgcaataggtcatgaattcggcggaatgacaagtgcatttgtatttggaatgtgtatgtgtgttctttatcttaaaacagataatatattaatgggcatgtctgttcatttcctgaacaatcttatatttacagtatgggacttatttgcattggatgcaattgttttccaaatgcctgtattgccattgactttactcatttccattatttctggattattaataattctttatttatataaggagattggtaaattactggctgaatag

SEQ ID NO: 232 - DNA, 243 bp, Methanobrevibacter ruminantium
  source 1..243: mol_type = genomic DNA
atgaaaacaataatacgatatctaaggcaggaggttaagatgagtcagcaggatttagcaaaatctgctggagtaactcgtcaaacgattaatgctttagaaaatggacgatataatccctctttacttttagcatataatataacaaggattctaaataaagccacttatggtgacgatgtagattcctatctaagtattgaggacgtatttaaatttgatgatgatgaaatttcagtttaa

SEQ ID NO: 233 - DNA, 630 bp, Methanobrevibacter ruminantium
  source 1..630: mol_type = genomic DNA
atgttcttgatttacggctattcctacagggttacaaaggtctctgtagaagggatgattaacggtaacgatccattgccagaatttgatgatgtgattggcatgtttgttgacggcataaaggtttgcctggtctatctgggatatgcgctggttccaataataatattcatggtctttgctttagtctccagcgctattggaggatatggcgaatctgtattgatggcatttggctctattattactcttctagccataatcggcgcttatgtgatgagcatgtttggagttgcaaacatggctaattacgacggcgcattggcaaaggcatttgacattaaggagattattgaaatcatacagtccgtcggcgttgtaagaagcgtaggggcatatattggattggctattatttgcactgcaatctttatgattgttggactattgctcttctttgtattcggattctttggaataatcactggaaccttagggtcctatactgcagcaggaggcatattcattgcaggaattatcttaggttacttcttaatgctattcattgtaagtccttatattttgattatgcaatcaagagttgctggattattatataaccttcattaa

SEQ ID NO: 234 - DNA, 849 bp, Methanobrevibacter ruminantium
  source 1..849: mol_type = genomic DNA
atggctagcattacagacattataaaggaaggacttaaatatccattcaatgacactagaaaggtattgattcttgggctaatattcctcatctctgggctcatttcccttttcacacagtatgtggtttatgattccatgacccttatggtcaatgcctccccatatacctcagttaatggaatgtttgcatcaattcctccatctaattcagctttaattttcctgtcatggattgtaacattcattttgttccttttcacttcaggatacatatatgatgttattaaatatgcaatagatggaagatacgaacttccagactttggcaatatatttgcaatccttaagaacggattacgcacattaattgttggaattgtttattccattgtgccagctcttatattcatccttggattgatgctgatggttaatgaggcttcaggtgaagctgtaaacatgtttggacttatattgctttttgtttcatttattgttgcaatattcatttatcttattgaagtcattgcaatctcacatatggttgaaaatgacagtcttaagtctgcattccaatttagtgagatctttgatataatttcaaatatgggctggggaagatttatcggagccttgatatttgctttcattgtaattgcaataatttcaatgttctttggaatgatattcggagcaatatctactggaattggcatattgttcgattctgcattggtttcaactcttgttagttctatattgactggtttgttattaagtccatatatcagtattgctttaggcagaatgtttggatctgtttataaggaggctattagtgagtaa

SEQ ID NO: 235 - DNA, 798 bp, Methanobrevibacter ruminantium
  source 1..798: mol_type = genomic DNA
atgaagtttaattcaagagttttagggattttatctctattatttgttcttacaattcttgtttcaagtgtgggggcagcagaatataaattaacagaaaaagattttaataatacctttaaaataggtattccagaaggtacagacttccagcaagatgcatattcaaatattgctgctggtaatgttaactttgcaatgaaagtttttgacaatattggaaataatactgatggtgttgtttctgtattgtactttaaggactcttcttctgattcaaatcttatttccgatgtgattgatgatttaaatagcagtggggaagttgttgaagaaaatgacaattacatcatagttaagaataattatgatgctgaatggaatgctccagatgccagcacatcttcagatgagttctggagctttatcggtgatttatgctcctctggctctgatatgaactttggagatggtgattcaaatatccatctttccgatgatggagttaacatagaagattctagtgcaaatgtatcattttccaaaaatggaatctatgtttctgattccgatggtcagaatgtttccataagttctgaaggagtaaaagtctctggcgggtcttccaatgagacagtggacgtaaatgctgatgtggattcagtcatgaattcatattctgaatttgcagactattctctttgcttaaagaatcctaaaaaagatcaattgattattatttgtggtaatgatttagatctattaaagcaaatggcagactctgcttctttcaaatag

SEQ ID NO: 236 - DNA, 384 bp, Methanobrevibacter ruminantium
  source 1..384: mol_type = genomic DNA
atgtccaataactatcttccaaaaaagctagaaattaaatattctcatcaaatcgatggaacaaagtcaattaagctattgaatggcactcttttagtgaataatccaaatccagaattaatagatataaatcaaatagatgaagaaaagtggattgaattttgggatgccgttgaaaagataggcctttgggacttggaggaagtctatgaaagctgcacattagatggaggattcacctggaagatagaaatagaatatggcaatcgagaaattaatagctatggagccaatatggagcctaaaataattatgggagataaggtttattctgttttagaagagttatataaatccattgaagaattaatctctttagattga

SEQ ID NO: 237 - DNA, 777 bp, Methanobrevibacter ruminantium
  source 1..777: mol_type = genomic DNA
atgatatttgactttcatttgggaagtctattttttaaatttatcctttatcttgtaatgcttctattttttatttataaatttaattctatctctaaaaagaattctagttcaaattttaattataattcaagttcgaatagggattctaattcagtaaataactcttctctttcagatgcttttagaaacgatttaaacagcatattcaaggtttctaagatttatcacattctatttattgttttagcaaacatactatttgtatctgcaatatactttgtattaagttatttgggatccatatccattattcagtttaatgcccctttattcggtgatttcactggtttaggctttgatgtaacgctcctttaccttataactgtagttatcctatctccaataatcgaagagtttctctttagaggaatcttcttacgaagattcaatcttgagcttgacaatttgacacttgctatcttgatttcctcagtcttatttggaatttgtcataactttggaggaatattgggagctattctctttggaatctgcgtttccattctttatgtcaagtccaggaatgtattagtccctattttggctcatttcattaacaatctcatttcctttttgctggcccttattggaatagagaatttcattcatggaaatagcattgtcattgctttaataatcattttggccattataagtaattttgtgctctttagagctattgtattagagtggcctaaatcttttaaagaatag

SEQ ID NO: 238 - DNA, 606 bp, Methanobrevibacter ruminantium
  source 1..606: mol_type = genomic DNA
atgttaaaatttactggaaaagaaataagagatttaataatatcattcattgtaattgctttggcattctctattctttattcaaatcgtgattttaatggaattctattcatatttccaatagttgcaataggagtaggtgccggattcatctttcatgaattagggcataagtttgcagctatgcactatggatattgggcagaatatcaattatggccaactggacttgtcattgcattggtaagttcctttttcggattcatctttgcagctccaggagcagttgtcatatacagtcaaggaatggaaaagtctgagaatggtttggtttcacttgcaggtcctgcagtcaatatagtccttggattgatctttttaggtattttaaattcattaggtcaggtcactgattataatggctatatcatagctttgatttgcttgcttggaactagaattaatttcttcttggcaacatttaacttattgcctatcccaccattggatggatctaaagttttatcttggaatgctcttgtttggatagttgcatttgccatatctgttatattgcttgttgtctatggcggttaccttggatag

SEQ ID NO: 239 - DNA, 162 bp, Methanobrevibacter ruminantium
  source 1..162: mol_type = genomic DNA
atggcaaagaaagatgataaatacagtatgcctatgagtggggcaggtttagtaagatactttgatgacgaaagtgtaggtccaaagatagctccagaatacgttattgctttaacagttattctcggtatcttttgtttcattttaagatactccatataa

SEQ ID NO: 240 - DNA, 3564 bp, Methanobrevibacter ruminantium
  source 1..3564: mol_type = genomic DNA
atggattctggaatggattattttgaaagattggaaagtgaaacacaacgtctctacgagatagcaaatgaagcaagatctaagggttttgatgtagagcttgaaacagagattccagtggcaaaggatttagcagagcgtgtggaagggcttgtaggtcctaaaggcatagctcgacgtattaaagagctagaggctactggcatatctcgtgaagaggttgcatttgaaattgcagctgagattgcatctcaagagtctagcgaaactggagcaaagcttgaagctgagaaacaggcttttgcagatcaaggccttcgtacagcacttgctatcatcactgaaggggtggttgcagcgcctttggaaggtatttcaggtgtaaagattaaaagtaattcagatggcacaaaatatgtggcagtatactttgcaggacctattcgtagtgcaggaggtactgcagcagcattatccgttctccttggtgataaaatacgtgtagctactggacttgacagattcaagcctaccgatgatgagattgaaagatatgtggaagaggtagagctttacgaatctgaagtaacaaaccttcaatactctccgactccagaggaagtaaggtttgcagcaagaagcattcctgttgaagtcagcggagagcctaccgaccagattgaagtttcccacagggaccttcctcgtgtagagaccaataacattaggggaggagcccttcttgcgatggttgaaggggttattcaaaagtccaagaaaattctaaaaatctctaaaaaactcaatttggatagctgggaatttttagcagagtatgctaaaggtatcggctcatctcaagaggaagaaaagtcagaagaggaaactgaagaaatcgttgaggaaatcgacgataatattattgataaggatgaattgtttgcccattcaaaatacgcccacgatatcattggaggaaggcctgttttaggatacccttctgaaaagggcggtttcagactaagatatggaagatctagaaacactggccttgctacaatgggggttcatccggcaactatggaactattggaatttttagctgtcggaactcaacttaagatagaaaggcctggaaagggtaactgtgtagttccagttgattccattgaagggcctacagtaaaattaaagtctggtgaggttcgcagattagattccatagctgatgcaagggaagtcaagggaaaagtggttgaaatactctttttaggagacatgcttgttgcattcggcgaattcttaagaaacaaccagcctatgttaggctcttgctggtgtgaggaatggtggattgagtgcataagaaacagcgacaaatacaaatcattctccaatgacagcgagctttatgactatcttatagagagaggaatcgatttaagcattgaacatttcatctcacatgaagactcttcaaagtatatggactttgatagggaaagcttcaatcttaatttccttgagaaaaagcgttatactgccgaagaggcctttagaatctcatatgactttagtgttccacttcaccctgaatacacatattattataatgacatatcccgtgaggacttggcttatctgaatgaatggctagacactaaaagggattatctgtcaactgactacttgaatggagaggatttaattcttgatttggctcctcaaaagagaatccttgagatattgggattggttcataagctgattgataaaaaggtagtcattgatagggatcatgcttatgccctaatgaaaaccgttggaaacggctctgcattagaagataatgatggggacttatcatctgaagttaaaacaatagattattccaaataccttgatgatgaccattataagtcaaaggttgttgacatactcaacgaaaacatcgactttgagattatggataaggctccatgctatataggcacaagggtaggacgtcctgaaaagtctaaggaaaggatgatgcgccctgctcctcatgtccttttcccaattggaaacaatggaggaagcagacgtctagtggctgaagctgccaaaaagagaaaaatcaatgttgaaattgcaagaagacaatgcacaaaccctgattgtggattaagctcattcatggcaatttgccctcactgcggcgctccaactgaaatcaccaaagcaagtcaaaaggacattaacctgtccaccatgctatcaaaggcttcaaataacattggagttcgtaaggttgatgaggttaaaggtgtaattggtcttatttcagaggataagctccctgaacctttagaaaaaggtattcttcgtgcgaaaaatggtgtcttcacatttaaggaaggaaccattcgtcatgactctacagacttgcctcttacccacttcattccaagggaaattggcgttactgttccaaaattaatcgaaatgggatatactcatgactgctatggacaggaaatagtgagcgatgaccagataattgaactgaaggttcaggatattgtagtttcagacaattgtggcgattaccttgtaggtgtagctaatttcgttgacgatctattggaaaagtattatggaatggaccggttctataatgttgaggacaaatatgaccttatcggccatctcattgcaggtcttgcacctcacacatcagcaggggtgttgggccgtattgtaggattcactaaggcattgggctgttatgcacacccttatttccattctgcaaaaaggagaaactgtgacagtgacgaagattctgtcctattgcttcttgatgctctaatcaacttctccaaatcatatcttcctagtacccgtggtggaagtatggatgctcctttggttttatccacacgtatagacccagaggaaatcgacgacgaatcacataacctggacatatttgaacgtttcccattgggattctaccagaaaagccaagagcctttaaagcctgcagatatgctggaatttgttgataatgttgaaatgcatcttggaactgacagacagtatcatgatttgatgttctcacaccatacctcaaacattcatgcagggcctaaggtttgcctttacaagcgtttaggctctatgaaagaaaaggtggaggctcaaattcatttggcagagctcatccgtgcagtagaccaaagaggagttgtagaaggtgttctttcatcccacttcctgccggatatcatgggaaattcaagggctttctccaagcagaaggtcagatgccctaaatgtggcgccaagtatagaagaatgcctcttacaggcaagtgcaaatgtggaggggaccttattctaagcgtttccaagggttctgttgtgaaatatctggaaatttcccagaatcttgtaaacaggtatcctgtttcacattatcttgagcaaagattggagattcaagagtttggtatcaattcactctttgaaagtgataaatccaagcaaagctctcttgatgtgttcttcggcaaataa

SEQ ID NO: 241 - DNA, 2343 bp, Methanobrevibacter ruminantium
  source 1..2343: mol_type = genomic DNA
atgggtttaaaaattaatgaaggtgttaaagtggaaaatgtgtataatgtagaaaatgatattaggaaagctaaaatcactgttaagaaaaacaacggtgtctgtgaagctttcagttatgaaaaattgttaaagtctttagttatggttgaagccccatattttgagtctgaaaagattgtttcaactgttgtagaaaacttatacgacggtatcactactaaagaaatcaagaagatcgtttacgaatgcttagaagaggttgactctgaggcagctaacaaatatctcgctaagactaccttgaaggtacgttcctcaagagataagattgaaccattcgacatggctaagattgcaagcacccttgtagaggaaaccggtgcttcccaagagactgcttttgaaatcgcatctgaagtatggaaagaacttaaaaagctcaatgtagaatacctcactgctcctatgattagggaaatcgtaaacacaaagcttgtagagtatgggcttgaagacttaagaagcagatacacccgtttaggaattcctgtttataacattacatcattgattgaaaatggtaacagagacaatgcaaacatgatgcataaccctgaatccattcacaaatatgttgctgatgaagcattgaagcaatatgctctcttgcatctattgccatcacacttggcagatgcacacatgtccggtgacattcacattcacgatttggaattcttcgctggaagaccattaaactgtctccaacatgatataagggcattcatcaaatacggccttaaagtggacggtacaggtgaccacacttctgtagctgcacctccttcccatatggaaaccttgatgaaccatactggcgaaatcatgcttgcagctcaacagaacatgtctggtggacaagctatgtccctttggaacgtatttgtcgctccatttgcaagaggaagaacctacgaagaggtaaagcaatccattcaaatgcttgtctacaacttgaacatggcttatgcagcaagaggatcacaagttccatttaccagcatgcaattggaattcggcgttccaaacttcttaaaggacgtaactgcatacggtcctaaaggacaagtcgtaggtacttacgctgactttgaagatgaaaccagaatgattcaaagggcattcactgaaatcttgcttgaaggagattcagaaggcaagcctcacctattcccaaatactatctacacattacgtgaagagaccttgaatggtgactatgatgatgacatgctccttgttcacgagctttcagcaaaatacggatcttcctactttgtaaacatgttgcctgactacagaggtcaaatggctaactatatgggttgcagaacctgtctccaggacacttggaccggtgactgggaacaagactgtttaagaactggtaacctcgcttatgtaaccttgaacatgcctagaatcggttaccaatccaatgatgaagatgatgtattcgaatacttagacaattatatggacttagctgtagaaaccttgatgattagaagaaagcaaggtcttaactgcttgaataactttgacatcctaccgttccttgaccaagaggttgacggagaaacctattacagaatccaaaactcaaccttatcctttggtttctgcggattgaacgaaatgttacttgcattgttcgatgaaggcatagaaaaccctgatgctaacaagttcggtatcaaatgtttagaatacatcaatgcaagagcaaaagcattgcaagaggaaaccggactcagatggtctgtactccagacccctgctgaatctaccgcttacagatttgcaaccttagataaggaacagttcggagataaggcaatcttgcaaggtgacaatggagctaactactacactaactcctcacatgtccctgtaaactctgacattgcatttgctgacaagatcaaaatcgaaggccaataccataagctaactcctggaggacacatcttccatgcattcatgggtgaatcctactctgatcctgaagcattgatgagccttaccaataagattgcaagaaaatcagacattggtttctgggcttacagttcagcattcagtttctgcttaaactgtaaaacattgatgaaaggattaagcaacaaatgtccttcctgtggtgaatctgcagatgtagaatggtatgacagaattactggttacgtacaacaagtaggtcatgctaaatctgctaacggcggatggaatgcaggtaaacgtcaagaattaattgacagacgtagatttgaacaataa

SEQ ID NO: 242 - DNA, 1587 bp, Methanobrevibacter ruminantium
  source 1..1587: mol_type = genomic DNA
atgaaacattggattgaaagaatcgctgatgaattaaatgaaatggatgtagaaaaacatgtcattgcaagtggtacatctatctcaggttctatacatataggaaactcttgcgatgtatttatagcaaatgcaataggaaaggctttaagagaattaggcaatgatgctgaaaccatttggatagcagacgatcatgaccctcttagaaaggttccttatccacttccagaatcctatgaccaataccttggtatgccttattccatgataccatgtcctgaaggatgctgcaagaactttgtagaacactttgaaaaaccattattcaatgttcttgatgattacggcatagagattattcctaaatctggttttgagatgtataaagatgggtcttatcttgaatcaatcagaatctcccttgaaaagcataatgaaatcaaggctatctttgaccaatacagaagagagcctttggcagaccactggttgccttataaccctatctgtgacgaatgtggaagggtaaacaccactgaagcatatgactatgacggagacattattaagtataggtgtgaatgtggccacgaaggtgagatggatataaaatcaggcaatggtaagcttacctggagagttgaatgggcagcaagatggaagatctttggaaccacttgcgaaccatttggaaaggaccatgcagcagctggaggatcctacgatgtaagtagcgttatatcagaggaaatctttgattatcctgctccttatccagttccatatgaatggatcacccttgacggtgaagcgatgagtaagtctcatggtgtattcttcactccagagcaatggctagagattggaccagctgaaagtcttaactactatctattcagaagcaaaccaatgaaatctaaagacttttcacctaaaatgccttggttagactttatggacacttttgatagggtggaaaaggtattctacggcgaagaggaagctccatcagaaaaagaaggcagaaaattcaagagcatttataagatggctcaaatcaatccagattctccattacctttcagacctccatttaggttcttggtaaatgcttatcagattgtcggtgaaaaggaccttgagaagatttttgctattgttaaaaagaattctcaactcactaaaagctttgcagataaggagtttgaagacttaagcgaacttgaagtgtctcaatttagtgaaagggtagataatgtaatcgcttggttagagaaatatgctcctaaatttgtcaagttccaagttcaatatgattccattccaaacttgcctcttccagatgatcagattgcattcctaaaggatcttgcagacttaatggaagagaaggagttctcatctgctgaagaattgcatgatagcatgtatgagattttggaaagccatggattaaaacctcaaaaggcattccaagctatttataaaatgattcttggtcaaaagcaaggtcctagagcagcttcattcttgctgtctttagataaggactttgttgttaagaggttaagacaggaagcttaa

SEQ ID NO: 243 - DNA, 861 bp, Methanobrevibacter ruminantium
  source 1..861: mol_type = genomic DNA
atggtgatttttatttcagaagaagaaattgaaactttaaaaaagcaattagctgataaagacacaaaactcaaaaaccaagcaagcgaattaaatcatttaaccaatgaggtaattcctgagttaaaaaaagacaacaaaaagttaaaagcgcttaaggaagagcttacagatgcattggaaacaagtaccaaaaaatacttcgatcaattggaaatcaatgcagacttaagtgaaagcgttgcaaaaaaaggagctggtcttcaattagctaaagtaagattaaacgaaatcgaaaaattagttgttgaacttgagactgcaagacttgaagaggaagagaaaaaagcagctattccaactgaagagactgacgaagatgaagtaaccaagatttatcaagaaaaagaggaagcaattgaacaattgcattctgaaattgataaattggaaaatgaaatcaaagaaaaagacgcagaaattgacagaaaagaaagcttaatcaaaagcaaagattctaaaatcaaagagaaaaatgatgaaatcaaagacttaaatgacaatgtcattccttctcttaaggcagaagtagctagcaaaaatgcagaagtcaaagccactcaagaagaagctcaaaaagaaattgatggtgtcggaggcaaaattgctaaattagaagctgaaattaaaaatcttaatgaaagcttagacaaaaagaaaagggattatgatagattatacaccgaattaaacgctaaggataaaactatcaactctcttaaaaacaaaaaccaacaattaactgagcaactcgaagaagaatctagcaaaggtttctttagcaagcttactggtagataa

SEQ ID NO: 244 - DNA, 240 bp, Methanobrevibacter ruminantium
  source 1..240: mol_type = genomic DNA
atgagttttggtatggttttttttagttgtttggggatttgtttgttttgtaatgagttttggtatggtttttttttagttgtttggggatttgtttgttttgtaatgagttttggtatggttttttttagttgtttggggatttgtttgttttgtaatgagttttggtatggtttttttttagttgtttggggatttgtttgttttgtaatgagttttggtatggttttagttaattaa

SEQ ID NO: 245 - DNA, 2364 bp, Methanobrevibacter ruminantium
  source 1..2364: mol_type = genomic DNA
ttgtcaaatattgaaactgatgattcatttattagtgaaaattcaatatcaagcgatattaatgataattcattaattaatgaattcacagcatcaaatcaaatcaacgacaatatagcaattaatgatggcttaagcaaaggcgacaaaagccaattatctgaatccaaatcaatatacgtatccacaaacggcagtgacgattcaggagacggaagtgaaaaaagcccataccaaagcataaaacatgcagtatccaaggcagatgatgattcaatcatatacctatccagcggaacttacaatggagagaataaccaaaacataagcataggaaaaagcttaagcatctatggagaagattccactataatcgacggtgaagacaaggcacagctattcatcatgaattccagcgcaaaattaagcttaaacggacttattttaacaaatgcatataaggacggcaacctaagcgactatggaggagccatcataaatgaaggcggacaattgaccataatcaactctacaatcaaaaactcttatggaaactactatggaggagccatctacaacaatttaggaagattgaccatcataaactcaagcattttaaacaatagcgcaatacaatatggaggagccatctatacacttggagtgacaaacatccagaactcagttttcgagaaaaacaccctaacagctgaaaaaggtgtgggagcaagcatagcagcaggaggaacaataaccctcaacaatacagatttcctcaataatcatgcgatatattcagcagcagcgcttctcagcttaggaaacgcaacaatcaacaactgcagtttcataaaccagaccacaaactatacagcaggggcaataagcaatcacggaaacatgtttataaacaacagccttttcttcaattgcagagtaagattctatgcaggagcaatacttgcacctccaagcggacaccatgtcgtaacagaggtctacaatacaatctttgactataacaatgcaggaaaccacggagcagtcacaaacaacttccaagatgcagagattacaatgataaactgtgcaataaccaataactacatccaaaagaacgttttctatggagatattgcattggatgacaacgctacagtccaatactgctggtggggccaaaacaacataagctcttactactattcccctcacagcaataatgaggatccaggtcaaataaacgcttcaagatggcttatgatgactttcacatcaagcaatggaaacatctcagcagatgaagtgaacacattgactgtaagcattaagcaatactttgacaacgatacaaaagaaatatacgaatataatgaggatataaacctaccattaaccgttaaattcttcgacgacaataaaaagaccattgcaacaaaaactttaaagaatggtacagcaagctacaattacatcccagtgaaaggtgtcaatgctgtctatgcacaaatcaccaatgaaatcattgaaattccagttgtccagaaaaaggaatcaaatcttagcacaagcaatctgaccaaatactacaaaaatgaaagccaattggaagcaaaactgacagatggcgacaataatcctctttccaataaaactataagcatagaacttttaggaaaaacatacaataagacaacaaacgaaaacggaatcgttaaacagaatatcggattaaagccaggccaatacactgcaaacattattttcaaggacccagaatacaaaaacaaaaacattacagtgcaaatcactgtcttaaagaacagcacttcaataagcgctaaaaaccttgtaaaatactataagaacagcagccaattaactgtcaaattgcttgacaataataagaaagcaatgaagtccaaaaaagtcaaattcaccattggaaaaaacacttacacaaggacaacaaatgcaaatggagccgctacattcaacatcaatctaaaggtcggcacatataatgtaaaggtttcatttggaggagatgactactacaaaggatcttcaaagacagtcaaggtaactgtaaagacaacaaagatgcaggcaaagtctactaagatacgcaaaaactctaatttcgtagcaacatttaaggacgctaatggaaaggtcataaagaacactaaagtgaaattcactttaaataaaaagacctatacaaaaacaaccaatagcaaaggacaggctacattaaaggtaagtgtaaaattaggcagctatacaattaaaagtcagtacgcatccactaagacctatggggccactgtctttaatacaaaaattaaagttgtaaaataa

SEQ ID NO: 246 - DNA, 918 bp, Methanobrevibacter ruminantium
  source 1..918: mol_type = genomic DNA
ttgactattaaaaaagacttattagcgataggacatactgcattggattatataatcacagtagatgaatttccaaaggctaacaattcagctcctatgaagaccatgctaaacttgaatgggggagctgcagctaatgtggctatgattggcgcaagccttggattgaaatctggattggtatccgctgtaggtaaggaatttattgactctcattatcataaggaaatgaccagattaggtgttgacactgaagcgatgattatttcagagactgaaaacacacctactgcttttgttatgacaaataaaaatcaggaccagattagctatttctactggggagcaggtaaggatttccatgatagtgaagttccaagggaaaagataaaggaatttaaggcagttcatttggcaactggagatcctcatttcaattgcaaatctggaatcgttgcaaaggaagaggaaagattggtttcattcgatccaggtcaagaccttggaatgtatagtcctaaaaagcttaaggaagtcattagcaattcaaacattctttttggaaaccatcatgaaatcaaaaggattcaagagtcattggctgttgacattaacggtttgatggaattaggtccggaaattgttcttacaacttgcggtaaggaaggaagcataatctatagccttgatgagggcaagtttgagattgattccatctataggcctgcagttgatcctacaggtgctggagactcctataaggcaggattcctatcccaatttattaatggaaagacattagaggaatctgctaagtttgcatcttctgtttcatcctttgttgtggaaaagcaaggatgtcaaacaaacatgcctagctatgaagatgcttataatagaatgatggacttttattag

SEQ ID NO: 247 - DNA, 1299 bp, Methanobrevibacter ruminantium
  source 1..1299: mol_type = genomic DNA
atgacacagataagcgatgcaaaaaaaggcatattaactgaagaaatgaaacatgttgcaaaaatcgaaaatgtttcagaagactttattttaagatccgttgcaaacggtactatcgtaattccaagcaatgtacacagagacattgaagcatcaggtattggtgcaggacttagaacaaaggtcaacgcaactgttggaacttcaacagacattgtaaactttgatgaggaagtattgaaggcacagattgcaattgaccatggtgcagactgtcttatggaattaagtatcggcggagacttggatgtaataagaagaagagttcttgacatgtccccattgcctgtaggatctgtacctgtctatcaggctgctattgaaagcattagagaacatggctctgtaatttatatggatgaagatgatttattcggcgccattgaaaagcaagctaaagacggtattgactttatggctgttcacagcagtatcaacattgaaaccttgacccgtcttaaacggcaaggacgtgtaactggtcttgtatcccgtggaggatccttcatgtctggttggattgtagagaatgaaaaggaaaatccattatatgctaactttgattatgtattggaaattgcaaaggaacatgatgttgtactttcccttgcaaacggtatgagagctggttccattgctgactctactgaccgtgctcaaatccaagaattgattatcttaggagaattgattgacaggtcccgtgaagctggagtccaatgtatgattgaaggaccaggtcacattcctatcaatgagataccaaccaatgttatgattcaaaagaaaatgtgttcaaacgctcctttctatatgttaggacctattgtatgtgatgtggcacctggatatgaccacattgtatctgcaatcggtgcagcatcttcagccaaagccggagccgacttcatctgttatgtaacccctgctgaacacttggcgctaccttcccctgaagatgtgaaagagggagttattgcaactagaataggagcatatgcaggtgacttagctagcggtcaaatagatggttcccaagaccttgcaatggctgaagcaaggaaaaaactagattgggaagctcaatatgagtgtgcaatgttccctggcgctgcacgtgcaaaaagagaccaaagacctcctgaagaggaagacacttgtacaatgtgcggtaactactgtgctgtaaagattgtaaatcaatggttggatcagtctgattctgatcttattaaatag

SEQ ID NO: 248 - DNA, 1062 bp, Methanobrevibacter ruminantium
  source 1..1062: mol_type = genomic DNA
ttggatgcattaagggcattagcaattatctgcgtaattgccatacatgcttacgcatgctcaaggaattttgttattagcgaattggtgggaaacttaccttcattgaattggattattattcaattttcaggcaatacatttagaataggagtagatttgtttttaatgttgtctggtgctttatctttaggtagggattggaagatgaaggacttctttgctcatagattccctagaatagtatatccatttttattttggagcatcctcttaggaaccatatttcttctattgtcatattatgattcatttaatgtgataagctcatttgatttggtttcaatagccaattacttctatggagtatttatgggaattattgatttcgctaagccttattggtacttttggatgattttagggatttatctgataatgcctgtatttaacaaatggattttgcattctgatttggatgatcttctttatttcttattcttctggcttataacatgcttgtttgactatacattaggagttgaatttccaatcagattgtcatactttacaagtccgataggtttggtggttttaggctattatttaagatatacaaggagaataattctaaataaccaatattttgcattatttttgattattttctcaagcctattgatgcttgtcctttcggccatttattcaacagacactcatttctataattttaatatatattccattttagtcagcatggaagttataggagtgttcttattgtttaagaatttctataagtttaatttaaatatagggttcttctcaaggcctgatggattctttaataaatcagtttatgctttggccaggtatagttatggcatatttctgattcataatgcatttatatgtgtgttggtgcactacttgggcaatacaggcattccgccagtcttatatatgattatattgtttgttgtttctttactctgttcggtgattgtaatggctgtattaagtaggattccttatttgaatagggtgattggtgttaaatag

SEQ ID NO: 249 - DNA, 930 bp, Methanobrevibacter ruminantium
  source 1..930: mol_type = genomic DNA
atgagggatattatgctagagaatactgataatgaaaagggcaaagccatcattgaaccggaaattggaatcacaatcaatggaatatcctttaatcataaactatttgaaaccttagaatcattatctcgaacatattctcaaagaaaaacagcaaaagaattgaaaatagcccattctgttttaaatagaagaataaaaaatgctgaagacaaacttggtgaaaaattagttgttacaataggttcaggctctgaattaagtccaaaaggctatgaattgcttaatgcataccacaaatataagaatcgccttgaagacagagaagagattgtcattgcaggaggccacatcataacaggcctgcttcaagcaatcagctacgacttgccctttaagacattaatctacagcagtgacgatgaaagcgcttatgaacttgcaaaaagcaatcagattgacattttagcattagacgatccattgcttgcatttgaaaatgacttgaactttacagcaatagcctatgaccatcttgtcttaatctccccaaaaaaggaaaagcctatagaaaaaataagagaccttagcgatttggaattcattggagttaagggaagtgcccaaaggctagcttggagtactctaaaacaggaaaacattccattcaatatagtaaaagaagtaaaatcccaatttgatgcatttaagatagttaaaaactcagacgagtattatacatttttaaatgcaagctatttcaatggaaatgaaatattgaaaaatgaaacccgtcacgtaattagcttagttcaatgcaatgatgaaaaggaagacatttataatttaatggaatatttacttatggacgggcaaagtcaaataggagaacaaggatttgttcctatgaaaccttggaaaacaagataa

SEQ ID NO: 250 - DNA, 591 bp, Methanobrevibacter ruminantium
  source 1..591: mol_type = genomic DNA
atggaatatatgaaagacgctatagaagcaattttagataatatacgtgatgctgaagactatttagttgaagaggatgttgctacatttattgatattataacctcttgtgagaatatttttgtaactggtgctggaagatccggtcttgcagctaaagcatttgctatgagattgatgcatttaggattaagttcctatgttgtaggggaaaccatttctccagctatcaatgctgatgactgtattttagctatctctggttctggagagaccaataccattgtaactgcagcgaaaatctccaaaaacagaggggctaaggttttagctttaacaagttatcctgaaagcactttaggtcaattggcagattgtgttattcttgtaaaaggtaggacaaaagttgaagcggatgatgaaaactatcttaaaagacaaatcaagggaaattatacttccttaactccacttggaactgcatttgaattgacttcattggttttcctcgatggtatggtttctgaattgatgaatgctatgggaaaaactgaagctgatttgaaattaaggcacactgtcttagaatag

SEQ ID NO: 251 - DNA, 1107 bp, Methanobrevibacter ruminantium
  source 1..1107: mol_type = genomic DNA
atggaaaagaaaactacaattatattggttattttaattgctcttattgcatgcggtgttggaataactttattcgcttcaccatcatctatttctacagatgggaataccacaataactgatatggcaaataggactgtaaatatttcaagtagtgttgatagggtggttgctacaagtccacctatgaccactatcgtttatatgctggcacctgaaaaattggttggtgtaaacttccaatggactgatgaggaactaaaatatgttccggatcagtataaggataaattcccagttatcggtggatggtttggaagtcaagacggtaattatgaagagtttattgcttctgagcctaatttggttattgaaggtattgatgaaggaatgggtgttgacctatcaactgttgaagaaagacaggagaagtttggttcacttcctgtagtggctgtaactgacaatacaaatgttacaaagatagacaatacgatagagttcttaggcaagcttttaggtgctgaagataaggcaaatgagttaattgcttttaatgataagtatttgtctcaagttcaatccactgcaagcagcattccagattctgagaaaaaatctgtttattatgcttctggtgaggatggattatccacttatgcaagtggcgcttcacatggtcaattgatttctcttgttggaggcaaaaacgtagcagacactgaagttaaggatagcggaagtgaattgactgtttccattgaacaggtaatgtcttggaatcctgatgttattatagccacagatgaggacttttataataaggtttataatgattccaaatgggctagcgtaaaggcagttaaggaccatagagtatatctttctccacagtctccatttaagtggtttgataggccaccaggtgctaatataattataggagttccttggactgctaaggttatttatccagataaatattccaatatagatatggttggagctactaaagagttttatagcaatttctatcattatggcttaagtgatgaacaggctaaagagattctaacttcttctggtctaaaggggtctgatttgtag

SEQ ID NO: 252 - DNA, 1026 bp, Methanobrevibacter ruminantium
  source 1..1026: mol_type = genomic DNA
atgagtgaaaattcttccttttctgtggataatctggttatttatctgctgctaatagcattgccaatctttttgttctttgtatcatttatgttaggtagatatcctgtggcacctatagatgttataaagaccattctaagtcctatatttccatctttggctgtgtctcctgaattgaattccatcgtctttacaataaggctgcctaggattatagcggctttgcttgttggtgctgccttatctatagctggagcttcatttcagggaatatttaaaaaccctcttgtctctcctgatcttttaggagtatctatgggagcaggttttggagcggccattgctattttagcaaatgctggaaatgctttgattcaactttctgcctttgtctttggtcttattgcagtattcattacattttcaatatcaaagacatataaggccggaggaattttactccttgtgctctctggtactgcagtctctgcattcttcaatgcattgatttcaggagccaaatttatggcagatccttatgataaattgcctcagattacctattggcttatgggcagtctctctgcagttaattttgataagctggcaatgataatcattccattggtgctgggaataattgtcgtcatgattttaagatggcatttgaatgtcctctctatgggtgatgaggaagcccaatcattgggattgaacccatcaagacttagattgattgttattattgcctgtactttagtaacatctgctgcagtttcaatcagtggaattatagggtggataggtcttgttgttcctcatatgactcgtataattgtaggtccagaccataagatacttattccagcttcattaagcataggggcaagtttcctattgctcattgacaatatttcaagaactttcatatcaattgaaattcctattggtattttaactgcaattattggtgttcctttattcctttacttgcttagaaaaggctattctgagtggaattag

SEQ ID NO: 253 - DNA, 831 bp, Methanobrevibacter ruminantium
  source 1..831: mol_type = genomic DNA
atgacaaaattagtagaagttaaagatgtttcattttcctatgacaaggattctccgattgtctttgagaatattaatttctcaattgaaaagggggatgtattatgtattctcggtccaaatggaacaggcaaaacaactttgataaagacattgaacggtcttcataaggttaattccggtgagatactcttaaatggaactaatatcaaggagctttcattcaatgacattgcaaagcttgttggatatattcctcagggacatattccttcttttccttttaaggtattcgatgttgtattgatgggcaggtctccttatatcaatcttacagcttctccaagggaggaagataaggaaattgctcttaacgctcttaagactcttggaatagaagacttgaaggacaaaagctataccaatctaagtggaggagaaagacaattggtctttttggcaagggtattggctcaagagccagaccttttaattcttgatgagcctacaaatcatttggactttggaaatcagataaaacttcttgaaatgattgaacaactgtccgagcttggccttgcagtcatcatgtcttcacattatccagatcatgcatttttagcagcttctaaggtagcaatcatgaaagacaagagctttattgattttggaactccagaagatgttttaactgaagagaacttgaataaggcatatggcatagatgttaagcttgttgaattggaagacgatagaaaaatatgtgttcctttaaggactaatttggagttggttatgtctaattattctaagaagtactctaaggattga

SEQ ID NO: 254 - DNA, 573 bp, Methanobrevibacter ruminantium
  source 1..573: mol_type = genomic DNA
atggtaagtgtagaagactatgaagaacaattagctaaagctggtgaattccacggagaaatctgtggtggaatagctatcggcactaaacttgcaatgtatggtatggaattaatgggctttgaattaaacaaacgtcataaaaaccttattgtatttttagaaatcgacagatgcatgtctgatgcagttcaatcagtcactaaatgttctatgggtaaaagatctcttaagcaaatgtattatggtaaatttgcagtgactttctataatatggacacaggggaagccattagggtttccgatgcagatgccaataagcaagaaaagaaaagagaaaccagagatgaaatgattgaaagatttaaaagaactcctgctgaagagctattcaatgtggaaaaggttcatgttgaattgcaaccttctcaaatgcctggaaaacctcataccagtgtattctgttcagtatgtggtgaaaaggttactgacggtcgccatgtaaaccgtggcggtaagcctgtatgtattccatgtgcagaaggcgcttattatgagttaatagatgaataa

SEQ ID NO: 255 - DNA, 4188 bp, Methanobrevibacter ruminantium
  source 1..4188: mol_type = genomic DNA
atgaagaataagagtttaatattaatttctttattattactgattacaataataagcataggatctgttgttgcaacggataatgaagaaattaatatggataatataaataatattgataataatgaggatatcgctaatattgataatgtcgataatgtcgataactccaatataaacaatccaactgacataagaatagacaattcaaacctaaatagagaaacagaactagattcaaatttaaataaatctaatcagattagggaagacgaattagaacaaagcaatgcaaaatccaatctaaaatcaagcaagctatcctccacaatcactgtagacggctcagatgaaaaccaaatgtctaatccaaccattcaaagcgctatagacagtgcaaatgctggagatacaatcataataaccggaaagtcatatgttcactgccatttcatagttaacaagccactgacaataataagcgagattggaacatcaatgagcccatgcccttcaaatacaaaaggctctggtgcacatggaatattctacataagccctgaagctagcggaacagtcctaaagggattcaatctaacaaacacatatggtgactatgacgactatggaatactcataagaggagcagagaatgtagaaataatcaactgtacaatcaatacagtcagcgacggtgacggaataagaatagaaaatgccacaaacacaaaaatagctgactgcctaattaaggattcaaacattggaataaacattacaggttcaagcaaaacaaccgtaacaaacaataacataacaaacaacaaggtcacaggtgtcaatgtaggaataaataacaacgatacaactattcacactaacaatatcacatataaccagcatagcggaatagacctctactctggagattatgtatacatcctaaacaacttcattggtcacaatcaaaattctaaaagctcaagcggagctggaatatatgttaactcaaatatcaccaaagttgaaatcaaaggaaacttcctcaagcaaaacggacaatacggagtcctaaacgactatcgtgtaagaaatatggatgcatccagaggagctgaaaccctagagataaacaataacaattactatttaggacataccgaaagaatcacataccatatcgaatacagcaaatatgccggaggcccattcacttacgacagcgaaaatgatctatacgtctatgtgggggacggaaatggagactgggacattggaaagactgtagtctaccttggatatgcattctacagagacgaaaccgtttgcggatccactctctttaaagctccaagcaccacttggggaactgaggtctataagttagagatcagtccaatcagccaagtcaaaaaaggagtatactctgtttcgattgtagatgtcaacggcatcgttgcaagcgacataagctcaatatatgtgactttctatttaaataaaaacaataccgatgcagagcctcaaagcggagacatctataaaactgtcctaatggaaaacggaactgcaactgtaaatcttacagacaaagagtttaaagaaagtggaaataagataaccgcatgtttcccagggctttataatgtatataccatcaacccatatgcgacctttgatgtaaatgactcagatatccctggaagctatagaaacaccacaatcaatgcaacagatatgagtcttgttccaaactctggaaacaagattactgcaagattaactgatgaaaacggaaatcctgtagctggagaaagccttcaattcaagatctctggaatttcaacaacatatacaagaactacagacgaaaacggtgaggcaaatcttaaggtaagcctatcaaatccaaagacatacactgtcaacatcaactttaaaggcagtgaaaactataataaaagctcaaaaacaattaaattaaccgttaaaaaacaaacccctaaaatagaaagctcaaacatagatctattgccaaaatccggagagaatttcacagtcaccctaaaggatgcaaacaacaaggcaatagcaaataaagaaataagcttcacattaggcaaaaaaacatacacaagaactacagatgaaaatggtcaagcaagcttaaagataaaccttgcaaacactggaaaatacacaataactacaaaatccgaaaagacaagccaatacaacgaggtttcaaagtccaatacaataacaatcaaaactggtgcaaacaaagtaaatatcgaaagctcagataagacctacattcctaaatccggtgaaaatttcacagtcaccctaaaggatgcaaacagcaatccaatagcaagcaaggaaataagcttcacattaggcaaaaaaacatacacaagaactacaaatgaaaatggtcaagcaagcttaaagataaaccttgcaaacactaagaaatacccaattacaacaaagtatgccggagatgacacatattcatcagcaagtgccgaaaatacaataacaatagcaaaagcagctgcagaacttacaacttacaacagaacatatatcaacaaatcaggacaaatgttcagcgcaaagcttactgataaaaacaatattccattggaaaatgaaaagataagcttcactatcggcaagaagacatataacagaaccacagatgcagatggcttagcatatcttacaataaatcttgcctatgataaaaatatcagcacaaaattcttaggaaacgatcagtacaatgcaaaaacaaacacaaattcaatcacaataacagatgagatagaaaccgcttatatcgataaaggccttaaaaacgacgagattcaaagaatcatagatgaaattaagccaaattatgatgtaaaattcttaggtgacagttacgacgatgtcaatctaaacattaacaaaaccttattaatctacacagacgtaaataccacattaaatggaaaatcagcaagccctgttttcaatttaagagggggtaatattggagtaagcttctttaatataaatgtaaactccacagatggggaaggatatggaataatccttaacaatacaaaagaagcagtgatagatggaaacacaataagcaacatattggattcatctaaaatgactgattacaataatggaagcacaatacttccagggcatggaattgaaatattaaacagcaaagcaacattgattgaacaaaacaatatagaccactttgaaagcggaatctatatggaatacagcgatgatgcagtgataagagaaaataccattactgaaaacaattatggtatcaaatacggatttggaaactccaacacccaaatttacaacaatacaataattgacaatatcggatggtacacagaagaggttccagaaggccctagaggctatggagcattccttaataattcagcaaccaatataacaatcacagataacaatatcagcaataattatatgggaatttccgttgatgcaaacaagagcacaggaatcgtcatcacaagaaatctgattgcagacaactcacttgaaggaatcagattcaacgaaggctatgacctggcagaaaatgcaattgaaccagtggtaactgacaatgcaatctatagaaatgcagaaggccctagcctaatgattcttggtgaaatgagcgcaaatccaaatggaatctatggagccggccaatgggacgacagcatgaagctaaagatagatccaaactggtacggcgtaaacaatcttagaacctgggactatgaaaccggcattgtaggggttggaacaatgtgtcctagaatcaagtccactacaatcaagttcaacacccttgaatatgaaaatggaacttataaaatcaatttctataaaaacggcacttttgcaatcaatctcgctaaattcgacatctatgccacaataaatagaaatacagacaaaaaggccgaagttcatttctatgtggaaaacggtacaggtacattcagctttgataagtcaaactacctagacagcaataacacaattgaaatatctgtaggatctttgataaatgtggtggatagaatttatagtgttgtttatgcttatgacgttccagattcagagattccaaattaa

SEQ ID NO: 256 - DNA, 1341 bp, Methanobrevibacter ruminantium
  source 1..1341: mol_type = genomic DNA
atgggagggatatatatcatcatgaagacttttagacaacagctattggaagaccctgaattccagaactacctgttgcagagaccgaacctgacggagagcagcctgcagtcatacctcaatgccgccaccaacttcgtgaggttcacaggggagccgttctacaagaccgtgcatgagctcagaagccagcagaacgataggattgagaacaacatcatcataaggttcaacccgaaccagtcaaggataaacatcatgcagtttgagttcatagaatacctcaagggaaggggctgcaccgaggtgagcatagactcctatgtcaggtacatgaggaccatactgagcaccttgggaatcatactgcccaagtctccgaagctggacgacactccacaggactggtatctcctgacaaaggacgacataaagtatgtcctcgacacagcaaatctgcagtacaaggcggtcatcaatttcgctgccgttacaggactgagagtgagggacatgaggtcattgaccatcaaggacttcatgactgcgaccgaggagtaccatggctgcacggaggtcgaggacttcctggattcagcacctgacgggatgataggcttctgggagcttttccctcaaaagaccagaaagttcaggcttccctgcaaggtgtgcaacacccctgaaagcagcgaccttttgcttttctcattgaatgagcgtgtgaagtactttgaatggaagaacgagaaggacggcactgacctgaagatcaccaagaatgaccctctctttgcaagccgccaaaggaagtacaagaacttcatagcgcccaacagcataagctggaccctgtcccaatacagcgagaagctgagcgccgagagggaaagggtcttcaagtacaagctggagcatggcgagatcagtcaggagacctatgacgaaagcgttgcgacaatccccaagttccatgcgcatgggctcaggaagttcttcatctcaacattggctaagaaccgtgtggatgcaaggataagcgcacttatggaagggcacaaggctccgctggtaacggatagccactacatcaacaacgattacctgaaggagacaatcaaggaggagtacatgaggtgcattcctgacttgagcttcgagaatgttgaggtccgtttccttacaagcgaggaaaggaaatccttgcagcagaagatagatgagcttcaggaagagaacgagaacatgaagaaggacatggagaagtacattgacgatgccgtccatgagaagatgaaggacgccttcgagaactggctgaacattcaggactcaaaatga

SEQ ID NO: 257 - DNA, 297 bp, Methanobrevibacter ruminantium
  source 1..297: mol_type = genomic DNA
atgaatacattaaaaatagaatgttcaaaagatgattatatcataaagactgcaaaggcaaattctgaaaatgagttgaaagttgaagttcctgagaactggaactgcgactatgtgaatgctgtcctgtgggaagaggacatctgcgaagtgcttgaaaagggtgatgaaagaatgcttttgattcctatgtgcggtgaactgcttcttgaaggagtgcaggaagatgaatacataaagtacatttgccttcctgtaaaatatcaagatcagatggttttgattgcaaaaatttaa

SEQ ID NO: 258 - DNA, 885 bp, Methanobrevibacter ruminantium
  source 1..885: mol_type = genomic DNA
atgggaatgaaaaaagttaagatcgaaagtaaagcaaaaaataatatgacaagaaacgaaaaactcttctataaattatatgacgatttatataatgaagatagattaattttattctccacatattttaacatatatgataaatttatttttaaaaaagatataatccattatgttttaatgaactactctgaaaatgaaattattgaagcaatgaaaaaaattgatgaaattcagtcagaaggcattgatattaaaacattcatacctaaaaagtattgtccaaaatgtaaaaaagtaatggacagttatgggaaaatctgcccagattgcggtacaatattaatagaagatgaaaagaaaattcaagagcttcaagcaaaagataaagcatatgaagaatatctagaaaaagagtataatatttatttacaaaactcttatcacaatatgattcaagggtcatatactattaaaatacgaactcgaaagcctaagactgaaactgagatagtgcgcatacctgctcaaacagtaacatcaagaggcaagttcaattcaattagccagcattatccaagtgaaacctatacaagacaaaaagtgactcgtgcaaagtataaagagtgtagagttctttttgacaaagagaagatgatattaaatattgatggaaccgcaactaaactttattatgatgaagtttgtgaattggaatatcctgaacaggaagtgaatgaactagttactttaacattgcacaatggcacagtacttacttttaaaataaaaaatggatggtttgcttctgataatgaaaaaaaggcaagatttgacgctttcgtaaaaacctttattgaacaagggaaaaatctgcctctataa

SEQ ID NO: 259 - DNA, 828 bp, Methanobrevibacter ruminantium
  source 1..828: mol_type = genomic DNA
atgaaaacacaagatctaattaatataataaatgatgaggaatctcctgtattcctcaacagggaagtctttgagatggactatgtgccggacatctacaaatacagggacgagcagctggcgaaaatggcgatgtactgcaattcaatacctgacaacatagctcccaagaacctgcaattgtgcggaggcaatgcgacaggaaagaccacaacattaaagcagttcttcaagatgttgaacgaggcttttccaaacatagtaacagtctacatcaactgtcagctgttcaacacagaaaacacagtctacggaaaaatatacaacaagctgtacggagtaaagggctcgataaacggcaagtcaaacaccatgctcttcgacaagattgtcgcaaggcttaagaaggaaaataagatattgattataggcttggacgattttgacagcttcaagtctcgcgatgggctcaacaagatgctttacaacttcctgagaatccatgaggctgaggaaggcatacagatctgcatcttcaccgtcagcaacaaggagaatctgaagcttgctccttccgtcgagacaatcttcaacagggttccgatattctttgaccagtactccttggagcagatgtaccacatactggacgacaggtgcgccttcggtttctatcctggcgtgataagcgatgagctggtgagggttgttgccggcaagtcctatgacctgggcaatctgaggtatggcattaagcttctgagcgctgccggtcagaaggctgaagtctttggtgatggaaagataataaggaattttcttgattga

SEQ ID NO: 260 - DNA, 858 bp, Methanobrevibacter ruminantium
  source 1..858: mol_type = genomic DNA
atgtttttggaaaaatgcgatggaaaagatacaatcagcatgtctcttcaagaaaagatgaatcttatattggaaactatggaaagcaaaggaagccccttcatatcctgtattcattgtaacatacctataaatgaagcagaagaatggtacaaaaatggagaaataggagatcaggactttataaatttctatgatgatgtaaacttgattgaagaaagttttgggtttgaaatttataaaaaatcagaatatcctacattacatactcagagcataaatcaaatagcctctacttatccaatgaacagaacccaaaatgaaaagacaccactattccttagacgagaaagaaaattatacgaaataactaatatttttaaatcccattcaacaaatgaaatttttatatcaatggattctaaatcaaaactaaaacatgaaataaagtatgattttactcttaaagaattaaacgaaatttttaaaaattatttagaagaggattgttcaatttacatattaaacgataatagagcgtttgtaatgacattaggacacttccaatttgaatttgatgtttttggttctgcaaaagaaagttatgtatttgatgttgaaattgacgatgaaaaatacgataaaatattcattcgttcttcatactattttaatattcctgttgatgaattggatggcttggctaaaatattgaaacaaaaaagaataattgaagaaggattttttgaaggccaattcttatatcacactccaggaaacggcatgacatatggagacccagtaagaattatagaaaatgaaattgaaaaatacgcttttagattcataactttttaa

SEQ ID NO: 261 - DNA, 219 bp, Methanobrevibacter ruminantium
  source 1..219: mol_type = genomic DNA
atgcaatattggcgtattgtaaattactctccactagctgttgcatgtaaaaaaagaaaacattggacgtgtaatcattctttttatgcaacattttatatattgaactttcaaatatttaaaatcttgctttttatggctaaacagcagctattaagccgtattgatttgaatctactttttttaatatatttccaaaactttttgcttattatctaa

SEQ ID NO: 262 - DNA, 168 bp, Methanobrevibacter ruminantium
  source 1..168: mol_type = genomic DNA
atggaaaaattaatcgaaattgacggagttcaatacacagaagcccaaatcagaagggctttagccattgaacgagacgtgcgctctcctaatttcgttgatatgttattgggaaagatcaaacctagcgaacttgcaagcagagtttctgaaaaaggtgatgcctaa

SEQ ID NO: 263 - DNA, 156 bp, Methanobrevibacter ruminantium
  source 1..156: mol_type = genomic DNA
atgtgctatgtgggaaacaccaggacattggtctatcacacagaggactgcttctgcaaccactggctgttgaacgagaacaagaccattctagaggaaaagcctgtagacatgaaaccttgcagcttctgcaaaccacagtttgacactgaatag

SEQ ID NO: 264 - DNA, 225 bp, Methanobrevibacter ruminantium
  source 1..225: mol_type = genomic DNA
atggttgcagagatggttgaaaacatcaggaaaggagaaggagatggatattccatctaccctcctttttcctgcattgttttcctacaaggcaaaaagtattccgaatgctgctgcaaggctgaggcaagggatcagaagtttgcacttgtgaaccttgtaggcttcagaagagaggatgtcaaggtcatagacccaaggaccaacgaggagctgttcgtatga

SEQ ID NO: 265 - DNA, 162 bp, Methanobrevibacter ruminantium
  source 1..162: mol_type = genomic DNA
atgagcatgcttgcagacttcgagcctgcaaggctccacaagaggacatgggctgaaaggcatgatgtcgaaatccttgctgtcatatgccttgccataagcattgcaatgctacttcttttctttgcgcttgcagagccgactgttgcaggagtgatttag

SEQ ID NO: 266 - DNA, 453 bp, Methanobrevibacter ruminantium
  source 1..453: mol_type = genomic DNA
atgactaaggaatttgaggacttcatgagaaggaacacaggactgcttgttttcttgagatgggacacagtggcatatctgaaataccttgagtcccattatgacgaaaggaagtacgaatgcgcttacagattgttggaggcaatcgacaatctctttgacttctaccagataaccttcagcaaaaagactgaaagggaaattcctgaccagctttttgaaaaggacaagataaacaaaggcttcctttcacacataggaaaggcttgcaaaaagcagtctgatttttacggtcagagatggaagtccacaagaggaatcagagatgcctacggacactattccgcaggaaacttcctgtttgcagacatctacggttgcctgcacaggataagcgacgattgctacaggattttgaactttagcgaatatgaaattgaggagaaagcatga

SEQ ID NO: 267 - DNA, 756 bp, Methanobrevibacter ruminantium
  source 1..756: mol_type = genomic DNA
atgaatgagatagttactacaactaacgagaataatgtacctgtcgacgttgactatgccatcgaggaatggaaggcataccagcgattgaccagagagctattggacgaaacagattatcagacacacagaggcaggaagtacaagaccaagagcgcttggcagaagtacgcacgtgccttcaacataaacacacagataatcgacaaggaaatcgtcaagaatgacaagggaatcgtcattgaggctgagtatactgtcagagccaccttgcctaacggacgctttgtcgagtcagacggaagctgcgacagaagagagtccggaaagagggaaatgagcaaccacagcataaaggcgacagccaagacccgtgcaaccaacagagccataagcgagctcatcggtgcaggggacgtcagcgctgacgaattggatcctgcattcgacaaggtgcagcacagcaagaccaatcatgtcattgaggcggaagttgcagagataattgaatctccgtatgacaaaaatgcgggttttgagactgccgacaagattgagcctgtggatgaggaccctgtctgcaagaattgggtgaagaccatctgcaagacaatcaaggcagagggaaagccttgccttaaaggtgtcctcatccagaaggctaggaccataggcaccatgaccgacgaggaaaggaacaggctcatcgagtacataaagacacttccgaagggagaggtgaacctcgatgattga

SEQ ID NO: 268 - DNA, 231 bp, Methanobrevibacter ruminantium
  source 1..231: mol_type = genomic DNA
atgattgagtgcatacaggaagagggagacttcacggattgggaggttccttcctcctcttccgacatcaagtacatagtttcagtggatgatgagggaaacctgttctgcagctgtcctgacttctattacaggaagtccaggatgaaccctcacatctcaaaccctgaatcctattgcaaacacatcagacaagtcttggaggaggacaatagattgcaaatgctctag

SEQ ID NO: 269 - DNA, 1005 bp, Methanobrevibacter ruminantium
  source 1..1005: mol_type = genomic DNA
atggataatataaataagacaaaaacaagtttagctaagtttgaagagtttttcagcactgtatacaaggacgaagtcatggaagttttggaaaagtatcctgaggaaaggacattggttgtggactatgagaatttggaaatgtttgatcctgatttggcagacttgttgattgaaaagcctgacgaagtaatcgcagcttcacagaaagcaatcaagaacattgacccattgatgaaagatccaaagttggacatcaaattcaaaaatgtgtcaaactgcattgattttgtgaatgcagacagcaaatacattggaaagttaatatcttttgaagccaaagtcatggaagctaaggaacctaaaccaatacttgacattgcagtctatgaatgtaggggttgcatgagtttgcgtgaaatacctcaaaccatcaattcaagtttagaaccatcactatgtccagaatgtggagggaggtcttttagactgctacaagatgaatcagagttcttggaatcacagctattgattgtctcttctgatgacacttctaaaagtttaaaggttcttctgctaagggatgaatgctcttttgacttgtattccatgggtcaggaagtaagaataactggcatattgaaatctttttcttctaattatggatatgaatattttttagaatgcaatttaattgaaatattaaatgattctgaagattctgaatatgatgaatatggcaacagaaacagtccagagtatcgaacctggcaaaaagtagtcatagattcagacagagtatgccaatgctgtggaggatctaagcatttggaggctcaccatatcttcagctatcaaaataatccaagttacagggttaatttggagaacggcattgctttatgtaaatggtgccatagcaaataccatagttattatggcaaggacgcctctccaaaaagcctaattagattcttaaaaagatttgggaggtatgatggctaa

SEQ ID NO: 270 - DNA, 435 bp, Methanobrevibacter ruminantium
  source 1..435: mol_type = genomic DNA
atgatggctaacaagattagagttaatctcacggttgaccctaatttgtggcaattagcaaaagacaagttaccttgcagcagaagcgaattctttgagaatcagttgaagatgttcttagggattgaagatgacgagtcggaaatcattaaggacatccaaaccaaagaaaatgagattaacgcactaagagacaagttatgtcatgttcgcaaatcaaagcagttgaaattggaatcaaacaaatctatggagaaggctatggcaagcttaaacagaatgcacaagaaatatgggaaaatcggagagaaccagattaggaacctcgcccatgttcacaaggttgactttgatgacttgaagaaggaatgtcaggacaactgcatgaacatatttgaatttgcagaagttcctaagcatgatagcgtaatgtga

SEQ ID NO: 271 - DNA, 420 bp, Methanobrevibacter ruminantium
  source 1..420: mol_type = genomic DNA
atggagttgtttttgatgacaattggaagtttggacaattttggaaagtcagatggagaaaacatgaaccctgaagatttcgactgttctgttttctttgaaatgtacaaggcactttttgagatattggatgttgaagttggcagcttcgctgaactcttggatgtgtacaagaatgtcgagatggattacaccttgaagagacatgccctcaagcagaaggaaatcctttactggttcaataccgactggaaggaggaacttggaaaggaaaagccgaccgaaaaggacaaggagaaatggatcaggcagaagattggttatgactccttcgtggtcgagcagctagaagtcaagctcaagcacatcagaagaatgtatgaaaccgctttgaagcattcctttgaggcaataaaatga

SEQ ID NO: 272 - DNA, 276 bp, Methanobrevibacter ruminantium
  source 1..276: mol_type = genomic DNA
atgaatgtgaaaacagtcatgaatgaccttataggattgtcaaaggagttcgagggagtggaatatgagattgaatccaaaaattcaatctacttctattcctttccaaagtacatgaaggaaggcattgtgattctgaaatattccgcaatctatgacctgcacaccatattgaaaggcatggatggaatcatagtggacattctggaggttgaggacaatcctggtgatgagaagaaggatttgctatatgtgcagattgaggtgaaggaatga

SEQ ID NO: 273 - DNA, 234 bp, Methanobrevibacter ruminantium
  source 1..234: mol_type = genomic DNA
atgattagcgacgaatgggaagaggaatactatgtcaaggtcaacgaggaactggagcaggtggaagtcaggtttttcagcaaggtcgacaggctcgtctttgctcaatcctactcttcttcatcttccttttcctttgaggaggctgaaatcctgtgcgacaggatatgcgacatactgacaaacgatttgggaaatgccaagtattatctaggaggaaaagatgaattatag

SEQ ID NO: 274 - DNA, 150 bp, Methanobrevibacter ruminantium
  source 1..150: mol_type = genomic DNA
atgaattatagggaatgggttgcaagccagttcgagctgaggatgactgaggacggaagggtttgcttcaagacaccatgcagctactacacattttcaaaggaggactttgagataataagggagatgttccttaatttcgagtcctga

SEQ ID NO: 275 - DNA, 174 bp, Methanobrevibacter ruminantium
  source 1..174: mol_type = genomic DNA
atggatagaataaaggaattgaatgtatgcggaacctgcaagcacagccatttgattccagacatcaacggagagatagcagtgaacatttgcaggataggttcagaggctgtcaacaaggacggaggacttacatattgcgtagactggacaccaaggaggaagctgtcatga

SEQ ID NO: 276 - DNA, 336 bp, Methanobrevibacter ruminantium
  source 1..336: mol_type = genomic DNA
atgttaagtaaaaaagaagccatacagatgacgctggacaatgagaagcactatcctgttaagtgcaagtactgcggaaagccgttcaccaagtctcacaacaggcagatgtactgttcagacagttgcagacggaatgccttgagggaacagaaggcaagataccaggctaaaaggaggctaaaaataaagcagaaagtgctgattgtagatgaatacaagaaatacggtttgggtagctatggaacaagtgcgaacggacacagaaagaacaatttttcacatgagtacatggctattcaaaaggagatgaaaagaataggattgaagagataa

SEQ ID NO: 277 - DNA, 552 bp, Methanobrevibacter ruminantium
  source 1..552: mol_type = genomic DNA
atgtatttggctaaattttgtcctaactgtggaaataaagtagaagaaaatgataaattctgcatttattgtggaaataaactaagagttataattcctgaaaaaaaagtgaaaagaagctcaaatagtattaatgatgaaaaaactagcaaatatgttgaagtcattgatgggctaatgagatataaagtttttccatcaagtttacctgtgaaatatattatttataaagtgaattatggaacaacatctgatgaaataaaaaatatattagaaaatgggaattataattataaaataaatatccattacttcctacaaaacaaaaaattatatttccgtagcccaaaaaatccgaacatgttttttaaatttcataatgatagattcaatgaggagatgaggaaagacaataaagaaataatacatatttcttcatatgctagggtacatagaccttcattaactaaaatatttaattttaaccaagaaaaaacatttatattggcaaataaacattttgaagaaaatataaggaaaacaagattatga

SEQ ID NO: 278 - DNA, 237 bp, Methanobrevibacter ruminantium
  source 1..237: mol_type = genomic DNA
atgatgatttatgataaagcgacagttacaagcctcatagtggctatcctattgccattgatgagcatgttaggaatcggagaattgactcagaactacatattggcaatagtgagcggtatgatagcccttgtggtttggtactacaacgagaagcacaacagcgatttggtgagcggaaccaccaagtgcgactgcgagctttgctatgggggagacgatgaagcacttatatga

SEQ ID NO: 279 - DNA, 339 bp, Methanobrevibacter ruminantium
  source 1..339: mol_type = genomic DNA
atgaagcacttatatgagataatcccttacaggaggactgtttggattacagggttcctgaagacaacagtctcctcggcaatgataaccactggcgtagtgatattgttcaacagcataaccgagcacccttacttcatggagtgggacgagataggaatcgttcttggaatcgtttccatcaccatcgcctgcatttacatagcgatgatagacagatggaaggaacgcaggaagaaggaggagcttgacacgatagaggactacataaacaggaaggctgaggagatagcgaacatgaaggtattgaggaaacttgaggaattggaagaggaatga

SEQ ID NO: 280 - DNA, 621 bp, Methanobrevibacter ruminantium
  source 1..621: mol_type = genomic DNA
atgactatgatagaaatcagcaccataaagatcaccgacataaagcctgccgaatacaatccgaggataatgagccagcttgaacacacaaagctcaggaactccatggagacattcggagtggttgacccaataataatcaacctgaagaacaaccacatcataggagggcaccaaaggtacgaggtccttctggacaagtccatggaggacaacgagttcataaaggagctccacctcatcaggcttggagatgtaggctgggcattccctgagtcagacctcgaggtcgaggacgatgaccatgagaaagccttgaacctggctctcaacaacatcgagggtgagtgggacctgccaaagctggaacccatattgacagatttaaaggatgtaggattcgacattgaacttacaggattcagcgacatcgagcttaccgagctcaatctggagaacaaccttgtctttgcggaggagttcgagcctgacgagagcgaggaggatgtcgacttggaggacatttacgatgagcctgtaaaggaaatgctccaatgccctgcatgcgaccatgttgatgttgtgaaaaggttcaagagagtcgattcacaaggagattag

SEQ ID NO: 281 - DNA, 201 bp, Methanobrevibacter ruminantium
  source 1..201: mol_type = genomic DNA
atgaagatctacttggcggcagcggacaccatgagcgaggacatcataaggctcctgccggttgccaaaaggcttcactggaacctgttcagctactactatctcctgacccttaagaagatggaggactatgacatcataaggaaggcttcaaaaaagcgtccttatagacagcggagcgcacagcttccagaagggtaa

SEQ ID NO: 282 - DNA, 459 bp, Methanobrevibacter ruminantium
  source 1..459: mol_type = genomic DNA
atggacgtcgacaacctgctgggatatgacaaggtactggaattgaggtctttattggaggaggtcacggacaaggtgatacccgtatggcacaagaaccgcggaatcaaggacttcaagcagatgtgccaggactacaatttcgtcagcataagcggctggagaaacgaggacgtcaaggatgaccagttcatccatttcgtcaggcatgcacacaggaacggctgcaggattcacggattgggattgacacggagaaaggttctcgacagggttcccttcgacagcgtcgacagcagcagctggctccagaccatattgtatgcaaggcttgggcagaagcagttggattccaagttcgcaaccgaaaggagaggcgatctggcggtgctgtcctacatcaagtggatgaagacacaagaagagtactacaagaaatggagacattatcatgattaa

SEQ ID NO: 283 - DNA, 657 bp, Methanobrevibacter ruminantium
  source 1..657: mol_type = genomic DNA
atgattaatgaaaggataagaccttatttgaattttagcttcaatgacaagaaagtcattttcgtcacattgttcgttgtgagcaatctgataagcaacctgttagccatcaaggttttcaacttgggattttggggattgacaaccgattgcggaaatctcctgttcccgttaggataccttatggcagacgtgattacagaagtctatggagagaggacagctcgaagggtcatattgcttgggctctttgcaaacatattgctgattgtggctaccacattgactgtctacatgccgtatccaagctattggacaggacagggagcgtatgcctacatgttcggattcactcctagaatcgtgcttgcagggttcatagcatacttggtgggacagttcgtgaatgcgagacttatggtgctcatcaagaaatggaccaacagcaagtacctgttcatgaggacaatcggatctacacttggaggggagctttgtgatagttgcatatgcagcagcattgcttattacggtattgtgcctaactctggcatattgctatttattcttatgcagtatgttgttaaggttacttgggaagtggtgatgcagcctctgacatacaagtcaatcgcttgggctagaaaagacggatag

SEQ ID NO: 284 - DNA, 591 bp, Methanobrevibacter ruminantium
  source 1..591: mol_type = genomic DNA
atggcaatgcccgaaccttgggaaaggcaaagggacgagaacggaaagcttgagccaataaaggcattcgagtacttcaccgagtacctgacaatggacaagccacgaagcatgagggttctgtgcgagaggctcggcaagaaagatgggtatattaggcaacttcatgcctactcatccacatggaactgggtcgaaagggcagaggcatacgatgaacacataatattgaagaaacggttaaggaaagagaagttttacgatgaacttgtcgaatccgagcttcccaatttaaggaaacggctcgaatactacaacaagaatatgaatgacatcgaaaccgacatgacaaccaagcccacaagcaaggctcatgcctatgacaagaacagcaaggcgcacagcacaaccctgaatgaaatattgctgatgatcggcaagcctaccgaaatcaaggaaaccagccttgaagcagacattgaaagcgacaacaagattgatttggagaacagggtcgaggtagacattacaagcgacgagttcatggaaagcgaattggaatacatgagaaagatgattgaagaaaagtga

SEQ ID NO: 285 - DNA, 1476 bp, Methanobrevibacter ruminantium
  source 1..1476: mol_type = genomic DNA
atgacagctgcaagcagggtgaatgctcacggaacaatgggtcttggaagatggagcatttacataaacaacggattctggaagcctagggactttgatgtcctgataatagagcttctgcaatatgcaattcagggacgggtgagcggcatattgctgggagttccctcaaggcacggaaagtccacacttatcagtaagaacttttgcagctattttttatcatatttccctaatgagcaggtcatcctttcaagctattcgcaaggattggcaagtgagttcggaggacaggtgaaggacattgtcaatcattacggctacctttcaccgtacaagccgaccatcaggtctgatagtaaggctaaaaacaagttcaagctcaatgagccttatcgtggacagatgttgagtgcaggtgctggcggttcaatcatgggatacggtgcaggtctccttattgtcgatgaccctatcaagaacgtcgctgaagccgaatccaaggtacgtcaggcaaagctcaaggactggtggggaggaaccatcaagtcaagggtccagaggagaagcaacggacttcctcctatcaagattgtcattgcacaaagacttcatttaaaggatttgcatggaatcataaaggagacagagccgacaatacctgcaaatgacgcattcaggattttaaggaacggaggctcaatcgaccctaacacatgggttgacttcaaccttcctgcaatctgcgacagcgaggacgatattcttggaagaaagataggtgaagtgctttgggaagagcagagagactatgaatggctcatggctgaaaagagaagcatgggctcatatctctttaatagtatctatcaaggacagcctgtagagcgtgatggtgagatatttaaaagagaatggtttcaggatgaggtcaatcacaagctcacatgcctcattgaccctaaggacattccgaaggacttgcctcagctcagatattgggatttcggtgcaagcggagacgctggtgacggaacctctgcaatcttgactagctatgatggagaatatctgtatgttctggatcttgttgcaggaaagttttcaagtcttaaagtattgaaaacatttaagagactttgtaaaaaggacggaaaacaaactcgtgtaatggtcgagcaggagcctggaagtggctcaaaactattgattaagaagtttaggagagaagaggatttaagaggatacaatattcgtgcagataaggttcaggtcagtaaaaaagtcagggcttttgaccttgaaggtcttgcagaggacaggagaatcaagatggttccagcccattggaacaataagttgattgaccagttggtggcatttacaggtgaagatggtggagaggatgatatagtggatactattactggctcttgcaggttctggacaagacctagaagaagagttaaagcgtga

SEQ ID NO: 286 - DNA, 1326 bp, Methanobrevibacter ruminantium
  source 1..1326: mol_type = genomic DNA
atgagtaagaaacaagaaatgatgagaattgaaaggttaaaacactatgcatatcaaacaggactaataatccctatttttaaaaatcatgatttaattaaaaaaatagaaaatggaaaaataactaatactgacgaaataaagatatatattgaggaaaatgaaaagcagataaaaagaagaagagaatttataagtattatttatgataattgcaaatattttaaatacgacagcatatgttataaattaatatccaaagtaaataattttgaaataaagagcctagaagaattaatgaatgaaatagaaagtgaaaaaaagaaaaatggttttagaaagaacatagaagaaaaagaattaataaaagaaaatgaaaataaaggaaggctaaaagaatatgtgagaattgttaggagagaatatggcttagattttacatcagtaaagaaattaaaattaaaaatcgataataataaaataagaagcaaagaagaattaaatgaagaaataattgaagaaaaaaagaaaactgaattgaggagaattgtttatgatagtgacttaaattgggacttaaaatgggaattagaatccaaaataagacataacgaaataacaactaaagaagaattaataaaagaaataagaagaatagaatttataaatattatttatgataataacagagattttaaattagactatgtcacaatacaaaaattagtatcaaaaataggaagtaacgaaataacaactaaagaggaattaataaaagaaatgactgaagaaaaaaagaaaggcatagaaagaagaacggaatataagaaaattgttaatgaagcgcatgccttagataatacatcacaatggaaattagaattaaaaatcaataatgatgaaataagaaacaaagaagaattaatgaatgaaatagaaagtgaaaaaaagaaaactgaattgaggagaattgttaatgatagtgacttaaatgatacctcacaaagaaaattattatcgaaaatagatgaggatattgaagtaataactaaagaaaaattaaaaaaagaaatacaaaaagaagaaagaataatagaatataagaaaattgttaatgaagcgcatgccttagataatacatcacaatggaaattagaattaaaaatcaataatgatgaaataagaaacaaagaagaattaatgaatgaaatagaaagtgaaaaaaagaaaactgaattgagaagaaaatcagaagaaataataagaagaaaaaaagagcggagcgactcatatcatccaaatgctaataaaccatggaaattttaa

SEQ ID NO: 287 - DNA, 1659 bp, Methanobrevibacter ruminantium
  source 1..1659: mol_type = genomic DNA
ttgagtaagaatgctaaagcagacgcctttgttgtgaccactgaagacggatcctatgacattgtcgatgcagatgtcttggagaggtatgcaataaagagcgaatctgacgagacaggaagcaagcagttgaagactgatggttgggaatatgatgatacattgcttgagccgttgtatgacccattgcagttgtgtgagctattggagataaacacatatcatgagaactgtgtcgatgttgttgcaagggacagtgcaggaataggatatgacatagttccagttactggagagaaagaaaaggaacttaacaagccaaaattgaccaattttctagaaaacatcgagcctaatatcaatgaattgctgtaccaaatgaactatgacagaagggctactggctacggagccttggaattaatcagaaaagataaatcgaaatcagagcctgttaacctatcccatatatcttcttacactttaagaaggacaagtgatgggaaaagagtaaagcagagagtgggaacaaagacagtatggtttgtaatctatggaaagaactatgacaaggaaggcaatctgtgcgatgtacactctgagacaggagagttccacccttacaattccttaagcaaggaagaaagggcaaacgagctgttgtggactatggaatacaccacaaaaagcaagtactacggattgcctaagatagtgggtgcaattccagccatttatagcgacataagccgttccaagtacaataccagcttcttcaagaactacggaatgccatcattcgcagtcttggtaagtggagacttcgtggactatggccaggaggagttccttgaggacggaacaaagaatcctgaatatgacgttacaaagactctgaagtggaagatttcacagcaattgaagcaggcaataaagaaccctcacagtgcagtaacaatccttgtcccatctgagggagaggaaggtaatgtggagattgaactgaagccgctgagtgtcgagaccaaggaggcgagcttcagactcttcaggcaggataacagggatgaagtaatccatgcacacagggttcctccatacaaggtcggaataaacgagacaggcagtttgggtggaagcaatatagagggagccaccataaactacaagaacgatgtggtgctaccaatcagattcaacgatgagtttctaattaaccaagtgataaagaatgactttaagataaaggactggagattcaagataacggaacatgacacaagggactacaccacagacattgcaataatcaaggaactgttccttatggcttcaatcactccaaggcagatcatcgagaacattggcgaaaggttcggtctgacagcttcagacaatccttttttagatgaatactacttgaacaatgttcctttggagaatgtatggaatggcggtgatgtgccgatggaagcggagacagttcttgacagcttggagaatgacttgatgaaggacgcaggtgttatggatgaacagcttagagagaagagacagactcgtgatgatggcgctcaaggtgcgtcattcaaagaggcagattcagaatatcaagagagaatacagaaggcgtttgatactcgaagagcagtgcagtag

SEQ ID NO: 288 - DNA, 2328 bp, Methanobrevibacter ruminantium
  source 1..2328: mol_type = genomic DNA
atgatggcgctcaaggtgcgtcattcaaagaggcagattcagaatatcaagagagaatacagaaggcgtttgatactcgaagagcagtgcagtagggagattgcggacttcttcagaaggcttgagaggaaaatccacaaggtcatggatgagcactgggaaagcgaattgggtcttttccatctgaacaaggtttcagacatcatacaggacagcaggcaggagtactatgacatcctgttcaagtactgcaaggactcctacatgaagggaagggaagctaccgaaaggagattcaacagaaaactggaaaacattagcatgaaggcagatgtcaacatcacaagacttgaggacctgttcaagcccgaccctactataaggtacaatctcaacaataaggtctttcaggcttcagcccatacaatggacagggtcgacaataggataatggagaacataacccaaagctatgatgacggattaggcattgatgaggctaaggacaggctgaccgtcgagtacaatggattgaagtcttgggaggcacagaggattgcaaggaccgaaatcaattcagcccagaatgacggtgcctttgacgtctatggagagcttggagttgagtaccatcagtggtggactgcccaggacgaaagagtcagggagacaccgcaggcagaccacagggaacttcacggcaagatagtgaaggtgggcaactcgttcagcaacgggcttcagtatcctggagacaggacaggcaggatagttcactggataaactgccgttgcacaacccttccgttcctcatgcctctcggaaagatggctcctccaggaatgattgagttcaccgaagaggacctgattgacattcctaacttcgagatgcctacaatagatgacctgatgaggagatacgaagctgttgaacccaaatcccagtggatacttgatgactttgaggatttgatcaacctcaatgaagatgaggaaagaaggcttgctgaaatacaggaaatctttaagaggaatgctagagacaatgttcctccatcatatattgtccaaaggcagtatgacgaattcatgcttagaaagaactttgcagagaatcttagaatgcttaaaagaggacagaatccgttcctcaacgagtctgaaaagcagatgttcataaaggattacagcaggttcctaaagcagtacgaaaacgagataagaatgaacaaggaacttcagaaaatgtatccgaaggagttttcaaaggttgcaaaggatgtcgacctgcaattctacagggagaactacaacaatcagttcagcatttaccatcctgatgacatcaggtcatttgaagtaacctccaaaaccttgacttctgaggagagggctaggctgaaggaaatcgagaagctctatcctaaggaatccaagagaatcgcaaaggaaatggacttgaagtattatgagaaaagacatcctgaaagatttggcaggttcatggaggaagaggaaaggaagaggctggcaaaaattgagaggatgtatcctaaggaaacctccaagatggcaaatgaatttgctcctagagatgtcagcaggctgagaaccaaggaggacattgacctgtacgagaaaaacttcatcatgaacaagtcatacaggaagaaagccgatgagattgtgaacggcaatggcatgacaataacaagaaatgtgaagtatgacctgaagggaagatacgaggactacatcaacataactgacgatacgttcgatgttttgaggttcaaggactacaattgcgaaatctggatcagcagcaaaagcgaagtgtccacagtcgaaatcatgcaaactcttgacaagattcctagaaagctcatgaaccaaaaccacaacagaataatattctctgctgacagggatgtctataatctcaagaagaaccatttcgtcggaggagttacaaagagaaaggacaatgaaattgtgatcttcaaatgcaaggaaggaatcctttcacaaaccaaaacccttgctcatgaacttggacatgcttgggacaacaatctgagcaagattgccaatagaggaggagcctactataaggttgccgaagaggaaggaggatttgtaacctcatatgcaagaaagggctttgaagtcttcaagacccattacagcgaagactttgcggaagcaatggaactgtatgtaacaagccctgaaaaactgaggagaaaattcccaaaaagatatgagttcataaagaacatgatggaagacgatttgttcgttttggggctcatcccttattga

SEQ ID NO: 289 - DNA, 264 bp, Methanobrevibacter ruminantium
  source 1..264: mol_type = genomic DNA
atgataattgaaattcctggaaatgacaggacagaagaaataaatttgccgaacggacagtttgtactgataacctacttgcaggaaaatgacatgatgtcattgcctgacgggaagtatgtctgcccattcagaatgattcagcttttcactgaagagggcggtgaactgattggagagtgcattgaggaaaatcctcactacaacactcgcttctacaatactgtctttgagcatttggatgaaggaattgagtacagataa

SEQ ID NO: 290 - DNA, 540 bp, Methanobrevibacter ruminantium
  source 1..540: mol_type = genomic DNA
atgttaagagtcgtagagagaacctattatcaacaagaagaaatcaagacactagactgtcgaattagagaggcaggagtcaacacttactcccttgctcgtcaaggagcagttgactatcctacctacgaatcctacaacgaggtgagagaggaaaggataaaagaggctaaggaaaaatacggtgaatcctactactatcactggagagacgttgagacctacttctattacttaggaagattctttagtgatttggaggaaatcgagaagtacttagaaaggactgttacctataagcctcacagagaagaacttaaagaagcaatggaaaggttagacaaaagattcgaggaagtcatcaacgagttctggtattctcttgaggaatacgaggatataaccgaggatgtacttgagcagttgaaagaaggtgattgcaccgttcattgcgaattccttataaaagagtttaagaaattcgtcaatgtcatatgcagaatcataaaacaaaacgagattaaccataaggagttttaa

SEQ ID NO: 291 - DNA, 291 bp, Methanobrevibacter ruminantium
  source 1..291: mol_type = genomic DNA
atggacgcgataaacgttatcaaccaaaacaagatattagtagatgttttgtaccgtgggactgtaaacctgattgacatcgtcatcggtgatgcattggtctatgacaatccgacagttgtagtcaagtgctacaccacagatttggcttttgcaaccacagagattgatgagattgtattagagaacgaagaatttgagttattaataacttacgaggacggagagttctcaattttgttgaagtcccacaatcttggggaattaggatacattgaatgggtaatttag

SEQ ID NO: 292 - DNA, 330 bp, Methanobrevibacter ruminantium
  source 1..330: mol_type = genomic DNA
atgggtaatttaggtggttttcgtatggtttttgtcgatttgtgcgagaacgaaatagcagacatggtcgagagcttctatcgcaatggagacggtagcagcaggatattgaccaacagagcagttggagagatagtggagcactactgttcctttgaagtagacggtagaatcaccactaatctccgagatttcctattatatagtgttgtcttatatgacaccattggagaggctgtcgatgacggagtcaaccttgaggaagtgttcatcatagaagacaggaactgctacacagggaagtctcaagtcatattgattggagggtga

SEQ ID NO: 293 - DNA, 567 bp, Methanobrevibacter ruminantium
  source 1..567: mol_type = genomic DNA
gtgagaaaagtggtgaattggttgaaggctattggagataacttctcagtggattatctccttttagcattattctctagtggagatttgatattggttgccatcgttctcaattcttatggtgtcatctcacctgagaatgtaagggaactggtgattgactatataagttacaggaaagttgatattttttggagacatctaaggagacctagaatgagttttgaagattatgtcttagacaattttgaagagatggaaactggtgaactcaccagagagcaggttgttgaatttgtctctcgacaagagaggaaaggactcaccttctgcaatgagatcttcattgctgtgcctttgaagaaggggagcaaggacgatatcgttgagatattgtggaatgagtattttgtggaggactataaggagaactggttagagcaacacgagaatcttggttggaatgactggaagaaacttttgaagaaagagatagttgagaatggtggcgatgacttccaaatctttaggaatcacctgattgactgtgtcttaatggagtattga

SEQ ID NO: 294 - DNA, 192 bp, Methanobrevibacter ruminantium
  source 1..192: mol_type = genomic DNA
atgacaatgaaagttacttttgaagatgagaacggtgagagaacagtcgagttcggcgatgacgtcgatttcgttttaatcgaaagcgatgatgacggaaacattgagattcgcgaaggagactgggaattggacggagattccgacgatgattgggaagagtacgatgactgggacgaggaggagttctga

SEQ ID NO: 295 - DNA, 282 bp, Methanobrevibacter ruminantium
  source 1..282: mol_type = genomic DNA
gtggacgaattcgttgagaccctgttcgacacctactggaaggtgaatgagaacggagagtacatgagccttaccgattgcggtgatttctacatcgcaaaggttgctccctgtgttcgcaactggagcatagtgatagaatgcaattgcttctgttttcattgcaaggaatttgtctaccatgagaacggagcaatacttgagataggtatggagattagctctctttacctaagccaaatggagataaaagatttgaagatatacatgatagattgttag

SEQ ID NO: 296 - DNA, 372 bp, Methanobrevibacter ruminantium
  source 1..372: mol_type = genomic DNA
atgggattagacatgtttttggaaggaatatttgaacaagacggagagaatgtaagagaacaggtgatttactggagaaagtccaatcaggtacacaactggttcgtagtcaacgctcaggacggagaggacaactgccaaccacactcagtaagcagagaacagttagaggaactaagagacctatgcagagcagtgctcgcagacaatgacaaggcagaggaacttctcccaacaagacctggtttcttctttggtgcgatagactatgacgaatggtactactacgatttgcagtacaccgtcgagaaaatagacgaagtgcttaaagacgacagatacctgtactttgagtattgcagttggtggtag

SEQ ID NO: 297 - DNA, 198 bp, Methanobrevibacter ruminantium
  source 1..198: mol_type = genomic DNA
atggaatgcccttgcgataattgtgagatgttaagagagaacgaaccaatcaaggtgattgactggaagtccaattctccatttggaatggatttgtatcactttgaggacggcttcagatgttgctataatggtgaggaaagcttgagaaaagaggatctaagcaatcatggttgcagattaagaggaggaatttag

SEQ ID NO: 298 - DNA, 351 bp, Methanobrevibacter ruminantium
  source 1..351: mol_type = genomic DNA
atggaactgatgactagggaaatggaagggaaactcaaatccttccctttctattcccaagacggaaaaggagatgacgcgatagtggtgatgaagttcttcaacccttacggattgggaacttggtatgtattggaggcagagaaacaggagaatggtgattaccttttcttcggatatgttgaatcaccgataacacctgaattcaacgagtacggttacttctcattgtctgagttggagaaccttaagataccaataaaaatcaatggaataaccgtgtcctacggtaggattgaaagggatttgtactttgaaagggtgagaattggagacataataggaaattag

SEQ ID NO: 299 - DNA, 225 bp, Methanobrevibacter ruminantium
  source 1..225: mol_type = genomic DNA
atgttcggacagaagaaagaatttgtcaaaaagatgtatcatgtcggagacgttgtcgaactggttcatatggacgatgcacaggctccacctagtggaaccagaggagaaatactcttcgtagacgatattggtcaaatccatgtgagatgggagaacggctcaggtctggcactaatatatggtgaggacaggttcaaagttgtagagaggaaaggagaatag

SEQ ID NO: 300 - DNA, 153 bp, Methanobrevibacter ruminantium
  source 1..153: mol_type = genomic DNA
atggatttgttgtatctttatgatgacctgactgcaaggagagaagtctacgattcagtcggattgagttttgtggtcaagtataaattctcatctcgtaaggaagcacaggatttcgcattgaagtacggtgcagaactgattgaggaatga

SEQ ID NO: 301 - DNA, 189 bp, Methanobrevibacter ruminantium
  source 1..189: mol_type = genomic DNA
atgattgaacggaggagattaggaatgaagtacgatatttttactatcttggatgaaatttcaaggaagttagatgacggtgaattatccgatgagcaggttgatttcctgttgcagatggagattctagtagaggaaggcactatcacagacgagcaggcacaagatgtcatgaatggagattattaa

SEQ ID NO: 302 - DNA, 168 bp, Methanobrevibacter ruminantium
  source 1..168: mol_type = genomic DNA
atgatgaaattaagtttgaaggaactcggtgaggaaattgagatgatacttgcagaaggtggattaacctttgatcaagtcgattatctgttgtacttggagacctgcattgcagacggaagcataacagaggagcagaagagagaaattatctgtagggacttctaa

SEQ ID NO: 303 - DNA, 207 bp, Methanobrevibacter ruminantium
  source 1..207: mol_type = genomic DNA
atgtatttggaaattgacgaggtcaagtgcgaaaacattgacagaattgagtttgacgatgtcgcaatggaaatcgtcctgacagacgaaaaggtgtacgagagaataaagagatggctcaagtccaatgagattgactacgattgcagggaagaccggtatttcgccaatctcatagaatatgtcattaggataacttggtggtaa

SEQ ID NO: 304 - DNA, 249 bp, Methanobrevibacter ruminantium
  source 1..249: mol_type = genomic DNA
atgtcggattcaccattgaggaacggttcttccttactgctcaggaattggagtattccgaagtgggagaggaacacgagagcgtcattgacagagccatcgcattgctgtacacgaagctcagaaccagagacttcgagttcaccgacgaagaacgggaactcttggaggatgcttttgtcattgtcagcgaccaatagagcacaggtgtttttagagggactttacgaagttcctctttttttatga

SEQ ID NO: 305 - DNA, 1353 bp, Methanobrevibacter ruminantium
  source 1..1353: mol_type = genomic DNA
atggctaaagaaaatgttatagattataagattgagcgacaaaatgataacacttggagttatttatatgtaactgaaagagggagaggaaatatcattgcttcatcttttggagaattgaggcagaaagttttaaaaagaggtttgccttggaatgatatatctaacctattcactaaaaagagttctgattctaatgttcgtcgcgaatctgtaaagaatattgatgatgaatctgttttggctgatgtcgctaaaaagagttctgattctaatgttcgccttgaagcagttaggaagattagtgataattacgttttaattgatattgttaaaaatgcttctgattatgatgttcgtcgtgaagctgtaaggaagataaatgactcatctgttttagaagatattgctaaaaataataatgatgagaatgtccgtcttgaagctgtaaggaatattaatgatgaatctgttttagagaatatatctaaaaatgcttccgattctaaagttcgtattgaagctattaagaagattaatgatgagactattataatcaaacttgcaaaaaataataatgatgaggatgtgcgtattgaagctgtaaggaagataaatgataagactgttataatcgattttgctaaaaatgcttccgattctaaagttcgtcgtgaagctgtaaggaagataaatgactcatctgttttagcttatgttcttaaaaatgaccctagttggatagttcgtattgaagctgtaaggaagataaatgataagtctgttttagctaatattgctaaaaaggataataatccgtctgtccgtcttgaagctgtaaggaaaattagcgatgaatctgttttaataagtgttgctaaaaatgattctgattattttgttcgtcttgaagctgtaaagaagattaatgataagtctgttttagaggatattgctaagaatgatattaattccactattcgacgtgaaactattaagaagattactgatgaatctgttttaataagtgttgctaaaaatgattctgattattttgttcgtcttgaagctgtaaagaaaattagcgacgcgtatattctaaaggatattgttaaaaatgcttttgattctgatgtacgtattatgtctattaatgagattactgatgagactgttttagttaatcttgataaaattgatccaaatttgagattagttcgtgactctctaaagaagaaaaatagaagaatacataaatttaggactttggaagaatgggaagaatattactatgataagaaggtgccaaaacattggataactcctcggtggcattacggattagatgattaa

SEQ ID NO: 306 - DNA, 696 bp, Methanobrevibacter ruminantium
  source 1..696: mol_type = genomic DNA
atggtagtcaaatgtcctaattgttttagtccacgtgtttcaaaatgtgaagatactaatattaaatggcaatgtgataaatgcaaatgcaaatttaaccatggtgctttcgatattaatgctgaaatggagaaagtagaacaattaacaatagaaaaaattgaaagagaacgagaaagaactgaacaatttgaaagagctattaaagaagcaaaggaacaatttgaaagagaaagaactgaacaatttgaaagagaaagaaaggaaagactagaaagagaaaagagagaaaaagaaagagaaaagatagaaaaagaaagagaaagaaaggaaagactagaaagaaataggattaaaatagaagaaagagaaagagaaagaataaaaagaaatgaaagaattagaagagagaatgaaagaaataggattaaaagtgataagagagaaagagaaaagagtgaagaaaaaagaataaaaaggaatgaaagaattaggaaagcaaatgaaagaaatagtattaaaagagaaaagagagaaagagaaagagaaagaaacgtgatgactattgatgaatattacaggtcaataggatacgggtcaacaggaaaaagtaaggtatggtcagcaattattattccaatattattggttatatgtattatattgattttaatgttttatggaggaggaatgtga

SEQ ID NO: 307 - DNA, 1044 bp, Methanobrevibacter ruminantium
  source 1..1044: mol_type = genomic DNA
gtgattaatattttagaggttgttaccaaatcaagagattccttgcttattactgctccagtactgattccaggtgaaagggattgtgagtttgactacggagaggagccgttgaccgagggtcagataaggcagattgcacatgagtatctggcaaattacagccttgtcgacaagaaccatgagttcttcgagaccagagaagttataggagttcctgtggagtcatatataacaaacgagcctataagcctcaagggcttggacggaacagtcaatgagtatccaaaaggaacctggatagccaccacaaggataactgatgaagaggagatggaaaaggcactcaatggagagtacactggatacagcataacaactgtgagcaagaagttcgcagacaagcagatccagctgcctagaagagtcctgatgaaagacatcaaggacccagtgggtttcaccataagccttgtcaggaagccttgcgtaagaggagctaaattttgcagtatgaaagaagatatagagaacggtgatgttgtgagcgaaaatatagacgataagttggaagaggaaaccaaaggtttcgtgcagtccatcaagggaatcttcaacaaggaagataaggatgaagacaagaatcctgaagatgaggatatcgaattggacatcaaagccattgtggatgaggtaaccaaggatttcgtaaacaccgacgatttcgagacattcaagaatgagttggaaaaggctttgagcgacaagttcgagactcttggagcagaacttttcaagtccttgaagaaatccttggagaaggacaaggctgaagaagccaaaaatcaggaagatgacgaaagcgatgaggatgatgatgaggaagaggcaaaggacaatggagaggcacagaacgtccagtccagcaaatccattccgaatcatgacatcaaggacaaccagaaggttgcaaagaccggagccgcacgtgtctatgaaatcatgggcagggacaacacaggctctgcagtcaggaaattataa

SEQ ID NO: 308 - DNA, 1038 bp, Methanobrevibacter ruminantium
  source 1..1038: mol_type = genomic DNA
atgggaaacgaagctactttaaaccaattggtaaacgagcaggaaaaggcagtcttcaagtccatgaggactgacatggagacaggaaaggctgtattgaacgtcgagcagctaggttacttccttagagaagcaacattagacaatacaattttaagagatgcggacttcaagctgatgaaatcattcaagaagcatctcaacagggtaggaataaacggaagggtcctcacaaacggatatgacgtgaacggcgagaccgaccctgagattcctgcggctgacgtcgacttcggagcaaacgagttggacgtcaagaagctcaaggcaatgtgcgaaatcgaggatgacgagaaggaggacaacatgacacaagcccagttcgagcagacccttctccagatgatgggagaaaggattggagaggacttggaatactgggcattgtttgctgacagcgaagttgcaagaagcgacgaccctcttctcaacacaaatgacggatggctcaagaaatgcgcaaaccacatatccagcaggtcaatagctcctagcaatggaatgtttgacattgaggacggtcctgaagcgatgttcgacgcaatgatcaaggcattgcctccaagattcaggaaaaacaggagaatgctcaagttctatgttccttttgaagtcgaggacgcatacaggaacatcctcataaacaggggaactggcttgggtgattccgcacagatagggttcaacgccttgtcctacaagggaatacctatcgagcactgctccaccttggacgatgaggacggaaggggaatgctcggcaacagagtatgttccatgctcacaaaccctaagaacttggcttacggaatatggaagaatctttctgtagagcctgaaaggattgccaagaacgagctcacaagatactggttccgtatccgcggcgatgtggactactacttccgtaacggagcagttgtaagcgtaatgaattcaagcgatgcggaggcgttgcctgaactctccagagcataa

SEQ ID NO: 309 - DNA, 405 bp, Methanobrevibacter ruminantium
  source 1..405: mol_type = genomic DNA
atgatttcgcatatcattgtgcttctcatttgctttataggattggttgaggcgatactgatggcattggttgattgggaggacttggcaatatccgttcgcaagtctcctagaaagctttataatgttttgaaggatgagttaggtcttcctgaatggaacgaactgtctgtgattgaaaggagaagcatgaagaaaaggtatgctgtcataagagattcctttcctgagttgcctccatgggaagaactttccgtcatagacaggagaagccacaagagactctacaaacttatcaaatcagtttatgatggagactatgatgacagtccaagcttggaaggtccaccagcagcagtcggtcctcagaaggagattccattggaagaggcagagtatccttga

SEQ ID NO: 310 - DNA, 414 bp, Methanobrevibacter ruminantium
  source 1..414: mol_type = genomic DNA
atgacttggattggtacggaagatgtcatcgagttcacaggagtcaagcctcagacattcaggttcgagaagggagacacctccagcctggaaacattgcttgagaagtggattctgcaggcagaaggacttataatatcctactgcaactacgatttcaatgacttggaggagatacctccagcagttgttaatgtctgccttaggctcactgcaaacatggtcgcattggcacaggcaaggaaggacactcctgtaattcaggtcaaggaatggaacgtgcagactgtcagttccaacatattctcaaatgacttgaaaagggacttgacccctttcgtgcatgaaaggaaaagctacaaaggagacgagattgacttcttcgtcatcactggagatgatgactcttggtga

SEQ ID NO: 311 - DNA, 444 bp, Methanobrevibacter ruminantium
  source 1..444: mol_type = genomic DNA
gtgaaattgcagattgacgttgaggaactcaagccattggagccaaggttcaaaaaggttgccaaaaggacagttgtgttgactgcaaatgaattgcagagaaacctcaagaagttgagtcctgtggatcatggaaggcttcagggctcttgggtaatcttccagacaggagaattggaaaggactgtgaaaagcagtgcaaagtatgccattttcgtgaatgacggaacaggactgtacggtcctttgggtcataagataagacctaagaacggaaagttcttagcctttacaccaaacaaaggaaagttcaagggaaagcttgttgtggttccatggactagaggacagaagcctcagaggtttgttgagagaagcatggaaatgactgaaaggagagtgcaggaattcatgataagggcaatgatggagatggactcatga

SEQ ID NO: 312 - DNA, 510 bp, Methanobrevibacter ruminantium
  source 1..510: mol_type = genomic DNA
atgagattcgtaaatactgcttcgcttgttcctcagactgtcaaggcatatcttgaaagggaaatctgcgaaggagggttgcttgaggatgtagagacactcattccgtccgtgaacagcgacgttcctgttgacccacctgcgatatggatagtccagcaccccactaccagatggtctggcagtcagccaaatctctcaaacaagatagctatgtcagtccctttcgagttcgtatgcgtggaatacagcgatgacttggaagaggctgagatattgggaataagcctagccagcagggttggctcaagcctgatgaagaacttcaacaaggtgaaagttgatgattccatgccgaacaggttcttccacaagctggagttcgagacattgtatccggtaggagaggtaacggttgtgggaaagagcgaaaggatacctgcaaccagcatcatttttaatttcgtttatgttgttgattggttgaaatgtaatagaagatatgattaa

SEQ ID NO: 313 - DNA, 1281 bp, Methanobrevibacter ruminantium
  source 1..1281: mol_type = genomic DNA
atgggaattcgtgttgtaggaatgaaggaagaggcaaggtatggagttgcggagtcagcgccggacttccatcaggaagttagcaaggcaaaggcttccttgaactccactccgaacacaaagtcaagcggctcaaggatgaagaagaaggcacgtgcaggcgtgtacaagcctactgccaacatcgaaggtgaagttgacttgaagaggataggacattatctcaaggctttcctggacaattaccattttactgacggaggctccaatccaaacgtccatgagttctggggcggagagaacaataaattgtcaagcttcactctttgggtaacttttgacatatttgagaagaccatcgttggctcattgcttgacaacttcaagatggaggtgagcgacgagtacatgaagttcaccgctgactttgtctacaagacagaggaaagcgatgagattgagaacattgagctctataaggtgaagcttcttgacggcgattgggcattgatgttctatgacgtttccgttgagatagacgagaacgctcctccaggaattgtttcaagtttcagttttgacggaaagaacaacatcaatgtggacaagactatcggcttaggaagcagaggtccgcagaggaaggctgctgctcaaggaagggacatatccatttcctttgtctccactttggaaagggagaccttggagctgattcaaaaggctgaatacggagaggtaggcacagaaccgtctgaatgtaagttgtgcaagattccattgaagctcatctgcaatgtctgtgaggacacaaccgacaggcttgagatcactttccctgaatgtatctttgctgtggactatgagttgagcgaggctgacgagattgaggttaccttcaacttggacgccatgggaacaggatatgccacaaagttggacggaacccgcgtattgactgacatgtattgcaggcttgtgaatgaccagcctgagataaagagcggagagggtgttacaagcgccaccgtaaggctcactgtcaaggacgataataatcagcctgtggcaagcaatgcagtaactattgtgaatagagttactgatgagagctatgaggcgaccacaggcagtgcaggaggctgctccttcaatgatgtggagcctggaaggtatgatgtcatcgttgaaggatatgatgttgttgcaggaagcataatctctgtcaatgacgatgaggaaagctttgacattactgtagaggaaattgaagaggattag

SEQ ID NO: 314 - DNA, 441 bp, Methanobrevibacter ruminantium
  source 1..441: mol_type = genomic DNA
atggttgtagttaagaaatccgatattttaaagggcgtaaaaaagattgaaaaggtgaagattgaggctttggacggagacgagatgtacttgagaccgttgtcccaagccgagatcaacgaggtcgacgagattgaggcaaaggctatgggaatcttcgagaccaacgagaccgcacacaggggaagaaggcagaagcctaagagtgtggttgagagcaaaggaaagataaatctcgaattgcagcagaaggcacagcaccaagccaagaccaaggcaatcttcttatctttagataatgagaagaatgtgggagaggaggcttggtccgaaaccgagattgagcaaatgcctcacaaactatttgaggaacttttcaatcatgtgaaaaggttgagtggaatagaactcgatgaggatgacgtggatacctttcattaa

SEQ ID NO: 315 - DNA, 3300 bp, Methanobrevibacter ruminantium
  source 1..3300: mol_type = genomic DNA
ttgccgtcaagcaatgtaatgaacataatagtcaaggcagaggacatggcatcatctgtcgcccaaaaggttgaaaacagcttcaggaaattgggaaacacaatagacagcaccttcaccacatctctttcaaacaccaagttcaatcaggaactcacttcttttggaacagacttggacaaggtaacccaaaggctgaagcaggtaggcgtgaacggtcagtccagcttcaaccagcttacaaatgctgaaaggagaaccttggaaaagctgagcgaatttgatccagtatcagcacaggttcttcagcatctgtcaagaatcggaatcaccggtcagcagacattcaaccaattgtcggtttccgagcagaagtcattgatgaacatgaagtcaaccgctcagcagctggaggaagtaaattccaagctgagagttgtgggaatcggtgcggctcaggcagcgaacatgctgaaccagatgaagcttgacccaagcgttggctccaatctggacagggctaagctgaaggtttccgagatgggctattcccttgacagcacaaaagggaagatacttgtcttgggcacagcaatccagaccagcttgggcaacaagtgggactcaatcaagaccaaggttcagaccacagccacaaacattaggacagcattgggaaatgcactgacttccgtgaagtcaaaggtccagaacttgggaaatgccttcagcggtcttggaggaataatatcctctgcaatcggtgcgataggaatggcttccatctcacagctgactgttggcttggctatgaaccgtgagaggatgactgccttgacaaacgccacaatgggaggcgctaaggcaggagatcagctgctcaacggattcacaggcgtgaacaaggtcttcaaggacttgaatggaaactcaacaaactacttcatgggtcttgacgagatgactaaccacagccttgtctcattggacgatttgggacaggctatgtcaacaatcaagatgtccacaggaatgagcaatgaggaattgatgatgttctcaagcaccgtgaacgatgttggacagagagccattttgatgggaaagagcggtgaggaggcgatttccctcatgcaagcggcaggaagaggtctgaacggcgagtttgacatgctgaagacaaacttcggaatcaccaaggacacccttactgaccttggatggagtggtgccgctgacgatgtcaagggctatcaggaggcattggacaaggctcttgagaagggtggagacatggacggaatgctcgacaccacaacaggacaccttgagacattgaagaagaacttccgtgttgcaggaaggcatgtgggagagatgttcactccatacatagacatggcagtccagaaactgaatggcttgaaggagacatgtcctggcttgtttgagaaccttgtcatgatagcgggtgcagtgagcggatttgccactgtggctccaagcattgctcctatgataagcgtctttggagatgtgggaagtgcgataaagaggacagcaggattcttgggactgatggaggttgcagaggacgcagtaaccttgaagtcaacattcctgacaatagctcagattgcaggcgctgacgcagctgtgcttcagactgccgcaaacagcggtttgactgcaagcttctgggcaatggctgctgcaatcttggctaaccctttgacttgggttgcagttgcacttatagccattgcagtagcagtctatgaggtcggaaagagtttcggatggtggtctgatataggctccatgattggtgctgtttgggcaggaatccaaaggctttggagcgccttcataaacaatcctaacgtgcaaggattcctgaaggacctgtctaacgcatggaatgacatatgcgaggcattggcaccagtcatcgattgggctaggaaggcttgggctgagctgttccctcctagcgccacaggaagctttgacattgtcagggcgataattgacgttttcggacagttgggagacttcttaggcaaggttgtgaatgccgtaaaatctgcttggaacgcattgggaggatttgccggattccttcctatgctgttgggacctgtaggaatggttgtcatggctttgagaatgattgtctgcatacttttaggttgcagtccaggcatagttcctgcattgcagaaaacacagtcagtgttcatgagcgttttcggtgcaattgcagagttcattggaggtgctgtaagcaatgttgtagccattctcacaaggataatatctgcattgacaggaatcttcactcgtgtgagttcaatagtgagcacatatctggctaagatgataagttccgtgatctcttgggcttcatccattgtcagcaaggcaaagagtgcaagttccaagttcctgacaaatgttgtgaattacttcagcaagttgccaagcaaggtctggaaccatctgaagaacatcattcaaaaggttaccagttgggcgacttcaattgtctccaagggaaagaatgctgccagcaagttcctgactgctgtggtgaaccatttcagcaagttgccaggaaaggtcggcacctatgtctccaatactgcaagcaggatttcatccggtgccaacaagtgggtttccaatgctcgaagcaaggcttcaagcacagtgagtgccgttacaggaccaatcagcaagttgccgggaaaggtctacaatgagttcatgggaataggctcacgaatgctgagtgcaggaagcgcacttgtttcaaaggctcgtcagataggaagcaacatagtcagcggactgttgaatgccatgaacattcactctccaggtacaattcagcagaaggttgttgcagaatttgagaacaccctttcacgtgtaggtagcatggattcaactgctcttgatgtcgggcaatccgtaggtaacagcattgtccgtggattcactgatttcggcttggataccggtagcttcaatgcggactattccacagactacaatctcaacaggaaaaatgacgataaccttgacgtgaacataaagcaggaactggaattcgtgtttgacttcaagaatctgcctaatgatgtagatgaggacaagctattggaaatgcttaaggaaatggttaccgacaagagcgtcatacaggctctcgtgagcaatcctgatttccaaagcatggacacaaaggtgaagaacagcataatcgcaaaggtcaagagagcaagaggtgtctag

SEQ ID NO: 316 - DNA, 3039 bp, Methanobrevibacter ruminantium
  source 1..3039: mol_type = genomic DNA
atggcaagtgttacaaaatatccgagcaacgtttcacagaccactggaggaaagttcgtgtccttcagcaatctggcaaacataaagaacaatgctgacggagcgcatgccgtgagcagtgttcttatcaaaagcaagaagcagtctccaaacagaccgtccacagtctcatgcaaaggcttcggattcagccttcctgaaggtgctgaacctactaaaatcacagtaacttataggcataggaagaatgctggaagcgactacagctcaaagaacaagactcacatatgcaacatcggaggacctacaatctcacttttaggagtcagcggattcagcagcaagggaagcgggtgcaccaccactatgaccactcacacaaaggctttcagcgttcatggaaagctctctagagcacaagtaaatagtgcaaattttggagtgaagcttgactatcctaccaacagcaacacctacaacggatacatgaggataagctatgtccgtgttactgtcgagtacatcacaagccagtacagcgtaagcgtcaagcatgtcagcggaacctatgaggatgaggactatgtggtctcattaggcataagcaacaagaacctcacaagctacaaccctacatgcacgctgacggttcctgctggattcacctataagggcgttacaggtgcagccaccggaaccgtaacaaaggtcaacaacaggactttcagctggaaccctcagctgcagggcagggcaggaagcaggcagataagccttgcatttgagcctaatgtaacatttccggaaggcactgactcatattctggaacattcagactgtccgagagccttaacggtgcaaacagtagcctcaatgccgtcatcagcaagagacctgctccttcaggcagcgagactgctggcgaatcgacacaagtcttggagaacgaggacacattaagcggaaacgattcctatctcatcctcaatgtaggcgaggagttccttttctccgtcgagttcactgatgctgagaatgctgtctataatcgcataggcaatggagaggacgattggggaaggattgcattgacattgttcaagcttgtcgacggcagttggatcggaaggagccattacgatgtgtcaacccaattggagtatgacgaatcaattcctgaggaagttgcattggctgaaggcgacaagtggagcctcaataagacattgagcataggtcaggtcggaacatacaggttctccttgagatacgagaacgagcacaaccatgagcttgactatgacatgaggcagttccttgcctatgtcagaccttccgaggaacagttgggcaatccttgcttcactgtcttgaggctgtccgatgaggagtgcgacaggcttggaagcctccacacatacatcgcacaggcatacatgaagcacattacagatgacacacatcctcgggactggtacaggaaccttcgccttggagtgttcaacaatgcaatagccgataacataacagtaacctccgaagaggtcgacggtgaaatcattgaaactgttgaggacagcacagactatgaaagcctcaccaatgaggacatcttcaataatgccgaatactggagcgatgccttggcaaatgtgaatgagttcgacaatctggaatgcgagttcacctacaatgaggactatcctctctgcatcatcatgaccggagactacaatgaggctgatggctatgattatgatgtgggaactgtcgaatacacaaatccttgcatagttgagaaggatgtctacaagcaaagagaacccagcggaaactatcctattcctttggagaatgttctctcaaatgacgattcaagcgaattgggaatagagcagttcaacatcagcactccaataatcctctacactcttcccttcgatgagggctacggcaccaacgaggagatgactataaggggaatcgaggttagcggaacacttgagcagagcgatgagcttacagtgaatgctaagctcaagtctccaactggaataagcggtacaagaagcattatcatcgaggagaatgacctgacccttgacagcacaaacgagttcaggattggagggttcggagacctttggggcttctccacatttgaccttacaaatcttgatgactttgaacttgagctaaccgtgaacaacaatatacatgatactgaggcaaacataaatttccaggacgtgaagataacattctatcttgaattcatacaggaccagaagataaacatcaagataaatgaagaggacctaagcttttatggggttttcaccgatgacgttatcattcctgaagggcttgagacagatactagcttccttacgatagacggcaccgacacaaatgacgcatataggcagaacatcaaggaaaaggagattgagcttattctctacattgcagaatgcgatttccaaagcagcactgacatgctgaggcaactgtcaaaggttctcgtgaatgaaagggatgactataaccgtccgattcccaacaggattgagttctcgcactatcctgacgtctattttgagtatgtgatggagagcgcattgagcgtcgagtcagacatcagcacctacaacataaaggcgaagctcaccattcctagcggaactgccttcagcaagaagacctattccacaggagtagatggctatgttcagggaattgctcctgtcaatcctgtaataacattcaagcctcagagcgacaccgttgaaatccttgaaaggaagagcggacagaggttcaacatgacctacactgctggatgggaaacaatgattgcagagatagactgcgaaagccatactgttgttctgaaaacggatgaggacgattccgagatgactgacataagcggagcatgcgacttcaatgtggactggttcagccttcatggagagtatcagtttgaagggacagggtgcaacataaggacagtaagctacaacgagaggtggtga

SEQ ID NO: 317 - DNA, 3309 bp, Methanobrevibacter ruminantium
  source 1..3309: mol_type = genomic DNA
atgggcatagctattgttgttatggacaatgaggagaacttcctgcaattccttgaccctgatttatgcaccatcaatgagaccatagaggaattgggcttgaggactttggagttcaactacaagtttcaggactatgttgaggacagggatcttttcaggataggtaacaagatctggattagcaattcccagagcttggaggactgcctttatgtgataaacactcctgtggagaacagcgtctatcaggagaactactttgcatgcgagattgaggaggtcttggctgagctatactatgctccattgttcagccagaccgaactgacaagtgccaacggcttcacattgaggaccaccaacggagagcagaccgttgatgtggactggaatgccctgaactactggttcggattgtatttcaatataggtgttgttcaggaatgcttgggaacctatgcgaacaggataactgtaaacggaacaatgaaccgtttgaaccttcttagaagcattgaggagcagactggaaatcgctttgtaacaaggtatgagaaggacttgcttgacaacaccatacatcgctatctggatttcctgaatcctgtgaacgtgagcaagaactggaaattgaacatcgagtacgatttcatctatgaggatgacggtgagtactgtgaggcatacacaagcgatggaaatcctataagcgaaatatatgatgacatcgaggaggaggacgatattgtggacttccctccatcaactccaaggcttaacgttgatcctgaaggcattgagttcaggatagtgaacgaggactttgaggtcatcaacagcgacggaaatgtctatgttgatgacagacagcagactcctcttgtctggagcagtgcgagcgttggctttacaggcgagaacaggcatgtcctaatcacattgtccaaggagaaaagcttcgtggaactgagcgtcaatgggaaaagctttgtgatgttggacaatgcagttggcgatgttgtgagcacaggatttgtgaacccaagcagtgagccggtgcagaggagcagcactgtaatccctgacgattcgtattttgaaatctttgatgtcagcaggaacagggctgtcttccgcacctgcataaacagggagatcgggcatgtgcatgaggaggtgcttgacttcggatacaacttggaggaggtgttctttgagacaaacgaggaggacacattcacagccataagccctgtgctgagccttgatgacgattccgagggtctcaccagagccaatatgaacaccataatcagtaactacactaatctcagcatacctaaggggaagattatcccgatgattcttgaaagggtgaacgtcaaggcaacaacacttgccaatgcaaagtcaagcttgggcacttttgatgtgagcaggaactactattcaagacccgtgcagccgaatgacagcattgacacatcagacagctcaaacaacacttgggagttctggagggcgacagcttactggagagctccgtttgcaaagttcggcggagacttgcacgtggcgaccgatgccgtcctcaagacacagtacactgacatcagcggaaggtccgacaatggagacgaaaggagagttacaagacccaagatgggcatggtggagacaggcgatgaggacgcctatgcaatctacaatgatgtggcattgaagctcaaggagaagatgtatcctgaattcaatgtttccgtggatgttgcaaatctccgaaagggaaggttcaatgactacagcctctacgataaggtttacataaagctacccaactccactgagcttgttaccgctcgcgtgacaaagacagtgaaggacgccaatgacatttcaaggaacacggttgagctgtcaaactacaccttcagctccaccataaagaacattcagaatgagacattcatcgacgcctacaacgtcagcttcaagtatcctaacagcaagaccctttctgcaaggcttgtgaaccttgactatgacaattccaatccggattccgttcagtatcctgcaaaccagatgataacgttcacagtttacaataaggatagccagtccatagttgcctcctacaacaagctaaccaatgcacagggctatgcaacaatcaacatgaagtacgatcctggaaactatgagatcgacataggattcggaggggacgaggaataccttgactgctcaacatccgttgaagccaatgtctacggaaagaaggttgtggagaagcctgttgtggtgaagacaaagtccaagacaaccaagaagacatcctccaagaaaaaggcttcttccaagagtactgccaagaccaaagcaaagaccaggagcaccaagagatactacagcaagtacggcgttagccctgacggaaagtatctcatggcgataggtcgcccaagcgcaagcggagagcttgcgaaatacggatacaagttttacaggacagtgttcgtaaggaaatgccctatgtgcggaagcactgagatctactggtcaatcttctgggcaggaaacgagcatggaagctggggaaagttccctgctaccggaaggagagaatcaggctccgcagaaggtcaaatcttttgcaagaagtgcgatgcggactggtcaatcttcgggaacaaccacaattcaagccataaggacttgaagatttacaagaagcctgcaaggagcacaaagtcagaagcctacaccttgaagaagggcaagatgtactatgacacagtaacagtaaccgtcaaggagaagaagaacacaagctccaaggaaagggttgtgttggctaatgacattcctaaagccattgtgcagttggctttgagcattgtgggaaacagtacaggtcttgctgctgcgaagaagatagcgaagtggtgcggacacaagaggaacctgaaatgggttgaatacaggaacttcaagcatggagtctcttgggttcgcaggaagaggaaatgcaactgctgcgatggtgcaaggttcatgcttacgctgatggacgcagcaggttgcactgagaagttgaggttgcagtatgtgaatgtgagcggaggcaagggaggtcatgtgttcaccaagataactgtcaaggagacaggctcttggtgctatgtagaccccacctgcaagttcgagaacggaaagaacccttggaaccactacatcaagggatacggcagtcctccagggcatgtctacaattacaatggtccgatcaatccgccattttag

SEQ ID NO: 318 - DNA, 1518 bp, Methanobrevibacter ruminantium
  source 1..1518: mol_type = genomic DNA
atggtcgagaagattacagtgagtcctcaggaagtcagaggatacggaaatgttgttgatgagaaggaattggaagattacggaagctacaggtgtgatgtgagcgagagctcggaggtgatcaagggagttgaggaaaggatattcagcgtttctggtgttcctgctcctgctctgagcattgccaatgttactgaggacactcgcaggggcaggtgcgcccacatctccgcctcatttgaggatggggaaggcgatggcttggatgataaggcaatttcccttaaaagcggcgatgatgtccttgcaaccattacaactggaagtggagaaaacgtgtttgatgtggtcctttatgatagcgctcagctctatgctgtctttgatggagatgactattatcctcctgctgtcagcgaagcaatcacagtcaatcctgcaaagtcattatgggatgtcgagttcatccttgacgaggaggagtatgaggttggagacacagccatactgtcagggaccgtcggaacgattgttgacgagattgttgacggagagattgttacccgcaggcaaatggaggcgaatgttacattgactctagtaacggatttaggaataaggcgctgctccaccaatgccaacggagagtttgtgcttcaggtgccgaacattcagcagaaccaatggagagtagtcatagccgccactagcacccatctggtcttcaatggcttgattgatgttcctgtccatgactattccttagtgatttcaggatccgaaaattcaactgccgcctccactatattggtggtcggtctcaccgacttcaacagcatggtagagggagcaacaatatccatcgctggaagcgacggctcatcatacaccgctgtaacggattcgatgggaggagcaacagtgaatgtgggcagactgaacggagccacaacattcactgccacttacggcaatgtctcctcaacggttacggttgtgcctcctttggactggtacgatgcgtcaaactacaccgcaggctcaggcagaatgccttcctcaagggcaagttcaatctatttgcaggctgtgggcggaagatggctcaacaaggagtttactgacagtgagtcatatgtcctcgagttcgaccttatcctgagcaagaacaaccgtgagggtttctacttcggtgcaaaccctaactcaaacacaaactcaggaatctcaatcttcaaggacatctcaaacaccatgattgagacattcgattccacaggcactgcaataaggcttgaaagctcattgtcaggaagctatttcaacacaggcactcatcacataaggattgaaagggactatgatgtagcctacatatactttgacgaggacctgatattcgagtttgatgatgagatattgagctatggtgcggaggatcagatgtacaataccgtcggaatcctatcttggggctcaggcatcatcgagttcggaaactttgagttgagtgattga

SEQ ID NO: 319 - DNA, 159 bp, Methanobrevibacter ruminantium
  source 1..159: mol_type = genomic DNA
atgaatgatgaaagttgcagaaattgtgtcttcaggaatgaggattatcctcctttctattgcgattttggagatgacaatcctgttatatgtacagtgaagatgaagaagatgagagaatacaagaaagagaagttaaggagttgtttggatggttag

SEQ ID NO: 320 - DNA, 687 bp, Methanobrevibacter ruminantium
  source 1..687: mol_type = genomic DNA
atggttagattcagcagagacatgctccaggacggagcgaagagaatgttcaagtggctaagaaagggcgaagggttgcctaactacttgataatgtatgacatggacaggaataaggagtataagttggttccaaaggaatatgcaggactgtatgagtccagaaacatattctggattaagaacggaagggagcctaactatgttacactgacttccgttgcaaggaatcctcttgtgatggactaccagaacaccaattacacctgttgcccaaccagtttgtcccttgcctcacaaatgctatatcactataagtcagaaagtgaatgcgctaaggctttgggaactagcaagggcagtggaacaagccctgcacagctgatagccaatgctccgaagttagggttcaagataattcctatcaaaagagacagcaaggaagtgaagaaatacttgaagaaaggtttccctgtaatctgccattggcaagtgaaccagagcaggaactgcaagggagactatactggaaacttcggtcattacggtctcatttgggacatgacctcaacccactatgttgtggcagatcctgccaagggagtcaacaggaagtacaaattcagctgcctcgacaatgctaacaagggctacaggcagaactactatgttgtctgtcctgcatag

SEQ ID NO: 321 - DNA, 2250 bp, Methanobrevibacter ruminantium
  source 1..2250: mol_type = genomic DNA
atgaaaaaacattgcttttattttttaggggacagttttgccgatatatgcaatgaagccatgttttgtgaaaaacatttagtagaaggaaactatttggattcaattatccgtgcaggaaaggcttcagagataataactgtaaacatttgtgaacttgaaggtcaagatggcttaataagctctggtcagaagaaaagattggaaatgcttggatataagggtatcatttcttatgatatttataaaagattaaaccatattcgtaaaattagaaataaggctgtccatgggcatttaagtgatattgaagacaatgcaaatattctgcatgcctatctgtatctaatttgcgcatatttctataaggaatatagagacactaatttttcagcggaagattatacgggccctattatggacattgcctctaagcctaaagagactgcttcagagacttcagaggataatgaaaatattggagagtttatttcaagtccattggatgattatctttttgaaaagtatgatgacagttacctgttaaatgaactgtctaaacttaaggactcttcaaaggaagctgttgaagacgataacttaagcgaatttaaggaatatcttcatattgacagatctattcaagaagattttttaaaggcattgaacagagccactagttttaattcatctcatctgattatgctttgcggtagtgttggagatgggaaatcacacttgattgcaaatttaaaaaagaaaaaccctgaactctttaatcaatttgctatccattatgatgctacagagagttttgatcctgaaaagaatgcaatagacactttagcctcagtattggaacctttcaatgacaataatcttaacaattcgacagaaaaacttattttagccattaacttgggtgtattgaacaatttcctggaatcatcttatgctaatgaagattacactaaactcaagttaattatagaagaagcgaacatatttgaatctaatgaggtttcagataacatttatggagataaggttagttttgtcactttcagtgattacaacatgtttgaattgaatgatgatgaaaattcaaactacacatcatcaaagtacatctcttccctatttaataagataacccaaaaggaggatacaaaccctttttatgttgcatatctcaaggataaggactctcactttatcaatcctataatctataattatgagatgctgatggatgaggaggtccagaagacaatcattgattatttaatcaagattttcataaaatacagaaaaatcatttcaactagagacttattgaacttcatttatgagataatagttcctccggaattcctgaaaagtgaggatttggacaatatcaatgatttcatggactattcattgcctaatttactcttcggatatccagaaaggtcagatttattgaagctatgcaatgaattggatccgacattgcatcgtaatgaatctttagataagttcataatagacttgaacattaatgacgatactgaaaagatattaaatcgttattttgatttcactcgttttaatttccttgaagagtatggagagtatctggttgattttagggagtttaacaattctgaaaaagagaaggtcaccaatattctaattaggtttgcagtattctatggaaagagcattatcaagaataatttcaaggataaggtttatttaaattatttaaaatatctgtatgcctataatacacagtctcataaggattacaaatatctgttcactgaagttaaggacgctatttttaattggaaaggttcctataagaagaatactatatgtattgacactttggattcatttaaagtgtataaaaatttaaaattaaaaccatctgttgataaatttgaaaaaagtttattagatggtctctttttaggaaatagatttaaaacagatataaaaatttatttttcagttgaatctaacaaaaagaaaatacctttaaatgttgatttttcattatatcaatacataatgaaattatataatggttttaagcctaatcaatcagataaagacgatttaataattttagatgaatttattaataatttattagatgaagatacagatgatgatttatatgtaattagtttagaaacttatgaagaatttttatttgagtcaaatgattttggcacttttgaatttaagaggggttaa

SEQ ID NO: 322 - DNA, 1371 bp, Methanobrevibacter ruminantium
  source 1..1371: mol_type = genomic DNA
atggatttttcagaaaattataatatattattaaaacaaatgacttgtgatgtaaataaaaggaaattaatacatcagattaatcaaaattctccattgttaccttttaaaactaatactcctaaaaaagctaattttgaaaatggttttgatataatattgggtgaattatccagaatcttattaaataaaactattgaaaaaaattttaaattagataatattgtttcaaatttaattgataataatattgaaattgaagatggaactaaggagtatataacaaaattgctaaatgaatatttattcgatgaaaaaaatgatttaaaaatatctcatccgaatttgtatttatatattcctctttcaaataataaaagttctaatggagaacaggaagtagcattgtttttaagagatattttttgtaagaataatcaaaatcttattaacttttttgaatcatatgattcaaatcacattatcttaaatttaattttaaaaaatactcctaatttacatcataaaataactgaaactaagtatgtaattcattttgaggaaattgcaaatttatttaatgaagatatcaattatgcaatactttataagaaattttttatggaaaacattggtaatatttttgcttattactatttcttttatatctctcaattaattctaaaaatttctaaaggctttaatgataataatgaatttgaaaaattgtactatttattggactgggaatctgcaagtaaaaatcgtaaatcattaaatagttatagtttactaaaacatcattctaaaccattatatgcaaaaatggcagtcatagatcaaataaatacactattaggtacaaataatttattggaaaaagatatttcagaatattttaataatttggacatcaattctaaaaataattttttacattttcttaaaaaatgggtttcagattataggtatgtaaggaattttgatgataaagaattaccagataatttattagaattaactgaaattctttttgaaagtttaaaaaatgaaaaactgggtgtggatggagctgtacaatctaggtacgctttaaatcttgaagatatagctaaaaaatatttgttaaagcgtagaggttcgtatggttatgtattaaatattaatagagatatgttgcttgttttaactgcattatgtgttaaagataagaaaattaagttaaatcaactatttattgaatttgagaaaagaggagtttattttgacaaatattcaaaagaagaagtagtaaattttttaactaaattaaatttaattgacaagaaaagtgatagtggagatgctcaatatgttaaaccagttttatga

SEQ ID NO: 323 - DNA, 5223 bp, Methanobrevibacter ruminantium
  source 1..5223: mol_type = genomic DNA
atgttaaaccagttttatgattatctatctaataaattactaaattattttgatgatactaagattttaagtggtgaaaaatttttcattagttttgatgaagatgaccaaataatgtctttttataatagtttaagaagtattgcagaaactaatttttcttgttctgaattcatatatgtccatactatttcaggaaaggaatataatacttattccataaacattaatggagtcaaatttgtcatttctgaaagtttaacaattaacgtagatttcttagttactttaagaaatcaagttacttctcaagagggtgtttggaaggatactgcattattagttatctgtaatgaagcaatagatagtattggaaaaggtatgagaaatttacagaaagaaggaatgccattaaatgtaaaatctatttcaaaaaatttagaggatgaaattaacgattctcaaattcttaactattccgataagcaaatcgctaagttttctttgaatattcaagaagaagaattgtttcaaacaacattatgggattatgaaactatcttatcaataatcaacaagggttttgttagtgatgaagatttaagagagttgaatctttttaaagatgaccaactaaatcaaaattctcctcaaaagatgttaaaaagattaaaagaaaattatgacacatttaatgaagtaaataaattttcacaatatggagataaaaaagaacagcttaaaaatatgtttactgattctggagtttctattttaagtaaagatgactggtataaagcagaatggaaaatggttaaaaaatcaaaggatgactttattaatcaacaaaatcctttaaattacaatgaaaatcttgaaaaaatcacagaaaatggcttaaattattgggaaattcctaactcatttactaaaactggaaaaagaaaacgaaatatcattgtttttaatccaaatcattctcatgaagttagtttaaagttcagttttgatcagattcttagtaattcattccttaatacaaattcaaaaaaattcactattgcaagaggcaaatcattaatagtcaattttactctggattctagtgaaccaattttcaaaactataaaatataaacataaaaatgaaaatatctctgaatttacttttaatattgttgttttgaattttgagcctgaaatttttaattctattaaatctcgttttagtgtcaatgtcaaatctaaacagattattgtaacaaatgatgaggatagttttgatattgtttttggtactggttcaaaagaaatagagaaattaattaaagaaaatggtgaaaagttatatctttatgatgatgaatctttaataatttctgaacaatctcctgcttggaatgatggaaaattaagttttaaattatataaagacaataattatgccccatttttgattaaagaaaaatctaagaaaacactgccagtaaattcctatgtaatttggaatttgaaaagaagaaatatggaaaactttatttttaatggagtaaaagctgttcaagatgtaaacagtttctatctcgtagaagaatttaaagaatttctaaaaatggaacgagaaatcattaaacaggacatattttatgctaaaaggaatattgatggttctttagaaaaaattgaagtttcattcagtaacgagttagaaactgcttacatggacatatttaattattataagacttttgatgattctccagaagacaatcttccaagtttagtttatttaaatgatgatttaaaagagttatataagaaatttataactatcttcaataaggaaatatcagaaattgaagagaattctattttgtctgattttaaatataaaaagaatttgcttaagttaggtcgtattgaaactgataacaaaataatgtattctccattatctccactaaatatcgcttatcaattagaagtttctaaacaatgcggaaatgaggatttatccgtaaatatattagaacggttagttccaaataacttaattccttatatttgttcagatgatggaaaagaattgtttagacctatttatcaagaagaagctcatgaatggttgatttatgagaaaagtgaagaagtatcaattggaacaacaaatgtatttatttctaatgttgttactgaaaaacttaatcaatttgtcaaacattttaattacttatttagttttaacaactcctcaccaattaaaattaacttaatcaatataaaagatgataaagaagttgtgaaaggagtatttaattttattagatctagattgcctgataaaactaaaacaaaaaaagttattcctgttgaaatcaatatttacaacgacgctgaaaagagttcttttgacaatttatttgattgtcagtctgaaattcagttactggaagaatttggaattaaaaaattaaaatcagatatttttgatcctatagatattatccatatgattcaaaataatatttcatattataaacatccatttaaaaaagaagaatatgaatatgctcatctttctttctataaagtcaaatcacataacaatattgcaaatgacaatatggataaaattgaaactggattatctttaaacggtttattatcttcagttacatcaactactaaacattcagaatatagaacgggtttcggtacaaacaatattttaaatatgagtaatcctcttattaaaacagtgattaacttgaacgaacttgttgagaatagcaagaactttggaaaaaatacttattcaaaaaataaatcagttatcactactgttgaattagaagaagacaatattgaagaattgtacgacaaatctcattgggtaacatttattgaacctacatttggtatcgaatactttgacagttctgatagtaatttgatcattattcattacagcgatcaatatagttcctctagcaagtatgatactattactgtaactaataaatcaacacaatatgaggaaattataagagatttcctccaatctaaatatgtaaaagttacagatgaagaattgtatgatgtaataaagatgtttaattcaattaatggtgaatggttacttagagtaatttctaattccggccattatgatagggaaaaattaagtattatttctgctattaaatattgcttatccattttggaccataaagatattgtttggattccagtttctatggaagaaatcttaagaattgcaggaaatgttaaattagataaaaataaaggaatttttgactctaagttaataaaaggaaatcatagtgatgatctgctattcattggtgtaaaattcaatgaagataatagaatcgaagttatattctacccaatcgaagttaaaataggtttgaataatgcttcaactattaaaaaaggtaaaagtcaattagataatacttataaacttcttaaaactcaactacaaaatattaatgtagagaattctgaatttagaaataaattctttagaaatttcttcatccaaatattattgtccaatgagcaaaaattagtaactaatcatatttgggatgaaaaaggattggatagaattgaagaattcaaagcagaactattaaatgatgaatatgatattttatatggtttagaagagtacattggtaaaggttctttggtttcatttaaaaaagaatctcatcacatctctatctatatggatgttgataagcaagtaattgagttaccagaagattttgcttattacggtttagccactcctataagagaaatccatgatgagattcagtcagacaatacagatattcttgcagaaacattgttatcacatgtagatataagtgaaattagagcaaagaataatgatatatgcgattcaaatgaggatatgtcaatagatgatgattttgataatttaagtgaatttgaggatagttttattgaagaagaatcagaaatttctgaagagcctgatgaagaattaactgatgcaacttcaagcagtgataatgaatcaattgagaatattggagaatctccttctaaaatttctaatgtcagagcattaattggaactcagaagggttataatcataaagtttattgggaatttggacatccttctttagcaaataggcatatgttaattcaaggaaaatctggacaaggtaaaacatatttcattcaacgaatgttaaaagagttgtctattcaaggcattcctagcataattattgattatactgatggattcaagccttctcaattagaacctaattttaaagactctttaggagataaaataagccaatattttgttgtaaaagaaaatttcccaataaatccatttaaacgaaacactatcatgattgataaggacatatttattgaagaagacaacagcactattgcgagccgatttaaatctatcattaattctgtttatgggctaggtattcaacagtccaatactttatatcaaacagttttagattgcttggataagtatgatgataattttgatttgaatatcctaaaagaagaaattctaaaagacgaatcaaatagtgcacaaacagtcttgaataaattaaatgagttattggataaaaatccgttcgcatccactgatttcgactggtctgtcttagataataaagacggtaaagtttacattatccaattaactgcactttctaaggatatacagacaattataactgaattcatcctttgggatttatggaattacaaattaacaaatggtagtgaagataatcctttcattgttgttttagatgaagctcataatcttgatttttccaatgactctccatgtagtaaaattcttaaagaaggcaggaaatttggatggtctgggtggtttgcaacacaatctgttaaaggatctatgaaaattgatgaaatagctaaattagagaatgcagatgagaagatatatttccatccaacggatgtttcaacaatagctaaagatttgtcaaaagacaatgaagataaaaaaatatatgaaaaagagttatctcaattgacaaaaggatattgtattgttcaagggtctgcaatagattcaagtggcaatttgtatcagccaaatcctgtaactgtaaaaattgaggagataagttttgatgaaaattaa

SEQ ID NO: 324 - DNA, 3165 bp, Methanobrevibacter ruminantium
  source 1..3165: mol_type = genomic DNA
atggaaagtaaagacagaatagagaatactattttcaatgataaaagaatggatgcttatatagacaaatattttgaagagtttactctgagttctgaacaagaagaggcactgaatatttggatagataaattaaataacgatcaattaacaagtgaaaaagggaattatcataatttttttgaaattattcttgaagatttacttggttataaacgttctgatgttaaacatgaagagaatattggtgatgaaggccatcctgtagagtttgtattagaaaaagatggaaaagattatgtgattatagaactaaaaggaacaacttataaagacctcactaaaagaagacctggacagcaatcaccagtagagcaagctacaaattatgctagtgctaaaaaagaaactgaatgggctacagtttcaaattatgatgaatttagattttttaatccaacagcaagagataattatatttcattcaagtttaggcaattgaaagatttggaaatctttaaaaaatttttattagtattcagtaaattttcacttatcgatgaagacatacctaaaaaattacttaatgaaacaaaagtcattgaaagagaattagaaaatgaattttatcaattgtatagtgacactagattaatgattattaaggaattggaatattcttcagaagatattaataggattgaagcaataaaattatctcaaataatattaaatagatttattttcctttgttttgcagaagatttagcgcttatggaggaagagacaactgctgatgtattattaacacctttaaagcatagaaatttaatcggaaatacaatgtggaataggttaaatgaattatttatttttgcaaatcaaggaaataaacataggagaatacctgcatttaatggaggattatttgaggatgatttatctaatttgaaaataagggatgaaattgaagataggtctttctttgaaaattggaatttaaaagaagattttgaagacaaatatgaggatattgctaaactaattggagtttataaagatactcttaatccaattttcattaatttattaataatttctacatatgactttgattcagaacttgatgtaaatatcttaggacatatttttgaaaacagtattagcgatattgaagagttaaaaaatgataatcaagagcaaagaaaaaaagatggagtgtattacactccagaatatattacagattatatttgtagaaatacaattattccatatttaagtatttctggtaaagccagcacagttcatgaattattatacgaatatgaatcatctaattcattggatgttttagattcaaaattaactaacatcaaagttctagatcctgcctgtggtagtgggagcatgttaaataaatcagtagatatattatttgaaattcatgaagcattacatgcaagtaaatatgctggagattcatctttagatagattttttgatagtttagaaaaacgaaaggaaattataagtaataatatttatggggttgatttgaacgaggagtccgttgaaattactaaattatccttattcctaaaattagcaactactgttggacttaaagaagggtttcaacttcctagtttagataaacatattaaatgtggggattcattagtggatgatgagtcaattgccggaaataaagcatttaactggtatgaatcattttcagaagtttttgaaagtggcggatttgatattattgtaggaaatcctccgtatgtggatattaaagaaatggatgaaaaaacagcaaaatacatatttgataattatgaaacttcttttaacaggataaatttatattctacatttgtggaaaaaagttattatttgctaaaaaatgaagggattttttcatttatcatgcctaattccattttatttaattctacttactctaaaatcagagaactaattcttaataatacatccatattaaatattgtaagaacttctgatgatgtttttaaagatgctaaagtggaacctattattttaatcttcaaaaaaggatatgatgaaggaaataagactaagatacttataaaaaaagatgatatggatgaaattccaataaataattattcagaacatttctttacacaagaaagatggtttgaaaataattcaataattaatattttttcagatgattttacttttgatttattaaagaaaattgatggaaataatgaaagattaattgattattgtgattttagtttaggtttaactccttatgataaatataaaggtatgagtgaggatattattaaaaatagaaaattccattcaaaaataaaacttgacgatacttttaaagaattattggatgggtccgatattacaagatataatgtaaaatggggcgaaaaagaatatattaaatatggggactggttaggagcacctcgggaagaaaaattctttaaaaatcctagaattttaataagacagattttatctatagctcctaaggaatctcgaaaaaggatttttgccgcttacacagaagaagaattatataacgctcaaattgcttttaatttagtattgaaagaaggctttgatgataaaaatttattgaaatattttttaggaataattaattctaaaatgatgacttggtattatgaagaaagatttatggataaaaataaaaagaattttgcaaaaattttgattgaaaatgctaaaaatcttccagtcattattaattcaaattttttagatgagatagtatctaatgtggattcaataatagagttaaataaagagttttatagtgtaagaaatgcatttcaaacatggcttaaaatagaatttgaaattgaaaaactctctaagaaactagaaaactattatgatttaaactttgaagaattcttaaaagagataaaaaagaaaaaagtagtcattagaccaaatcaaatacaggacttgtccgaattatttaatgaaagtttaggaaaaatagaatatctgcaaagagagattaaagaagcagacgaaaaaattaacctactggtctatgaattatatggtttaaatcatgaagaaatagaaattatagaaaatagctttaatgattaa

SEQ ID NO: 325 - DNA, 261 bp, Methanobrevibacter ruminantium
  source 1..261: mol_type = genomic DNA
atggacgatgaaacattaatcctaattgaatacatcagaaacgcgccaacaagagaaatggtgcttaagtcatttgaaggagtggactttataagaccaatccaaatttctaggaaaacaggcattcacccaaacaatgtcagcaagaaattaaaggatcttcgcgaacatgaactggtctatgtcataaatcctgagtaccatgttcctaaactttacaggcttactgaaaagggtaaaaatatgcttcaattcttgtag

SEQ ID NO: 326 - DNA, 2061 bp, Methanobrevibacter ruminantium
  source 1..2061: mol_type = genomic DNA
atgaataaaaaaattatcttatccctccttttagtattattagtagctatttctgtctctgcagttgcagcagcagatgctgatgtcacatatataaacgatgctgcagatgtagacgatgttgcagacgaaaaagttgctcctcttacagctagtgctgatgcacaagacatccaaactaagcttgataatgctaaacctggagacacaattgaattagaaaacaagacatatgacgttgatacaacatttaatgtaactaaacaagttaccatcaaaggtcaagacactgtcattaaagctagcggtgcatcccaaggtggtagcggagcactcttcattgcaaatgaagctggaactgcttttgaaggaattaccttcattaacactgacggccacaaaaactatggagaacaagtatcaggatatgctatccaattagctattgaaaacggtactgtagacaactgtaaattcatcgactggagtagcggtgtatacggtaaaggcgcatctttctgtagcattaccaactcttacttcaacggttcatccgaacaagtaaccaacggcggtaaaaaagaatacggtactaaagcaattaaccttatgggttcccacgacattaccgtaaccggatgtacctttgaaggacaagttcttgacgctatttccattgcaagtaactcaggtaacaacatcatgaccgacaacactttcatcgacaactgttatgctatctacttcggtggagcttccacccaaggatgtgtaatcgctaacaacagtttcatcagatgcggatactgtgttgatgacaaaggaaacgtaatctttaaagatttacctataatcagtactcaaaaagcagctaacggatacatcattgctgataacactattgaagcaaatgaaggatctatctttatgaaagctgaatcaggtaacacagcacacggatacccaagtaagatcggtgacataaacattacaggcaacaccattaccgcaactgcaggggctaatcctgaaggcattactttcatgtacatcttaagtaactctggtcctttaaacccatatgcacctattgcaatcgttaacaacaacttagacgcaggcattacccctgtaaccgtatggtatgctgactgggacaatgaaaatggtactgtaattcctgcagcagataaagcagtaacctccatcaacattgcagaaatcgctgcagcagatggaaccgtcactgttgaattggtagacgtaaacggcgctcctcaagcaggacaaaccctttcctacaaaatcgacgatggaaatgcaactgaaatcgaaactgatgaaaacggtaaggctgtaatcaatgtaccaattgatgaaaacgctactgcccaaactgttgccgttgaatttgccggaactaacgaccttgctgcaagcagcgctcaagtttcattcaaaaacactgcaactaaaagaacagctacccaaatcaatgctaacaatatgtcagttgtcactttagcacctaataccggtgacacaaatgacaattacttcaacgcaaccttacttgatgcagaaggcaatcctttagtaaacaaagaagtcaaaattggatttaacggtaaagaatacactaaaaccacaaatgaaaatggtgtagctcaacttaaaattaatttaggatacaaaggaggatacacctttgctgtagcattcctcggtgacgatgaatatgaagcatcatttggagtatacttaattaacgtagccgctcaaactcctaaattaactaccaaagctgctacttacaaagcatccgctaaaaccaaatccattagcgctaccttcaaaaccgaacaaggcagtgtaatcgctaataagaagatcagtttcactgtaaacggcaaaacttacactggaactaccaactctaaaggtgtagctactgttaaagtaagtatcaataagaaaggaacttacagcttcactgctaaatatgcaggtgacaacacctacaaagcagtaagtgcaagtgctaaacttactataaaataa

SEQ ID NO: 327 - DNA, 2091 bp, Methanobrevibacter ruminantium
  source 1..2091: mol_type = genomic DNA
atgtcgttatccatatttgttctggttataggaggtggatttattaataaaagaatattattaatattcgtatttctaatattcttcataagtattggatctgtagttgcaaatgatttagattcaaattcagtcaatcaagacaattatatttctgatgtagattcttttgatggttctaattcggttttgtccagttctaatttggatagttctattgataaggataattatttaaatttagattctaataataatttaaatttagattctgataagaattctgtttcaggttctgatttgaatttaaataatgctgatttaattaattctgtttcaggttctgatttgaatttaaataatgctgatttaattaataattcaactactaatgattcaagcaattcaaataattcaaataatttagaaaatcttactaatttagatgattctaaaggtgcttctaatcaaaagcctcaaaagtatcttattcctaatgacagttctataggttctgcatatatccaaaagatcattgataatgctgcacctggaagtacaattcaatttacaggttccttctataaaaatatttatctgaaaatagataaagctctaaacattataagtaaatctggcactgtgataaattcaagctatcgtttgcctgtatttactatatcaagaggaggatctggaacaaatatttcaggttttacagcaaatcttgcaaattcctttgtagaggcaagtgatgtgtccgatataagcatatcaaaaaataaaatctttacaaaacggaaagctattgtcctcgaaaatgtttttaattcaaagattgtaaggaatagtttcctaagatttgaaactgccattgacatttcaaaatctggcggattgaccatatccaataataatataactccagataacggatacaatgtgggaattagcttaaaagacatttatagagacaaggttagcatattaaacaataatatcactggccatgacagacgtatagaatccacaggcatttacttcgggccaaacgctaagaatgtattgattgaaggaaatattatagatgaatggtatactggtgtagatttccctaattctgtaaataatgtttccattttaaacaataccctcaatcacaatggtgatggagtaatcattaacggatggattaataatttcacttttaataagaatgtagtcactaatactggaagagttggagttctatttgactatgatttttatggaacaaaaggggatttcactttagagaagaatttctttacccaaagcggacagttggatttaagaaacactggagaccaggcagtaactattggtgaaaactttgctagcagacgttgtgttagggttgccatgaaaaatggattttccattaaaacccgtcaaaatggaaatggctattatttctcaattgtggataagaattccaggggagtaagcgggcttcctaactttagtgctacaatcagcatcaatggagtttcctataatgtcaatttcataaattctgttgcttatgttgaagttgatggcgctagcggcgaaaatgatgaggtccttcttgatgttggtgaagacaagcgtaagcttagcgattggggagagactcaaaatcttagttccagtgaaatggaatactataaaaagatttatgatgatttgatcaaatctatggtagaagagactaataatgataatcaggacatgaaaaaggtagaagataagaatggaacaggctccactccaagtggtggaaacggcggaggcgactctggtatttcagacggtcgttcttctgtaagttcaaatggagattcctctcctgcaagtgcaggaacttctaatgtggcagcaagttctgcatcttcatctgcgggcccttctgcagctcaagcagacactcctgaaagttctactgtaaaatcattgtcacttgatgaggaaacctttagagttgctggtgttggtggattagtcttcttgattatttgtgtaattggattatactaccgtgaagatattatggatatgattaaagaataa

SEQ ID NO: 328 - DNA, 684 bp, Methanobrevibacter ruminantium
  source 1..684: mol_type = genomic DNA
atgatggatttaatttttgaatatctgattgtttttattttattatttgccacaaatatagcatttttactaagatattctagttttaataaaaataaatttattccatttgttttaggctatgctattatagtatttgcattaacttttgtattttcttccttgaatttacaaaaggaatccatagattttattccgtatattttatttgctgttagtgctttaatgctaattatttcaattcgatatgtgggatttggaaagaattatggaataaatgatgataaagttgttttatatggcactattttatcttcattcttatctattggggcattggctttaggtttaaaatcagataatcttttcttatctggtcttgaattagctattctttctgttgtagttatctttttagtttataaaatctcaaaaatattcaacaatgctaaaagaccatattatgcagtcattggtgaatatatgtttttagaatttattttgcttcttattttagctttaaccttctctagcgtaagagaattggattattcaatgtttggatcttttctaattcttactcctacatataaggtgctatatatgattatagcaattgtcattttgcttgttttaggggttttatataatgattgggttttaaaaaggctaaaaaggaagtaa

SEQ ID NO: 329 - DNA, 642 bp, Methanobrevibacter ruminantium
  source 1..642: mol_type = genomic DNA
atgatacttcaaggtacggaaatattgacttcgtttatccatattgtttctgaaagcttgctggcacctgttgtaattgttttagttatattcttaatctatgcaattttaagctttggcggatttttaaatgaatggtttacaaaaaagccattgaaatctgcaggattggaaaagttattgcaagacatttcaagctccgatagtcctgaagacttaaaggctgttatagatgccagcgctttgtataaagagcaaaaagaaattcttgtaaagataactgataattataatttaggtccagaggcaagaaaggcttttgcaagtaaacttattgaagaggaagaaagcaatctgcttaaattaacaactaaaacagatattttagtaagattaggccctatatttggtcttcttggtactttaataccattaggtcctggactttctgctttaggtactggggatattaccactcttgcccaatccttgacaattgcttttgatacaactgtcactggtttgactattggtgcattaggttatattgtttctaaatatagaaagcaatggtatgaaagtgatttgactacaactgagacaattgcagaggctattttagaaaaattgaatcagttttaa

SEQ ID NO: 330 - DNA, 318 bp, Methanobrevibacter ruminantium
  source 1..318: mol_type = genomic DNA
atgttaagaaaaagaaaacgttttagtgatgatggcgatgaggatcctatgtctgggatttcaaatctttcagatgcaatgcttgtgcttgctttagggtttttgatttttgccattatggctcttcaggtaaatcctgatatgatggctaagactcaggagtctcaagcacaacaggccacttctcaagtgagcacaggtcaggactttaatagtagtgccaatgcaggtgcctctttagagcagtctggttattctgaggtgggaaaagtttataaagatcctgatactggtaaattagtcatggttcagggttga

SEQ ID NO: 331 - DNA, 1623 bp, Methanobrevibacter ruminantium
  source 1..1623: mol_type = genomic DNA
atgaacaataaaaagattataatgtcttttctattggtcctattgattgcaatatctgtctctgcagtttcagcagcagacattatagcagacaatcaagattcaatttcatccaatgacaattcaatcaatgaaattgctacagaagacattagcaaagacattaatgacaaatctctttcagatggagtcagcaccggcggaaacaattggattgtaaaaccatcaacagatggaaaaagcgatgcaaattccattcaaaaggcaataaacctcgataatacaaagcctggagacagtctccttttaactgataagaacttcaccttagaaaagtcagttagcttgaataaagaccttacaatcaatgggggaaatatatacaatcagaacaatttaactgatctatttataatagatcctaaatctgaaggaggtccaaagaatataacaattaccaatgttacattttatgtaaatggaaatgaaaacattgtgcttgcaaatggagagaattacggcacaacttatattgatcttgccaatataaaaataagcaactgtacaatcttgcctataaatccagacagcaatatcaatgatacagtgcttcttaatataaaatccgataggacagtaggccaaacaggtcaaagtacaggattcgtattggtttcaggcaacaagctaaacggcataaacacccttaagaataacgattacgtattaaaagacgactttgttattcaaaaggcggaccctatcttaaataccgccctaatatgccctaacatgactattacaacctatgataaaaacactaatgacactccaagctattatgaagtgaaattgatagatcaaaatgtcaatcctgtaatcaacaggacaattcagataggattcaatggcaaaatctatgataggacaagcgatgaaaatggaatagcaaaggtaaaattaaccttagcttacacttcagtttacacatttgcagtttacttcctaggtgatgaaagctatgcaagtgcatttgacgtttcaactgtgacaatcattaagaaaaatgccacaatcactccaaagacagttagctataacgtaaatgcaaaaacaaaaactttaactgctaccttaaaagacaaaaacaataaggctttagccaataagaaggtcactttcactgtaaatggaaaaacatacactgcaacaacaaactcaaaaggtgttgcaagcgctaagataagcctaagcaagaaaggcacatacactttcactgcccaagttttgcaggggacaatatctataattcagtttccaaaaaagggaaagcttaccttaaatccgctttcaacaaacttgactgtcaagaagtacacattcaaaaaagcagccactaagaaaatacaagtcactctcaaatccggcaagactgtgcttaagtccaaaaagcttaccataaaagttaatggaaaaacatactccggaaaaacaaacacaaaaggaatcgctacaattaccataaaattaactaaaaaaggaacctacacttacacagctaattttgcaggagacaatacttataaggctattagcaaatctcaaaaagtggttataaaataa

SEQ ID NO: 332 - DNA, 822 bp, Methanobrevibacter ruminantium
  source 1..822: mol_type = genomic DNA
atgagttttaaaagtcctgcagatactgcaaaagcagttgcatctgcagctaccgcaaaaggtgaaatgcctatcataaaacttgctattttaggtttcttagcaggtgcatacattgcattcggaggtttacttgcagaagtagcaaatactggtgctattgctggtggagttccagtaggtatttctaaattattattcggggcagtgttccctgtaggtttaattatggttgttatctgtggatctgaattattcactggtgacgtaatgtttatgactatgggtcttttagacggtaaaactgatatcatgggcttactcaaaaactgggtaggtagttgggtattcaacttaatcggtggtctcttcgttgcttacgtacttgcttacttaactggtattatggtacctgaagcattcgctggcggtgcaattaccattgctaacactaaagcattaggtggagctaccttcatggcagctggtaaatcaactgcttctttaacttgggtacaatgtttccttagaggtatcggttgtaactggttagtatgtttagctgtatacttagctaacgctgctgacgatgtagtaggtaaattcttcggaatttggttcccaatcatggcgtttgtatgtattggatttgagcacagtgtcgcaaacatgttcttcatcccattaggtatcttcttaggtgctgaagtaacctgggcacaattcttcatcaacaacttaattcctgtaaccttaggtaacatcgttggtgctgctgtattcgtagcatgtgcttactggttcgtatacttacgcgactaa

SEQ ID NO: 333 - DNA, 2052 bp, Methanobrevibacter ruminantium
  source 1..2052: mol_type = genomic DNA
atggttgagataaaatatgtaccatctatttgtccttactgtggtaccggctgtggtattaactttgtggtcaaagatggcaaaattattggtgtagaaccttggaaaagacacccagttaatgaaggtaaagtatgtccaaaaggtaactttggataccaattcattaaccacccagacagattaactactccgttaatcaaagaaaacggtgaattcagagaagcttcctgggatgaagctttagatttagtagctagcactcttaaaaaatatgctgacactgatcctaacaaattaggattctacgcatgtgctagatctcctaacgaaaacatttacataacccaaaagttagcaagagctggttgtggaacccaaaacgtagaccactgtgcacgtatctgtcacggtcctactgtagctggtctcgctaccaccttcggttcaggtgcatccaccaacggttatgacagtattgaagaagctgacttcattttctgtatcggttccaacaacatggaagcacacccattattcggacgtaaaatcatcagagctattaaaaacggtgcaaaattagtagtagctgacccaagattcactcctactgcaaaattagctcacgaatacatgcaattcaagaccggtactgacgtagctttaatgaacggtatgatcaaaatcatcattgaaaatggtttacaagatgatgagttcattaaaaacagaaccaaaggctacgaagaaatgaaagaagtagctatgaaatacgaccttgacaaagtagctgaaattaccgaagctgaccctgaacaaattgaacgtgtagctttagaatatgctcaagctgaaaacgcagctattgtatactctttaggtattaccgaacactctcacggtgcagataacgtaatgtccaccgctaacttagctatgttaaccggtaacgtaggtaagattggtggaggagtaaacccattaagaggacaaaacaacgtacaaggtgcttgtgatatgggtgcattaccttctgactatgtcggataccaaaaagttgcaaaccctgaaattaccaaaaaattctcagacgcttatcaaatcgaattaccaaccactcctggtttaaccttagtcgaaatgatgaacgctgctcactctggtgacttaaaagtattatacatccacggtgaagaccctgttctctccgatgcagatattaaacacaccaaagaagcaattgcaaacttagaaatgttaatcgttcaagaattattcatgaccgacaccgctgctgaagcagacgtagtattacctgctgcaggttggggtgaacaagaaggtaccttcacttccggtgaaagaagagttcaatggttacgtaaagctcaagaaccacctgaaggaaccatgcttgactggaagatcatggaagaaattgctgttagaatgggcagaccaagagaattattccactacgaaaacgctgctgaaatttgggaagaaatcagagaactcgctccttcctactacggaattactcacgaaagattactcaaacctgaaggtgtccactggccatgccttgacccagaagatccttgtgaaccattaatgcacaaagacaaattcgcacacccagacggtttaggtgtattccaagcattagaacacagaggtcctgtcgaagttgtagatgatgaatacccattattattaactactacccgtatcttgttccactatcacgctgcaatgaccagaagatgtgaaaccttagataaggaagtacctaccggattcatcgaaatcaacactgaagacgcagcagaaagaggaattcttaacaacgaaatagtaaaagcttactccagaagaggagaaatcgaaattcctgctcgtgtaaccgacgacattaagaaaggtatcgtaaacattcctatgcactttaccgaatgtgcagctaacatgttaactaactccgattctttcgaccctaaatgtaagatggttgaattaaaagcttgtgctattcaagtagaaaaattataa

SEQ ID NO: 334 - DNA, 1209 bp, Methanobrevibacter ruminantium
  source 1..1209: mol_type = genomic DNA
atggctgtaaatgtaaatgatatgttttatgcatactctggtaatgaagcaattaaagaaaaaggagaatatggtggtgtagtaactaccatcatgaaatacttactcgaagaaggtattgtcgacgctgttgttgctgtagaagaagcagctgacctttacgacgcaaaacctattctcataaccgaccctgaagatgtaatcaaatctgcaggatcccttcactgcggtacattaaacttagcaaaattcgtatccaaatacttagacggtgcaagagatatgaaaattgcagttaccacaaaaccatgtgacgcaatgaccttaaaagagttaatgagaaagagaaaagtaatcgaagaaaacgtaatcatgattggtgtaaactgtggaggaaccatgcctcctgtaccaactatgaaaatgattcgtgacgtatatgaattagaccctgcagatgtcatcaaagaagaaatttccaaaggaaaactcattatggaaaccgctgaaggcgaaaaagcaatttctattgatgaactcgaagaagaaggtatgggtagaagagaaaactgtcaaagatgtaccatgaacatcccaaccaacgctgatttagctttaggtaactggggagttatcggtgaattagcaggaaaagcaacctttgtagaagtttgctctgaaaaaggtgcagacatcttagataaagttattgaagctggtttaattgaaacccaagaaccaatcgaaaaaggtgtaacaatccgtgctaacatcgacggaatcatggttaaacaagcaatggcacaaagagaaaaagactttgctggaacctccggtgacattttagaagtatttgcagaatacaaagaagaattctccaaatgtatgaaatgttacggttgccgtgaagcatgtcctctctgtttctgtgacgactgctgtcttgaagctgaaggtcctgaatgggtacctggcggatacactcctgcagctccattcttccacttaacccgtatggtacacatggttgacgcatgtactaactgtggtcaatgttctgaagtatgtccttgtgaaattccagtatccaaagtatgggctactgtaaaccaaaaggtcagagacatcttcggttactacagtggtgtagacaacgaagaaccattaccattcactgaatttggtcctaaatcatacagacaatactaa

SEQ ID NO: 335 - DNA, 708 bp, Methanobrevibacter ruminantium
  source 1..708: mol_type = genomic DNA
atgagaattatttcaattgtaggcttaaaaaatacaggaaagacttcacttacaagcaagataatcaaggaattgaccaatagggaatttaaggtagcaagcataaagcattctcatcaccaaatggaaatggatcatgagggtacagacacctacaagcaaatggagtcaggctctgattttgttgtgggaattggaggccgcacctatttcaatatcaatgaaagacttgacttggaacgtattctattcttaataaagcttattgaaaatcctgattttgtggttatagagggattcaagagctatccttatgcaaagatagcaacctgcaaagaggtggaagacgaatacacaatcaaaacagtaaattcatttgaaataacagatgaagagcttctagatcttgtagaccttatagaagaaaggtcctatgacatcctagatacattattcgttagtgactgtggctataatgatgcaagtataataggtcaggcatttgcacaaggaaaactggattataatcccgatactcaagcggaagttaatttagccatcgatggaatcaatatagggctaaataagtttgtaagcaattatattaagcaaactgtattgggcatattgaatccacttaaaatcaaggaatatggtgtggaagactttgagaatattgacctaacaataaaaaacaaaaaggattaa

SEQ ID NO: 336 - DNA, 186 bp, Methanobrevibacter ruminantium
  source 1..186: mol_type = genomic DNA
atggcttgtaatgatgattttgaaaacaatgtgactttagcaatcaatggcaatgatattgaattaaacaaatttacagatgatattattaaagaaaccattcttggattattgaaagctattaaaacttctgaatatggtgtagatgaagttaaggatgttgaaataacaataaagaatgaatag

SEQ ID NO: 337 - DNA, 936 bp, Methanobrevibacter ruminantium
  source 1..936: mol_type = genomic DNA
atgaaggataaagttagagacgattatgaaaggccaattatttcacttaggatttctataaccaatcgttgcaatgtcaattgcatatactgccaccacgatggcatgctggactcatcttctgaaatgactcctgatgaaatatacgagatctgcagaattgcaaagaaattaggtgttgaaaagatacgcctatctggaggcgaaccacttgttcgccctgacatagttgaaattgtagagaaggtcaactcacttgactttcgtgacatttcaatcacaagcaatggaatatttttagacaaattagcaggtcctctaaaggatgcaggattagacagaatcaatgtcagtttagacacacttgatgaagaaacctataaaatgattgtggggaaaaacgttttagagagagtaaagaaaggaatcattgaatcttgtgcagttggtatgtatccagttaagataaacatggtagttatgaacaatatcaacaatgatgagattatggacatgtttgaattcaccaagaaacatggtgttatccttcagcttattgaaataattgagtctgaaagctgtgatgacaatgacttcaattccaagtatcactatcctttagctgaatttgaaaagcatcttgctgaaattgcagatgagataaaggttagggagtttatgcaggataggaaaaaatatttcattgacggcggagagatagaggttgttcaccctgttgacaataccaatttctgcaagaactgtacaagacttagaattactcccgagggaaagatcaagccttgccttcttagaaatgataatcttgtaaatcttattgaatttattagagaaggagcctctgatgaggagctcattgacatattcttaaagggaattcataatagggaacctttttataaggaagaaaattag

SEQ ID NO: 338 - DNA, 6930 bp, Methanobrevibacter ruminantium
  source 1..6930: mol_type = genomic DNA
atgaaaatccaaagaggtatatatataatattaactttacttgttctctttagcctttctgctgcaagcgcagcagacgatcttacagatgatattattagtgctgatgagaatgaagaacttattttagatgaaacagtcattgatgacgtttcaaatgcaaatgacaactatgatgaagaacttattaaagcaaatgatgaaaaatttgtatatgctggaaatgattcagatgaattaagggaggatccagggacatattccgggctatctagcgagattggcgctggaggaaatattgtattgacacacgattactatacttatgatagtggcgatacaatcataatatcaattagcaatagtgttattgatggtaatggtgcgattatagatatggccggatcaactattcgagcatttaaagtaactgcttccggtgtaacaattaaaaacctaaccattaaaaacgccaatgtaactacagatgatctaggcaatacagatgatgagggcgctgcgattgactttgaaaagtccggtaccattgaatattgtaattttattaataactctgcaaacgctgccggtgcagtatacttttataaagataacagcaaagcaataaattgtaatttcagctataaccaagcggtatactctggtggtgcagtttgctttgaggaaagtggtactatagaaaattgtacttttgtcaataacactgctgtttatgatattttaggaggaggcggtgctgtttgctttaatggtacaggtaatgcgataaattgtaactttaccaataacaccgctcaagggtatttttcatgggctggtgcaatttgctttaatacaaatggtaatgcgataaattgtactttcactaataataaggctcatgactctggaggtgcaattgagatttatggcaatggtaaattggaaaattgcagttttgataagaattctgccaacgatggtggtgcagtcaagatttatggagctactaagatatcaaattgtaattttactgaaaacaaagcagcagaactttcaggtgatggcggcgctatctattggaatgccagcgctggcaaattagaaaattgcagttttgctaaaaactcagcttttcacggaggtgcagtttcctttgaggaagatggcgaagtaacaaattgtaattttactgataacctagcaggagacagcggtgcaatttggtttacagcggatggtactgtagaaaattccacttttattaagaatgaagcatgggatgagtatggcggcggaattgtcttttatacctccggggatgtaagaaattgtaatttcactgataatgaggctgataagcaaggtggtgcagtttactttaatggagcaggtactgtagaaaattctaatttcaccaataataaagcacaggatggcggtgcaatcttcttttcagaggacagtactgtaaaaaactgtatttttgttaagaattgcgctactgatatacgttctgataggtattttgagaggtgcaaatatgtattttataagaatggtgaagtaacaaattccagctttactgaaaacaatgctactgaaggtggcgcaattttatttaagggcaatggtaaagcaacagattgtaattttaccaataactctgctaaatttggtggtgctattgactttgagagccatgccactgtagaaaattctagctttaacggtaacaaagcatcctctaacggcagtgccatctggatgaatcgtgcgggaggcattgtttccagcagtgtttttgtgaataaccgcgctaataccggtaccatatttttcagaaatgataattccacttcccatttgacaatcaatgataatattttcctgaataataatggtgttgcaatctattttgataaaaatgattctgattccaatacagattacaactggtttggaaacaatgcaacaaattatgatatagcaccagtagctaataatgctgaaataaatacttggcttttcctgaatacaactgtaaatccggatatgatttctattttagattcattagacatcgcgtttaaattatatgcttacactccttctgaagtatcagaatatgacaacatccgtttgaaagctgtcgacttgacattaactccaacaaatggaatattcaatactaccaagacggagcttggaaaaactgttcagtacattccagagagtgatggaatcggaacactaacagcatcaatagaaaatgcctcctacactacaacattaaaaatcacagatggaacaacattctttgacttagattatatcataaacgccaataataataacactattgttttggatagagattacacttataactcaacattcgactataattttacagatggaatagtcattgatcgtcctgtgacaattatcggaaatggacatacaataaatgctgctgaaatggtcagaatattccatattcaagcagacaatgtaaaaatcaaaaacattacattcacaaatgccatctcaaacggatacggtggcgctatctactggcaaggagccaatgctaatctttccagttgtctttttgaaaataatagtgctgtaatggctggtgctgtagcgttctatggaagcactggcagtattgtttctgattgcagtttcatgaataattccgccaataatggtggtgcaatcatgtggcaagtcagtgatgacagcgttgtttctgattgcagtttcatgaataattctgccatacagggcggtgctatctattggagcagtaatgatggtgttgtttctgattgcagttttgtgaataattccgctgtgcgtaatggtggagcaatatattgggaaaaaaataatggtaatgtttccggctgtatttttgtgaataacagtgctgataacggtgccatctatttcaataatcaaaactttggtcaaaatttaacaatcaatcataatattttcctgaacaatgatgccgttgcaatctattttgtgagaaatgattccgcttccaatgcagattacaactggtttggaaataatgcaactaattgcgatatagcgccaacaagcaataatatggaaatgaatacttggctgttcttgaatgctacatcagaaccggaaggaatttctattcttgattcatgcgacattatatttaaattatatgcttatgctccttctggagtatcagaatatgatagcagccgtttgaaagagattaacttaacagtgactccaactaacggaaggatcaatactacccaagccaaactgggagaaaaggttcactacactccagagagtgccgaatgcatgctaacagcatcaatagaaaatgccttctacactacaagattaaaaatctcagatggaacaacattccgtgacttgaacaatctcataaaccgcaacgataatgacactattattttggataatgatttcatctataactcactttttgacagtaaatttaaaaatggaataaatattaatcgacctttgacaattgttggaaataattataccatagatgctaccggaatggcaagaatattccgtattcaagcagatgatgtagaaatcaataacattacattcgctaatgctaaaatagacggcaatggtggtgctatctattggtattccggcgctagaggtattgtttctgattgcagttttgtaaataattcagctaagatgtatggagctgctatctattggaatggtgctaatggtaatgtttctgattgcagttttgtgaatagcactgttactgatgaacatggtggtgctatctattggcacggtgccaatggagttgtttctgattgcagttttgtgaacaattctgctaagaaatatggtggtgctatcttttggaacgctgccaatggagttgtttctgattgtatctttgtgaacaattctgctaagagctatgatggtggtgctatagtatggaatgaaggtttgaacggtgctatttctgattgcagttttgtgaataattccgccaatgatggtggtgccatcttatggaatgaagctgctggcggtactgtttctaattgtagttttgtaaataattcagctaataagagtggtgctgctatctattgggattccggtgctaggggtgttgtttctgattgcagttttgtaaataattcagctaataggagtggcgctctatactggtttgctaatgatggtgttgtttctgcttctatttttgtgaataacagtggcgataatggtgttttatacttcaataatacaaataagcgaaatttatcaatcaatgacaatattttcctgaataatgatgtcgttgcaatatattttgttaatagtgattccacttccaatgcagattacaactggttcggaaataatgcaagcaattttgatactgaaccattaactactaacgtggaaattagtacttggctcttcttgaatgctacagcagatccaaatccagttgaaattttaaattcatcagatatctcatttaagctatattcatataacgctacaggaatatctgattatgacaatagccagttacagcctgttaatttaacattgactgcaactaagggtgatgtcgatagcattgctaaattaggggaaactgtcatatacaatccaactagtttaggaactggaagcgtaactgcaaaagttgaaaacgtcgcatattctattgaaataaacaatataaaatcaaatccaaacctatcagttgaatccgatgaacttacatacggcaacaacatagcaattgctcttaattatgagtctgctgctaccggcaaagtcaatataacattaaaaggcaaaaaatcagattatacatttgcagatttggatttaaatgaaacaatttcacttggaattcttgctgctgatgaatatgaggtcattgttgaatattccagagatgagatttataccaatgcaagcgcaaggggaactttaaaggtcaataaagccaattcaacattgacagtcagtgatattgaatttgattataaggatatgggatctggtgaaatatcattcactaacgcaactggtgttgaggccaaagtaataaatcatgatgaagccattgttttcgttagaggaaatactataactgtattaaatttaagtgcagacagctatatattggaagtaacaactattactgatgaaaatcacaatgaggtaagcaagaatgcaacaataacagttagaaaagtcaattctaccattaatgttaatgatattgtcctttattatggcgaatccatcaaccttgctgtaacaactgatggtgctattggaatatctgctgatatcgatggcgagaacgttgagcttaatgaaaacatcgttacaattccagatgatttggaatctggaaatcacacattgaccataacaacagttcctaatgacaaccataaggaagcaagcaaaaccgttaatattgttgattgcaggattggcaatatcactgttgttgttgatggcgttgaatattctattcctgctgtaaatggcactgccattacaaccaatatgccggaggagattgaaaagcttaaagaaaatattactgatttaactggtcaattggaagaagcacaaacaaacgcaactaacctggctaacaatctaacaattgctaatcaaatagttgataaattaatcgcccaattggaagaagcacaagccaatgctactcaaacaatcaatgatttaactcatcaattgaatgaagcccaaaccaatgcaactaaaatagctaacgaccaaacaaatgctaatcaaatagtagacaatctaactggccaattaaatgatgcccaaaccaatgcaactaaaatagctaacgacctagaaaatgctaatcaaatagttgatgatttaactcgccaattagaagaagcacaagccaataatgatcaaaccatcaatgatttaactcatcaattggaagaagctaaagttaatgcaactaaaatagctaacgacctagaaaatgccaatcaaacagttgacaatctaacaacccaattggaagaagctaaagttaatgcaactaaaatagctaacgacctagaaaatgctaatcaaatagttgacaatttaactgaccaattagaagaagccttggctaatgctactaaaatcgaaactgttgttgtcgatggtaaagaataccctatagaatatgtgaacggcactgcaacagtaactaccaattctacaggtcctcaaaacataactcatgagagaaaagccacccaaatcatttataaggatatggaaacaactgctatcgacactaaagttgatggacgtatcggcaaatacttcaatgtcattctcaaggacagtgagggtaatattttagcgaataaacctattcaaattggattcaatggtaaggtctataataggacaactgatgaaaatggatctgctaaattacaaatcaacctcatcaaagcagacatttacacatttgctatatgctacctcggcgatgatgattataacggttctttcgttgtatcaaaaatcaccgtaaaagcgcaaaaaggcactctaaccgttccaaacaaatcttacaaagcaactacaaaaaccaaaactttaagtgcaacattcaaggcagcaagtggtaaagtacttgccaataagaaagtttcattcgttgtgaatggaaaaacttattctgctaagaccaacgccaaaggtgttgctactgtaaacgtcagtttgaataagaaaggaacatatagcttcgttgccaaattcgctggagacaatacatacgctgcagtaagcaaaaaagcaaaattaacaataaaataa

SEQ ID NO: 339 - DNA, 450 bp, Methanobrevibacter ruminantium
  source 1..450: mol_type = genomic DNA
atgccaaaacatatcgtatcaggactaaaatatttagaaagtgtcgagcttagaaaaagagggctgtcccaaaaggagatttcatctgaaattggtgtggacagatcaactatttctcactacttgaacggccgaaacatttctgccgattcaatcgagcttgctaaagttattttagagctgaatcctaaggattttatattaattgcaagagttttgtttggagattataacgaaattcgtcaacttattagcatttttaatatgaatcattatgacccgcagatagatgacggatgtattggttgtggattgtgtgtagatttgtgtgaagtgaagtctattagcttagactcattaaaagcaaagataaaccctcgttattgttgtggctgtcttatgtgtgttgaagattgcccgacaaattcaataaagattttggaggtataa

SEQ ID NO: 340 - DNA, 1104 bp, Methanobrevibacter ruminantium
  source 1..1104: mol_type = genomic DNA
atggtcaaaaatattaaagaaacagaaggcaaaaacttctgcattaaaagatcattaggcgaagaaagagtattgtctttcaaagatcacgtctgtgtcggttgcggactctgtgaagcaacctgtcctgtagaagctatctctcttgatgaagtagctcctatcgaacgtaaatatgtagacacttatttcagtggtcatgaaaagattgctcaaaactatgctcttttcactaatgataacgaaatcaaagcaaaattagatatttgcgaagataaatgtgttctctgtggtttatgtagtggagtatgtccagcaggtgcattagaacttgctattgatggcgtatccattaaagaaaatgaagcttacccacatcttgtcacttcagctgaaattgatgaagacaaatgtttattctgtaagaaatgtgaagctgcatgtcctagggagtcaattactatcgacagaaaattacctaaccgtgcagaccttgtaaccggtgaaatcgaagtggatgaagaagaatgtatctactgtggcgcttgtgctgaattatgtcctgctgaagctatcgtagtggacaaggcaaccggcgaagaaagcattgtcattgacaaggaaaaatgtgtatactgtctcgtatgtaagaaagcatgtcctgttgacgctatcaaagcagtatgtagatcctgttcctacggcgaatacgatcttgaccctgctaaagcagcaattacaggtaacgctatcattgattctgaaacctgtattaaatgtggatggtgtgaaggagtctgtcctgctgatgcagctactgtaaaacaagcattcaaaggtactctcgaaatcgacgaagaaaaatgtggtacctgtggagcatgtattgacgtatgtccatgtaatgtcttgtccttccctaaatcaactggtcctggagacagaggaactcacttagttaaagaagaagattactgtatccactgtggtgcttgtgcaaaagtatgtcctaacgaagcattaacagtaactagaactgatgttgactacaccccaacaagttctaaatcttggattgcagcattcgaagctttaaaaaattaa

SEQ ID NO: 341 - DNA, 231 bp, Methanobrevibacter ruminantium
  source 1..231: mol_type = genomic DNA
atggaacttaaagtagatcaagataaatgtttaggttgtggagtatgtgttatcgcatgtcctgtaaacgcttccatcagtccggaaaacgctggaggacacggttccaaaacaaccgaaactattatgatggttgaaaacggatttattaaattattcagtgtggacaaatgtgataaatgtggtacttgccaaatgttctgtccaactgaagctatatggttagaatag

SEQ ID NO: 342 - DNA, 537 bp, Methanobrevibacter ruminantium
  source 1..537: mol_type = genomic DNA
atgcattacgcaaatacttatttagaaagaccagtagttggagatttagaaaacgtagctcaagaaggtactaccaaagtactcaaatgtatgttaaacaccggttctgacatatatcaaggagcttgtaagaaaagaggttccaccttaaaggaagaatataagaacgcttccggtacctgttatatggatcctcgtgacatggtaaaattaggtgttaaaaactgggacaccgtacttgtaaagactgactatggtgaagttgtcttaaacgcagcaaaatcaagagatgctcctcacgaaggtaccatttttgtatgtaaaggtccatgggctaacactatcgtaagccacgaaacctactgctgttcagaccctacctacaaaggtattcacgctactgtagaaaaaaccgacagaaaagttctactcatggcagacttaatgagatgggcatacaaaaaatatgttgacgaagaagatgacgacgttattgaaaacatggaatccttaggtgaaagaccagtttataactga

SEQ ID NO: 343 - DNA, 1392 bp, Methanobrevibacter ruminantium
  source 1..1392: mol_type = genomic DNA
atgacatatgagccacctgtaactgattacgattatattgtagaaaactgtacttgtgcattttgcggttgtaactgtgacgacttagatttcttagttaaaaacggtcacgtggttgccgtaagacacgcatgcagattaggtgcaagtaaggtaatggaagatatggaccaaagattacttgtgccaatggtaagaaacgaagaaggagttcttgaagaggttgactgggacactgcacttgacactgcagctgaatacattgcaaactccatcagacctgtattctacggttggtctgaaacttccaccgaatgtatgaaagaaggtgtggaattaggagaatacatcggagcagttctcgataaccaagcaaccatctgtcacggtccaagtctacaagctatgcaaaacgcaggttaccctatccaaaccttaggggaagttaaaaacagagctgacgttattgcatactctggaagcaacgctatgaactctcacccaagacacttagcaagatatgctgcattccctcgtggatacttcagacaaagaggaagattcgacagaaccgttatcactatggaccctaaattctcagacactgcaaaaatgtctgacaaatggattggtttcgaacaaaacggtgactacggtttctacaacgctttaagagctgtactcaaaggtaaaaagttacaatctgaatccgtttccggtattccagcagaagacatctatgaattagctgctgaaatggaagctgcagaattcggtgttctcttcttcggtttaggtttaacccacaccttaggtaagcaaagaaacattgacatcgcgattaaattggtacaagacttaaacaccaacagtaaatggggactcactccaatgagaggtcactttaacgtaaacggtttcaacatcttcatggcttacgaaaccggttgggcattcggtgtagacttctgtagaggatacggaagatatatgatgggtgaaaccaacacaatcgacttactcgttagaaaagaaccagactgtttcatggttattgcagctgaccctggtgctcacttccctaacggagcaaaccaacacttagctgacattccagttatccaaatcgatattcactggggaccatccaccgagcttgctgatgtagtacttcctggatcattcatttctgtagaatgtggaggtaccagttaccgtatggacggtgttcctatctggatgaaaaaagctatcgacaaacctgaaacctgtcgtgatgacgaatggattgtacgtgaattgaaagaaagagtaatgaaactcagagaagaacctaacgtagcagatgaatacgttcctaatgaaggtctcgcatgtctcttagataagtaa

SEQ ID NO: 344 - DNA, 1719 bp, Methanobrevibacter ruminantium
  source 1..1719: mol_type = genomic DNA
atggaatatatacttaaaaatggtattgtttacgaccctgctaatgaagtaaacggagaaaaaatggatatctgcttcaaggatggtaaaatcgttgaagacgtatccgctgacgcagaagtattagacgtcactgataaaattgtaatgcctgctggtgtagaccctcacgctcacgttgcaggaccaaaattggttgtaggtagattatacagaccagaagatgaaagaagaggagtagctcaaaaaaccaaaacaaccagagcagaggctggtttctctatcccaagttgtcctaccactggatacagatactcaagaatgggatacggtaccgtttgtgaagcagctatgcctcctttagaagcaaaacacacacacgaagaaattaacactattcctaacattgacattaacccattgccactctttggtaacaactggtttgtaatggaatatgctagagaaaacagaattgacgatttggcagcattcattgcagcaatgttaagagtatctaaaggatacggtgtaaaaatcgtaaacccatgtggttcagaagcgtggggatggggtatgaacgtacacggatacgatgataaggctccatactttgacgtaacctccagagaagttgtaagagctttagcaaaagcaaacgaaaaattaggacttccacactctatacacatccaccctaacgatttaggtcaccctggaaacgttcctactaccattgcaactttagactcaatcaaagacattgcaaaatcaactaaaccatctgcttccgtaagagatcaaaccatccactgtactcacttacagttccactcctacacaggaaacagctggaaggatgcagcatctggtgctgaagaatgtgctgacttcattaacaagaacccatatgtaacttgtgacgtaggtcaagtaaccttcgacgaaaccactacaatgactgcagacgctcctatggaatacgacttgtttaagatttctggattaaaatgggctaacaaggacattgaatgtgaaaccgcagcaggtatcattccatgtatctactctcctaagactccagtaagtaccttacaatgggctatcggtcttgaattgttcttgcacattgaaaacccatggcaagtatgtctaaccactgaccaccctaacgcaggtcctttcatcagatatccaaagatcatctcctggttgatgagtgctcctaagaggatggaaatgattgacaatggtgaagtgcacaaatgggcttccaaaagaactggcttagctggtcttgaaagagaatacgacttctatgaaatcgctacaatctccagagcagctcctgcaagaatccacggatttgctgacagaggcgcacttacccctggctacaacgcagatattgcagtatatgacatcaaccctaatgactttgacccatccagagaccctgaaggtgttgaaaaagcattcagcaatgcttactacactatcaaagatggtcaaatcgttgttaaagatggtgacattgtatctacaaaacaaagccacaccatttggaccaacgtcataggatacgaagaagaggaaaaacaaatcatagacagcataatgcctttcttcactcaatactattctgtcaaatgggaaaactatcaagtacacgaccactatgtacctaaccctactgtagtggatgtagaagctaaataa

SEQ ID NO: 345 - DNA, 867 bp, Methanobrevibacter ruminantium
  source 1..867: mol_type = genomic DNA
atgaaaactattacttttgatcaaaagaaaacttcttcaattgctttagaatttgatgagttaatcactgataacatttacgcttggaccgaagaggactttgcagaatacaaagttcctataggaaactccagattcccaatcactgattactttgacatcaccgttgaaggagaagcagaatctcctgctgaagtcaaaatgattttaaacggagattgtaacagagtaaaatacatcggctgtaaaatgagcgctggtgaagtagttgttaacggtgacgctgaccttcacgtaggtgcagaaatgtctggcggaattgttaccgtattcggtaatgtagcagctcacgccggtcgtgaaatgaaaggtggaaaactcgaaattatgggtaataccaaagaattctgtggtgcatcctatatcggtgaatggagaggtatgtccggtggagaaatcatcatccacggaaacgctggaaaacaatgtggtgaatgtttagtcggtggtaagatccacgttttaggtgactgtgatattctcgcaggtattcacatgactaaaggtaccattgaaatcgatggtaatgttaaccgttggcctggcggtcagatgaaaaacggtaacatagtcatccacggtaaagtaggaagattacttgaaggtttcgtagaacaaggaatcgtcacagaccctgaattagatggagtcacttatcctggcagatacatcgaatacaaaggggacattgctttaaacggtaaaggtaccttattaatcgatgctgagaaaaacagagacagattatctacctggattgaagaagacgacgaatataacgcaattagagaatacagagaccaataa

SEQ ID NO: 346 - DNA, 303 bp, Methanobrevibacter ruminantium
  source 1..303: mol_type = genomic DNA
atggtcaaggaaatacttatggacccagatgatattatagaatatgtaagaaatgaagtaaaagttgatgatatttttgaattgtcttataatagggtgtttgctccaggaactgtgcttggaatcactcctgaagatgaggaaaccggtgaaggattgattctttctcttcagcttaatggtgaactcttgaatcaggcagtagacattgatttgcatgcagttaaggatgaaatcattgaagcacgtcatttgcctggtggagatgaggataaattgattgtcattgaagctacattgtag

SEQ ID NO: 347 - DNA, 303 bp, Methanobrevibacter ruminantium
  source 1..303: mol_type = genomic DNA
atggtcgataaggaattaacaatgacttctgatgaagttctagattatattaaaaataattttaaagaatttgataaagtggatattgcatacaatcgtgtttctgcaaaaggagacatattaggtgtggatctttctgattataaaggaaaaccaagttgcagagtgatgatagctttagatggtgaaatcatttccgataccattgaagtggactttgaggagtataaggaagacattattgaattgcatcactggcctaaagacgaatcaaaggaatctgtttatattgaggtaatttag

SEQ ID NO: 348 - DNA, 1038 bp, Methanobrevibacter ruminantium
  source 1..1038: mol_type = genomic DNA
atgagtgaaaaattcttaaaagtaaatatccaaaaggaacttaaagaatttgaattagatattgattttaagttaaataaaggatgtttaggcattctcggcccttcaggatgcggtaaaagcatgaccttaaaatccattgcagggattgtaaatccagacaccggaatcattagcctaaagatggatgaggaaaacatatattttgattcagaaaaaaagatcaatctaaagcctcaaaaaagaaacgtaggctacctgtttcaaaactatgccctatttcccaatatgactgttgaggaaaacatcggaatcggtgtatccaaagagaaaagggaaaaaacagtatctgaaatgataaagagattccatcttgaaggacttgaaaagagatatcccagacaattatccggaggccagcagcaaagggttgcattagctagaatattggcctatggacctgatgttatcctattggacgagccattcagcgccatggacaccttcctaaaggaacaattgcgtatagaacttgttaattcattaaaggactttgacggattttcagttctagtaacccacgaccgtgacgaggcattccagttctgcgatgagcttatcatattggataaaggaaaaatcattgcaaagggggaaactcatgaaatctttgaaaatcctaaaaaactcgatgttgccagacttacaggatgcaagaacacatctagaattgaaattatagatgattatcatctcaaatccctagactggggactgacattggaagtctctgaaaaaatctcaccaaacataacccatattggaataagagcgcatgactttgctccagccaaaaaagatgaagtaaattcatttgacactgaaaattcaagcctattggaaatgcctttcgaatgggagataactttagcaaacggcttatggtggaaacgtgaaaagcaaatccgcgagcatgagtttgtagttccagaccatataaaagtagatcctaaaaatacaatattgctggaagaatag

SEQ ID NO: 349 - DNA, 1695 bp, Methanobrevibacter ruminantium
  source 1..1695: mol_type = genomic DNA
atgtcagagtccgaacatagaatgatagaaatcctaagaatcttaaacacccatgaaaagccaataggctcaaaggtaatagcagacgaacttaagaccaaaggatacaaccttggcgagcgtgcagtccgctatcatatgcaaattcttgatgaaaagggatatacagaaaaacaaggatactctggcagagttatcaccgagcttggaaaaagcaaactggaaaagggcctaatctacgaccaggtagacttcacactgtccaaattcaaggaaagaatctatctcaccgactttgactataagaaaaaggaaggaaatgtaatagtaaacacttcaaacatccttgaaaataaggcattcgacataattaaggaagtatttgcagcaggagtctgcgtaagcccactgataaatgccaaaaagactgaaatcaacggcaaaaagggatatgtgatgaaaaccatctgtggtacaaccatagatggagtcttcttaaagaacggaatcccttcaatcccacaatatggcgggcttgtagatattgaggattactatccaaccaagttttcagagcttatctcctataggaaaacctccatcactccattggatgcattcatagcaaaaggaatgacctctgtccttgaagttgcggagcatggtaccggaacaattcctgcaaacttcagaataattccagaaagtggtctagaaaaagctaaagaaatcttcgaaaagcttgaaaaagcaggaattggaggaatccttgaaatcggagaaatcagcgaaaacattttaggaattccagttccagaaggaatggttggaatatccataattggaggaatcaccccattctgcgcagctcaagagatgaactataaggtggatataaagacaggtgaggaattcataaactacaataagctaaaagagcttgaatcctccaagcataagataaagcatgctaaaaaggtggattacaagaaaacaccattcatacttaccaaatcattaaacagagtgaatcaggtcgattatgacattgaaacaggtcatggaaacatagtgtccaacatttcatacctccagaaggaagatcttgacgatgcaataagcattatgaaaaagacatacaaggcacttccaaaatacatgaattcccatttcagcatagttgaccatccagatgacaaaagcaaagtgggaatagctacagtctgcagccttagcattgatggaatcctaatcaaaaacggaataatgagcacaccacaatacggaggacttttagagcttggaaagccacctttatttgttgaaatgatttcatacaacgggtcatcaatcgatccacataagatattcatctttaaagatttgacccaaatagccaaacgaaaaaaccctaagaaaatccttgcatcaatcaaagaggtcccatacatcgcaaggcctgaaacagaggaaatattggagaagataagcaaagaaggattttccatatttaaagtaggaaaaccaagagaattagtctataatgcaaaggtagataattataactttggaatagttacaggaagcggattgaatttaattgctgcaatcaaggaaaaaggaataaatattgaagcaaaagccgttgaaactgtcttaccaatagaagacatgagcctgatttatgagcaataa

SEQ ID NO: 350 - DNA, 1347 bp, Methanobrevibacter ruminantium
  source 1..1347: mol_type = genomic DNA
atggaaaaaagaattcaaaatattatggaaagaatgaaagcagacaatatcaagtttattagactccaatttgttgatttacatggaattccaaagaatgtgtcaattccttgtgaattggacaatatggaagacttattcactgatggaatcctatttgacggatcatccatccctggttttgttggaatcgaaggaagcgacctcgtcttaaagccagatatcagcacttattcacccctttcatggagacctgaagagtctgcatcctgcagattcatatgtgacatctataatcctaacggagagccatttgaaggggacccaagaggaatccttaaaaaagctttagcaaaaatcaaggaagaaggctacacctacaacataggacctgaacctgaattcttcattgtagacacagacgatgacggatacccaattcctcacgatactgcaggatactttgatgtagagcctgtagataagggaactgacttcagaagagaaatcactaccaatttacaggaattaggctttgaagtagaagcaagccaccacgaagtgggttccttggccaaaacgaaatcgcattcaagttccgatgatgcattaaaaactgcagatgcagtgattacattcaagcaagcaatcaaagcgattgtggcaaatatggctgatttcgatggattcgactacagagtgactttcatgcctaagccattctttggagaaagcggaagtggaatgcactgtcaccaaagtctattcaaggatggtgaaaacatcttctatgatgaaaacagtgaaactggattgtcccaagaagctatgtggtttattggtggattgttaaaacactctgcagcaataaccgcagtgaccaaccctatcgtaaactcatacaaaagattggttccaggatatgaggctccagtttacatcacttatggtattcaaaacaggtcaaccttaataagagtgcctgcagcacgtggaaaagccacccgtattgaatacagaagcccagaccctacctgcaacccttaccttgcatttgcagtaatgcttgaggcaggtatggatggaataaaaaacaaaatcgacccgggagaatctgttgagatcaacatttatgaattgaccgatgaagaaagggaagagaaaggcatagaattgctcccttccagtctatgggaagcataccacacctttgaagaaagtgaaatcatgaaagaagctcttggagaacatatattcaatgcattcttatctgcaaagtatgaagaatgggatgaatacagagtccaagtgttcaattacgaacataagaaatacttaaattactaa

SEQ ID NO: 351 - DNA, 12564 bp, Methanobrevibacter ruminantium
  source 1..12564: mol_type = genomic DNA
atgaatgataaaacaaatgattttttcagtgaatatttatcaggattatgtctggattttgatgaatccactttaattgctccaaataagaatggagaaaaggaaaaatgcataattgaaaagtcagaatatgaaattaaaaaagataatttagttggatttgcaaagtccaattcaatttcaatcaatgagcttatattggcaagtttaactttaacacttaataaattcaatttttcaaatgaaaccttaattttcaatcaaaataatgttccatttgctgctaaatttgaaaacagacaaatttcaattagggaatttttagaaaaaattcatgagaattatattaaaacattggaattcgatgagtattttgataaggatgaccttcctttaaatccggaattttattttacgttcgatgaggatttaaaatcagatgcagaatattccaattatctaagcattgttgaaaatgatgaaactgtttctctctttttatcttataatgatgaattatatacaaaggagttcatcaatctattcatatcaagccttgaaaaaatccttgaagaaatagccacttcggatattgataagacaaatatctgcgacattgctattgtaggtgaaaatgaagatctcatcttcactgaagttgaaatgcctttgattcacaggcgttttgaaaagcaggctgtggagaagggggatgagattgctcttgttgcaagcgatgccacattgacttacaagcaattggatgaaaaggcaaatgtcattgcaaatgcattgatagctaagggagtcaagccgaaaagcaatgtcttagttatgctttcaagggatagcaatctgattgcttccattttaggtatccttaaggcaggctgcgcattcattccaatcgatcctgaataccctcaagagagaataaactacatctatgaaaacagtcaggcagattatattattgccaacgaatctggagaaaagtctttagacattgaagagttgcttaaggatggcaattcagatgatcctgagcttgatgttgacccggatgatttggcctatatgatctacacttcagggtccacaggaaatccgaaaggtgtaatgatcagccacaaaaacatctgcaatcaggcttcaaatccaaaatccacttatgaaagtttgctttgcattacaaccatctcttttgacgtgtctgttgacgacatattgacatccctttcaaatggattgaaattggtacttgctgatgatgttcaaatcaaaaatattccagctctaatcaagttaattgatgaaaacaagcctgaaattttagaaattactccttcaagaatggggtcttatcttgaggtaaaggaattctgcaatgtcatatcctgctttaagtgtattttcattggaggagagaaattttcatcaaaagtttatgaagatttaagaaaatatagtgatgctgtcgtctataacagttacggcccaacagaaacaacaatcacctcaaacaacaaggcggttactgatgtaaacgatttgactgtggggcttcctcatattaattatgtcaccgatgttcgtgacattgacggcaaattggtccctgatggtgtaatgggtgaactgtacattggaggtaccggtgtaggaaaaggatactacaacatgccagaaaaaactgcagaagtgttcctgaccatcaataacattccatattacagaagcggagactatgcaattaagcttccaaatggcgaaatcgacattaagggaagaattgacaaccaaatcaaactcagaggattaagaatagaaatcggcgaaatcgagtctaacgttggcaaatatccaaatatcaaacaggctgtagttgtaattaaagagattaacgataatgaacatctatgcgcttattacactgccgatgaagagattgatagtgatgatttaaaagagtttttaaaagaccgccttactcgttatatggttcctactgtcttcatgcagcttgatgagatgccacaaacaccaaacggcaagacagacttgaaacaactgccagtgccacagcttaaattgtcatttacccttccagagagtgaaactgaaataatcttgcatgaaattgcttcatcaatcagcaaaacaaaggaattcggtactaccgatgatttgtatgctattggatttacttcattgacactgatgaaattaaatgcaaggatttatgaggaaatgggtgttaatttagatattatttcattattgaatgatcctacaattaaaaatattgcaaaggaaatagaaaacaatgatattctggacttgaatggtgtaatagaatcatctaaggatatggtttattatccattgacagaaaatcaaatgggaatctattatgagtgcattcaaagcggcgagcttgcacaatataatctcccatcagtaataagatttggcagtgaaattgatgctgacagattacatgacgctatcatcaagacaattgaggcatatccttatcttaaaaccagaattgttctagaaaaaggtaaagtgatgcttaaacgtgatgattcaatagatattgatgatattccaattattaatgttgatagtatttccgatgagcaaatcgaaaaggaaaatctaaagctatttgatttgcataatgaccagttattcagatttaaaatctataagactcctagcgaaacaattttattctcagatgtccaccatatcatttccgatggtgaatccttagataagctctttacaaatatttccaatgcatatcaaggaattgaaattgaaaaggaaacaatcaacggttacattaacagcataattgaaagtgagaatgagaacagtgaaaaatatgaactgtctagaaagttcttccaggataagttaactcaagaaattgattccactgtactcactccaaatctcaacggcaattttgaagagggaattttaaaatcaatttccaaaaatatcgactccgaattggtcaacaggttttgcagtgaaaacaggataacccctaatgttttattcatggcagtaaccatgctcaacctaaacaagtacacattcaatgacaaaactttgattacaaccattttcaatggaaggtcaaactcatcctacatcaacacacaggcattgctggttaaaacccttccgattgtttcaatcaatgatgataggacattgtcatttaaggaatatttaagttcagtcaatgacatctggatggaaaccatcaatcattctgattatccttatactaagatctctgaagagtttggattgaaaccagagtttttctatgcctacaataatcttgatgctgaagaaattgcaattgatggcaagacttataaagtcaaatatttgaaatcacttgaagtcaattataagatatctttggaagttaatgagacttgggacaatattgaattattccttgagtacaatgaccaattgtatagcgcagattacattgacaccttcttaaattgcatcatcgatgtaataaatcaattaattgaatcggatattgaagaattaagcattggtgaaatagaattgggtaaaggtatagagacacccttatcatttacacctgttgatatgcctattttacataagcgatttgaaaaacaggtaactgataaaggtgatgaaaccgctcttgttgcaagtgatgccacattgacttacaggcaattggatgaaaaggcaaatgtcattgcaaatgctttgattaaaagaggagtcaagccgaaaagcaatgttttagtgatgctttcaagggacagcaatctgattgcttctattttgggaatccttaaggcaggctgtgcattcatcccaatcgatccagaatatcctcaagagagaataaactacatttatgaaaacagccaagcggattatattattgctaacgaatctggagaaaagtctttagacattgaagagctgcttaaggaaggcgattttgaaaatcctgatgttgatgttggccctgatgatttggtctatatgatttacacttcaggatccactggtaatccgaagggtgtaatgattagccatgaaaatatctgcaatcaggtttcaaaccctaaatcctcttatgatagtcttctttgcattacaaccatatcttttgacgtgtctgttgacgacatattgacatctctttcaaatggattgaaactgatacttgctgatgatgttcaaatcaaaaatattcctgctttgattaggttaattgatgagaataagcctgaaattttggatagtactccttcaagacttgcctcctatcttgaggtaaaggaattctgcaatgtcatatcctgcttaaagtgcattttcatcggaggggagaaattttcagcaaaagtctatgaagatttaagaaaatatagtgatgctgtcgtctataacagttacggtccaacagaaacaacaatcacctcaaacaacaaggcggttactgatgtaaacgatttgactgtggggcttcctcatattaattatgtcactgatgttcgtgacattgacggcaaattgcttcctaatggtgtaatgggtgaattatacattggaggtaccggtgttggaaaaggatactataacttgcctgaaaaaacccaagaggtgtttttgactatcgatggcattccatattacagaagcggagactatgcaatccaacttccaaatggcgaaatcgacattaagggaagaattgacaaccaaatcaaactcagaggattaagaatagaaatcggcgaaattgaaaccaatattggccaatatcctgatataaggcaagctgttgttgtaattaaggaaatcaacaacaacgaccatttatgtgcttattacactgccgatgaagagatcgatactgagaatctaaaagagtttttaaaagatcgcctcactcgttatatggttccgactgtgtttatgcagcttgatgagatgcctcaaaccccaaacggcaagacagacttgaaacagctccctgaacctcagcttaagttggctttggtgatgcctgagagtgaaactgaagaaagattatatgatattgtctcatctcttgtggatgctgatgagtttggtattacagatgacttatatgccattggatttacctctttgacattaatgaaattaaattccatagtctatgagcaaatgggggcgaatttagacatttccatattattcaatgagccaacagttaaaaactttgcaatagaaattgacaattcctttgaaaaggattctggccttgaagagcttatagaatcagctaaaggcttggaatattatccgttgactgaaaatcaattagggatttactatgaatgtatgcaaaatccggatgtgattaagtatacgatgcctacaacagtaagatttgacagtgatcttgatgcaaatagacttaaacaggcagtcattgacactattgaagcacatccatatattaaaacaagaattgtaaataatgatggtgaattaaggcagaaaagatgtgatgatgtggcaatcgacgatattgaaattgttaaagtcgatagcattagcgatgaggacattgtccgaaatgatgtgggtccgatttctatagaggacagtcaattgttcaaattcaaaatatatgaaacccctgatgagattgtcttattctcagatttccatcatataatcactgatggagtatcccaaaacaatttatttagagatatagccgatatctatgaaaatagagaaatatccgaagagataatcgatggatatatctacagtcttttggaaaaagaagccgaaaacagtgaaatatatcaatctgcagaggcatttttcgatgataagttaactcaaggaatagaatccactgttctgactccagaccttaatggaaatcctgatgagggtaaaataaaaaatctttcctatgcttttgattcagaattgattaatgagttctgcaatgataattccataagcaaaaatgccttgtttatggcaggcacaattttaaacctgaacaaattcacattctctgataagacattgataacaacaatattcaatggaaggtcaagtccaagctatttcaatactcaaggatttttggtaaaaaccgttccgtttattatcaataatgaaaacaggcaggcatcacttagggatttcattaaatccattgaccaaagctggaaagataccttgacaaacagtgcatatccatatattaagatagctgagaaatatcaattaaaacctgaattcttctatgcttatcatgaattcctagagtctgatgaaatgatgataaatggcaaggagtacattccacaagaattagctggggttgatatggttacagttgaatccaaaatcaatctagctgtttatgataatggtgatgagtttaatcttattttggaatataacgaccagctctacagtgaagattatgttaaaacattcatagaatccctgaagagcattttagttcaattccttgaaaatgatatggacaattatagaatctgtgatgtaaaattaaaggatgatgaggaagtgcatgaatttgttgatgtggaaattccatttatccataagcgttttgaaaagcaagttgatgaggctcccgaaaagattgcattaattgcaagcgatggctcatggacctatggtgaacttaaccaaaaggcaaatcgtgttgccaatgctcttataaacaagggaatcaaagccaacagcaatgtcttggtaatgcttccaagggacagcaatctcatttcagctattttaggtgtcttaaaggcaggctgtgcattcatacctattgatattaactatcctaggggcagaatcgattatatttttgaaaacagtcaggcagattatcttatagcagataggggaattgaaaattcaattgacattaatgaattgctccaagaggagaatgcctcaaatcctcaagtggaaattgatccagatgatttggcttatatgatttacacttcaggttctacaggtaatcctaagggagtaatgaccagccatatgaatattacaaacttattctccaaagatgagggtagtgtaatttataatgcatattcaaaaatgaaaaggactcttgccctttcaacagtatcttttgatgcatttctgcttgatttcatgccattgaccttcggtttggaagtggtgctggctaacgatagtgaaataaagaatattaaggaattggctgaattggttaaaagagaaaaaccggattcacttacattttccgcaccatcaaggtttaagcaatatctggaatatgaggaattcgccaaacaagtacctgacttcaggtatattggtcttggtggagagatggtacctcaagacctaatttcacgacttttagagtatcctaatttagaattgtataatatttacggcccgactgaaacaacagtgacatgcaatacccataagcttagtgatgcggagaatataactgttggaagggccctccacaattgcataactgaagtcagggatattgatggaaaactggttcctaatggagtgatgggagaattatacatcggaggtaaaggagtatctagaggatattacaatatggaagaaaaaaccaaggaagtattcctatctattaatgatattccatattatagaagcggtgactatgcaattgaacttccaaatggtgatttagtaattaaaggaagaatcgacaatcagattaagttaaggggattgaggatagagcttggtgaaatcgaatccaatattgccagattcccacatatgaagcagattgtagttgtgattaaggaaatcaataatgctgaacatttatgcgcttatttcacagctgatgaagagatagacataaagctcttgaaaaggtatctgggaaataagctgactgaatatatggttccaaccgtatttatgcagcttgatgagatgccaatatctccaaatggcaagacagacattaagagacttccaaagccaaaattaaatctggattatgttgaagctgaaggggaaactgaagaaaagttagttgaacttgtttcatccattgccaatacaactaacttcggcacaacagacaatctatatgaattgggcttctcttccttaacattaatgaaattgaactcaatgatcttcaatgaaatgaatgtgaatattgacataacttcattgtttacaaatccgacaatcaagtcccttgcagataagattgacaataatatagaatttgaaatagacattgatgaaatcattgagactgcaaaggatatggattatttcccattgacctcaaatcagatgggaatctactatgagtgcatgcagactgaaaaaatcaaatacaccatgccatatgcaataaggtttgaaagcagcatcgatccttataagcttaaggacgccgttatcaggactgttgatgcacatccatatctcaagacaaggattatcaatactgatgatggaaagatattgcaaaagagatgtgacgacgttgaaatcgaggagatagaaatcgtcgaaatagattctatcagcaataggcagataatggacagggacataaagccaattccattggatgataatcagctattgagatttaagatttataagacacctacagaaacaatattgtttgctgatttccatcatatcattacagatggagtttctcaaggcattttcttcaatgatttggctaaggcatataacaatgaggaaatcgaggctgaaaaaattgatggatatgaatacagcctgattgaagagaaaatttcccttagcgaagtctcagagaatttcttcaagaaacagtttagtcaaggcattgaatcaactgttctaactccaaatatgaatggcaatccagatattggaaacattaagctcatttcagatcaggtaggctccagttttgtcaggcacttctgtaaggactattcaataagtccgaacgttttatttatgggcgctacacttttatgccttaataaatttacattcagcggaaaatcattgattacaacaatcttcaatggtaggtcaaactcaaattatgacaatactcaaggaatgttggttaaaacattgcctatcattgtaaatgctgaaaatcgtgacatgatggttgaagattatataaaattggttgataaggcctggaaagatgcattgacccatagcaattatccctacacaaagcttgcagaggattatcagttaaagccggaattcttctatgcattccatgaatcattaaaaagtaaagttgagcttgatggcaggacttatgaggcgattgaccttgacggtactgtttcaactgattataagataaacttggatatctttgatgatggggaatttattacattgtatttggagtataatgatcaaatctatacagaagagtatgttaatcagttcatacgttcaataaaatatatcttattccagttctttgtacatgatatggataaattgagaataagggatattgaattggttgaaggggaaattccagagtttgaagagattgacactccgattattcataagcgctttgaaaagcaggttgttgaaaagccaggtgatgtggcattggttgcaagtgatgccaccttaacttatggggacttgaatgagaaaagcaataggattgcaaatgcattgattaggcggggcgtaaagcctagaagcaatattctcataatgcttaagagggatagcaatttgattgcttccattttaggtgtcctgaaggcaggatgcgcatatgttcctatcgatcccgaatacccttccgaaagaatcaactacatttatgaaaacagccaggcggattatatcataagctatgagacttcagagaattcattaaatgtttatgagcttcttgaagaggaaattgttgtaaatccaaatgttgaggttcttccggatgatttggcctatatgatctacacttcaggctcaacaggcaatcctaaaggtgtgatgattagtcataagaacatctgcaatcaggctcaaaaccctaaatccacttatgatagtcttctttgcattacaaccatctcttttgacgtatctgttgatgacatattgacatccctttcaaatggattgaaattgatattggctgatgatgttcaaatcaaaactcttccggaacttattaaattgattgatgagaataagcctgaggctttagagatcactccttcaagaataggctcttatcttgaattggaagagttctgtaatgtgatttcttgtttaaaatgtattttccttggaggcgagcagttttcagcaaaagtctatgaagacttgagaaaatatagtgatgctgttgtctataacagttacggtccgaccgaaacaacaatcacctcaaacaacaaggcagttactgatgtaaatgatttgactgtagggcctcctttaaaaaattatgtcaccgatgttcgcgacattgacggcaagttggtccctaatggggtaatgggtgaattgtacattggaggtatgagcgttggaaaaggatactacaatatgcctgaaaagacagaaaaagttttcttaaccatcaatggcattccatattacagaagcggagactatgcaatccaacttccaaatggagagattgacattaagggaagaattgacaatcagatcaaactcagaggattgagaatagaaatcggtgaaatcgaatcaaacattggcaaatatcaggatataaggcaggctgttgttgtgattaaagagattaacaatgttgatcacttatgcgcttattacactgctaattgcgaaattgactctgatgatttaaaggagtttttaaaggaccgccttactaattatatgataccgacagtgtttgtgcagcttgatgagatgcctcaaactccaaacggcaaaacggatatcaaaagacttccgcagccaaaagtggaattgaattatgtggctccgaaaacaaggcttgaacatgagatctgtgcaatattttcatctatattgaatatagaaacagttggtgtagaggataatttctttgaaatcggtggaacatcacttattgcatcaaaattaattattgaacttcttaaacagggatatagtgtaagatatgatgacatattcaggaataaaactcctagagcactggcgaaattattgtctggtgaagacattggcgaagaggacttggatttaactgatgatatcatcaaaaactacaattatggcgaaatcaatgagcttctccaagagaatacatgggaaaacttctttgatggtgaaaatctggaattgggcaatgtcctattgactggagctacaggatttttaggaatccatatcctatatgaattcatcaaaagtgaggaaggaaagatctattgtatgttaaggaaaggcaagtttgattcctgtcaggaacggttgattgatgtgatgaatgattactttgatgaggatttcactgatctcgtcggctcacgcatcattccaatcgaaggggacataactgaaatcgatgattttaaacagcttgaggatgagcctattgatacggtgataaattcggccgcacttgtaaagcattatactgccgatgattatatcttcagggtgaatgtcgatggagtaatcaatggacttaaatttgcccaaactagaaataacataaaatatgtacagatatcaacaatcagcgttctttcatcatactccttaaatgaagaggcatatccgaatcaggaatatgatgaaaggacattatattatgagcaggatctagaaaacaaatatgtatgcagtaagtttttagctgaaagggcggttctgcaagctgcaactaaagggcttccagtaaagataatcagagttggaaatcttatgagccgttattcagatggtgtgttccagaaaaattatgatacaaatgcatttttaaataacattaaaaccattaaaaaattaggagctatgaatcctgcaatggctagtgaaaaggttgacatgagtcaaatagattatgttgcaaagggaatacttgcattgtctaagactccagagaaatccagggtattccattgtatgaataatcattatatttcccatagggatattgttgatgcattgaatacatacggttacggaattgaagaagtggatttcgaagaattcaaacagatttacgaacaaaacatgaatgagaatatacagggtataataactgccgatttttcaattgatgactttgatgaggaagacgatttcgaggagaatgtggaaattgaacagactgttgatattcttcattcgttaggatttgattggcctgaagcagatgaagagtatcttaaacgattgtttgattatttgaataagtttgattattttgaataa

SEQ ID NO: 352 - DNA, 1620 bp, Methanobrevibacter ruminantium
  source 1..1620: mol_type = genomic DNA
atggctttaaacatagcttcagtcgttgatgcaagttttgtatcaacctttatcggacacaatgcacaggcggctttacaggtcttagagcctttggtattgttaattacaatatttgaatggctgtttggactgggaggtcaaattttagctttgaataaaaaggcggaatttgatgaaggtggaagcaatcattatttcacaactgcaatgcttgcaacaatagttctatcagttttgattttattggtatgctttttatttaaagattccttaattaatctattgcatccgactgctggagcactgccttatgtaaacgcatatagtccatatttattcatcagtttcccaattgcaactatcttgggagtattatgtcaatttattcgtgttgacgggcaaccgaattttgcttcaggagtaattattgttgcaaatattatcaatataattttagattatctcttccttggtgtttttcatatgggcattgaaggggcatcacttgcgatgatgataggttatgcagttggattattgtgtactttaaagtatcattttgattcaaaaagaactttccgattcgttttttccgaattgaaatttgggacttggatacgctcaacaattgaaataatcaagataggtcttccaggggcaagcatgggcttctttaatgtattgttgatctatatcatgaatttaattgttggcggagttttaggagagctgggcttggatatattcaatgtatgtgtggttgcattgcttttaataagcattttaatcatgggattcgccgaaacattatcttccattgttcctatttattatgcccaaaatgatttctataatcttcatcatattgtgcgaaattcaattataataacattggtctgttcggtgatattcactgcattcctcttaatatatcctgatggtctattgatgtttttcaaacttcaccaaaccgctaatgatggattagtggaaaatgcgattaggatatactcattggcattcatacctatggcattttcaactatgctcttgttttattatgaagggattgaaagaactgtggaatctggaatcattacagtcatttctgaatttcttggaccattattttttacatacctattatatccattcataggcataaccagcgtttggctatctttccctttaggttttattctatcaatagttgctgtatccatttatgttaaggtggttgaaagaaaagatagcgaatattcaggattgtttttcattagaaggggattgattgaaaaaacaagaaattacactttagaaagcaagaatgatgctgtgaaatctgaaatgtttaatcatttaaagagtttgaatgtggatgattcatctattgaaacattggataagattataggtaccatatttgattcaaacaatgaaaaagtccatgtggagatattattgattgattatggtgataagatagttatcaatatgaaagatgagggaaatagagaagtgatgaaggatattgaaaagtccttttcccaagataaaatcaaagttagtgaagtgttgggatttaataatgtagaatatttgattgatggggcctag

SEQ ID NO: 353 - DNA, 750 bp, Methanobrevibacter ruminantium
  source 1..750: mol_type = genomic DNA
gtgccagaaagatataaaggatttggatactgggatatagcaacccgtcaaatgggcattgtaagtaaaagccaacagacaagatttaaagatgctaaagtagcagtcataggatgtggaggcattggaggagaaacaattttaatgcttgcacgtatgggaataggagaattaatcattgtagataaggatgaatttgacttatccaacttaaacagacaagcgatgagtagcatagacacattaggactttctaaagcagatgtttcaaaagaaaaagtaagattaaccaacccatacacaaaagtaactgcaatcaacgaattcatcaatgaggataatgtggaatacttcaaggactgcgatgtaatattggatgcattggacaatctctatacaagagtgatcctaacaagatttgcaagggaaaacggcattccttatgtccatggagcaatccacggaacaaaaggacaggttacagtatttacaaaggacaccaagtcctatgaagagatgttctcacttccatcccttggaaaggaactgggagaggaaacaaaagaggaaatatcaaaattaacaaagggagttcctcctgtaattggacctaccccaaatatagtggggtgcttggaagcatttgaagcttataagttaattacaggcattggagaagtcacctatgctccaaagatacttaattttgatctattaaacttagaatcttttagtgttttagaattataa

SEQ ID NO: 354 - DNA, 1170 bp, Methanobrevibacter ruminantium
  source 1..1170: mol_type = genomic DNA
atgaaatatagaactttaggaaaaactggagaaaaagtttccattttaggatttggagcaatgagattgcctcattttgaaactaatgatcaaattgatgttaaaacatctgatgaaatcttaagttatggaatagataatggaataaatattattgatactgcttattcatatcatgcaaataacttatctggaaaaggaaagtgtgaagagtacattggaaacttcctaaatgagcattcttatagagacgaagttttattgactgcaaaaatgccaagctggctgatagagacaaaagaagacatggaaaaaatctttgaaagccaaatgaaagatcttcaaacagattgcattgacttatacatgcttcatagccttaatgaagactattggaaaatgtatagggaaattggtgcatttgaatttatggacagtcttttagaaagtggaaaagtaaagcacattggtttttctgcccatactgaaatggattggatagtagacattgtagatgactatgacaagtttgagtttggccttacccaattgaactatctggacgagagatatcagtccggaagggaaggggtggaatacattcacaagatgggccttggaactatgattatggaacctcttagaggaggacgactaatccagaacattcctcaagacattatggacctttgggacactgcagaggaaaagagaactcctcttgaatgggcatttcaatatctctggaatatggaagaagtcgatacagtactcagcggaatgaattcaatccaacaggtcaaggaaaacattgagatagcaaataagtccgaaataaactcaatcagcaaaaatgacttgaacctaatcaaggaagttgcatgggaatataagcaaagaaagggaaatgactgtacaggatgccaatactgcatgccatgccctcacggagtggatgttgcaggatgcttcagggagtacaatattgcaaaaatgctgaataaccctgcaggaagcgccatgcactatttctcattggaaagcgacacaagggcagacaaatgcatacactgcgatgactgcctatatcattgcccacaaatgattcacatctctgaagacttaaagaaggtagatgagttctttgggcgaaaatacgactatttctag

SEQ ID NO: 355 - DNA, 1497 bp, Methanobrevibacter ruminantium; identical to SEQ ID NO: 119
  source 1..1497: mol_type = genomic DNA

SEQ ID NO: 356 - DNA, 246 bp, Methanobrevibacter ruminantium
  source 1..246: mol_type = genomic DNA
atgaaaagaacaattaatgaaagatgggaattatggtataatcgaatcttgccatatattataatttttgattttatattgattacagtttcactcatactaaatgtttcagaacctacaatggctcacattgaacattttgaccttttagtctgcataatccttttgggagaattcttttattttttatacaaggcaccgtcaaagaaaaagttcctgcttgacagggatatcttctgcttttga

SEQ ID NO: 357 - DNA, 270 bp, Methanobrevibacter ruminantium
  source 1..270: mol_type = genomic DNA
atgcccgttaattttccaggaaccattttaggataccttagaatgttaaggttaataagggtgataagctttgcccgaatggggtcctttgaagatttcttcaaaaagacagagtttcacaaaatcataattgcaatagcaatcattataatgacattcacagctctgttttacgtgtttggaaccagctacaatccttttgattatttctattttgttatagtggcactgacaactgttggatttattgacaaaccccttaaaaaataa

SEQ ID NO: 358 - DNA, 333 bp, Methanobrevibacter ruminantium
  source 1..333: mol_type = genomic DNA
atgaataatattgcttatcttttacttgcaattctatttgaaaccagtgccacatcactgttaaaagttgctgaaggtttcactaaaccattgccaacaatagcatcaatcatattatacatattatcattttacagtctcagcaactgcctaaaaacagcaccaataggagttgcatatgccatttggtcagcattgggaatcgtgcttgtgacaattgtagggattatcgctttcaaacagacccctgattgggctgctatccttggacttttacttatcattataggtgtaggggtgctaaatctattctcaaaaatgagcttacattaa

SEQ ID NO: 359 - DNA, 387 bp, Methanobrevibacter ruminantium
  source 1..387: mol_type = genomic DNA
atgacaattaaaagaaaatttgataaactgcccccatactgtcaatttgaaaaaaatctgaatcttattaaaaacaaatggacagtatacattttaagggacatgattcttggaaaaaaatatttcagcgatttcaaagaggacaagcctgaactgtccaataaaatcctaacacaaagacttaaggaactggaagaaaacaacatcatcgaaaaaaacatcaaagataatgaaacatcatatcacctgactgaaaaaggccacaggcttcaaaacatattatacgaactcgccattttcaatcttgaagaggaatatcatggagaggaactggaaaaaattaaaaaagaatttgaacagttaaaatatgggggaaaccaaaaatga

SEQ ID NO: 360 - DNA, 801 bp, Methanobrevibacter ruminantium
  source 1..801: mol_type = genomic DNA
atgaaagaaaaaatatttatcaatggaagaggaggatgtggaaagagcacattcatatcattaattgcaaaggaattgtcaaaaaacaataaagtattaataattgatatggatgagggaaacctcggattgaacaagatgcttaatgttgatgttgcagacacttcattaatggaatattatggtggaagagataagataatgggtgaaattttaaaagtaggaattaaaggtatggttttagaaaaaatcaacctgaaagatgacgcagcctcagattcaatagatattttggataatatgaaattatcagatttaccttccgattatgtgacatggaacggaaatataggattcattgaatccggaaaaatcaacgaccctgatgaaggctgtgcctgtccgatgggaaatcttacaagagacttcctaaatcacattgaattacaagacaatgaagtaatattggtcgacacctcagcgggaatagaacacattggaagaggagtaattgagtctgcagacaaactcatttcaatagttgacccgtcaagcgatgcaatattgttggcaaataaaataggatcattatcaaaagaggcatccaaagaatatatggtaatattgaataaaattgatgaaaatactaaagatttggtattggaacaattggatgatgacatatctgtcgttggggaacttgaatataattcacacatagctcaaagcaacctttcccaaaaagaaattaaccttgaggaagtagaaggtgaaattaaggaaatctgtgcaaaaatttaa

SEQ ID NO: 361 - DNA, 828 bp, Methanobrevibacter ruminantium
  source 1..828: mol_type = genomic DNA
atggatttgcttttttatgttgttttgctgttgattggaggttgctttgcaggtttcatggcaggccttttggggattggcggtggaattgtaatcactccaatccaatattatcttttaacctcaattggatgtgatcctaaaacgtccctaacggttacctttgcaacaggtcttgcagttatctgtgtcacgatgataaacagtacacgaaagcacaaacaaaacaatctaatagtaaaacagcacctaaaaccaatgatggtctttggttttgtaggtgccattctgggtgcagtcatatctcaatacatagatgttgaggttttaaagattttgtttggtgtaatatgtatagtatcaacagtatttttagttttaataaaatctcctacctctttagataatattaaaactgatgcaggattattttactctattgcatttgcatgtggtcttgcaagcggattgataggtcccgcaggaggagcatttatcataccgattttcgtggcatatttgagatatccaataacaaatactatcggaacaacttcagcattaagcatcgcaaccacacttgcaggggtaatctgttatattgttttaggttggggtgttcaaggattgccggatttttcattaggttatgtcaacttgcttcaattcgtatttttaacaataactagcattattgtatccggatatgctgctaacctatctaaaaaaatcaatcctacaaaattaaaagcgctgcaggtaatcgtaatatcatatattggccttcaaatgatgggtgtattcgacataatattaagcataatataa

SEQ ID NO: 362 - DNA, 219 bp, Methanobrevibacter ruminantium
  source 1..219: mol_type = genomic DNA
atgtataaggtatggaaaaattgtattggttgtggggaatgtgcaaaggcatgtgattttaatctgattcaaacatttgatgattatattctgatggatattgaaaagtgcaggcattgctcaaaatgtgtagaaacttgtcaaaacaatgtttttacaaaatcagttatttttaaacactttttatatctattatattataagattaaaaaatcttag

SEQ ID NO: 363 - DNA, 408 bp, Methanobrevibacter ruminantium
  source 1..408: mol_type = genomic DNA
atgaaaattgcaataagatattattcaaaaactggaaatactgaaaaacttgcagaagcaataggtgaagctatcggtgttgctccaaaaacaatagatgaacctttaaacgaagatgttgacatattgttcttgggaaatagtgtatataatgctggagcagattcaaaagtcaaggaattcctcaaaaatattgatgtgaatgttggaagtattgttaatgtctcatccgcagctcttatcgaatcaacctataagcaaataaaaaaagaagctgaaaaatgtggattaaacatggatgatagagaattccattgcagaggacaatttaaattcgttcatagaggtcatccaaacgaagaagatataaacgaagccgtaaactttgctaaaagtattgtcagatag

SEQ ID NO: 364 - DNA, 546 bp, Methanobrevibacter ruminantium
  source 1..546: mol_type = genomic DNA
atggcaaaatatatcgttataaatggaagtacaagaaaaggaaactcatatgcaattgcaaatttcatcaaagaaaaaattgatggagacgttgaaatattcaatataaaagataaagaaatcggattttgtcaagctgataatgcttgtaaggcaaaagacgaatgcatagttcaagatgatgcatatgatttaatcaatgatctggaagaatgtgacggtgcatttattatcacccctattttctttggaaggcttcctggaatggtcgatgctttaattgacagattctattccaaattcaatcctgcaaaagagatgaaagcaccagacgaatcaaaaaaaataggtatagtattcagctatggtggaggagaagcagattacacacctgtagctgaacatgtcgcatttgaatttggagtattaagatttggtgctcacaaaaatgttatgtgtagtgaaaacaatgatcctaaaggatttgaaagtaaagacgaccaacaaagccaaattaatgagttaattagttgggtttgtgagtag

SEQ ID NO: 365 - DNA, 702 bp, Methanobrevibacter ruminantium
  source 1..702: mol_type = genomic DNA
atgagtgaaagtgatgaaataatcaaaagactggacagaatagaaaatgaattgattacaataaaagaaaataattacaatcaaaaccttcaaactgccattgaaagcattagggacacctactctaattcaatcaagaaaaattttgcagacaatctgggggagaagtgtagtgaattttatctcccaaattgcaaaaatgaagagtgcaaacaatttatagtccaagagttcaaagaactttttttaaatactcaagaaacagacctcaacaaacttaatgaacagctggatgaaaaattttattctgtatgtggcgtagaatgtagtccatgctacaataactttaaggaatacttctttgaagagttgaagatgatcaattccattaatgtgtcatatgaacttaatgaaaatgaaccgattgaaaagttggatgtggatatgttaatttccgatgtatttgaaccgttatcgagcaagcaaagggttatcataatagaatcgttatatgtagaaaacaaatcatatactcaactttcacatttaactaaattaaggggaggaaacctactgttccaccttgaaaaactacaggatgcaggtttaatctcacaaaaacaagaccgtggcgaatacctgctcacaaaaaaaggttatacaactttgtccttaataaatcaatttcaaaaattaatgtaa

SEQ ID NO: 366 - DNA, 1896 bp, Methanobrevibacter ruminantium
  source 1..1896: mol_type = genomic DNA
atggaaataattgatttgttcggtgcggctttgactggagtcaaagaacagaacgttgatttgcttttcaaatcaggattatatatgttaatgtataccgtcatttcaatgattgccgtttatgtcatctcttttctcacaacaagagtggcttcaaaatcagcatatactgtccgtgagaaaatattccatattctgatgaacttgcctcgtgaggaaattgataaatttaaaatttcagggctagttacaaggtcaaccagaggtatgtcctccgaacagggatttatagtgatgatactcgaacagttaatgcttattccagttacattcgtagcaattgtatatgaaatagcattgattgatggaacttatgcattatttttcttaggatttattggtgttctttctgcaatcataatttttagaatgaaacagattgtggaaatatttttcagagctaaaaagacatatggtaaactaaatttattattcttatccaaaatcaatgatatagctggcaggattccatttaacaaacaggagtatgaagtcgaatttgaaaaggcatgtgagaactcctatgataaaaatgtcatctatattaaaagtcaatgttacctcggaccaatattaatgtggggtttatatgttattgtcctggttacattggcaatggttaattcaggatacaccattggatttgaaactgatagtgtaattgattcattcattattctggtatatgttgcctacttcatcactactctagctaatattcctgcattaattgacagatggccacgtgcatatgccacttctgtgcgtttggaggaagtcttgaatattgaagataaaatcataaaatccaatacaaatgataatctgaaggaaatagagattgttgaggaggatattgctcaagaggctaagggcatatgggatgaaagaaagggtatctctgaaaaattcactgcattgttaaaagaggataaggccaaagtaagaatatcaatgattttacttacgatatccacattgtgcatggtttatgccccaaaagttgccggaaaaacagttgatttattggcttccaattggaattcaactaatgaccctgctatctacattagtcttgccctgttgctggtattgtattcagtaggatatctgtttaaattacctccaaagagaatcatgggggccacaggtgaaaaagtagcatatgatttaagagtgaaattatttgataagcttgatgctgttggttccgatttcattcaggaaaattcaaagggtcttgttctatccagactaaacaacgatgtgatgaacatcagggagtttgtttcatctaaatttactgaaatttatgcgcagattctatttatagtctttgtaatagtgttgattgtgatgacagacttcaggttgagcttaatataccttgtgatattgccggtttatgccgtttgcttttatgtatgtgatgtcaaatctaaaaactattacgatggtcatcaaatgcagttggggagattgatgagctattttgaaagaggcctgtcaaatcgtgattcattccatgaaaaagggtttaaaaaaatgaatcaaactgtaattgactattatgtcaaatccaaaaacgttactaattttatggtgcctgttacaacccttttaacaaatataagtaagataactgtttatattgcggggatttactttttagcaggtaatgagattcagatagggactctattggcagttattatgtatgggcaattattaacagatcctattaaaaagctaagttcctcgatggccactattgaaacttcattttcaagcatcaaaaggatatttgcaatcattgactataaaaacgataaataa

SEQ ID NO: 367 - DNA, 1044 bp, Methanobrevibacter ruminantium
  source 1..1044: mol_type = genomic DNA
atgcccgaattcaaacttattgaaaagttactatacaaaagcgaacagaacgatatagaagctgagtttataattggaaacgaaacattatggtcaagtcaaaaagtcatagcagaaatatttggaacaacatcagccaatatttcaatgcatttctcaaatataatccaagaaggagagctagatgaaaaagaagtaagcatatcttctaaagacctttttaaagacaatcccaattttattaagaaatccttaaaaaaatcaaataatcgaggtaggccccaaaaatggtataatcttgacgcaatcatatcaataggatacagaataaacagtaaagaagcaacacagttccgccgttgggccaataaaatattaaaggaatatatgataaaaggatttgtcatcgataaagaacttctgaaaaaaggtggaagatttacagaagactatttcgatgaattattagaaaccatacgagaaataagggcttcagagagaagattcaatcaaaaaatcacagacatttatgcaacaagctttgattataacaaagatgcagacataacaaaagaattctttgccacagtacaaaacaaactgatatttgcaataagcaaccatactgcagcagaactcatagaaacacgaagcgatattgaaaatcctcatatgggcttgacaacctggaaaaaagcaccaaatggaaaaatactacaaagtgacgtggtcatatccaaaaattatttgaatcaaaatgaattatcaagattaaatagtttagtagaaggttttttgaatttagccgaatcacgcgcagaggatagaatcccaatgggtatgaaagattggaaagaactgctggatgactaccttaaacttcgaaggctgccaattcttgttggcaaaggtaagatatctgctgaagaagcacgagaacatgtgcttgaaaaatatgaaaaattcagagtagtgcaagatgaaaacttcatttctgactttgatcaaatgattttagatattaaacgtctagaaggaaaataa

SEQ ID NO: 368 - DNA, 135 bp, Methanobrevibacter ruminantium
  source 1..135: mol_type = genomic DNA
atgaagttggtcaaaaggaaccagaagttgcatgatccagattcaccgttgctgattggggatgttaaagatggggatgttgtaaatgaagttaatgaacctagctatattgatttacaaactaagttgttttga

SEQ ID NO: 369 - DNA, 333 bp, Methanobrevibacter ruminantium; identical to SEQ ID NO: 358
  source 1..333: mol_type = genomic DNA

SEQ ID NO: 370 - DNA, 387 bp, Methanobrevibacter ruminantium; identical to SEQ ID NO: 359
  source 1..387: mol_type = genomic DNA

SEQ ID NO: 371 - DNA, 801 bp, Methanobrevibacter ruminantium
  source 1..801: mol_type = genomic DNA
atgaaagaaaaaatatttatcaatggaagaggaggatgtggaaagagcacattcatatcattaattgcaaaggaattgtcaaaaaacaataaagtattaataattgatatggatgagggaaacctcggattgaacaagatgcttaatgttgatgttgcagacacttcattaatggaatattatggtggaagagataagataatgggtgaaattttaaaagtaggaattaaaggtatggttttagaaaaaatcaacctgaaagatggcgcagcctcagattcaatagatattttggataatatgaaattatcagatttaccttccgattatgtgacatggaacggaaatataggattcattgaatccggaaaaatcaacgaccctgatgaaggctgtgcctgtccgatgggaaatcttacaagagacttcctaaatcacattgaattacaagacaatgaagtaatattggtcgacacctcagcgggaatagaacacattggaagaggagtaattgagtctgcagacaaactcatttcaatagttgacccgtcaagcgatgcaatattgttggcaaataaaataggatcattatcaaaagaggcatccaaagaatatatggtaatattgaataaaattgatgaaaatactaaagatttggtattggaacaattggatgatgacatatctgtcgttggggaacttgaatataattcacacatagctcaaagcaacctttcccaaaaagaaattaaccttgaggaagtagaaggtgaaattaaggaaatctgtgcaaaaatttaa

SEQ ID NO: 372 - DNA, 828 bp, Methanobrevibacter ruminantium; identical to SEQ ID NO: 361
  source 1..828: mol_type = genomic DNA

SEQ ID NO: 373 - DNA, 219 bp, Methanobrevibacter ruminantium; identical to SEQ ID NO: 362
  source 1..219: mol_type = genomic DNA

SEQ ID NO: 374 - DNA, 117 bp, Methanobrevibacter ruminantium
  source 1..117: mol_type = genomic DNA
atgaagctggttaaaaagaaccaaaagttgcataatcctaattcgccattgctgattggtgaggtaaaagagagtgatgatgtaaaggaagttaatgaacctagctatatttattga

SEQ ID NO: 375 - DNA, 804 bp, Methanobrevibacter ruminantium
  source 1..804: mol_type = genomic DNA
atggagatttttaaagttgtctgtgaattaataattccaattttaatatttggtgtgttatttgcagttggaaaatttattcatgtaagattattgaatagtaaaagcagaattttaaatccaggagaatatttccctgatgaggaacttgaaacattaaagcaagtttattatttggtaatgatgttaatattctttgcttttatattatacatcatgatagttcaagctaatgaggtattcgcgattgctgttttacaaattcttgtgtcagtctatgtcgctttaactttggattatagttatttgaaaaataagatattgttcttcctcttggttccttttgaagctataatattccttgttttcaatgattttctaatgatttggccaatttatttgatgcatattcttgtttatgcatatttcatcaaggtatacttcgataaatttaggaaatatactgaaacaaatgggcttggaataacaatcatactattattcgctatagtttttataagcttcattatcacactatttgtggaaggtgttgaacctttaaattctgctgtaatggtttcaaatgcatttacaagtaatggttatgcaatacttggtaactcaggcattggtaaattgaccagtttggttttagtttggagcggatacatcatatctggtgtaggtactgcaacattaaccgctgcaattatgatgagacataatcaaaaacgtgaaaaagagttaaacaaacgtttagatgagttggaatcattaattaaaaatagtaataataaagaataa

SEQ ID NO: 376 - DNA, 1965 bp, Methanobrevibacter ruminantium
  source 1..1965: mol_type = genomic DNA
atggaaattattaagggaaaagaaattccgaaaaaaagtttaaaaagaagtttaatcgtatttattggaaatatgataggaatatatcttataagtattttaggtttaggagtcgaaattagccaaactggtgacatattccttttagtattattcctaggtatagtaaatgcaatactctggcctattttaacaagaatagctatgccatttttagtattgaccttcggaataggttcattaatattaaacggactccttcttcaattactcgcaccatcatttggaatagaaatcaaaggtgctgcaatgattcttgcacctttaggaatggcggccgttacaacagtgctatctagcttaataacaattaatgatgacagttcctattacagatccgttttaaatgatgccaaaaagaatgcaaaaaatgaagtcaaggattatccaggcgttataatcgttgaaattgacggacttgcatataatgttttatgtgaagcagttgaaaaaggagacatgccaactcttaaaaaaatgattgaaagcgaagactacaatcttagaatgtgggaaactgacttgtcttcccaaaccggtgcaagccaggcaggaatccttcatggaaataatgaaggcatcgttgcattcagatggatagaaaagagcaatggcaatcagatgatgcaatgctctggaatcagcaatgtgccggaattggaaaagagaatttcagatggtaatggattgcttgtagaaaatggagcaagcagatctaatttattctctggagatactgacaatgtaatatttacattcagtaagataatggactttggaaaactctataataaggcatggtactcagtattttccaatccaagcaattttgcacgtattgtctcattgttccttgcagatattgtacgtgaaatctggtcacaaatcacacattccatcaaaaacataaggccaagaatcaaccgtggaatagcttatattccaacaagagctgctacaaacgtctttatgagagaaatcaacacttcaaccttaatcggagacatgatggttggagatgttgatgttgcatactcaacatatttaggctatgacgaaatagctcaccactctggagtcagagacagtgacgcatggatagcattaaggcaaatggaccagcaaatcaaacacttgaccgatgcaaacaaatattctccaagagattatcaattcgtaattcaatctgaccatggccaaacaaacggagccacatttacccaaagatatggtcaaacctttgaggactttgtaaaatcattgcttccagaagacatgaccatgtttgcaaaaatgacttcaaatgatgaccattttgtaggggattacactccatttgcaagaaaagataaaaaaatagagaaagagaaagaagaagctaaggaattaagtgactctgaagtaattgtactggcttcaggtaaccttgcaatgatctatttaacccaatggactaatagattaagctatgaggaacttaacagctatttccctgaactgatacctggccttataaataatgaatatgttggttttattttagttaaatcccaagaacatggcgatttagccattggaaagaatggaacatactacttagacagggatgaaatcgatggtgaaaaccctcttcttggatttggagacaatatcgttaaacatctaaaaagaaccagttcatttgaacatacaccagatatcttggttaacagtttctatgatgaggaagctgatgaggtatgtgcatttgaagaattggttggaagccatggaggagcaggcggagatcaatccaaaccgttcatattgtacccttcaagctggaatgtcagcgatgatgaaatcatcggtgcagaaaacatctataaactattaaaagagaatttagctgaattaaaaaaataa

SEQ ID NO: 377 - DNA, 828 bp, Methanobrevibacter ruminantium
  source 1..828: mol_type = genomic DNA
atggaaataatggaaataattaaagattcttttctatttccatctaaaaacttaggaaccttctcaatttatgttgtattgtcagtattagttgcaacatttacttttggaggaatattctcctatttattagggtttattggctctgagtacattttaataggcggattaactcttgtatttgcaatgttaattggatgggtaatgtctggttatgaaatcagcattattaaatctggtattgaccttgatgatgaagttcctgagtttaaatggtgggataattttattacaggttttttaaactttattgttgcaatcgtttactttataattcctgcttttattgtgggagttgtaggatatcttataaatattaatgacaaacttatggcagttgctcaagagatttcttcactctatccaaatattttcttgacaagttctccggatattgcatttgaggcattgtctcaagcaataattgaattaatagttcctttagctattctcattattgttgctctaattgtatttgtaatctttttattcctccaatccatggctgaagcaagattggcaaatacgggtagtttaagtgaagctttaaacatttttgaagcagctaaagatataaaacgaattggtgtacgtaaagtaattatagtaatcttattagtttttgtaattattggtgttattgggatggttacatctgttatatttaactatgtgccaacattatcaattctttcaattataataagcccatacttagtattctttgctcaaagggctactggattattatattctgatatagcttaa

SEQ ID NO: 378 - DNA, 462 bp, Methanobrevibacter ruminantium
  source 1..462: mol_type = genomic DNA
atggaacctaataaagtatctggaatattatccataattttaggattaattttcataattttccctttggttagttccggattagtatccatcatgattggagttagcttactattcttaggtatagcatcaattctaaccgaattttcagcactcaatataattattggaattcttgcaatcatattcggtttgctattcatattcaacattgatgcattgtccttccttttaggattccaattctacattattggtatcttaatgatcttaataggtgtagcaggtatctttgcaggagaaggcgtatcaaagattgcttcaatattgattataatcttaggtgttattgcattaggccttggaggcttttcacttacccaaccgattttcgctgcagtacttataggcgtagctttaatcacccaaggtgtaaggttatatgtagcaccaaaaaattaa

SEQ ID NO: 379 - DNA, 1521 bp, Methanobrevibacter ruminantium
  source 1..1521: mol_type = genomic DNA
atgaatgaaaccattaaggaaaattcttgggttccactaatagtcgtggctcttgcttcctttattgtagctttagacgctacattcatgaatgtgagtatttcacaggttgttgttgacttgaatactgacgtcagtacaattcaatcaatcatgtcattttatactctcatcactgcagcatttatgctcttaagtgcaaagcttcaagacatagtggataaaaagaaactgtttttaataggtactgctctttatggtgtaggtacattcaccgcatcaataagttcaagtgctggaatgttatttgttggatgggcagcaattgaaggtgttgctggtgcattaatgatgcctgcaaccgtttccatcataagtggaacatattctggtgaaaaacgtacagttgctttggcgattgtaggtgttatgggtgcagttgcagccgctgtaggcccactcttcggtggggtcatgacaacatttttaagttggagatatggatttgcagttgaattgataatcgttttcgttattttaatattcagaaatagcatacctcatttcgaacctactgaatctagaagcgatttagacatttcaggcgctataatttcatttatcggccttgttttattagtactaggtatcttgtcactatctaaagatttcacaacaagcataggcataattgtagtaggattaattgcattagttgcctttgcatactttgaaatcagaagaaaaagaaatggcaaagtaccattacttgatatggaactatttaaagacagaaatttacgtgtaggaactataattttgttattatcttaccttgcaatgggtgggggattatttgcagtttccctattcttgcaaagcgtattgcagttaaatgcattcaatactggtgtgactactcttccattaactttaggtttgcttatttttgcagtattggctccaagtttaacagaaaaattaagtcacaagaaaattatggcaataggatgcataatggcaattattggatgtttaatgttaagttatcaatttagacttgatacaacactttggacattattaccaggattattagtattaggtgctggacttggtttcattatggctttatgtactgatatttcattaagcaatattcctgcagaaagtcaaaataacgcatcaggtgttaattcaaccggtacctcattaggtgaatcaatgggtacagcagttattggaataattttaattctcggagttatgggcggtatcagcactgctgtcgatacctatgcaccagatcattcaggagacgaacaattccaacttgaagttgcaaattacttccaaaaagttgctactatagatgatcttaaacaggacagtacccttgtagatgttgcaaacatcattattcaaaataccatggcattcgtaatgcaggtaacagctctcattatgggagtggttttccttctaacgttacggctaaaggataacaaaattaaacaatga

SEQ ID NO: 380 - DNA, 1251 bp, Methanobrevibacter ruminantium
  source 1..1251: mol_type = genomic DNA
atgagcaatgttaaagacatgtctcttgcggatgaaggtattcgtaagatcaaatgggttcaaaagcatatgcctgttcttgaacatattaaaaaacaatttgaagaagaaaagccttttgaaggaatcactattggttcatgtttacatttagaacctaaaactgttaatttaggtttgaccttacaagctggtggcgctgaagttgcaatgactggctgcaatccattatccactcacgatgatgctgcagcaggtgcagcagctctcggattacacatatacggctggagagaacaaactgatgaagaatactacgaagctatcgacaatgtactttcccacaagccagatgtaatcatcgacgacggtgcagacatgatcatgtaccttcacgaaaaacgcccagagctattggaaaacatcaaaggggcttgtgaagagacaacaaccggtgtacacagattggaagcaatgcatgcagacggagcacttaagttcccagtcatcgcagtaaacgacgcatacaccaaatatttatttgacaaccgttacggaaccggacaatcctcccttgacgcaatcatgggaaccaccaacatgcttatcgcaggtaaaaacgtagtcgtctgcggatacggctggtgcggtcgtggagtagcatcaagagcagcaggactcggagcaaacgtaattgtaacagaagtagacccaatcagagcacttgaagcaagaatggatggttacagagtaatgaaaattagagaagcagtgaaaatcgcagaccttgtagtaaccgtaacaggaaacatagacatcatccatggagatgacttcaaatacatgaaagacggatgcatgctctcaaactcaggccacttcaatgtggaaatcaacagaggcgaccttgaagcacaatcagtaagctgcgaagaggttagagaaagcattgaaatgtttaccatgaaagacggcagaaaaatttatcttttagcagacggaagacttgtaaaccttgcagcagcaagaggacaaggacaccctgctgaaatcatggacatgagttttgctgtgcaagcattatctgccaaatacattgtagaaaatgacttgtcattaggtgttgaaaaggcaccggacagcattgatgatgaagttgccagattaaagcttaaagctatgggaattgaaattgacgacctttccgaacgtcagaaagattatcttgcggactggagagaaggtacttaa

SEQ ID NO: 381 - DNA, 666 bp, Methanobrevibacter ruminantium
  source 1..666: mol_type = genomic DNA
atgtcttattttcgctatattgataatggagaaggccctacaaagctatttatcggaggagttcatggggatgaaggcaagcatgtccttcctttaatcaagcttctaaaaagagaggatttttcctctggacagatttacatttataattttgacaggactccatatatctctacaatacatagggaattttatcaatcagaacaaggcaagaagatattggatttggtagattattacaagcctgatttttatacagaacttcattcatataatattaagcattttgatagattgactagtcttgataggcttgacagcgaagggattcctcctttaatcgattgtggtcaatatgtattgtgcagttctgtttctcctttgattagacgtaagcatttcactaaagaagcaatatgtcaaactttagagtttcctatattcagaggagaagacttaaagcttagtgatgatgaattgcttgaaaaatacgattttgattatgacttgtctgtaaaggagtatatggcctttttaagactgattacccttagcaagaatagggatgactttgaaaaaagagttttaaaggattataagaaacaggctgatcttgctttaaaatacgttaaaataatttatggattgaattttccacgttattag

SEQ ID NO: 382 - DNA, 987 bp, Methanobrevibacter ruminantium
  source 1..987: mol_type = genomic DNA
atgggagttaagtttaaggatatagttactgccgaagagataaacctaaaggatttagaaggcagaactgtagcaatagatgcatataacacactttatcaattcctatctggaattcgccaaagggacggcagtcccttaatggatgcaaatggaaatgtaacatcccatttaagcggaattctatatagaacagcttcaatagtggataaaggaataaaaccagtctatgtatttgatggagatgtctcagaatataagacaaaaaccgttgaaaaaagaagggccttaagggaagaggcaaaccagaagtatgaagaggcaaaggcagcaggaaacattgaagaggccagaaaatatgcaataagaagctccagattatcaccttacattatagaatcctctaaaaaacttcttgaatatatgggaatcccctatgtacaggcaaaaggagagggtgaagctcaaggagcatatatggttaaaaatggagatgcttgggccgttgcttcccaagattatgactgcttactctttggagcacctcgtatcataagaaaccttacattaagcggaggactatcaaacctcgaatatcttgaacttgataaggtcctaacagagatagaccttagcagagaacaattagtggatgttgcattgatggtaggaaccgacttcaatgaaggaatctatggaatcggtgcaaaaactgggcttaaattaatcagacagaatagtcttgaagacatattggttcaaaagggaattactgatgttgaagttgaaccagatgagcttagagaaatattcttaagccatgatgtcaatacagactataagattaagtttaaaagcgcggataaggaaaaactctgtgaattcatgtgcgaagaacatggattctctgagactagagtcctaaatgttgcagacaagctaaaaaaattaagttcaacccaaaaaagcttagaagattggttttaa

SEQ ID NO: 383 - DNA, 564 bp, Methanobrevibacter ruminantium
  source 1..564: mol_type = genomic DNA
atggcaactacagataatgacatcaatgtaagattgattgaaaagattaatcaagttgaagaaaagtacaatcaaaacttttcaaacactcaaaaaatccttatgaccacagatggctcaattacagccattttagatgtgctttatggaaaaattgctttaaagaccctagagcaacatttcgaagaggcaacagccgaaagcgcaaagcttgtcaatgtggatgttggcgatgaggtcaactttagagaaatcataatgcacaaggacgaacagcctttgatttatgctaaatcctatattcctttaaaaagattgagtaaagaaatcaaagaggacttggttagggcagacatccctataggaagaatattgaagaaataccatattgaatccagaagagagataaacattatcgatatggaaaaggcaaacgacaaattgattgaaatctataatacagatgaggatttccttgcaagggattatacaataatcaaagatggtgaaattctaatgtggattaaggaatacttccctattagttattttactgaaatctga

SEQ ID NO: 384 - DNA, 1254 bp, Methanobrevibacter ruminantium
  source 1..1254: mol_type = genomic DNA
ttgaatattacagaaaaaatattatctcaaaaagcaggccacgaagtcgaaccgggagaaataattgaaattggcgtcgatttagccatgtcccacgatggaacttcacctcctgcaataaaaacctttgaaaaaatcacagataaggtatgggacaatgaaaagatagtcattgtctttgaccacaacattccagcaaatacaataggatctgcagagtttcaaaaggtagcaagaaactttatcaagacccaaggcataaaaagccattacattcatggagaaggtatatgccatcaggttcttcctgaaaagggacatgttgagcctggaatggtcatcgtcggtgcagactcacacacatgcacatacggtgcattcggagcattttcaacaggaatgggtgcaactgacctagcaatggtctatgcaactggaaagacatggtttatggttcctgaagcattaaagatagaagttgaaggaagcttaaggccaggaataacatccaaggaccttattctaaacataataggagagataggaattgccggagcaacctacaacactgcagagttctgcggagagacaatagacaatctggatgttgaaagccgaatgaccatgacaaatatggcaattgagatgggagctaaaaacggaataatggagccaaacaaggcaacaatagagtatgtctgcaatagaaccggcaaaagcaaagaccaattgaatataataaaatcagacaaggactcaaactatctcaaggaatatctcttcaatgtagatgatatggaagcccaaatagcctgtccaaatgatgttgacaatgtcaatcctctctcaaaagtggaaggaacccatatagaccaaggatttattggatcatgcacaaacggaaggctcaatgaccttgcacaagctgcagcagtcctagaaggcaagcaagtccatgacgatgtaagattaattattatccctgcatccaaggaaatctatcaaaaggcaatggatttaggttatatcaaaacattcctggatgctggagcgattgtatcaaatcctggatgtggaccatgccttggaggacatatgggagtcttatccgaaggggaaacaagcatctcatctacaaacagaaacttcaagggaagaatgggagatcctaattcatcagtataccttgcaaatgcaggagttgtagctgcatctgcagtctctggattcatacaaaacccagatagcttataa

SEQ ID NO: 385 - DNA, 1179 bp, Methanobrevibacter ruminantium
  source 1..1179: mol_type = genomic DNA
atgcaatattatatcagtccctttaacaaggaagaggaatataaattcccaaaaaacataacaatttatgatactaccttaagagatggagaacaaactccaggggtctgtttttcaaaggaagacaaattagagattgctagaaaattagatcaatttagaattcatcagattgaagcgggattccctatcgtttcaagccgtgaagcagatgccgtaaaggcaatagcaaatgaaggcttggatgcacagattatctgtcttgcaagaactaaaagagcagacatcgataaggctcttgactgtgatgttgatggaataatcacattcatgggaacctcagacattcatttagagcacaagatgcatatcaaaagacaggaagccttgaatatttgcatgaaatccattgaatacgctaaggaccatggattgttcgtagcattctcagcagaagatgctacaagaactgacttggacttcttaaagagaacctactccaaagcggaaagctatggggcagacagggttcatattgcagacacagtaggagcaataactcctcaaggaatcactttcctaatcaaagagcttagaaaagtcacaaatgtcgatattgcaatgcattgtcataatgactttggtcttgctgtaataaactcaatttacggacttttagcaggaggttccgctgtttcaacaactgtaaatggaatcggagaaagggcaggaaacgcatcacttgaagagcttgtaatgtctctaaaaatcttatatggaaaggatttaggatttaagaccaaatacattcaagagctttcagagcttgttgcagaaaagacaaagcttggaattccttataataagcctgttgtaggtaaaaacgtattcagacatgaatctggaatccatgtggatgcagtgattgaagagcctcttacatatgagccatatcttccagagcttgtaggacaaaagagacaattagtcttaggaaagcattcaggatgcagagctgttaaggcaaaattagatgaatgcggatttaaggttacaaatgatcagctttgtcagatagttaaaaaagtcaaagaaagcagagaagaaggaaaatacattgatgataatgtatttaaagacattgtaagaagcattgatgctaattatgttgacttatag

SEQ ID NO: 386 - DNA, 546 bp, Methanobrevibacter ruminantium
  source 1..546: mol_type = genomic DNA
atgatagaagtagaagttaaagctaagataaataattttgaagatataaaagtcaaattaaacgaaatcaatgcaataaaaacaaaaacagaaaagcagatagacagatatttcaacagccctgtaaatgactttgcaaagactgatgaggccttaaggataagagaaaccaaaacagaaaaatcccataacttgtttataacctataaaggccctaagatagacagcaaaagcaagactcgagaagaagttgaaatgaaaatcgaagacagcgacaaatgtgcaaaaatctttgagaatctaggatttatcgaagttagaacagtcaaaaagaacagagagtattttaagcttgagaattttgagataagcttagatgatgtagagggccttgatccatatatggaaatagagattgcattggaggacggttccgattataatgaagctcaagataaaatatttgacctatttgagcaattgggaattactgatggcttcgagcgaacttcctatttggaattgctagaagagcaggacaaataa

SEQ ID NO: 387 - DNA, 546 bp, Methanobrevibacter ruminantium
  source 1..546: mol_type = genomic DNA
ttgaccgatgttgatataaaaatagaaaacattgtggcttctgctagcattggtaaagacattgttcttactgaagttgcaaaagcattagaaggcgtcgatttcaatagagaacagtttccaggtctagtttttaaacttcaagaccctaagactgctgctttaatttttagttccggcaaacttgtttgtactggcgctaaatctatcgatgattcaaagttagctattaagaaaactgtcgaccttatgagaactattgataccgagattcctcatgagtttgatattaaaattcaaaatattgttgcttctgcaaatttacaatccacattaaatttagaagcagttgctttggaattggaaaacaccgagtacgaacctgaacaattcccaggtttagtgtaccgtttatctgatcctaaagtagttttattattattcggttccggtaaagttgtttgtaccggcgctaaaaccaaacaagacgctaggttaggtgttgaaaacgctaaagctagacttagcgaattggacttaatataa

SEQ ID NO: 388 - DNA, 2064 bp, Methanobrevibacter ruminantium
  source 1..2064: mol_type = genomic DNA
ttgattaaacttgtagtatttgacttagataatgttattattgatggtgagggcatagatgagattggaaaattggtaaatattgaagatcaaattgcaaaaatcaccgagcaggcaatgcaaggtgaaatcgacttcgaaacatccattaaaaaaagagtaggacttcttaagggagcttctactgatgatattaaaacattagctaatgaaatgcctctaatggaaggtgctgaagaaaccgtttcctctttaaaggaaaatggttttgatgtagctattataagtggcagttttgatattattgccgatattattaaggaaaaactcaatgtggataatgtattcacaaattcacttgttgaagaagacgggatcttgacaggtgaagttactggaccattggtatctggttcaaaagtagatgttttatctaaattcattgaagacaagggctattctttagaggaatgtgttgctgtcggagatggagctaatgacatttctatgattgaatctgctggatacggcattgcattcaatgcaaagcctgccttaaaggaaaatgcagacatcattgtagaaacccgtaatcttactgacgtccgtgacgtcattattaacttaaattctgaaaacactgaagaaggtgctgacgtggataaagaagttgaaattgaaactgaagtagttgaatctactgatgtagttgtcgaaaatcaagaagaacaagttgcagatgcaactgaagaagtagttgaagtagaagaagcagaagaagctgttgaagaagcagttgaaactgaagaagaagcagttgaagaagaaactgtagaagctgaagaggaagctgttgaagaagaagcagaagaagctgttgaagctgaggaagaagctgaagaaatcgaagaagctgctgaagaggaagcagaagaagctaccgaagaagaagctattgaagaggccgaagaggaagctgatgaagaagtagttgaagaggctgaagaagaagtagctgaagaagaagcagaagagattgaagaagctgttgaagaagaggctgaagaagaagtagctgaagaagctgcagatgaagaagtagttgaagaagctgctgaagaagaagcagaagaagctaccgaagaggaagctgctgaagaagaagctaaagaagaaaagcctaaaaagtctaaaaagtctaaaaacactcttcctgaacctgatttcgaattagctgatactatcgaaggagtcagagctcaaaaagatgaaagagaagcaaaaattgctcaagttgctgacgaaagagaagcattcaatagagaagctaaagagcaacgtaaaatacgtgatgaattaaacactgaattaaaattaaacttagcaaaagctattgaattcagagatcaacgtaatgaaatcaacagagaagttgaagaaaacaaaagagctcgtaacaaagtaaatgaagagattaaaaatctcgaatggtcttctggtaaaaaagatagaatcagaattgaaaacgaaatcaagaagattgataaaatcattgaaaccagagttttagacattaaaaaggaaaatcagcttgtaaaaactgctaacgatttaagaaaacaacttgcagaaattacagaagacaacaaagtaaaagaagaagctgaaaagcttaaaaagcaatctgaagaataccacgctaaagttgtcgaactttccgaacaagctcaagaagctcacgaacaaatgctttcttactttaggaaaactgatgaaatcagaactgctgcagatgaagcacacaagttattcatccaagctaggaaaaacgcttctgctaaacatgaagaatttaaagtcattttaagtgaaattcatgttattaataaaagattaggaagcaacagagctagaagaagaaaatctgagaaaactagcaatgctcctggtaaaagaaatcgtgaagagaaagagaaagctgaagctatctttgataagtttaaaaacggtaaaaaattatcaactgaagagcttttactcttgcaaaaatatgatattaattaa

SEQ ID NO: 389 - DNA, 246 bp, Methanobrevibacter ruminantium
  source 1..246: mol_type = genomic DNA
atggatgatattatggatttggaaaataaaaaagatgataaaaatcaaaataaagaagaaataattgaatctagtgaaaaagaagttaaaatggaaatatgttatacctgcggtaaggagtttgatatgaattctgacgaaggcgctcattaccattatggtgaatatccaatgtgcggctattgcactaacttctttggattctataaggaagatatgatgggtggcaaggcaaaaaaggaataa

SEQ ID NO: 390 - DNA, 2226 bp, Methanobrevibacter ruminantium
  source 1..2226: mol_type = genomic DNA
atgcatgaagtgattatttcagaaaaaccaaagtctgctgagaagatagcaaaggcactttctccaaatgcccaaaagaagaaatataatagaaagatcaactattgggaatttgaagaaaacggcaaaaagaccactgtcctatctgcagtgggacatttgtactcattgacttctgctagttccagagacagattaggttttgatttgacttgggttccagcttatgaggtggaaaagcaaaaatatacaagggattacatcaatgcaattaaaaaactctcaaaaggtgcagataagtttgttcatgcttgcgattacgatgttgaaggaaccttaatcggatacaatgcattgaaatatgcatgtggaaacaatgccgaagcaaaggcatcccgtatgaaattttcaacattgactaagaaggatatcgtagaggcatacaatacaatgagggacattgacattcgtcaagtggatcatggtattgcaaggcatatgcttgactattattatggtatgaatatctcttcagccttgatgaaggctgtaagggcctctagctcaagatttattagcttatccgccggacgtgtacagactccaaccctttctattttagttgatagggaaaaggagattcaatcctttgttccggaaccttattggatgatcaaggctaaatctgactatgatatcatagcagaccatgtcgaaggaaagatatttgatgaagagcgagctaaaaagatttatgctgactgtcaaggtgctgatgctgatgtgacaagtgttaaggttacagaatccattagaaaacctcctattccattcaatttaggaggacttcagtctgaagcacatactgtctttggattctctcctaaaaggactcaagttgcagctcaaaacctttatgttggaggatatacatcctatcctcgtacatcatctcaaaagctgcctgaatccttggatttcaaaaacatttttgcagggcttgctaaagaccctgaattcaagaagcatatctttgacttacctgctaagcttaagcctaatgaaggtaaaaagactgatgcagcgcaccctgctatacaccctacaggagtattgccttccaatctatctgcagatgaggctaagatttacagcttgattgtttataggttcatcagcgtattttccgaaaactccaagcttgaaaccatgaaggtcaacttaaaggttgcagatgagaagttcaccttttccagaaaaagagtctcttatgaaggttggctaaagcattatccgtttaaaaagcaggaaaatgatgcattccctcctataaataagggagatcaactaaaaatccataagattttagttgaagagaaggaaaccaaacctcctgccagatataatgaggcttcacttatcaaggaactggaaaagagggaattgggaactaaggccacccgtgcagacattgttgccaagctttatgatagaaaatacattgaaggcaagaagattgaggtcaagcctttaggaatcaatatcatagacaccttaaacgagtattgtaaggacctgacaagcgaggagctaacccgtgagtttgaaagggaacttgaaggaatcgatactgataagtatacaaaggagcagattcttgaaaacggtgaaaaggaagtcaagaccattttagctgaaatcaaccaaaacaagaagcaaatcggtgaaaagctttatggagcatatcaggaaaccaatgtggttggagagtgcagctgcggaggaaaactgataaaaagatattctccaagaacaaagaacacctttgtaggatgctccaatttcccaaaatgtaaggttacctattccctgccaaagggagcgaatatgctaaagaagacatgccctacctgcggtttgcctatgatttccattaaaaaggcaagcggaaagggaagagatcatgtctgccttgattcaaattgtggaaaggatgtaagcagacgccaagctcctgaagttgttggaaaatgtccggaatgtggcaaggaccttttaaaacgttctggcagatatggagaatttgtaggatgctctggattcccaaggtgccgcttcacttgttctgttgatgagttgaacaatcttggcaaagataaaaataaggaagatgtaaaagagaataagggtgtttctaagaagatagtaaggtctgaggctaaataa

SEQ ID NO: 391 - DNA, 2703 bp, Methanobrevibacter ruminantium
  source 1..2703: mol_type = genomic DNA
atggaaaaacaacaagtaaaaacaattttaaaatctgtggttatcatagctatattgcttattattgtttttggtcttagggctcaatctgtagatattggaggagttcctaatgaacttaaatcacactatgtagacgaaaacggtcttccttatttcagtgaaatggactcatacttcaactacaggatgaccgagaattatatggatcatggatactttggtgacactaaggtaaacggtaccggttgggatatgcattcatacttcccttcaggtagggcagtaggtgattatcaaccgatgattgcttatgtgacttcgttcctatatggaataataaatatgttccaggaaatgtctcttcttgaagtggcgttttggactggggctattgtttcctcacttgctgtaattcctacttacatattcacaagaaggattacaaacgactatggagcaattgcggcctcattgattgtagtattaggtccaaactatatttcacacacattcgcaggatttttcgatacagatatgttcaacataaccttgcctttattcttcatactgttctttgttgaagctttaaaaactgataagctatcatacagaatcatattctccttattagcagtagcttcaatagcgctctattccctttcatggacaggttatatgttttatgttgctgtaatggtattggttatgattgtgttctttgtattatgcttctatttcaatattgagattttagaaccatttaagaactatggaaataaactggaatggctgattaatcagaaggaattgtttgctacattaattgtattggttgtaggtctaattggattattattagccgtcggagtaggtggaattattgaaggtattaccggccttacaggaggtttcacccttcaagcaggtgctgctgacgtatggcctaacgtacttatttccgttgcggaaatgcaaattcctaatttagtgactggaggacttgtaggttcattcctcgctaacaccggtggagtagtaaacggggttggaggaattgtatgtttattcggtgtgcttattgtattgtacacttttgttcaaagattattcagactcaactctgttaaagttaaaggagacactgcaaaacctcacaaatccaaacgaaaagctacctctgtaagaaccgaacaaaagagattcagcgtttctttaaaagacattggatcatttggatcaaccgatgaaatcaacaaaagcaaacgtcacacagtgctttacttaagtctcttctttgtatggattgtatcatctgcaattgcagtaactcaaggtacaaggtttattcaggtattagtagtacctatgggtatttgtgcaggtatattcgtcggatatgctgtagactatgtcaagaataatgtggacaacgataaggtattattattgattgctgttatcgcatctatcttgattgcacttccaatcactcaaatcgcttatggtttggataatgcaatgactataggtttagtagtcttagttattcttttggcaatttcagcaattgtgatttatgctaaaaaatccattaaggactctgatgtttcaatcaagaaggctttggttgtagtgctaatcactctcgctttggtatctccaaccgtttgtggtgctttccaaaccactgcagctaccgttccaggttcaagcgaccctatgtggtttgctatggattatgttaaagaaaactctaccaatgacactgtaatcatatcctggtgggacttcggttacctattccaagttgcatctgaccatcctacttctttcgatgggggttcccagacaggggatcgtgcatactgggtaggtaagtcattgactacgtctgactatgcccaatctaaaggaatcctgcagatgttggcaactacaggtagcaatgcatctatgctattgtctgagtacacaggcagcaatgtgactgcagttcacgcattggatgagaccttaggtaaaagcagatctgaggctcaaaagattttaacaagcaagtataaccttactaatgaccaagctaaagctgttgtaaaacagtcacatccaagcaatcctaacaacgtttcattcgttttaagttcagatatgattggaaaagctggatggtggtcttactttggttcttggaactttgataccctaaacagtaccaactatcaatattacatggctaacgactatgttcctatcaagcagaacacacaaggaaacattacaatccttaatgaaagcggtattatataccaagctgttgtaaacagaggcaagaacggtaccaacgaaactacagctcaaatggaaaccatttgggacaataaccgtagtaaaattgacctaaacggtaccgaatataacccacttaaggcaagcaatcttatttgtattgaaaacagttatttaactgttaacaagaccttgaataaggacggtaattacaccttataccttttaggttccggtgatgattatactgccatattgatggataataatcttaaagactctgtatttaccagactcttccttttaggtggtataggtcaagacactttcgagctaagtaatatgcaagatggtgtatctgtttggactctgagagacggatcatcaaattctgatgacgcaggttcacagtaa

SEQ ID NO: 392 - DNA, 1095 bp, Methanobrevibacter ruminantium
  source 1..1095: mol_type = genomic DNA
atgactatagaagaaaaaattaaagctattgaagaggaaattcaaaagacaccttataacaaagctacttctcatcacataggaaaattaaaggctaagatttctaaacttaaggaagagcaaatcaaaagaagtagcggtggaactaaaggtgaaggtttccacattaaaaaaagcggagatgctactgctgttttagtaggtttcccatctgtaggtaaatctacattgcttaatgaaatcacaaatgctgaaagtaaggttggagcttatcaattcactacattagaaatcattccaggggtcatggaatataataatgctcagattcaaatatttgacattccaggaatcattacaggtgctgcaggtggtaaaggtagaggaaaagagatcttatctgtagcaagaactgctgacttgattattgtggtcttggatgttctcaaccctcaacacattaatgttatcttaaaggagcttagaaatgtaggtgtaaggccaaatgagaccaagccagatgttagaatcaaaaagacacgtaaaggtggagtcaatgtttcatcaaccgttcctttaacctatttggatgaaaagaccattaggtcaatcatcaatgaatatggaatacacaatgcagatgtcctatttagggatgatgtcacaatcgatcagttcattgatgtgattgaggccaataagtcctatgttccaatgatggttctcttaaataaggtggatttggtagatgaacattatctaaatgaaatcaagaaggaacttcctccattcattccgatctctgcagataaacagttaaatattgaagcacttaaagaagagatatttaataatttaaaccttatcagggtttatctaaagccacaaggaagaaaagcggatatggaagatccattggttgttaaaaaaggttctaccgtaattgatgtctgtggaaaacttcacagagagtttgttaaaaacttcagacatgcaaagatttggggaacttcagtaaaattcccaggtcaaaaggtaggtccagaccatgtcgtagaggatgaagacattctaaggattattttaaagaaataa

SEQ ID NO: 393 - DNA, 603 bp, Methanobrevibacter ruminantium
  source 1..603: mol_type = genomic DNA
atgtctatttcagataaaatcgaagaaaataaagtaatattcatatcaggaactccatgtactggtaaaactacaattgcaactaaactaaatgatttcttaaccaacaatggattcaattcttattttataaaaataaatgattttgccattgaaaatgatttggttttaggcaaggacccagacaaattgtatacagttatagacattggcagacttgatgaagtcttaaataaggagattaataattttcttgatgaaaactcttcagatgattctaaaatagttgttgttgaaggacatctgtcccatttgtgcaatggtgcagataagatgataattcttcgattaaatccagaaaaactcctcaaaagacttgaagagcgaaagtatagtgaaaacaaaattcatgaaaatcttgaagcagaggctttggctgtctgttctgcagaagcttatgacttatatgatgataaggccagtgaaatagacactacaaataaatctgttgatgagactcttgagcttgttcttaaaatcattactggtgaactagaatctcctgtaggctctgttgattttatggattggtttttattataa

SEQ ID NO: 394 - DNA, 372 bp, Methanobrevibacter ruminantium
  source 1..372: mol_type = genomic DNA
ttggctagaggaaaaagaccaaaatggatgattgatatagctcaagaacgtatggatattctttttaatcgtgcagaaaaagaatataagaagaatccggagagatcccatcgttacatagagctagctcgaaacatttccaagaaatacaatacaaaaattccccagccatggaaccgaagatattgtaagaaatgctacaagttcttggttcccggtcacaactgcgctgtccggctaattaataatgaaattaatatatattgtggcgagtgtggccatgttatgaaaattccttacatcagggaaaaaaagttaaaaaggagagctaaaattgactcttacactttcaaaaaaagagattatgaatga

SEQ ID NO: 395 - DNA, 216 bp, Methanobrevibacter ruminantium
  source 1..216: mol_type = genomic DNA
atgacaatcaatattggaaaagctggtgttaacgataatgttattgaagagattaaacgtcagttaaaatccaatcctattattaaattacgatttgctaaaaatgtagcaagaaataaagatgatttaattaacagcattgttgaaggcactaaatcccaactcattgatgttagagggaatgttgctgttatttataagaaacaatctcattaa

SEQ ID NO: 396 - DNA, 441 bp, Methanobrevibacter ruminantium
  source 1..441: mol_type = genomic DNA
gtgacaactgtatttgatgttcctgcagagttattgattaatactgttgcagatgaatttaaagataataatgataaaatcgttgcccctgaatggacaaaacttgttaaaactggtgttcacaaagaaagaaaaccagaaaacatcgactggtggtatgtaagatgcgcttctattttaagaagagtctatattgacggaccagttggagtaagaagtttaagaaccttctatggcggtaaaaaagatagaggcgtaaaccctgaaaaattcagaaaaggtagtggatctattgttagagtagctctacaccaattagaagatgcaggatacgtagaaaaagtcgatgctggaagaattattactccgcaaggtagatctttcttagataatacttctgctgaattaattaaagacattccagaactttcaaaatattaa

SEQ ID NO: 397 - DNA, 372 bp, Methanobrevibacter ruminantium
  source 1..372: mol_type = genomic DNA
atgagtgaacttgatgaattacgtaaaaaacgtatggctgaactgcaaagacaggccgctatgaatgctgatccgcagatggctcaacagcaaatggctcaacagcagatggctcagcaacaattagctcaacagcaagaaatggaagctcagttgaaacaagctatgagacagatcttaactccagaagctcgtggaagattggataacttaagattgaccaagcctgagttagtacaaaacattgagattcaattgcttcaatcagctcaagcaggttctcttagaggcaaagtaactgatgaacaacttaaagttttgcttaaaaatctcatgggtcaaaaaagggaaattcatattacaagaagataa

SEQ ID NO: 398 - DNA, 582 bp, Methanobrevibacter ruminantium
  source 1..582: mol_type = genomic DNA
atgaaagcttgtgttctttatagcggtggcaaagacagttcattgatgggatacatcctcaatcaattaggctttgacgttgaactggtcactgcaaattttggtgtttacgattcatacattccagcttcaaagtctgcagagtccattggattgaagcatagggttttaaacctggacatttccatcttggaaaaggctgtagacatgattttagaagacggatttcctaatgagggaatcaagtatcttcatgaggctgttgttgaggaagtggcaaatcattatgatttggttgctgacggtacaagaagggatgacaagacccctaaactcaatagaaatcaaataaggagcttggaagacagaaaagatgtccaatacatgaatttggatagttttggctataagaccatcaaatatcttgtaggaaatctttttgaattgaagcatgaaaagagcaataaggatacaagttcagactatgaggttgaaattcgattgctgattgaccaaaaaggtggaaattcatctgaaatattcccagaacattatcagactaatgtggtcggattaaaataa

SEQ ID NO: 399 - DNA, 156 bp, Methanobrevibacter ruminantium
  source 1..156: mol_type = genomic DNA
atgagtagaaacaaaccattagctaagaaattaagaatggctaaagctaataaacaaaacagaagaatcccaatttgggcttatggtaagactcaacgtaaattaagatacagacctaagcctagacattggagaagaaatgatcttaaagtatag

SEQ ID NO: 400 - DNA, 261 bp, Methanobrevibacter ruminantium
  source 1..261: mol_type = genomic DNA
atggcagaagaattagaaagaacttatgttattccacttagaaaagttaaaaatgtcaaaagaactataagagctcctagagctattagagaagttcaaaactttttaatgaaacatatgaaagctgaagaagtaaaaattgacgcttctataaatgaatttatttgggaaagaggaattcaaaaaatcccttccaaagtaaaggtaattgcagtaaaagatgaagaaggtattgtcagagcaactttagcagaaaactaa

SEQ ID NO: 401 - DNA, 678 bp, Methanobrevibacter ruminantium
  source 1..678: mol_type = genomic DNA
atgctgaaaagaattaatttaaccggaaaccctaatttaggtgtttacatatctgttaatgatgaaatagctattgttccttttaatgttcctgttgaaatggaatctgttattaaagagaccttagaagtcgacatcattaagacttccattgcaggctctaacctaaacggtgttttagcaacaggaaattctaatggatttttagtttctccctttacatatgacagagaaattgaactattggaatctgcaggcataaatgttgcaaagcttccaggcaaatacactgccattggaaacataattgctgtaaatgattatggtgcccttgcaggtcctaatattggggaagaaacaatcaaggttattgaagatactttaaaggttccagtaaagatttatccatttgcagacactaagattgtaggttctgcaagcatagttaccaataaaggagctttattgcatagggatacaatctctgaagagattgatttcattgaagacttctttaaggttgaagcaaacattggaactgtatgcaaaggaatgcctcttgtaggtgcttgtggtatagccaattcccaaggtgtaatggttggggaaagtactacaggtcctgagatggctagaattgaagaatctttaggctttttagactttggtaatttctaa

SEQ ID NO: 402 - DNA, 225 bp, Methanobrevibacter ruminantium
  source 1..225: mol_type = genomic DNA
atgataactaaaaattatagagttaaaggtagcttcgtaatgggtagtgaaacacaagttttcactaaagagttaagagctattaaagaagaagacatttatgaaaagctttattctatcttcggaagtaaacatagaataaaaagaaatcaaatcaaaattgattcaattgaagaaatcagcgatgacgaagtggaagatcctatcgtacaagcgattctttaa

SEQ ID NO: 403 - DNA, 438 bp, Methanobrevibacter ruminantium
  source 1..438: mol_type = genomic DNA
atggaagaccagcaaaaattacaacaaattttaagtcaacttgaagtttacaagcaacaatctgagttatataagactcaaatcgatgctgttcaagcttcacttgctgaaattaaaatcttagaatctacattagatgacattagtggtaaagacaccatagaaactttagttcctcttggtgctggctccttcattaatgcagagattaaaaatgaagataaagttattatgagcctcggttcaggtgttgctgtttccaagacttttgcagaagctaaggaaaccactgctgcacagaaaaaagagcttgaagagactttagataagttatttgcagatcttcaacaaataactgacattgtagctcagctatctccgcaagctgaacagttgatggctaaagctcaagcgcaaatgggacagcctctttattag

SEQ ID NO: 404 - DNA, 1731 bp, Methanobrevibacter ruminantium
  source 1..1731: mol_type = genomic DNA
ttggcagggataaacttgtttagttcattaaagaaaaaatttgctgatgcaagtagcaaattaagaaataaggtagaagaagaagctaaagatgaagataacattgaattaatcgaagagtctaaagatgaatttgatgacatcgacgaagatctcatcgaatatattgatgaagaagatgaagatgacgattgggacttcgatgatattgataaagaagataaatctaaggaagagcctaaagaggaatctaaagaggaatctaaagaggaatctaaagaggaatctgtagaagaaacagttgatgaggctatagaagaagtcgaagatgtttctgcagatgaagattctgatgaagaagtaaaagattctgatgaagaaaaaaaggattctgaagaaaaggattcaaaagataaaaaagaaaaatccggtttcttctcattcttaaaacgtggtaagaaagaagataaaaaagaggatgaagaagaaattgaagattctaaagaagaggaagttccagaagaagaagtcaaagaagcatcagatgaggaagttccagaagaagaaacatcagaagaggagtctgaagaggaagttccagaggaagagatagaagaatctgaagctgaaccagttgaagaaactgttgaagaggaagcagaagaatctgaagctgaaccagttgaagaagctgttgaagaggaagcagaagaaactgaagaagcaaaagaagaaacttccgaagaggatgaagaagaaaagcctaaaaagaaacgttccctatttagacgtggtaaaaaagacaaagagaaggattcagaagaggaattcgatgcagaagaggctaaaggcaaaggtggattcctatcattcatccgtgaaaagactatctctgaagatgatgttgaagacattctattcgaacttgaattgggcctattggaatcagacgttgcaatggacgtatccagtgtcgttgtagattcagtcaaaaacgaccttgtcggtcaaaaaattaaaagaagcagtgacatagaggaatatacctatgaagcccttaaaaaggcagtttacaacattataaacattgaaggaaagtccatgaccgagcttcttgaagagaaggtcgctcaaggagagcctcttgtcgtcatgcttgtcggtattaatggtacaggaaaaacaactacaataggcaaattagctaacttttacattaaaaaaggttacactccagttattgcagcatcagacacattcagagcaggggctattgagcaggttgcctatcatgcagataagttgggtgtcaaattaatcaagcatgagaaaggttcagacccagcagctgtcgctttcgatgcagttcagcatgcaaaggccaaaggcaaagagcttgtattgattgacactgccggaagaatgcaaacaaataccaatcttatggatgaaatgaagaagattagaagggtctccaagccggaccttgttgtatttgtaggagatgctttaaccggaaatgacgcaaccgaacaggcaagaaaattcaatgaagccattgacatcgatggagtaatccttaccaaggcagatgcggactctaaaggaggagcagcactgtcagttggttatatcattcaaaagccaattctcttcttgggaatgggtcaatcctatgatgatattaaggaatatgatcctgattggatgctagagcaaatattctcttaa

SEQ ID NO: 405 - DNA, 1695 bp, Methanobrevibacter ruminantium
  source 1..1695: mol_type = genomic DNA
atgaatttagacagtaacgttaaaaccggattgattgtagctatttctataattttcctttttgttttatcattgtttattactagtgcaccaacaggagtggataattctgctcgtttcggaattttgacactgcttcctcctcttatagcgattgctttagcatttattactaaagaaactattctatcactattcgttggagttttcgttggtgaattcatggtttcagtaagtgatttaaacatcatcagctctgcagttaatgcatttttagctatgggtggtcaaatcatctcatgtatggctgatccatggaacgctggtattgtcctccaatgtctgctcattggtggtgtaatccaattaattacaaaaatgggaggagcaaaagcgttagctgatgctttggctaaacgtgctgacactcctagaaaagctcaacttattactgaatttttaggattatgtgtattctttgatgactatgctaactccttgattgtaggtcctatcatgagacctgttatggacaagcttaaggtttcaagggaaaaattagcatttgtagtagacgcaactgcagctccagttgcaggtattgctattatttccacttggatcggtcttgaaatcagtttgattactcaaggtttcgaatcaatcggcatgaatgtaagcggattcggaatattccttcagaccattccattcaggttctataacattttaatcttgattttcattgttatctctgcagttaccctgtatgagttcggtccaatgaaagaggcagagaaaagggctcgtgcaagaaaagctgatgaacctgttaaatctcttgaagcaaccagctttgatgatgtaaaacctgtcgaaggcattaaattatccgtatggaatgctatcattcctattgcagtcttaattatcggcgctcttatagcattctactggagtggttacactaccatcttaggcggtgaagaccaagcgctcattcatttaatgaaaacttctccattatccttcaacggtatctttgaggcattatctgcttcagatgcatctgtagccctcttccaagctgcattgcttgcttccattgtagctatcgttatggcagttctccaaaagatcctgactatcgaagaggcaattagcgaatggattggcggtatgaagacaattgttatcactggtgtaatcttgcttctcgcttggtccttaggtggagtaatcggagacataggaactgctgattacttggttggaatattgaaggacacaatccctgtattcatcttgccaaccttgatctttatcctaggcgcattgatttcctttgcaacaggtacttcctatggtacaatgagtatccttatgccacttacaatccctctcgcttgggctgtaaaccctgatatgggatttgttatcgtctgtacaagtggtgtattgactggtgctatcttcggtgaccactgttcacctatttcagatacaaccattctatcctctatgggaacaagctgtgaccatattgaccacgtccggacacagatatactatgcaatattcgttgcatcaatatcaatcatattcggatatatcccagcaggattcggtatcccatggtatatttcaatccctgtagctattgtagtggatgtttcattgggattaagaaggtga

SEQ ID NO: 406 - DNA, 1332 bp, Methanobrevibacter ruminantium
  source 1..1332: mol_type = genomic DNA
atggcaaacagtaatcagtctgaatgggatagtaacattgcatttattttggcaatgattggttctgcagttggtttaggaaatatttggcgttttccaaatgttctatactcccacggtggaggatcattcatgattccttatatcgtatccctattccttttaggaatatcatttgtacttgtggaatatgctgtaggatacagattcaagtcctccctaatcaaggttctatattctgtcaaaagcaaattggagcctgtagcctggtttatcgccctaatcgtctttctcataacaacatattacatatgtgtagtgggatgggacttgatatatgtggtcttaagctttacaaaggcatggggctcaaatccagaccttttcttctcaagcattgtccttcaatcaacagattccattgaagggcttctccatattgttcctatggtatttatatccgtacttgcattatgggctgttgcatggtacattattcaaaaggacttaaatgacggcataggtaaggtaagtaagttactgcttcctttgcttttgattattgttgttacaatcgttttgttctcactgaccttgcctggagcttcaataggctatacccaaatttttactcctgattggagtgccctaactgacttgaatgtttggcttgctgcctttggacagatcgtattctcccttagcttaggaatgtccattgcacttacatatgcaagctaccttcctgaaggctctaaattaacagacaatgctttaatcgttgcattttcaaattctggatttgaaatcttcaattcaatcggaatattctcaatacttggttttatgaccttaaacacaggcattccatttgaccaactggttactgaaggaacaggcttggcatttgttgttttccctaaggtattcaatataatgggtccttgggctacaatcatcggtccgctcttcttcctatgcattctctttgctggtgtaacctctgtaatggcattgcttgaggtggtctgctattcaatctctgaaaagttcaacttctctagaagaaaatcagcaacaatagtctgcattataggatttatagtatctgtaatatttacaacaagtgctggaagcatgattttaggaatattcgatgcattcctaaacaatatcgcactcttatttgcagttcttcttgaatgcatcatattcggttggatctataattttgacaatctcatagagacattaaacaataattcaaatataaaggtaggaaaagtctggaaaaatgtaattaaattcatactcccaatctgcatatgctga

SEQ ID NO: 407 - DNA, 2649 bp, Methanobrevibacter ruminantium
  source 1..2649: mol_type = genomic DNA
atggatgatgaaactaataacaatcaatggaacagttcaacaagcttcatacttgtcatggtaggatccatcatagcattggcagggatttggagattttcctatcttatttatgaaaacggagggggcagcttcctaatcccatacatattagccatcgttatcatggtcatcccccttcttgtccttgagtttggagtgggattcaaatacaaggcaagcctgccaaggatattttacaatatcaagtctgaatttgaaatagtggcatggtttatccttttcctaatattcatagtcctaatctgctatacttgcataatgtcctgggaccttatctacatagtcctaagtttatttaaaggatggggcaataatcctagtgttttctttacaaccaccctacttcatagcacctctaatccatatggcttaacttaccttgtagttcctattggaatcggcctcatattaatctgggccttgatatatttcatatctcgaagggaaataaataggggaatatcattagtgacaaaattttccctggcattgacatttgttctcgtcatcatcctttcagtctttgcccttcaattgccaggatccagaactggccttatggccttgttcaatccaaattgggaatatctcttggactataacatttggctcactgcattcggacagcttatattttcctatggccttgcatatggaatcgcaagcacatattcctcctatcttccagaggacagcaagcttatagacagcgcatgggttattgttctaatcagcctaatattcgaaattctgatgtctgttctcatatttgcattgcttggacatatggcattgggaaagaacatgcctattacaagccttgtaagcgacagcttctcattgatatttgtggttttccctaatgtattcaatgtgatgggctcatgggcaacaataataggtccattgttctttatggttatatttatagggggattaggtgcattatttgctcttatagagcctttggcaaatgcaatatgcgaaaagttcatttggactaaggatagggcaataaagacattggtcttggcaggactctttgcatctttcatatttgcaacaggaatgggagagtatttccttaggatagttgacggcttcataacccaatttgcaataattctagttgttttggtagagatattagtattcggatggctttttgaccttgatgatataagaaatgttttaaacaataattctagaataaagctcggaaaatattgggtctatctaatcaagtttgcaattccgattcttcttattgtaatctggatattgggagtttataatttgattataactggagacaggcaaagccttcttgttcagtccattttagcttcaatcattgttattgtgcctctagctctaactgtagctccatttaatggagaatattctcttggctcaattacaggaggatataattactttagggacagtggggatgatgaagaggccaaatcaaattcaaagccagacttaaagtccagattcacatcaagattcacatctaaggataatgatgttgataatggcactgaaggctatgaagagaagacctatgttgaaaagacaatagatgactatgagggctatgatggtgtagtggcaatcacagatgatgaagaggaaaattccagccttaaatccagattcagttgggacaagtttaaaaagtctaaaaatggtaagaatgttttaaataatgttgatttgtctgcgaaagagtttgatcctccaagcgatgatgattatgatgattatgaaacttataatagtttagatgatggttatagccaaggctctgatgattttgataatagtatggatgattataggtctaaatctaagtccaaatctaaatccaaatctaaatccaaatctaaatccaaatctaaatcagaatctaagtcattatttgaaaagattaatttatttaataaagaccaaggagagaatgattatttggatgataattatggctataattctaatgataattatgaagatgatgattcctcctttgaagatgtcttcgatgattttgattatataactcctataagggaagaagaacctaaatctaaacctaaaacaaagtctaaaccaaaatctaaaacaaattccaaatcaaaatctaaggctaaaggtggaaataaaaaacctaaattcattagtgctgaggatcttgatggaattgaaagtttagatgatttaagtagccagcctaataagaaacctgcttctaaaaagacttctgcttctaaaaagaaatcaagttcaaaatctaaaaaggaatctggctctaaatccaaaaaagcatcagaacctaaagaagaacctaaacctaaagaagaagaaatagaatatgaagagttctcagatgatttctttgatgatggtgtatttggagaggaaggctatgaagctcttctagacgattatgtggaaccgaaaccaaaatccaaaaagaaaaaggcatcttccaaatctgaccaatctacacctagggattctaaaccctattatgattatgaaaagaaaggatcagattctgtttttaatttagatgattaa

SEQ ID NO: 408 - DNA, 732 bp, Methanobrevibacter ruminantium
  source 1..732: mol_type = genomic DNA
atgattaaaaatcatctaatactttatttttttatctcttatctttttttagtccatttctttacctatttaactatttctattcctattattttctatcattttcattttttatcattatttgttcatgatttttcaattaatttacatatttatccatattttcaaaatataaaatttataaaagataaaaacatacctataattatcaaaataggtgattatatggataaaaaaatgacagttttattggttgccctattttgccttctctgtgtaggctcatatctaatctttgaacctgccaggcatataagctatcatgaggtcaatctcactgacacctgcgttgcaaaggtcccggtaaccgataaggtatcttcatatacagacaacttaaacattcactactattccgattatgaaaacgatcttaacattacaagtttttatgatgtggctccggaatcttcgtctcaagggcatctgagaatggacaatcttaaaaaggaagttttaggtacggaaaagggaagtgcaggcaatctcacttattataaaaacaataatgccggaacttacacaatgtatgttgaagatagaatgtcacataattatattttgctttccgctaaggacttaacaattttcactaatgtatattctagcttagaggctagaattgtggtaaatgaaactgatattgatagtttggactcaagctatgcttaa

SEQ ID NO: 409 - DNA, 1737 bp, Methanobrevibacter ruminantium
  source 1..1737: mol_type = genomic DNA
atgaacactgcagagattttagtcaatttgcttgaaagggatggaaatgaatttatctttggccatccaggtgaacagatacttccattttataaggcattgaaggactcttcaatcagccatatcctaacaaggcatgaacaagctgcagcccatgctgcagatgcatatgcgagggtttctggtgaatacggcatttgcatatcaactgcaggtcccggtgccatgaatctggtcatgggagcctccacagcattcaaggattctgttccaatgcttgtgataaccggagacaatgactatgataaaaaggactctgacatttttcagtcatttcctataaactctgtctttgagaatatatcaattaaaagcttccatccttatgatgggaaatccgctgtttacaatatgattgaagcattgattcttcttcataagtttccaaaaggtcctgttcatatcaatctctctagagatgtacttttagaagagattgattttgattctattgatttaagagatattggtctatctaatattccttctttgaatcttaatgattctgatataattgaaaactttgatctttttgatgattctttagataatttatatgacttttcacaaaagttatccgctgatgtagatataactattcaatcagctattaaaaaattaaaggattcgtcaaaaccattagtcatactaggaaatggtatagtttggtcaaaagctacttttaaattaagcgactttttaagtaaaactatgcttccagttgttaccacatatcactcaaagggaatagtcagtgaccatgacagattgaaccttgggatagtaggtcttaggggaaactcattgtcaaattatgcttatgagaattcagattgcattttggttctaggtgccaaactctctgaacgtacaatcggtgcttccgactttgacattgccaaggaaaagatgatacatgttaatattgatgagaattgcttaaagggaaaaattaatatttgcatggatgttaatgagttcttggactgtcttttggatgaattagatcaagataatggaacatttgattatgatgatggatggatagatgagatctactccaattatgaggaattgattgttggtggaattgaagaagtggaagaaaactttaatccattaaggcctccttatgcgattaataggattatagatgcttttaaaggagcatatttcctatcagatgcaggaacccatacgacatggactactttgcttgcaaaaagcgattcattcggcaagcttttgttttcaggtggctttggtcctatgggatatagccttccagggtccattggtgttgcatttgccttaaagaagagaggaattgatgaaagggtgcttgtcatctgtggtgatggagatattcaaatggtaattcaggaattggctacaattagggaatatgatttgaatattgatatttttataatcaataactctcagttaggaataataagacaatgggaagagactgtttatgactttgataagtatcaggttgaccttattaatccagactttgctaaattggctgatgcatatggtgttgattctatgaaggtggaatctaaggaagaccttcaattggctattgagatgtctttggattcaaataaggcatttttagctgatgtatgtgtttgtgaagagaatattcctatgcctaaaaaatag

SEQ ID NO: 410 - DNA, 348 bp, Methanobrevibacter ruminantium
  source 1..348: mol_type = genomic DNA
atggatggactagaaataataaatagcttcaataaagaaacaatttacgaatttagcgaagcttttaccatatttgaagatgaaatatatttcatattcaaagtagatatcatttcaatcaatgcaaacccatccaaaactaaagataaaaataaaaataaaaataaagagaacaaagataataaaaaagctcaaagaataatatcccatttagaaatagagccaatagcttatctattaaaaaaagctgaaaatgaagattatcaaatagaagcgattgatgaaaaatacactgaatttattggaaaaaataaagataaactcttaaaagagtttttaaaccaataa

SEQ ID NO: 411 - DNA, 849 bp, Methanobrevibacter ruminantium
  source 1..849: mol_type = genomic DNA
atgatcttaaatcttattttaattatactaatcgccttaattatcatattttcaataatcctatacaatggtttaagaataattctaactgttgaaaaggaaaaagcagaagccagatacaaattaaagataactctgcttaaaatccctatttttacaaaagatagctctgaagacaaggctacagaatccgaagaggaaaaagaagaagatggagaggaagaagagtccaaagacaaaaaaggcctgatggaaaaatacaatgaaattaaacctatcctaaaagagctaattaaatcaaagaaagaattaaagaaatatctaaaggacattctaaaatcaattgatataaagaaactcgaaggacacttgatactaggcctaagcgactctttcaccacagtcaagatagcaagttggatatggtcaataggagctatagtaaatagtaaaaagccagtttcattaactgtagatcctagatttacagagataatcactgattttgaaggacaattggaattaaagataaatctactgaaaataatattttatagcttaattttagtaagcaaaaaggacattagagaattgattaaagtaatttatgcttataaaaaagccaaagataaagaaaatgaagaaaaagaaaactccaatgaagaattatataaaaaagaaaaagacactgaaattaaagaaaactccaaagaagaattatataaaaaagaaaaagacactgaaattaaagaaaactccaaagaagaattagataaaaaagaaaaagacactgaaattaaagaaaactccaaagaagaattagataaaaaagaagaaaaagaaacttaa

SEQ ID NO: 412 - DNA, 516 bp, Methanobrevibacter ruminantium
  source 1..516: mol_type = genomic DNA
atgattgatgaagaaccaattaaaacaactgtagaagaattaagaaagcttattcacattagcaactatattggagacgcaatagaaactgaagacaaattattaatccctgtatccaaagctgcagtaggattcggaataggagagcaaaaggctgataattcacttgccggaaccggtgcaggtgtaagcgttgaacctataaccatggttgtcgtatcaaaaggaaacagtggagttgatgaaataaggacaatcaacctatcaaaaggaaaccaaaccaacaagacattaaacgaaatcggattaatcctaactgatgtcttaaaagagttcctcccatcaaaaggcaatgacgactacatagatgttgatgacgtaagtgaagttgatatccaagacgcagacataaaagaaaaggtcgaagatgctgttgaagaatcagacctaaaagaaaaggttgaagaagaagtagaagaagcagaagaatcattaggcattgaaatagatgactaa

SEQ ID NO: 413 - DNA, 1167 bp, Methanobrevibacter ruminantium
  source 1..1167: mol_type = genomic DNA
atgaacgaaatattattaatgctcccaggtccaacaactgcagacccaagagtattacaagcaatgagcaaagctgttgtaaaccacagaggagacgaatttggagaaatctatacagaaacaaccaaattaatgtctaaaactttccaaactaaaaatgattcttatatcctaacaggttctggaacttctgcaatggaagcagcagtctcaaaccttgtcaacagaggagataaaatattaaatgtagtaggcggaaaattcggtgaaagatttgcagacatctccaagatgcatggaatcgaatccgtacagttagatgttgaatggggaaccgctgtaactccagaccttgttgaagaagccttagaaaaagacgaagacattaaagcaatcaccatggtacacaatgaaacctcaaccggtgttgccgcacctatcaaagaagtgggagaagtaatgaaaaaccacgatgcattattcattgtagacacagtatcctctttaggaggagactatgtggatgtggacaaataccacattgacgcatgtgtaaccggttctcaaaaatgtctcgccgcacctccaggccttgcagcaatcacattcaatgacgacgcatgggcagcatgtgaaaaggtagaagacaacaattactacttgaacatgcctaaatacagagcaaacggtaataaggaccctgctcaaaccccttatactccatctgtatcattgatctatgcattaaaggctgctcttgaagttctccatgaggaaggtcttgaaaacagaatagaaagacaccacacagcagcagctgcatcaagagatgctgttaaagctttaggtcttgaattattccctgatgaagctgtatcctctgcaactgtaactgcagtaaaaatgccagaaggagcaaatgacgaccaaatcagaggaaccatgctcaacaaatataaagtccaattagcagggggacaagaccaccttaaaggaaacatattcagaattggacatatgggtgtaatcaactatcaagaattagctatcactttcactgcattaggattaaccttaaaaggattaggattagttgaagatgcaggtgccggtgtggctgctcttgcgaaccattacatcaaattcaaacttttagaaaaagtttga

SEQ ID NO: 414 - DNA, 1101 bp, Methanobrevibacter ruminantium
  source 1..1101: mol_type = genomic DNA
atgagttttagaacaaaaagagtaattatatccaccttattagtaatgatatatgaattctttctgatgaaatatctttttttactctttggaggattggatgacatttatttgcttttactcactattttattcggtatattgaatatggttcccatgttctttgaggaaaagaagtcaaggcctattacaaggcttcttgatacgatatcaggattttggatatggatgtctctcttttacttatttgtcatattgattatctatatcggaggagtctatattgattggccgttttatattatagtcattctagttcttcttgttccattattgacagtctattcctatttccatgcacataagatcattattcatgaaaggacaatccaaatggataatattaatgaggatatcaacattgcccacctttctgacgttcatttcggctcaacaaggcatgataagatcattagggatctttctgataaattgaaggagctttcagattattgtgacttggcaattatcagtggagacattgttgatgggtcctctgctattgaagaggatgattttctacctcttaaggatgtgaatatgcctatagtctttacaccaggcaatcatgactcatatctggatattgaggacgtctttggggcatgcagaaatgcaggcattattgttctagacgatgagggaatggaattcggcaatcttaatatatttggaatgacattcatctttggaatgacccgcaagtttgaagagtttgaagtagtcagcacaggtgtattaggggatttcgttaaggaagataaggtgaatattatcattttccatgttcctaaaaactgggaggacttttctaaattaggatttgacattcaattgtctggccatactcatggaggccagttccatccacttacttggatatgcgatcttatttggtataacagaggtctttttaaagctaatattggtggcaaggacaggtatttgcatgttactactggtgtaggctctatggattatccttttagatggggtactgattcagagatagttgttctaaaattaagaaagaatgattag

SEQ ID NO: 415 - DNA, 1266 bp, Methanobrevibacter ruminantium
  source 1..1266: mol_type = genomic DNA
atgcttaaaagaacagttaaaaagaatggagatgaattatttcctcttggattgggagctatgcgacttccaactaaaaacaattcaattgataaggatttggctcgtgaatttatcctttatgcaattgacaatggaataaattatatagacactgcatatgcctatcatggtggagaaagcgagtcctttttaggagatatattgtctttaactgattccgatggagtaaaatacagggataaagtcaaattgtccaccaaatcaccttcttggatggtaaggtcaagggaggactttgatgcctttttaaatgaacagttaaggcgacttaaaacagactgcattgattattattatcttcatacaatcgatttaagcatattagagcgtcttaagggattgggagtttatgagtttctagaaaaagcacgttcagagggaaagatcaagaatattggattctcctatcatggcgcacctaatgagttcaatgacttgattgacgactatgattgggacatggttcttgttcaatacaattatctggatgtgaatgcacaggcaggaattcgcggaatcagatatgcatatgagaatgatgtggctgtattcattatggaacctttaaaaggaggaatactcgctggagaattgcctaaggaagttgatgggctgtttaaaggtgtcgattccaataagtcttcagtggattgggctttaagttgggtcttaaaccaaaaggaagtcacttgcgtactctctggaatgggttctatagagcagataaaggaaaatatgaatattgcagagagagttgaagtggattcattgtctgatgatgaattggctgtattggagaaggctcaaggaatcttcaattcaatgatgaaaataaattgcacaggctgcggctattgtcttccttgccctaagggagtaaacattccagattgctttaatatttataatgagaaatatttgtttaataaaaaagcatttggacctattcccggtgctatggtgaattattatatggttgttggtggaataaccaataagcagtcaaatgcaggtctttgcaatcattgcggtaggtgtaaaagattgtgtcctcagtcattagacattccaagccatttagatagtgtaaagtctgaattcgagaagtttggatttaattatcagattaagtttattagaaatattgcaatgccttctataaataagatatctaaggtatttgatgtctttaagcattcttaa

SEQ ID NO: 416 - DNA, 4308 bp, Methanobrevibacter ruminantium
  source 1..4308: mol_type = genomic DNA
ttgtacatctcagagatagagattaatcaaaacattatcctaaacactgaaggcaataaaatatatctaaacaattcccctaaaagcaatatacacgataactggtttggaaacactctgctgaactatgatgaggtgccatatgaaggctgcacaaattggatattcctaaatggagaaagcaaccaggtctcactggagaatccgatcagctttgaaatcacatttaccctatcctctttcaataagaatacaaagaaaataagcaactatgatgatagaaagcttccattcaatctaacagcacatgcagagcatggaatcttaaatccgaacagtaatcttttaggaaaaacaacaatatatgaaacagaaatcatcaatgttgagagaataatcggaaatattgcaaatatagattcagaatttgaaataatggagtttttagtcactgacggaaccacattctatgacttgaaccaactcatcaacaacaacagcaataatgaaatcaatataagcggaaattacacatatcatgatgatatagactttgaatttaaagagggaatcaatgtcaaccgcagcctaatcattaatggaaacggatttacaataaacggattaaactcctcacgcatcttcaatataaatggagacaatgtcacaataaataatatttcccttataaacggaaatggatatgaggacacctacgacagtgacggaggagccatatactggaaaggagctgacggaaccctgattcaaagcaatttcacaaacaacagcggatataatggaggcgccattctctgggaaggagacaatggaagaataataaacaacacattcaaaaacaacagcgcattcgatggaggaggtgccatcaccataacagtagagagaggaataataataaacaacacattcacaaacaacagcgcatcctacgatggaggcgccatctacctaatagcaagcagtggagagataataaacaacacattcacaaacaacagcggatataaaggaggcggaatgatctgctatgcagataatctaagcatgatcaacaatacaatggaaagcaacattgcatccgacgacaatggaggcgccattctctgggaaggagaaataggaagaataataaacaacacattcaaaaacaactacgcctctgaagaaggaggggctatcagcataagaggagagataggagagataataaacaacacattcacaaacaacaacgcatcctacagaggaggagccatcagcataataataactagtggagagataataaacaacacattcacaaacaacagcggatatagcggaggaggaatactttgctatggaaataatgtaagcataatcaacaatacaatggaaagcaacattgcatcctacgatggaggagcactttacgtcagcatggattatgcaatgataataaacaatacaataaaaaacaacaatgcatccgacaatggaggagcaatctactgggatagatataagggaataataagcctaaacacaatcgccaacaataatgcaaatcatgggggagcaatctactatgagggatattcttcaaatcttaactataacatcatcttaaacaataagaatagtgaaatctatttcgacaatgtcagaactttcaacggaagcaataattggtttggaaacaatgcaagcaattataatttgaatccaaacactagcttcgaatatgacaatagcccaaatgtaacccttagtgattggctatttttaaatggaacagcaaatccaaaaatagtgaatgcctttgaaagctcccaaatcttatttaaattatattcctatgacggaatattgataagtgaatatgacaattccctaataacagacaccaagctaaacttaagtgcagaaaggggaagatttgacaagacaagcgccagtttcaatgagccgataaactatactgcaatagaagggggaagagatacaataagaggagcaatagataagagtggatacagcataaatctaacaaacaggagagtatcctcaaaaattgcaatggatactaaagagataaactatagcagaaatgcatcaatcaagcttaattacaatgactttgcaggaggaaatgtcacaataagactaatgggagaaaataatgaatacctctttgaaaacatgaccctgaacaagacaatattccttggagtcataaatagggacagttacaacgtaagaatagaatattcaggagataggtcattcctagaggagaacataagcgaaagccttatagtgaataaggcaggaacaaaaatagttccaacaaatgacacaatagacctaggcataggagagaactcaaaagtcaactacactttctatgttatagatgatgaaggccaatacataactaacccagaggacattggaaacataagcttcaagtcagatggaagcgcagtcgaagtagattcaaagacaggggaaataaatacaattaaggaaggaactgcaaacatcctaataagattccaaggagatgaaaaccatcttgattccaatgcaagtgtatatgtaatttcaagtaataaaataaggaccaaaataacagcagaaaacctaacaacagattataaaaaggatgactacatcatagcaagattaaccgacctcacaggaaaaccgatagccaatgcaaagctgattgttgaacttaatggcacaaataactatacaactaattcaaagggagagataaaagtcccaacaaaaggattggattcaaatgaatacatagcaaagatcatctatgaaggagatgaaagctacagattttcaaatgcaagtgtaagactaatagtgaataagctaaatacagaaataactgcaaataatatcacaacaatctataatataactaaagaattggtgattagactaaaagacgtcaatggagacccagtaagcggggttgaactaactgttgacctgaacggaatgaataattatacaacagatgataatggacaagcaatagtggaaataaaaggattgattcctaacaattacacagcaaagatcacatttgaaggcaatggaaactataacaaggccagcacagaatcagatatagaaatattaaaaattccaagcattttaaatggaacagacatgacagtaaactataaggaagataaatatttgacagttagcctaaaagacaaagataataagcctatccataatgcaagtatctcagttgaattagagggtattaaaaattacactactaattctgatgggcaaataaaagttccaacaagcagtttacctgcaaaaaaccatacagcaatgattagatttgaaggaaacgaaatttacgaaaaatcaaatgctacagcgaaaataactgtaaataaaatttccggcaaattgactgcaagcaatgtcactgcaagatatggagacaatcagaacctagttattagtttaaaagacagcaagaaaaatccattaagtggttttaaagtgtctgttgacttaaacggcaaaaagaactacactacagattcttcaggacaaatcaaagtttcaactaaagatctagttccagacacttataaggcaatcatagtctttgcgggaaatgagaactatacaggatcaaatgcaagtgcaagtgtgagaataaatagaataaatacaacattcaaatacacaaacatgaatacaattgcttttgattcaaatatagaaggacgtattggagaatatttccgcttccaattgttggatgaagatggaaaaccattatctggcaaacaagtctttattggatttaatggagtcaaatacaatagaacaacaaatgaaacaggagaggcaaggcttcaaatcaacttaaaatatgtcaaccattatacctttgcaatagcattcttaggagatgattattataagggaagctttaatgttgctttaatcaatgtgactgaacagattccagtcttaagcacaagtgctaaaacatataaatcaagtgcaaagaccaagactttgactgctactcttaaatcatctagaggacatgtccttgcaggcaagaagattagttttacacttaatggaaaggtatacactgcaaatacaaacagtaaaggtttagcaagtgtaaaggtctctttaagcaaaaaaggaacttatagttttacagttcagtttggaggagacagtacttataagaaggtaactaaaagttcaaaacttacaataaaataa

SEQ ID NO: 417 - DNA, 1392 bp, Methanobrevibacter ruminantium
  source 1..1392: mol_type = genomic DNA
atgaaattcaaaaaatatttatttattctgctaatagctcttatttgcataatcagtgtctctgcagttgctgcatctgatgcaaatgaccctattagccaagacaataatcaaggactagttttagaagaaacaaatcaggatctttcgataactaagactaaagaaatagtggaatcaagcaccaataaagaaattagcctagaagacaacaaagttatttctaaggaaaataagaaaacaagtcttaaagatgaagaaacagactcattcaccaatctaaataatctaataaacatagacaaccccaacaaccatacaattagcctaaattgcgattatgtcctcttggaagaggactgcacctacattgacactgaaatattaagttcctcaaatcttacaacatcccacatcttaagggatgagggaagcctgccgattgacttgaatccaaaaacatataaagcccgattaatggttgaaaattccaatgaccaatccattgaagtgataaaaaccacaaatatagaaggatcctcattctggctcttaaatcagaccataaacaataacagcaatagtgaaatcacattagatagcaattacacatttaattccagcgcagattccggatttataaatgggatatacatcaaccgcagcttaaagctgaatggaaacggcattacaataaacggattggatgaaggacgaatcttcataatcactgcagacaatgtgaccattacaaacgtcaattttgcaaatggaaaatctgacaagggaggagccatcctatggcttggaaaaaatggaaatatcagcaactgtaactttacagacaatatggcaacatctggaggagccatcttttggggaaatacaaatctaacagattattatagcaatggacaaggggatgacggcaccataataaactgcaatttcattggaaacgaagcccaaaagggaggggcaatgtttttccataccggcggagccaccataaaagatggttgcaccttccataacaatactggaggccaagagggaggagccctattttggcttaactatggcggaaggatagaaaataactgcaatttcacatttaacactgcaaaaggttctggcggcgcaatctattgtcctcaagtagagatactcaataactgcattttccaaaacaacacagcccaatccaaaattgaagagagaataatgaaaggagggggcgcaatctatttacagaaaggaggaacagtaagagactgtacattcataggcaatattgctttaaacgacgaatcagatggattgagattttataaaggaggggagccatttacattgaaaggaatgcctccgtttccaactgcaccttcatag

SEQ ID NO: 418 - DNA, 4176 bp, Methanobrevibacter ruminantium
  source 1..4176: mol_type = genomic DNA
atgaaattaaaaagatattcatacataataatgatatttcttgtttgcatgataagcatctctgcaataagtgctgcagatgactcatcaatagctactgacgattcaaacaagataatcaatgataataacaatcaggacattgtattagaagaaaatggaccctcaacaaatatagctttagaagacaagaattataaaattgaaaagccacagcttaaggaaaatagcccaggcaattttaccgatttaaattatctaataaatgaggatgaaaccacccgccataacactacaatcactttagaccgtgactacatcggcggtgagaaaggcataagaatcgatcgtcccctaatcattgacgggcaagggcatacattaaatgcatcccaaaataacagagtcttccatattacttcagaaaatgttacccttaaaaacatcattttcacaggaggtagatcagattatggtggcgcaatttactggcaaggagacaatgggaagataatcaattgtaactttacttacaacacagccactaaatatggcggtgccgttttctggggagatgacgaatttgaaggtacagctgaccaaacaatagctaaagatggaattataataaactctaatttcatctccaataaagcgaatgtaggaaatggagaggcctgggaaaatggcggaggcggagaaggtggtgcagtttactggtatgccaataatggaaccatatgcaactcctatttccataataatcgtgccggtggacaaggaggcgccatcacttggaaaggaaatgatgggatcatatgcaataacaccaacttcactgccaatagtgcaggagattctggcggtgccgttttctggcgtggagataacggaaccataagcaataactgtgagtttaataataatatagcctatggtcgtaccagtgatggcatatccagaggaggaggagctattttttgtcatggcgaaaatggtaagataagcaactgctcttttatggaaaacagtgcaaaacctgaaagtgaaagcggtaaaggaggaggagcaatttatgctgaatataatactttcatcacagattgcatttttataagaaactctgcagattattatggaggtgcaattctcatattcagaacaggtgatgtctatagaaatatctttataaacaacactgccttaaacggcaacactataacattaaaaggaataggccattcaaccataacaaacaacattatcctaaataagacaaatgcaatctactggaatgaatccgactatacaatcgaagctaattggtttggaaacaatgctacacaatattcagaaccttatgaatactcacaaacctggttgtttttaaatgcaacagcaaatccaaaccctgcaccattcaatattccaactgaagtgaaattcaagctatggctctacaataaaaagactaaaaaaataacagaatatgacaattccttactgccaactatccaattaagcttaagccaaacaaagggaagcattaataaggagactgcaggattggatgacccaatcaactatactgcaaatgaggtaggaacaggaagcataactggaaaaatggaatggataacagatagcatcttctttgaaatcgtaaatgaccctaaattagaggtatctgttaatcctagcgaaatcgactacggagacaatattaccctccatctcggatatgaggatgaggctacaggaacagtaaacatcagctttaaaggaagtacacacgaaaaaacaatagaaaacattcctttaaacaagactatcacaattacagagtccattttgccagacgaatataccgttactgtattctattcaggagataatcaattctcaagagcaagtaagaccgcagatgaaaaattgaaaataaatcaaaagaatccgaatatgacagtgacatcctatgagatctatgtaaatgacactaacggagtcatgtttagcataaagctagataaggatgccacaggaaagataattcttacaggagacattggaagggaaatcaatctgactgaaggcagcataaaggatgggaaaagaattattgaaattaaaaacaatggttttgatcttggcaaatacaatgtcacattttcatatcctggagatgagatatattgggaatatgaaacaactgccctctcagagattaaagtcatagaaaccaaaataattccacaaaaggaagaaatagtcttaataattggcgataagtcaaagataaactataccataaatccaagcaatgcagttggagatgtcactttcacaagcaatgacacaaatgtggtcaaagtcaatggaagcggagatattgaggcaatcgataaaggacaggccacaatcacaataaaattctctggaagcaaagactatgccccttcaaatgcaactgtaaacataacaatcggcagggaaatggctaagttaactgccgaaaacattactgtaacatataatgctgaaggataccttaaggttgccttaaaggatagtaaaaacaagtcaataagcggagccatattgattgtagacttaatcaataaaacaaattacactacagactccaacggagagataaaagtcccaacaaagtcattggctgctggaaactatactgcaagcatagaatttgaaggaaatgataagtacttgccagcaaacacaacagcaggagttacaatcgagaaggataatcctagattgacttcaaacaatatcacaaacaaatatcatactgaagattacctgatagtgagcttaaaggacagtgcatcaggacctataagcggtgccgagcttactgtatacctaaatggaagcgaaacttataagacagatggaaacggacaaataaaaatccctactaaagacttgcttccaaacatatatgtggcaaatataagctttgcaggcaatgaaaactacacagaagcaaacgcaagcgcaagcataaacataactaaactagatacaaggctgaatgcaacagacacaatcacaaaatacaatgtaaataaagatatgatagtcaccttaaaggacattgatggaaatgccataagcggtttgaatatacttgtagatctggacggagttaaaaattacacaacagactccaacggagaggtaaaagtgccaacaaagtcattggctgctggaaactatactgcaaacatagcatttgaaggcgacaatatctatattggatcaaatgcaacagcaaaggtcacaatagaaaaagagagcaccgaaataagcgctacaaatgtcagcgcaaaatatggctcaaaccaaagcatgatagtcactctaaaggacagccaaggcaatccaataagcggagctaaagtctctgttgagatagatggcaaaaaggactacactaccgactctaatggacaggtgaatgttccaagcaaaaacatagttccagacacttacaacgcgaccattacttttgctggaaatgagaactacacctcttcaaacacaagcgcaagcgtggtcataaaaagagtcaaaactgcacttaactacacagacatgaatacaactgcatttgattcaaatattgaaggaagagtaggagagtatttcagtttccaattgcttgacgaatatggaaagccattatccggaaaacaggtcttcattggatttaatggagttaaatacaaccgtacaacaaatgaaacaggagaggcaaggcttcagataaacctgaaatatgcaaacaattacacatttgccatagcattccttggagatgaaaactatagcggatcattcaattttgcaattatcagtgtaagcgaacagactccaagcttatccacaagccctaagacatataaggcaagtgcaaagacaaaggcattgactgcaacattgaaatcctataagggaacagcaattccggacaaaaagattacttttactgtcaatggaaaaacatatagtgcaaataccaattcaaagggcatagcaactgtgaatgtaagtctaaacaagaaaggaacttataactttacagtccaatatgcaggagatagtacttataagaagataagtaaaagtgaaaagcttactataaaataa

SEQ ID NO: 419 - DNA, 789 bp, Methanobrevibacter ruminantium
  source 1..789: mol_type = genomic DNA
atgaagaatatattaatatccaatgatgatggggttatgggtcctgggatattggctagcaagcaggctcttgaagggcttgccaatgtggttgtcgtagctcctcaggaaaacaacagcgctgtaggccgcaaggtcaatatcatgaagcatatgtatttggaaaactatgaattggctgatggaagcatggcttatggcttgtctggaactcctgcagattctgttaatgtggggattaattatgtgtgtgatgaggttccagatcttgttgtaactggaataaatcctggaataaacatcagcagattgcagataacaacatctggaactgtctgtgcagcgattgaagctgttggtttaggcattccagccattgcatgctcattgtttttggatgacgattgctttaagcaggatgatgagggcaattggtatgtggatacagattacagttttgctcaaaagatccttgcaaaacttgtaaagaaggtattggatgagggcatgccagatggcgttgacttatttaatcttaatattccatctaagccattatcggataagattaagattacaagacttgcagatagcatgctgaagtttaatattcttgaaagggttgatgatgatggcaatgatactgtcatgaatgttccggaactgattgaggattatgaggaaggaaccgatggatattgcttgcttgttgagaggaggccaagtcttactcctttgaatgttcattttggtgctgaaattagtaatttggaagattgggagttttag

SEQ ID NO: 420 - DNA, 735 bp, Methanobrevibacter ruminantium
  source 1..735: mol_type = genomic DNA
atggatataaatgaatgggaagaatggtatgaagagattcttaatacctttggatttcgtagggaagatgatgagaagactgcagacctattggatgaaatccttgcagatcatggttttttgaccattgatgagttctatgatgagatcatgcttaagaagggatacactgataagtttattgtctttggagcaggaccttcattgaaggagcatataagattcttgaaggaaaactatgacttaagcaaatacatgcttgtatctgccgatggggctacaacagcccttttggaagaggatgtcgttccagatattgttgcaactgacttagacggcaagatgtctgaccttttgactgcaaattcacttggctcatactttgtgattcatgcccatggaaacaatgaggagcttattgacctatggacaacaagctttaataagatccttggaacaacccagtctgttccagtaggcaatctctataactttggaggattcactgatggagatagggcaatgttctttgttgtagagcttggtgcaaaagagatggttcttgctggaatggactttggaacagttgtaaccaagtattcaaggccaaacattgagggtgagacaggccctgccgatgagataaagactaaaaagcttatttttgctgaaaggttattaaattggattagggaaaatgaggatgtggaagtgattaatttaatcgatagttaa

SEQ ID NO: 421 - DNA, 627 bp, Methanobrevibacter ruminantium
  source 1..627: mol_type = genomic DNA
atgaaagaaattgaatttgacttaaagaacaatccgttttataatttcctatcttcaagatatagcatgtctgcacgtttgaatgtggagaagatgtggaattattcaaaggaaaatgatctttccttttttacattatctcttgctgctttaatcaacagcttgaatgaaatccctgaaatgagacgaaggatagtgaatggaaaggtcattgaatatgattatctggatgcagtttgcccgataatggatgaggatagcggaatctataaggagatgagggtaaaggctccccagagatttgatgagatattggattggcatgattatgttcaagagcatgaaaggaagattttaaatggaacagaagacgcttttgaggtgaagactaccgaaagagatgagctgaatattgccaatttctcttgcattccttgggtggattttgattcaatcacaaattgcacagcaagctccaatcagattcagcctttgataacttggggaaaggtcaatgaggattatgaaatgactgtggctataacagttagccatatctttgtaaatgggcgagagttagcttatttttatcaattcgctcaggacaattttaataatcttttttag

SEQ ID NO: 422 - DNA, 1119 bp, Methanobrevibacter ruminantium
  source 1..1119: mol_type = genomic DNA
atggcaatagaagatattttgatgtttgacgagacaatatttaatgatataaatgcattcaatccagactatatgccacctaactataattttagagacagtcagatggaaggaatggctatggctatacgccctgccataagaggtggacgtccaaccaattcagtaatattaggatcatgcgctacaggtaagacaactgcaattaaaaaggtatttgaattggttgaaaagactacagataaagtggtttgtgtttatatcaattgtcagcttcacactacacgttttggaatcttttctcaaattcataaaaagatatttggacatcagcctccagagactggagttccattctcaagggtatatgaaaaggttatggataaactttcctcagatggaaagtctcttattgttgcctttgatgatgtaaactatctattccagactcctcatgcaaacaaggtattctatgatatccttagggcctatgaggaatatgaaggggtaagaacaggaatctttgcaatcctttcagacttggagtttcgattcgcccttgacaagaatgtaaataccgtattcattcctcaagacattgtatttccgccttataactatagcgagatattcagcattctaaaggatagggctaaggcaggattcttcccaggtgttgtctctgatgaaatcattgaagagatagccaatcagacctatgaagtaggtgacttgagagtgggaattgaccttttaagggttagcggaaacattgccgaatccaatgcaagcagaaccatagaattggagcatgttgaagaggcagttgcaaagcaaggctctgttaatcttatggaaacaatcaattcattgaatgacttagaaaaaaccatgatcaaggtcttaattgatagggatgaggttgttacagcaggagcattgtctaaggaatttaaggagcaggctggagtaagctatgcgacattcaacagaacccttgaaaagttggaattcttaagattggttgatacaaggtatacaggaaaaggagtaagaggcaattccagggagataattttaagattctctccagaggatattaaacgttgcaatctttag

SEQ ID NO: 423 - DNA, 192 bp, Methanobrevibacter ruminantium
  source 1..192: mol_type = genomic DNA
atgatggtaagccataataacagaacttgtgatttaagaaaaaaacaaaatttaagagatcctttgactttcaacaaccttagaataaacattaaagattgcatggtaatatttgtagtgtttacagtattgcttttatctattttagctgtaagtgcagctccaagcccagattttatgctctgggtataa

SEQ ID NO: 424 - DNA, 474 bp, Methanobrevibacter ruminantium
  source 1..474: mol_type = genomic DNA
atgattttaattcattgtggtgcaattatgagtgaaaataatcaaagggagaaaaaattcgaatattttgaagttactgcagatattggattttatgcttatggtaatactctggaagaggcttacgaaaatgctgctttagctatgtttaatgtggtgactgatatagataaggttaaaactagcgaaacccgtgagtttgaggtcgaatcagaggatttggtttctcttttatatgattatttggatgagttcttattccttcaagatactgaattcttgtttttcagtgagtttaaggttgatatagataaaacagaggatggttataagttaaattgcattgcatctggtgaggaaatcaattgggacgttcatgttccacgctctgaagttaaggccatcacttttcataagatgtgtgtaaaaaaggaagatggtgtttttaagcttagggctattttggatttgtaa

SEQ ID NO: 425 - DNA, 1449 bp, Methanobrevibacter ruminantium
  source 1..1449: mol_type = genomic DNA
atgtcaattagagaaagtcttgtaaaagttagagaaaatgtttgggaacttccaagtgactataagaaggaaatgagagttcctggaaggatgtatcttgatgatgaagctgtaaagaccattgaagaaggtgctcttgaacaggtttcaaatgtggcctgcatgcctggtattcaaggggcatcaatcgccatgcctgatattcacttcggatacggtttcagcataggaggagtaggtgcattcaattataataacggtgttgtaagtcctggaggagtgggctttgacattaactgtggagtaagaatgcttaggaccaatcttactgaagatgaaatcaagccgcatcttaaggagcttacagaggttctctttaaaaacattccatcaggtgttggaagcaaaggtcagataaggcttaaggacaatgagatcaatgaggttcttgattatggtgcctggtgggcagttgaacgtggattcggctgggaagaagacctaaaattccttgaagagaatgggagaatggaagaggccgaatctgaagtcgtaagcaaaaaggctaaaaaaagaggagttcctcaattaggttcattaggttctggaaaccacttccttgaggttcaaaagattgaggaagtctatgacgataatgttgcaaaggcatttggtctagagcctggaaatgttacaataatgattcacagcggttcaagaggctgcggacaccaaatctgttctgattatttaagaaagatggataaggcttatagaaactataagatcaagcttccagacagacaattggcatgtgctcctattgactctccagaggctacaggataccttaaggctatggctgcaggtgcaaactatgcttgggctaaccgtcagatgatgtcccattgggtaaggcaatcctttgaagaggtatttaagagggatgcagaagatatgggaatgagcacaatctatgatgttgcccataacattgctaaaaaggaagtccataaggttaaaaattcccatatggaagttcttgttcacagaaaaggtgcaacccgtgcattctgtcctggaagacgtgagattcctaaggaatatcgtgatgtaggtcagcctgtccttattcctggaaccatgggaaccgcttcatatatcttgcatggtactgatgttgctatggaagagacctttggatccactgcacatggtgctggaagggtattgtccagaactgctgctaaaaagcaatacactgctaaggatattgaaaaagaattgaatgataagggaattcatgtaaaagctaattcagctcctgtgttagctgaagaggctcctggtgcatataagaatgtggattctgttgttaagacctctcacgatgctggcattgctaagctggttgctaaggttgttccactagcagttacaaaaggatag

SEQ ID NO: 426 - DNA, 774 bp, Methanobrevibacter ruminantium
  source 1..774: mol_type = genomic DNA
atgattgcaattattggaggaagcggtgtcgatgagattacagacatggcagaatcaatagagaaaaagatagtagataccgaatatggctctgtacaggtttctctatttgaaattgaaggaaaagaagttgttttccttccaagacattcagaaggacatacctgtcctccacataagattaactttaaggcaaatatcatggccttaaaggagttaggggttagtcagattttagctacaaatgcagtaggttcagttgatttggaaattggcccgggatccatagtaattccagatgacttcttggactttactgtaaatagggataggacattctatgacgatgatgttgttcatattgacatgagcgagccttactgcaataggcttagaaatgcattgctagagaattctgattgtgtaaatggaggtcttgtagatggtggaacccatatttgtacagaaggacctagatttgaaactccatctgaaatcaggatgtttaaaatgattggcggaactgttgtgggaatgactacattacctgaagctgttcttgcaagggaaaaggagatgtgctatgcttccatagccattgtatccaattattgcacttccattgccaagcataaattaggagtggaagagataattgaaataatggctgtaaaaaaggaagaattgattagtcttctgtttaatacaattaagaatctgcctgtagactatgattgtgaatgccatcatgcattaggtgatgcggagttttaa

SEQ ID NO: 427 - DNA, 627 bp, Methanobrevibacter ruminantium
  source 1..627: mol_type = genomic DNA
atgaatataaaagagttatttatagaatccctaaaagacaataagaaactaataataggactatatgcattttttataatagttttcattgcagcttggattataaccggtccgaaaatgcaggccattgcaagcaatgtaactgcaatgaatggtcctggaggagcccaaagcagcgcaattgaacttttcatccataacgaacttggaggaatcattacataccttgcatcagtattctttggaattgctgcaattgtattgctaggatacaatgcattaaatttaggaagcattggacaattattcaatcatttcatgccaaatggaggaatcttatacctaatttacctaattccccatggaatatttgaaattactgcaacagtccttcagtccgcagctggaatactattgttcctattcatttggaggttcataaaggcatttagaagcaaggatacaaatggggcctctgacgcatttgagatgactaaaaagacactgattcagagcatagtgctaatggttattgcaacaatcctcttacttattgccgctccaatcgaagcatatttctcaactgcattttcagaatttattatggggtttttaggacttagataa

SEQ ID NO: 428 - DNA, 393 bp, Methanobrevibacter ruminantium
  source 1..393: mol_type = genomic DNA
atgaatgaatttggacaattacaattaatctggattagaagacttgcaagagaaactggtagaattactgcattgatagaagctggaaatctttctgtaattgatttggtcagatataaaaagagcatttcatcaatggatggattttgtcgttttgtaattgaatctcaagattgggatgatgttagaagaattcctgaaattgttgaagatgttgaagaaaagttattcttgcacttttatgaaatgatcgacagattcgatggagaaggagctcatttagacttttccaaagaagatgagggtaagatatgcttaaatttcgacgatgcttctttagaggacattgtatttacaatcattgatgacgaagacattgatgtgtttttataa

SEQ ID NO: 429 - DNA, 204 bp, Methanobrevibacter ruminantium
  source 1..204: mol_type = genomic DNA
atgagaaataatctaaaaatatatagggcaatagaaaatattactcaaaaggaattagcagatgaattaggcgttagcagacagacaattgtattgattgaaaataataaaaatgatccgtcattggaattagcctttaaaatagcccataaatttgatgtgaaaatcgaagacatatttattaatgattctaataaaaaataa

SEQ ID NO: 430 - DNA, 300 bp, Methanobrevibacter ruminantium
  source 1..300: mol_type = genomic DNA
atggaaaatcttttaaatttaaaatatacttgtaaagactgtgattttacttggataacattaaatggagaacatagcatttgtcctaagtgccatagtgaaaatattgatttattaggagaagtaaaggatttggatattgaagcaattcttgctcataataaaatgaggggaggatgttgtggttctgcacgtggaaaaggtcctttgacatgtggaaaaccaatgcctgaccatgcaaatccaaatattcctcatcataaccacaataagaaaacttgttgtggatacaatgaataa

SEQ ID NO: 431 - DNA, 1068 bp, Methanobrevibacter ruminantium
  source 1..1068: mol_type = genomic DNA
atgaatgtaagtgatttaaaaagagaccattatatgctaaagggtccccttgcaaagcaaggctatgactggtggtggcattccctcactgcatacaataaggaaactggggaaccaagacctttctttatagaatactttgtgtgcaatcctgctcttgctgaggatgagcctaccttaggccaagaccctaaaaacattgaagcagggaaaaagccatcctactgtatgctgaaggtaggagcatggggtaaggagcctaagcagattcataatttctattccatgaaggatttcgaatgtccagatgacaagttggatgttaagattggagagttcagcttaactgaaaaacatatgaccggatactgtaaggttacagaggaggaagcacgtgaccatccggagtacatgtgtgatgcaggagagatgaaatgggacttggacattgacaagcaaatcacttttaatgtgggatatggagctaacactctctttagaaaacttaattcatttgaaatgttttggcatgctgaaggaataaagactcaatacagcggaaccattgagcttgatggggtcgaatatgaggttattccagaaaagtcattcggatatgccgacaagaactggggagcagactttacaagcccttggctatggatctcctcatgcaatctaacaagcctcattactggagagaagcttaacaactctgcctttgaagcaggtggaggaaagcctaaggcatttggtatttcacttcctagaaagcttctgataggattctattatgaaggaaagatgtatgaatataactttgcaagattctggaatatggtaaaggttgatttcggatttaaggaaggtgaagagttgaatgaatggtttatcaatgcaagtaataaggacagcaagatggaaatgaagctttattgcaagcgtgatgagatgttgctctttaattatgaagctccaaccggtaagaagctacacacccgtctttggaatggtggtaacggctttggtgagataaagcttatgaaaaaaggacggcacattgattga

SEQ ID NO: 432 - DNA, 690 bp, Methanobrevibacter ruminantium
  source 1..690: mol_type = genomic DNA
atgttgtggacagattttattgttttggcgattgtttatatttatgtggttgcaatttttatactgtctgagaaggtcttaaagagcaggccagaggtctcccgtaagtttttacatattatggtaggtaatatgatatttgccatgccattcttctcagatccttggattatgcttttattcattaccttgcctgtaactgtggcactattcttccttacagagtactcccctattcagattgaaaacagcgttaccgaatccggacatgcattaggactcctcttttatgcattgatttggtccatattgctctttgtctacccaatcatgcttgatcctaactatctttggattgtagcaatggcaatcgttccattggtatatggtgacggatttgctgctcttgttggaggaaaatggggtacaatcaaatatcatgtatttggaggagagaaaactgttgtaggttcccttgcaatgctttctgtaactgcagttctttctgtatttgtttgggtgttctacagttcaataggatacactcttccagagcttaatttatggtatatattgcttatatcagcagttgcaacattgtgtgaagctctcagttatggtggtgtggacaaccttactgttcctgctgtaacttccgttttgtattatattgttgcgaccgtcctctaa

SEQ ID NO: 433 - DNA, 1059 bp, Methanobrevibacter ruminantium
  source 1..1059: mol_type = genomic DNA
atgaagcatagattaaatttagataataaagacccaaattatattttgttgaaagaaatatttaaaattatggattctagaaaatccaaaagtatattagcatcctatggatttaaaaacttaaatagaacaatatttacttttaaaattatatttataagtatgttctttggaattgacattccattcattttaaacgagcttaaatccaaaaaagaacttcgcaaatactttaatatttctgaagttttgactgcagatcaagtttataaaattttttcagaaataaactctgaaaaacttataaaatgtttaaacagaatcttaaactcaaggaatatggttaaaagaagaggaaaaaagacttttattgttgatgcgaccccagtggacgtagatattaatttccacagaaataaaaagactaaagaacatctggaaaaaattaatctcaaatggagttattcatcctctaaaggttattatattggatttaaagcaactgttgtattagattatgattctatgaatcctgtttgtattttagtccactctggagctccaaacgatgcaaaacttttcgaagaaattttagaaaaccttcaaaaaagacgaataatcagaaaaggagacacattaatctttgataaaggatattacagctataaaaactaccaaatcggaatcagcaaatacaaaatcattcctttcatttttccaaaagaaaaattcagcagaacccgattggatgacattttaacttatttactagccgtatttaacaaaacaaagagaataatgaaagaaaaaagattatacaatagtttaaaaatggaattaatgaaaaaaatagattcatgggaaaaatttaaaccaataaggggcaaaatagaagattttttcaaattattaaaacaaggcttgaatatgagagaaatccacaaatatactccaaaatcagtagaaaaaaccgtttatctaaatgtatttttgggagcactgattatatcacaaggattttactcaaaaacggccatacaacaattatctgaaaactaa

SEQ ID NO: 434 - DNA, 2208 bp, Methanobrevibacter ruminantium
  source 1..2208: mol_type = genomic DNA
atgactgatgtagaacttaaaatcaaagttgcagaaaccttgtctcaaaatgatgtaggcaaaaacattgctaaattggatatggaatccatgtttaagctcggcttaaaagacggagacattatcgaaatagtcggatctaaaaacactgcagctattgctgtcgcttctcaatctgatatggaaacaatcatcaggattgacggtaccacccgtaagaattccggtgcttcaataggagaggaagttaccatcagaagagcagatgtaaaggaagctaaaaaaatagtcctcgctcctatcgatgcaagaatcaggattggtggtgactttaacagggcattcgcaaatcaagtcatggttcaaggcgacttgataaacactggaatcaagacccctcaaagaagggtttcaggaagcggattctttgatgatatctttgatgaccttatgaatgtgcctggaataggtgcaatgagccagatcaagttggctgttgtaagcacaagccctggaggtgttgtaaaagttggccctaacactaaattggaaataaatgaagagccagttgacatctctaaattggaaggtgtatccaatcttgtagatatcagttacgatgacattggcggtttgaaggaggaagtcaagaaggtaagggaaatgattgagattcctcttaagaaaccggaattatttgaaaaattaggtatctcacctccaaaaggtgtattgatgcatggtcctcctggaaccggtaagaccttgcttgcaaaggctgtagcaaatgaaagtgatgcacacttcattgtaataaacggtcctgaaatcatgagcaaatatgttggaggctctgaagagaaccttagggaattctttgaagaagctgaagagaatgctccatcaattatcttcattgatgaattggatgcaattgctccaaaacgtgaagagaccaatggtgaagtggaaagaagaactgttgcacagcttttaaccttgatggatggtcttaattcaagaggtcaagttgttgtaatcggagcaacaaacagacctgattcacttgacggcgctcttagaagacctggaagatttgaccgtgaaattgaaatcggcgttccagataaggatgagcgtaaggaaatcatggaaatccacacaagaggaatgcctcttgcagaggatgttgacttggaccaaatcgcaaatacaacccatggatttgtaggtgcagatcttgaggcattggctaaggaagctgctatgagggttgtaagaagaatcattccggatttaggttcagacgatgagattccacctgaagtccttgaaaagcttgtggtaaccaaggaagactttaagtctgcccaaagggagattcagccttcagctttaagggaagtccttgtacaagttccaaatgtaacttgggatgatgtaggtggattggatgacgctaaacaggaattgaaggaagctgtcgaatggccattgaaatatcctaacaagttcaaggaatttggagtcagacctcctaaaggaaccttgctctatggtattccaggtactggtaagaccatgcttgcaaaagcagttgcaaatgaaagtgaagctaacttcattgcaatcaagggacctgaactcctctctaaatgggttggagaatctgaaaaaggagtaagggaagtctttagaaaggcaagacagactgctcctactgtaatcttctttgatgagattgattcaattgcaagctcaagaggaggcgaatctggagattctggagtaaccaaacgcgttgtaaatcaattgttaaccgaaatcgacggtcttgaagagctagaggatgttgcaatcattgcagcaaccaacagaccagacattatcgatccaggtctcatgagaccaggaagatttgacagacacattaaggtggacgctcctaatgaggacgctagacttgcaatattcaaggttcacaccaaagacatgcctcttgctaaggatgtaaagcttaagaaattagctaaacgtgctgaaggatatgttggagctgacattgaagcagtttgccgtgaagcagctatgctagctttaagggatgatattgaagcaaaagaagtttcagcaaaattctttgacgaggctatggataaggtgaagccaaaaagcagtaatgaagaagaattgatccaatacttctag

SEQ ID NO: 435 - DNA, 840 bp, Methanobrevibacter ruminantium
  source 1..840: mol_type = genomic DNA
atggataggcatgtgattgaagcattaggtagggctagaataacagtggaaaatgggaaggttgttgatgtaggagagcctatgattgaatattgtcctttatttgacaagcataggggaataaaggaacttacaaaagaggaaatagaaaaaaacattcaatttagaatagatgactttggaatgtgtactaaaaatcgtcaattaagacttaaagactttttatcctttggaatatctgaaatattgtctacattgcttgatgagaatcttattgactgtgcagtcatggtttgtgaaggatgtggaactgtccttgtaaccgaaagtgagatggctcagggagttggaggaagagtctctggacttgttgaaacaagtcctatttcccagagctttatttggaagagttttggtcaagatcgtgttgttgacagcgagactgcaagaatagatcaggtggatggccttagattggctattgacaatggatataagaacattgcagtaacaatttgccttgctgaagatggaatcattcttagggaattggaaaaggaatatgaagacattaatgtctatatatttgcagtccattcaacaggccttggaagagaagaagcagaaataatatttgatactgcggatgtggttacaggatgtgcttcaaagcatcttagggatattggaaaggagctaaaggttttctctgtaggaacttcaattccaatttttgctgcaagcgataagggtgaggagtttattaaattaagattggataaaataggtgggccaaaaaagaaaactggtaattccaaacagcctaatcctttagtttag

SEQ ID NO: 436 - DNA, 636 bp, Methanobrevibacter ruminantium
  source 1..636: mol_type = genomic DNA
atgtcaaaagatgtggttttaatattatcaggaggtttagactctactacattattatataaattattaaatgaaggaaataatgtcactgcactcagtttcaactatggccaaaaggctgctatagagattgaacgtgcaagtgagatatgtaaaatgaacgatgtaaatcattttgtttttgatataagaaatattgtagacttgcttagcagcagcttaaccgataaggataatgacaatgttcaagagccaaaaagcactgttgttccaagcagaaatacaatcttgcttgagcttgcaactgcatttgcaataagcaacaacttagaggaagtttattatggtgcaatcaaggcagacactggcgactatccagacaccactcctgaattcttaaagcagataaatgaattaaataaggttaataattatgaatacattccagtttgtgctccttttattgatacagataaaaaggatgttgtaaagcttgctttagagttaggagtgcctattgaaaagacttggagttgctatgtaaacaatgacggaactccttgtggggaatgctttagctgcaagtcaagaatagaagctataaaagaagctaaggaagaattaggtattgaataa

SEQ ID NO: 437 - DNA, 360 bp, Methanobrevibacter ruminantium
  source 1..360: mol_type = genomic DNA
atgttaacattagtatcagaacacagaatatatggctgtcacaagctaaaggaccaaggaggaaagtgtacacaatggcatggacaccaatatagagttatattaactttacaggctccttataaggatttggattatagaaatatgatcatggacacctatgacattgaagctatctttaatgagttcattggtgtggatcatttgaatttaaatgaattcatggattctgaaaatcctaccatggaagagatgagcaaattcttctatgatggtcttaaggataagattgaatgcttggtaagcgttggagtttatgaaactcctgaaactggagttacctatactcctatggaatag

SEQ ID NO: 438 - DNA, 609 bp, Methanobrevibacter ruminantium
  source 1..609: mol_type = genomic DNA
gtgattaaaattaaggtaagtgaaatattcacatcatttcaaggcgaagggccttatatagggactcctgcaactttcttaagattgtatggatgcaatcttaactgcccatggtgtgacactgatatctccacatatgaaattctatcagtggatgaggtctttgagatacttatgactcaaatggagtttaataatataaggatattggttataactggtggagagcctacattgcagatggaagagcttaagcgtttgattaaggaaattccagatgagattaagattcaaatcgaaacaaacggttcaatttttgaatacgttccagaaatcgattatgtgataagtccgaaggaagataaggaaaccgtatttaagaactattataaatatgataatgtgttctttaagtttgttatttgctcacaggaggatattgatgaggtcatttatctaaaggataaatataattatgataaaaccatatggcttcaaggagagtttagcaaggatggtgaaatggcagacttgattagggagaatttccctcatttggagaatgttaagttgtctgttcaaactcataaatatttgaatcaaagatga

SEQ ID NO: 439 - DNA, 423 bp, Methanobrevibacter ruminantium
  source 1..423: mol_type = genomic DNA
atgtataaaaagattatattaccaactgatggatctgaatattctaatagagaaattttaagagctactaagttattagctgaagatggagaagtcattattctttctgttgcaacagaattaagaaaaactgctttccaaagaagcaaagatattgatagggctaataaggagtctattcaagaagctaaagaatatgttgcagctatgaaaaaaggatttgatgacagcgtaaatgtcaggactaaagtcgttgtaggatttccagctgaagctattaatcaagttgcagaagaggaaggggctgatttgattattattgcttcttcaggtaaaagagggcttcataggtttgttattggaagcgttgctgaaaaggtacttaaagattctgaaattgatgtgttattagttcatgattaa

SEQ ID NO: 440 - DNA, 582 bp, Methanobrevibacter ruminantium
  source 1..582: mol_type = genomic DNA
atggcggataaaaaacctactgcagaaaactggcctgttgtaagtggagattatattgtaggagatccagaaagccctgttgctgtaaccacattggcttctcacaatgaagacattcctgcagctgctggcgcagccattgctggaccttgcaagactgaaaaccttggaattgaaaaggttgttgcaaacatcatttcaaaccctaacataagatttttgattttatgtggtgctgaagtgcaaggacacattacaggtcaaagttttaaggcattatatgaaaacggctgtgaccctgagaaaaagaaaatcactggagctactggagctattccttttgtagaaaacattccaatggaaggtgttgaacgattccaacaacaattggaacttgttgatatgattgacaacgaagacggtggagcaatcactgcaaaagttaaggaatgcatagaaaaagatcctggtgcttttgaagaggattctttagtgattaagattgatgaagaaagatattctaaaaaaagcagttttgtggaatcttcatctgaaagtgaaaaaatagaatccgaagcataa

SEQ ID NO: 441 - DNA, 450 bp, Methanobrevibacter ruminantium
  source 1..450: mol_type = genomic DNA
atgaaaaaagaatcaatattcaatgacgaagtaagcctattcaattccatttatgtaatgcacaaggcatttgaaaagtttttaaaaacccatgtaaatgatttaaatatcaataaggcagaatctaaatttttaggtgaaatctattataatgaagggataagccaaagggaaattgctcgaaacttatttgtttcagaagcaaatattgcaaagacatacaagatattagaaaaaaaaggatttatctataagaaagttgatgaaaagaacaatacccgtcgtcagttatacttaactgaaaaaggcaaagaatcctttgaagaaatcattaagctttatgaagagtatcatcatttcattttaagtgattacacagaagaggaaatcagaaagcatgaagaaatgatgaaaggaattgcagacaaatccttaaaattcttaaaataa

SEQ ID NO: 442 - DNA, 771 bp, Methanobrevibacter ruminantium
  source 1..771: mol_type = genomic DNA
atgaaaaattatttcgacataaaagacaaagtagcagttgtaaccggtgcttcttccggattaggttggcaaattgcacaagcttacgcaagccaaggtgctaaattagctttattcgcaagaagagaagaaagattacaagaaaacgtaaaagaaatcgaagacaaatttggtactgaagtaatgtacgctgttacagatgtcggagattatgacagcattaccgcatccgttcaaaaagtaatggacgcatatggaagaattgacattctcgtaaacgcagcgggtatgggtaacaacaaaatggttgtagaccaatccaacgaagaatgggcaagacacatccacatcgacttaacaggtgtatactacatgtgtaaagctgttggagaaatcatgattgaacaagaatacggtaaaatcatcaacatcggttccatccacagtagagttatcttccctggcggaggtatcagcgcatactcctctgcaaaaggtgcagtaatgaacttaaccaaaaacttagctgtagaatgggctaaatacaacattaccgtaaacgcaatcggccctgcagtattcgaaaccgaattaactgttgactccattgaaatggacggattcatggatctcattgcagcatactgtccagcaggcagattaggtaaacctggtgaattagacggacttgcaatctacttagcatctgacgcatccagcttctgtaccggtcaattaatctgtgttgacggtggatggactgctatataa

SEQ ID NO: 443 - DNA, 1275 bp, Methanobrevibacter ruminantium
  source 1..1275: mol_type = genomic DNA
atgactcaaatgactgaagctaagaaaggcaatgtaacccctgagatgcaagctgttgctgaatttgaaagagtagatgttggaaagattctaaacggacttgcaagtggtagaatagtaattccaaagaatattaatagagatacaaaggcttgcggtattggtcagggcttaacaaccaaaatcaatgcaaatataggatcttcaagcaaaatcgaagacattgatttggagattaaaaaagcaaaattggcagttgattttggtgcagatgcaatcatggacctaagcacaggacctaaattattagagttcagggaaaggataatggactcagtggatgtggccattggaactgtccctatctatgaagcaggggtagttacattaaataagggcaatgaaataatagatatggatgaggatgacatattcaattccataatccatcaggcaaaggatggggttgacttcatgacccttcactgtggaatcaatcaggatttggtctataaacttcaagaggctaaaagaatgatgggtattgtaagcagaggaggaactttcctcgcttcttggatattgcataatgaaaaggaaaacccattatattcaaattatgattatttgcttgagattgcattggaatatgatataactctctcattaggtgacggacttcgtccgggatgccagtctgatgcaacagacacttcccagattcaggagcttgtaaccttgggaacccttgtaaagagagcacaggaagcgggagttcagacaatggttgaagggccaggacatgttccccttaatcagataagggcaaatatggagattcaaaagacattgtgtcatggcgctccattctatgtattagggcctattgtaactgatttggctccaggctatgatcatatcacttcagctattggaggagcaattgcagcatcaagcggagctgacttcctatgttatgtgactccagcagagcatctctcacttccatcccttgaagacgttaaggaaggagtcattgcaagcaagattgctgcccaagctgcagatgttgctttaggattggacactgcatgggagaaggaagtggaaatggcacaggctcgtaaaaactttgattgggaaaagcagtttgatttagcttttgatagtgtaaagccacgtcattataggaataagtgtgaattggatgatgatgagatgtgtgctatgtgcggagagtattgtgcggtaaagatagctaaaggtgacttttag

SEQ ID NO: 444 - DNA, 1653 bp, Methanobrevibacter ruminantium
  source 1..1653: mol_type = genomic DNA
atgaaatacgaagaacttgttaatgtttatgaggcattaggtgcaactacaaaaagattagagaaaacagagatattggcagattttcttaaaacagtggaactagaagatttacagaagattactttaatggctttaggtcgtgtttttcctccttggagtgaagaggaacagggaattggcgataagcttgttatgaaagctgtaggagatgctgtaggagtctctgtagcagtagttgaagatgcaatcagagatgaaggagacattggagcagctgcagagaagctttacggcaaaaagactcaaatgactttcttctcacagcccttgacagttaactttgtctataatcagctgagaaaattggccaaaataactggaaacaggtccacagccaaaaagatctcaaacattttggaattattgtcatctgcatctgcacttgaagctaaatacatttgccgaaccatattggaagaacttagaatcggtgtaggtgaaggaatcattcgtgatgcaatttcacaagcctttggtgttgataaggcacttgctgagagggcacatatgcttacaaatgatttaggccttgttgcaaaggttgcaaaggaagaaggtgaagatggccttaaaaaactttcattaattccaggaaggcctgtcaagccaatgcttgcccaattgtctgagggaattgaaataagcataaatgaaatgggttgtgcactttgtgagacaaaatacgatggaattcgtatgcaggttcataagaaggatgatgagattacaatattcactcgcagactggagaatgtgactatggcccttccagaggcagttgacctaatcagggaagctttcccagatgaggacttcattgcagaaggtgaaatcatagcaatccgtgatggaaagccgactacattccagaacatccttcagagagtcagaagaaaacataatattgaagaagctatggaaaaggttcctattaagatttatctatatgatttgctctactttaaggagccaaccattgatgagccgataatcaagcgtcgtgaaatattggaaagtgtagtggattgctcaaatcctaatttggccctcagttcccttgtcaaggtaggtccagataatattgatgatgcagtggatttattcaataagtcaattgaagggggacatgaaggaatcatgattaaagactgcgatgagccttatattccaggaattagaggcaaaaaaatgctaaagcttaaggcagagcctgaaacattggatgcagttgtaatcggtggagttaaaggaataggcaaaaggggagactttataggctcttatgtgattgcccttcgagatgagaatgaccagttgcagcctattgctcatgtaggaaccggtctttcagatgatgacttggcaaatctcactgaaaagatggaagctcttaagataactgaaaagggaactagaataactgttcatcctaagatagtctttgagatagcttatagtgagattgtaaagagtccagagtatagtgcaggttattcattgcgtttccctgtagttaaaaggataagggatgataaaggcgttgatgacattgatacaattgaaagattagagtctatgtttaagggatag

SEQ ID NO: 445 - DNA, 399 bp, Methanobrevibacter ruminantium
  source 1..399: mol_type = genomic DNA
atggaattgaatgatgaaataatatttaaagttgcactgattactgcattggtcggaatgattgggatgctagcttttgcctcttatattgaaccaaaggagataacaatcaatgaaattacaagaaacaatattggtgagacagtttctgtctctggtgttgtagagtcggttaaattatcctcaagcggaagctcctgctttctggagctaaatgacggaacaggtaaaataaatgtcattgttttcgaatcggttttagtggagcttaaagatgctggaaacgacttaaatgattttaaaggtcataatataaaagttgtaggcagcataacagaatataagtcttctatggaattgattttagctaattccaattcaattaaattggaatcttag

SEQ ID NO: 446 - DNA, 213 bp, Methanobrevibacter ruminantium
  source 1..213: mol_type = genomic DNA
atgtatgaaaaggataaattagtattgcctaatatcattaaagaagaatttgattgcatagaattaaatgaagacaccatatttgattgggctattgaagatgacaaaatcattcttaaacctagaaatatagttacaactgacgatattataggtattatagatgatgatggtggagaatgggatattgataatgaaatttattccttatga

SEQ ID NO: 447 - DNA, 234 bp, Methanobrevibacter ruminantium
  source 1..234: mol_type = genomic DNA
atggggtttttagctagttctaagatttatggggattatcaaatagatattcccaaggaagttatagaagaattcaatgtggaaagagattctattatggaatggattattaatgaagatggaagaatttccattaatttcagaaagaaatattctataaaagatttggtaggtgcttttcatctggatgatgaagtcagttctgttgatttaaaaagaagtttgtatgagtag

SEQ ID NO: 448 - DNA, 1365 bp, Methanobrevibacter ruminantium
  source 1..1365: mol_type = genomic DNA
atggtagaaaaacgattatttggtacatttggtgtaagaagaaactgcgaaatgatggtgttgactcctgaatttgcatccagacttgccgcaagttatggatctattgtgcaagggaccgtagccattggaggagatacaaggacaagcactccaatgcttaaacatgcaatcactgcaggtttgctctcttcaggctgtgatgttgtggatttaggaatcctcccaactcctgctattcaatatgcagttagaaattattatgatgggggaattattgtaacagcttcacacaatcctccaaaatacaatggtcttaagtttgtagatgaatttggtataggaactccagatgatatggaaattgaggttgaaaagctatactttgatgaggagcctattcgcgcttcttgggataagattggtgaagtctttacaaacgaatcaatcattaaggaatatattgcagagactttaaagagagttgatgtggaagcaatcagggcaagaaagcttaaggttgttgtagactgcggttcaggtgcaggatcatacaccgccccatacattcttaaggaattaggatgcgaggtaaccacattgaactgtcaggctgacggatttttcccaggaagggacccagagccaatagagccaaatcttcaggacttgattgcaacagtaaagaaccttggagcagacattggacttgcccatgacggtgatgcagacagaaccatttgcattgatgagaaaggaaacttcatattaggagataagacctttgcccttgttgaaaagcatatgcttaaggaaaacggtggaggaattgttgtaaccactgtagctacctctcaagccatttatgatattgcagaagagtttggcggtgaagttattgcaactgctgttggagatttgcttgttgcaagaaagcttaaggatacagatggactctttggaggagaagaaaacggtggactaattttcccagactttatctatggaagagatgctgccatgactgtggcaaagatacttgaaattcttgttaaggaagataagccattatctgaacttgtagcagagcttccagtctattatcaggaaaagttaaagattgaatgtccagatgatcaaaagcaagatgtcatggctaatattgcaaatgagattaaggacacaactgactttgagcttgatacaactgacggagttaagattctaaaagaggatggctgggtaattattaggccatctggtaccgaaccgatattcagatgctttgctgaatctgattccatggataaggctcaagagatggctaactggggaatcagtttagtggagaagtataagaattag

SEQ ID NO: 449 - DNA, 804 bp, Methanobrevibacter ruminantium
  source 1..804: mol_type = genomic DNA
atgatttccgatagacaaaaaacattgctcattcttattctagtgcttgttttagcttttgcaataatatttctaggatattccatctccttaggaaacaatcaaacagcaggtgttaagctaaatgattccaataagatttatattaatcaatcttatccggcagagcctattccagatgctaaaattgatacaagcggtgtaaattcagttttattaggtcaaaatgaattaggtagcgtagagcttctcggcccatttggaaactccgattcagagattaagatagcctattcaataggtatgcatccttgggaaagcaaggttcataaggctttgtttgataccgtccttgctaaaaacagctctttaaaatattgctattatatttataagataaatgtgacaaattataatactgatgatgagggcagaatggatgggcagcttcttgctcaggagtttgtggcacctcatataattaatggagattatgacttgtttttagacattcacagcaataagggaactgttggaggaacttatgagcaaactaactttgcttttgcagttggtcaagatgaaaagtccgaggcctttgtaaagaaaatattagataagatgccagagcttgtttattatttcccagctgatcagtcaagccctccttatataaccttacctgtagagcaagcaggaactcctacagttaattatgaaacattctcatatgaggacattaatacaacctatgatttgattgataaattggttgatgtggttgataatttggagtttaaatga

SEQ ID NO: 450 - DNA, 714 bp, Methanobrevibacter ruminantium
  source 1..714: mol_type = genomic DNA
ttgtgtgatttgatattgaatttaattattaaaatagatgatattatgattattaaaaattattctaatgaacctactgatgaagcaaaggtagattcaagtttatatgatgctcaattaattggagaaaacgatttaggaactgtacaccttcatggcccatttggaaatgaggaatcagacattaagatagcttatctaatcggcatgcatcctttggagagcaaggcacatagggctttatttgatacagttcttgataaggatggggatttgaattattcatattatatctataacataaatgttataggagaacttgatgaggcaactgaaggtcgtatggatggccagcttcttgctcaggagtttgtagcccatcatataattgataggggatacgatttctttttagacattcatagcaatagggggtctaggagtcctggaacttatgaaataagcaattttctatttgctccaggctttgatgaagaatctagtaaatatatgaatgtattgctttctaagatagatgaattggtttattatgctcctgaatatagaacaagtcctgaatttattacagttcctgttcaaaagagtggaattcctacactagtttatgagacctattcctatgagccaattgagctcacttatgaattgagtgaaaaattagtggatgctgttgacagtttggactttgattga

SEQ ID NO: 451 - DNA, 1137 bp, Methanobrevibacter ruminantium
  source 1..1137: mol_type = genomic DNA
atgcctataatgtcctttggaagtcagaacatcaatatcataacaaataaaaaagcaatgaccataaggaaattatggaaaacccctttaaagaaaggtgataggcttcattgttactggaatcttgcttctaaggaaaagaaaaaaatctttgaagctgaagtcacagaagtggaaaccattaccttcaaggaactaaaggataacgatgaattggcaagagaggaaggatacgaagattccaaggaaatggttaaggaatttaaaaaaatgtatcccgacagaatcgcagacgacgacctattccaaataatctattttgaaaagcttgacataaacaaatggaaaggtgaaaagatagatcaaaaggaaatgatcacccaaagggcagatatcctttttgatactggaaaatacgacaagtctgtactatgctataatgctgccttaaagatagaccctaatgatgtttaccttttaaacaagaaaggagacaatttaggaaggctagacagatttgaagagtctattgaatgttatgacaaggcccttgaaatagaaggagacaatgaatatatctggaacaataaggcaatagccatgcttaactctggaaatatagaggaagctttagttgcaagcgatggagcattaaatgcaaacccagacaatccagttgtcctatactggagaggattcatccttgaaatcctatcagaattcgataaggctttagaggtttatgataagctaatcacaattgatgacactaaccctgaagtatggaacgcaagaggaaatgtcttaacagacatggaccgactggaagaggcattgcaatcatatgacaaggcattggaattatgcttagaagattctgaaatagacgcatctgcacaaaacagaaaaggaaacgcacttttagaccttggaagatttgaagaggcaatccaatgctatgacagagcaatcgaacttgaaccactaaacacatcattcctattaaacaagggagttgtattgatggagattgataagtttgatgaggcagaaatcctttttactaaagttcttgcattagacccttccaatgatgatgcaagggttttaaaattggaatgtcttgaaaatatgtaa

SEQ ID NO: 452 - DNA, 723 bp, Methanobrevibacter ruminantium
  source 1..723: mol_type = genomic DNA
atggaatatggtgctacaattacttcttcaatcgaatatcctaaaaaaatgtcatttgttatctttttagcaaagtgtcctttaagctgtccttactgcagcaatagcgaactgctctatggaggagaggaaataagcttagaagagattattgaaaagatagatgattccgctttcctatcagatgcagttgttgtctccggaggagagccattggtacagcttgaagatacaattgaaatattaaaatacacaagaaaaataggactcaacaccaaattagacacaagcggagtctatccaaacagattaagaaaagtattggatttaggattggtcgattaccttgcaatggatgtgaaggcaccatttaacaaatataaagaagtcatccattcagacattggagataaggtaaaggaatcattggatattgcaaatgaatatgatgatgttttccttgaatgcagaacaacctattgtccagcattacttgaagaagaagacctatttaagatagttgatgaagtggaatgtgacttatacacaatccagcaattcagaaacagatgcacattggatgaaagtctagacggtgcagaagagccaaacccacataatatgagagaaatagctcaaaaaataaaagaattgcaccctaatcaggatataaacattaaaactgctgaatttggccaacagaaaatcgaattagaaaattaa

SEQ ID NO: 453 - DNA, 1125 bp, Methanobrevibacter ruminantium
  source 1..1125: mol_type = genomic DNA
atgaaagcccgtaaagcagtagaagaaatagatccatatgttccaggccgttcaaaagaagagatagcacaggaattcggagttaaaaaggaagatataatcaagctaggatccaatgaaaatccatggggaccatccccaaaagcattggaagcaatcaaggaagaactgaataacatcaacagataccctgaatctgacgttgagctattgaaaaaggaatttgcaagatactctaatgtaaagcctgaaaacattattatcggaggagacggagcagacgaaatccttgacacccttgcaaagacattcatagaaaaaggagacgaattcatagtgccactgccttcttatatgtattatgaatttctattcaagccttacggagctatccctaactatgcaaaatggaatcttgaaactaacacattagatttagactctgtgcttgatgcaatcaatgaaaaaacaaagatgcttttcctatgcagtccaaacaatccaactggcgcattgattacacaggatgaattcagaccaatcctagagaaaacaaacaagtccagaggaggagtctgtgatgcaatagtagtaatcgatgaggcatatgttgaatatgcagagggaaccaatgtaaatctccttgaggagtatgacaatatattcatcataagaacaatgtctaaagtcatgggacttgctggaatgagaataggctatggaatatcaagccctgaaatcattgaatacatgcacaggataaagcctgtattctcacttacaaagctttcatatgtagctgcattagctacaatcagagacacagaatacatagaagaatcaatcaaaaagggaattgaaagcagagaatacctatacaatgaaataaacaagatgaagtctgtaaaagtcttcaaatcctactcaaactttatgctaatcgatatccacaatacaggatacacagcagcagaacttacaagagaatttatgaaaagaggaatgattgtaagagactgcacttcctttaagggaatcgatgaatactactttagaattagcatctgtaccctagaggaagataaaaagttcatagaagccatgaaagatatcttgaatgaataa

SEQ ID NO: 454 - DNA, 477 bp, Methanobrevibacter ruminantium
  source 1..477: mol_type = genomic DNA
atgaaactcaaagaacccgtaaaaatattccctggtgcacaagtaatcggcgatgttgaaatagatgaaaactgttccatttggcatggagcaatcataagaggagatgtcggaccaataagaattggaaaaaactctaatgtccaagacaactgtgtccttcatacttcagcaaatctaacccttaagataggagataacgttactgtaggacatggagctgttgttcatggctgtgaaattggcgacaatgttcttataggaatgaatgcaactattttaaatggtgccaagataggcaaaaactctattgtaggtgctggagcagtagtaagcgaaaataaggagtttccagaaaatagccttattctaggagttcctggaaaactcattaaggaaaccactcaagagcaaagagacaatatcgcttggaatgctaagcactatgtagaacttgctaatgaatatgatgaataa

SEQ ID NO: 455 - DNA, 1320 bp, Methanobrevibacter ruminantium
  source 1..1320: mol_type = genomic DNA
gtgaaagcattaatactaagcgccggggaaggtactcgtatgagaccattaacacttacaaaacctaaaacaatgctccctgtcgctggaaaacctatcatacaatataacatagaagcattacgtgaatgtggcgtaaaagacattcttcttatagttggctataaggaagaaatggtaaaaaattactttgatgacggaagcaaattcggcgttaacataagctatgcaacccaaaccaaattagaaggaactgcaaatgcaattagctacggaaaagacttcatagaagatagcctaatcacacttaacggagacatcatcctcgatgaggagatactcagggaaatcatagaggactacgaagagtctggcgcagatacattaatggtattaaccgaagtggaagatccaagcgcattcggtgttgttgaattggatggagaaaaaatcacaaacattgtggaaaagcctaaaaaggaagaggctccaagcaatctagtcaacacaggaatatatatctttaacaaagacatcttcgacaagatagacaaaactaaagtctccccaaggggagaatatgaaatcacagactccctatccctacagattgaagatggcaaatttgtaaaaggccataagaccgaaaaggaatggatggatattggaaagccatgggagcttattgaaataaacgaatccctcctcaacaatatcaaaggagaaatcaaaggaaccgtagaggaaggagccaccttacatggagaggtattccttgatgagggaagccttatccgttctggagtttacattaaaggtcctgtatacataggaaaggactgtgacataggccctaactcatatatccgtggaaactcatacttcggcgacgatgtccatattggaaacgctgtggaaatcaaaaactcaattattatggaaaacaccaatgtaagccacctaagctacgttggagactctatcctaggctcaaactgtaatattgcagctggaaccaacattgcaaacttgcgttttgacaataagaccgtaaaattcaatataaaaaataaaaaagtagacacaggcagacgtaagctaggagcaattgttggggatggagttaaaactggaatcaattcaagcctttcccctggagtaaccataggtacaagagctacaataggttctggcgtcttattatatgacgatcttccatcagacatgagagttctccttaagcaggagcatataattcaaaacaagaaagaaaatggacaaatccgcttagaagaagttgaagaggatatgaataaatag

SEQ ID NO: 456 - DNA, 162 bp, Methanobrevibacter ruminantium
  source 1..162: mol_type = genomic DNA
atggtaaaatatgtatgtatgcattgtgaatatacttgggactctgaaactggtgatgaaacttacaaagtaccagcaggacctatcgaagacttcccagatgactgggtatgccctcaatgtgctgcaggtattgaaggaattattaccgaagaagactag

SEQ ID NO: 457 - DNA, 1347 bp, Methanobrevibacter ruminantium
  source 1..1347: mol_type = genomic DNA
atggcaaataaaaaattattcggaacttctggaatcagaggaaagataggttcagaagtcacctctgaattggcacttaaaataggaaaatcattagccaaatacttaaataacactggaaaggtagttatcggctatgacacccgtactacaaacagaatgcttgaacaggcaatcactgcaggactcatcgagcatggagtcgatgtaatcaagatagctatggttccaacacctcttgtaggatatgcaaccattaagctaggtgcagatgctggaataatgcttacagcctcccacaacccttcagagtataatggaatcaagctctggaatgcaaacggaatggcttatacaccagaacaggaagaaaagatagaagaaatctactacaacgaagacttcggaaaggttgaatgggacaaaataggaataataagccataatgatgagattaaaaagcaatatatagatgatcttttagacattgtagacatcaagccaggtcttaaagtggtcatcgactgtgcatgcggagcaggatctgaactttccccagtattgtttagaaaagcaggatgtgaagtaatcaccttaaactcacaggttgacggattcttccctggaagaaacccagagccaaatatagcaaacctttcaagccttatgaaagcggttgtagcaaccgaatcagaccttggaattgctcacgacggtgatgcagacagaatgattaccgtcgatgagaacggtaaggtttcagactttgacaagcttcttgctcttgtatccaagaaattcggaggaacagtggtaacaactgtagatgcaggattatgcatggatgaggctatggaagaagtaggaggaaaggtcctcagaacaaaggtaggagacgtaaacgtagctgaagtgatgatagaagaaaatgcaagcttcggcggagagccttcaggaacttggcttcaccaagacttttgcatgtgtccagacggaatcctatcagggcttagaatggcagaaatcgtttcaaaggaaggaaagctatcagagcttctagcacaattcactgactatcctcatatgagggaaaaggtcatatgttcaaaagagcaaaagatagccgtgatggaaaacatggaagagctccttaaaaacgcctttgatgacattaaggaaatcaatacaatcgacggcataagattaagctttgaagacggcagttgggtattggtaaggccatcaggtactgaagactatgtcagagtaactttagaagccaaaacccaagaaaaagcagaattcattagagacacttgtgtcaaaatcattaaagagaatatttag

SEQ ID NO: 458 - DNA, 1239 bp, Methanobrevibacter ruminantium
  source 1..1239: mol_type = genomic DNA
atgaaaggaatgatattggttatggacggattgggtggccgtcccttaaaggaacttaacaatcaaactacactccaagctgcaaagactccaaatatggataaaatggctgaaagaggaataacaggaataatggactcaatagctcctggaatcataccaggcagtgacacagcacacttatccctattaggatatgacccttacgaagtatacactggaagaggcccatttgaagcctctggagtcggagtggatgtaatacctggagacattgcattcagatgtaatttctcaacttcagatgaggatggaataatcacagacagacgtgcaggcagaatcagagaaggcacaaaggacattgtagacgtcctaaacacaatggtcattgaaggctacgaagacattgaaatcatattcaaggaatccactgggcatagggcagttctagtccttagaggagaaggattatctggtgaggtaagcgatgcagaccctaaagtggaaggaaacaaaccaaaagaagtaaaaggccttgacggaagcccagaagcagataaaactgcagacatccttaacaaattagtggtcaaatcctatgaaatggttaaagatcatccagtaaaccttaaaagaattgaagaaggacttccaccagcaaatatcataattcctcgtggtgcaggagaagtgcctgaagtggagccaatcaacgagaaatatgaagtcaattctgcatgcattgcagaaacagggcttatcatgggaatcggacgctttgctggaatggacatcattgaaatggaagatgttaccggcggagtggacaccaacctttacaatatcagagatacaatcgtagatcaggtaaacaactcagaacatgacttcttccttgtaaacattgacggagcagacgaagcaggtcacgatggaaatgcaaaagacaagcttgaattcattgaaaaggtggatgagattgtaatgagcgaacttttaaagctagaggacatttatattttcctaactgcagatcattccacaccgatttcagttaaaaaccactcaggagacccagttcctataataatcaacggccctgaagtgagagtagacgatgtaaaggaatacaatgaatatgcagtggctaaaggaggaatgtgcagaatccgaggagcagatgtaatgaacattcttactgacctaatgggctatgcacataagtttggagcctaa

SEQ ID NO: 459 - DNA, 699 bp, Methanobrevibacter ruminantium
  source 1..699: mol_type = genomic DNA
atgaaagaagccttaatgataaattggggatatgtagtgcttctttttattttaggagcaataagctataaaagaaaaagcctagacatgctaggtgccctaataatgatttttatgggaataaccatcatcttctcagcaggagtgtcatggtttatcttaatcgtactgttcttcatattaagcataatggccacacgcttttcaaagccatacaaaaaggaaataggacaatacgaaaagaccagaactgcaaagaatgttatctctaacggattggtggccttcctgatggctgcattcggaagctattatctgccattggctggaggatttatcggagcagtagctacagctacagcagacacattagccagtgaaataggtgtccttcaagagcctcgtttgattacaagctttaagaaagtacctgcaggcacagatggggcaatatcaattttaggaacatcagcagcgattgtaggagcaggaattattggaatcgcttcatttttacttggaatcatgccagatccattgatagcaattaagatttctgtaatctctggaaccgtaggctgctttatagacagtatccttggagcagtcctagagagaagaaactttattaacaatgagcatgttaacttgcttgctaccatctctggagcaataataggtattatttctgtaatgtaa

SEQ ID NO: 460 - DNA, 579 bp, Methanobrevibacter ruminantium
  source 1..579: mol_type = genomic DNA
atggcaaagaaacaaagacgtagagtacgtgacacttggaaagaaaaatcttggtacaccatcaaaactcctatagcattcggagaaaaggaaatcggtaccacccctgcaagagacccagaacttgtatacggaagaactgtagaagtaaccatgagagaattaaccggagacttctccaaacaatacatcaaattacaatttgaagttgacaacgttgcaggagacattgcaagcaccaaatttaccggacacaagaccactaccgattatgtaagaagcatgatcagaagaggaaccagtagaatcgacgctccggttattgtaaccacccaagatgaacgtaaattaaaactccatgtattagctgtaaccaccagaagagctaaatcttcccaacaaaaatacatgagagaaaccattaccgaattagttagcaatgttgctagcgaaaaaacctttgatgaacttgtagaaatctctgtaaacggtagattagcttctgaagtttaccacaaagctaaaaaaatctatcctttaaagagagtagaaatcatcaaaagcaaagtattagattaa

SEQ ID NO: 461 - DNA, 804 bp, Methanobrevibacter ruminantium
  source 1..804: mol_type = genomic DNA
atgtgtgagatatttggattctcatcctctagggaagaggaattaaatgattatttaaagacatttttcagtcattgtgaagagcaccctcacggttggggattggctattttagattcagataaatatcaaataagaaaagaaccggtaaaggcccgaagtagtgtaatgttaggaaatattttattaaatccaatagtctgtaaaaatatgcttgcacatataagattggctacgataggcaatttggatttctataactgccatccttttgtaaagaaagacaattcagataggagatggactcttattcataatggaactatctttgactgccaggatctttgtagatacagtacagaagaggaaggggagacagattccgaaaggatattgctttatattgtagatacaatcaataattatgaatctgtaaagggagagcctttaagcttaaaggaacgttttgatatagtttccagcttgattaaaggaatgtcctgcaccaataagttaaatcttatggtttcagatggtgagcagatctatgttcacactaatctaaaggattcccttcattatctaaagaaggaccattccattttcgtttcaacacagccattggatgatgatgactggaaggaggttccattaaataagacattttcaatcattaacggtgacgtattgtttgaaagcgattcacattcaaatgaatatttcgaaacagaggaacagcttagattcattgaaaagttcttagagtcattaaagacagattcagatgaggagtacgcttggtaa

SEQ ID NO: 462 - DNA, 726 bp, Methanobrevibacter ruminantium
  source 1..726: mol_type = genomic DNA
atgtgtaaagatggtattagcgatgaggcattaagagaaaaattgtatcaagcatttttagagcctaccaaaaaggataaaaaggaatacataggcattgaaatagagatgccaataatcaatcttaacaaggaagcggtagactttaaagttgttcataaggtcactagggatttcagtgaggaatttgataactttgaacttgaaggaatagattatgatggaaacatctatgcattgagagataaggctagtgatgatataatttgctatggctgctcctataacaatatagaatttgcaatgggaaaggaagagaatcttttttctgtaaatgagcgtttccttaaatattattcatattttaaagataagtttgaagagcatggacatacattgactggaatgggaatcaatccatatagaaagtacaataatgaggttccgattccaaatgaaaggtatcttatgctttttcatcatctaaagtcttcctctgactatgtaggaatggagtttcaccaatatcctgcttatggcatgttttcaagcgcatctcaggtgcaattggatgttccttatgatgaattggtggacaatattaatgtcttttcaaaattagagccgattaaagcactgcttttttcaaattccgttttttggaagagaatgaagactatctttgctttagagatatcttatgggaattcagtacccatggcgtaa

SEQ ID NO: 463 - DNA, 654 bp, Methanobrevibacter ruminantium
  source 1..654: mol_type = genomic DNA
atgtataatcaggaatttgaggacattgatgagctgctttcctatttggagtccttaaatatctattgtgttatgagagatgggttatatattaattttccttcaatggggcttaaggaattcttcagcaaggacaagataacaggagaatactattgtaagggagaatataagaaaagggaatttgaaccctctttggatgatattcaatatttaagagcttttaagtttatcaatctcacctttaggggaacaattgaatataggagcgtttgtactcagccaattaaggattccatgtctgttgcagcattccatgtaggtttaaagcataaaaccgatgaattgaatgaattattcttaaaatcaggcatttataagaatgactgcgatgcaaatgagcttagaaaactattgattagaagggaaattccagatttcgttgatatggaaaagatttatggattggctttgaaggttcttgacttggcaaaagaaggattgcttgaaagagatttgggagaagaagttttcttagactctttgtatgataatttgaataataggaccaatcctggaaaaagacttttagattcattagatggtggaaaaagcttggaagagattattaaagagtatggtgaagttgaatag

SEQ ID NO: 464 - DNA, 1425 bp, Methanobrevibacter ruminantium
  source 1..1425: mol_type = genomic DNA
atggataaaatatttaatctgtcgcagattaaaaataatttgagctcagagcagctaaaagaaggatcatttgggattgaatgggaatgcttaagggtcaaggaaaatggagagctctcattaagtccgcatcctgagatttttggagataagttgacaaatccatatataacaactgatttttcagagagtcaaatagagataatcactccagcctttgatacaatagatgaggctttttcattcttttcattcatgtctgatctggtaaacagttccctatcagatgatgagtatctttggtttcagtcattgccttgcatacttccagagtctgataaaatccctatagccaaatataaaggcagaggattaggggaagaatctatggagtatagaaagggtttggctaaaaagtatggccttaaaaaacagctcatttcagggattcactttaatttttcatttaaggaagagctaatagaaagcttctatgatggtgtcattggagataaggagaagatttcatataaggaatttaaggatagtctttatttaaagatttcacgtaattatattcgttatgtatggcttattatttatcttactggctgttctgttgctgttcataatagctttactttagattgtcagaaattgatgaatcataaggacaatcagggaagcgtctatagtgatagggggccttcatttagaaattcctcctgcggatataagaatttagagcatttgtatccaagttatgcctctgttgaagagtttacaagagatattcaatcatttattgataatggacatttatctgaggcaaaggaattatacactcaaatcagattgaagccaagaaacccttcagaccttttgggttccttgaataataacggcatacagtatttggagataaggacattggacattaatccattctataaatgtggccttattaagaatgatatgaatttccttcatatgtttatgatctatcttctaattaaggaagagtctgattatgaaagctggcaggaagatgctctttataatgaggaaaagactgctgaatgtggatatgaagatggagttaagcttattaaggatggcaaagaggtagttttaaaggattgggccttatctatcttggatgaaatggagatgatggttgaatcattgaatcttgaaaataagtctgttatagagttgatgaagttaaagataatcaattcagacttgacatatggtaggcgtcttgctcggttggtggaaaaggatggatatattgaaagccaattgaagctctctagaaataataagttaagaagtaagtatctggttgaagagaccaatttgctaaatgatgaaaggtttaaagaatatgtgcctattgctcttcaaggattgagcaaatag

SEQ ID NO: 465 - DNA, 339 bp, Methanobrevibacter ruminantium
  source 1..339: mol_type = genomic DNA
atgagaatagcagttgccacatcaaacggagaggatgtaaatttacactttggaaaagccagttcattatatatctacgaatacgatgaagagaatgatgaaacaagctttatagaacatagaactgtagaaatagaaaaggacagcaaacaccaaaacccaaagatcattaaggcactagcggactgtgaagtagcaatctgtgaagaattcggatttaaggcatctatctttgcagaggatgctggattaaaacttgtaaaggatgaaggaaccgtagaagaagttttaaagaaatacacagatcatgtgaagttcctaaagaatgttaaaatataa

SEQ ID NO: 466 - DNA, 1572 bp, Methanobrevibacter ruminantium
  source 1..1572: mol_type = genomic DNA
atgaaaatgataaagcaaacattaggcttaaatgtagaagataaaaaatactacctgaagctaattatagaggctgtattaatcggtttattctcaggattcattgtatccctgtatcgacttggattagaccactcagaaagcatattatcctacatcctaaagtatatccaaggagacttgaccctaatagttctatggtttgtcatacttgcaatcatgggacttatcaccgcccttctgatgaagtgggacccagacagcctaggaagcggaattcctcaggtcatgggagaggtgaaaggatactttgatgtgacatggtggaaaactctaatagcaaagttcattggaggaacccttacagcccttggaggactttcccttggaagggaagggccatctgtccaattaggagccatggctgcaaaaggagtatcaaaatacctcccaaacagcaagactgatgaaaagcgtcttttagtatgcggaagcggagcagggcttgctgcaacattcagcgcacctcttgcaggattcatattcacattagaggaaatcaacaagggatttgacagatcaatcgtccttgtaggtcttgtttcagcagttgtagcggttttagtatccaatgtattcttcgggcaaagcccaatctttccatttacatccttaaatcttccattggaatatttctggctattaatcgtcctaggaatagcaattggaatattaggatacatctacaatgtaggaatgatcaaggcagctgaaatgtgggataaattaagtttcctccctcttgagataaaattcatcatagttttccttgtaactggaattgtaggactcttcttgcctgaagtgcttggaggaggatactctatgatgcaccttatagagctaagcttgcctccattatctgtcctaattgtccttttgattggaaaataccttcttttaatattctgtttcggctcaagcgcccctggaggaatattctaccctgttcttgtaatcggagcatatatcggagcaatattcagtgccatcgtaattccaatatttggactgaacccattaatcgcatataagttcattatgatttcaatggctgcaatgtttgcaagctcagttaggactccaataactgcagttgtccttattgccgaaatgactggagttacaaattccattgttgcaatgatagttgtagtaatccttgcatatatcattccaaccattctagacaatgatccgatttatgagaccttgcttatgagactcctaaaaaagaataagggaatcgactttgataagacaaaaagcgtattggaagagtatgtggttccaatggactgtgcattgataggaactaaaatctgggagcttcctattccaaagtcagcaatggtggtttcagttgtaagaagcggaaacactctcatcccagatgagaatctagagttaaagtatgcagatgagttatttatcattatgaatcaaaacacttacccagaagacaataataagatagaatcattgatttacaacaattggaaagaagaatag

SEQ ID NO: 467 - DNA, 1308 bp, Methanobrevibacter ruminantium
  source 1..1308: mol_type = genomic DNA
atgaaaataggcattataggaggaactagaggtttaggaagaaccttagcctggtatttaaaggattttgactttgatgttacagttacaggaagagattccatagttggagctcaagtaagcgaagagattggagtgaaatactcaaacaacaacaagaagatagttcaagacagcgatatagtaatcatatccgtccctatctccagcaccgaatcagtgatagaggaactggcaccattcatgaaagacgggtcagtgatgcttgatgtcacctccgtcaaggaagggccaagcaaaaagatgaaagaatgcttgagcgaaggagtggaattcatcccaacccaccctgtcttcggtccgagaacaaccgacctgaagggacagatcattgtcctcaccccaattaaaaagggaaaatggtatcctagaatctataagttcctagaggataagggaatgagaataatagaaaccactgcagagcatcacgatgacatgatgggaatcgttcaggtcttaactcacttctcctacatctcaacagcttcagcaatcgaaaggctgcaggtagacctcaaggacacccaaaactatgaaagtccgatctataatctcatgatcgatacaattgcaaggatcgtatcccaaaacccatatcttacctattccatacagcatgaaaacaaaaagggagagaaaataagacaagccctatttgattcaatgagtgaattaaaggatgccttaagcaaagaggacgaagaggaatttgttgaaattgcacttaaggcaaccaaacatatgggagacattcaaggagctttaggtaggagtgacaaggcgataaatgccctcacccaagaatataacatattgctccaatccattggagaggaagtggggcttaagcatatctattccgatacaatccatgtaggaaaaatcaaaaaaatcgatttggatttcctatatcttgaagatgaaaacgggaaagtcaaaaagcttaagatgtctaatgtagcgattttaagtgaaaaggaactctttgaatggaaaataaacaatcaaaagacctattcaagagacataagcgctatgtttacaaaaaattcaaatccccatatcattaaagacaccttaaagctgatggaagacataattgacgtggaaataattgatatttatgatggagagcctgtaaaggaagaccaaatcagctatacctttaagatagaagctctcagtatggaagcaattaaaaactgcagagacatcttaataggatttggcggaatcagcagataa

SEQ ID NO: 468 - DNA, 1062 bp, Methanobrevibacter ruminantium
  source 1..1062: mol_type = genomic DNA
atgaaagtgacttctgaagatgagagcaaaggaactgttgagctttttcctgaaactttagatgacttatggcatttgtcccatattgtagctgaaggggacatagtctactctaagactacccgtaggattcaagatacaagcggagatttaattaggggagaccgaggggttaaaaagacattcaccttaggaatttctgttaagaatgtcagttttcatcttttcacaggcaaattaagaataatcggatcaattgtaagcggtcctgaagagtttgttcctttaggatctcaccacaccatcgaagccaagcttcacactcccatcacaatcaaaaaggaaagatggtccagctatgccttaaaacgtattgaacgagctattgaagcatctaaaaaattatctgcaatcattgtggttattgaggatgatgttgccgattttggccttatgagacagtttggaatcgaatattatggtcctatcatgggaaatgtctctggaaagaggataattgataagaataggaagaaaaacatcgaaaagttctatgaaaagattgtagactacattaataagtttgataatattcaaaccattgtccttgcaggtcctggattctttaagaatgacttctttaagtatttggagttaaagcataaggatttggctaaaaacacaatcatagaatctacaggttcaggtggccgtgtaggaatcaatgaggtattaaagaagggcaccgttgaaaagcttgctaccgaaaatagggtcgcttatgaaatatctgctgtagatgctattttaaaggagatagctatgaattctccattggttgtttatggaaagaagcaagtccatgaagccatcaatatgggagcaattgagaagctacttgttttggataatttggttagaagtgaaaacatggaagattctatggatatggttgaaaacatgtctggtgaggttttggtaatcagcagtcagcatgaggggggtaaacagcttgaagcccttggtggaatggcagctaacttgagatatgccatttcttaa

SEQ ID NO: 469 - DNA, 957 bp, Methanobrevibacter ruminantium
  source 1..957: mol_type = genomic DNA
atgtttttcgaattattaattgtattcttattatgtttttttggaaccgggatcgtaagtatagtgttccgtttcttgggaaaacgaggatatatgggtaatctatatgaaacagtccgaggagggactcctagagctgttgggatagttccttttattcttatcagtctctttatgccaagcggatttaataatcttgttttggtgatgggtctatgtgccttaatagatgatataatcggcagaaaaacaattgctaatttgccgattgagattggtcagcttgcaagaggaataggcatgctttgtgtaataggattaggatatcctattatgggagtctcatctattttggttgtccttttaatccagccaatgaatattgcagatatgcaaccgggaactgctgcagctacaaccattataatgagtttcttcactcttttagctgttgtgattatgcaagtaggtcctgtcttagagatacatccatattactatccattgcttgttttagttacatgtctagcttattgtcctttggatttcgctggaaagatcatgatgggtgaggtaggtaaccatacctttgcaatatctttaggaatctgtttttatgctctaggcggatttataggaactttaatattattcattgtaaccactggattgattgcatatttaagaagatataatctctctagattccttataaataaattgcatattccaaatcctacttttggagatttatttatggatgtcttaactggaggaggtttaggtgacttatttagaaagattctcttgaaatcaaaccagtatgatgttgataatgagatattgattgcccttggatttagacggttattgtataatccttattctcctaaccttgaaaaagtggttcaaaaagatagtagaacaaaacgtgcagatttaagaaggttttattag

SEQ ID NO: 470 - DNA, 546 bp, Methanobrevibacter ruminantium
  source 1..546: mol_type = genomic DNA
atggctgatgtttttgatgtaattaagaatagaagaggcgtaagagcttataaagatgagcaaattgatgatgaggatattgagaagatattgcaggcagctatcatggctcctactgcaaggggagaggctccatggcattttactgtagttcaaaataaggagcttcttgatgagatcaatgattctgtacacagcatattaactaattctggtgatgagcttcttgaagcaatcgctgcatctggcagaaatgtaatgcacaatgctccaactgttgtttttgtttctgctaaatcagatgctactaatatgcaagcagactgttctgcagctattgaaaatatgcttcttgcagctgaaggattagacattgggtcctgctggttaggtcttgtcgctttattcttcagcgttgaggaaaacttgaaaaagcttcacattcctgaaggttatactccattatacggtgtttccttaggatataaggttgaagaaaacgaaccaaacccacgcagtgatgttttggttaattggttaaaataa

SEQ ID NO: 471 - DNA, 1374 bp, Methanobrevibacter ruminantium
  source 1..1374: mol_type = genomic DNA
atgaaagaaactaaaaaaataaaaaacattgtcattggagcaggccctgcaggaagacttgcttcatttgaacttggaaaattaggtgaggaaaccttactaattgaaaagaaatacattgcagggacttgccttaatgaaggatgcatggttgtctgtgcattgactgacatcagccgcttttggaagaattgccaaagattttccgaaatgggattggtcaatggacttttagagttgaactacaattccatatgtgaaaacattaaaaagacccaaaaattccttcgtaaacttaaccaagaagaaaatgaaagcgtgagcaataaagttctctatggagaagctagtgtagaagtggatgaagatgagaaaatcatcgttaccgtcaaattggacaatgacaacgagcttcaaaaagaggagtacaagggaaaagaaactttgagctttgaagcagaaaatttactcatagccactggagcaaggccattcattccaaatatccctggagcagaatatgccctaacaagcagtgatgtaattaatctagatgaagttcctcctaaattaaacatagttggaggaggaataattgcaactgagctttctaacatcttttcaagctttggaagcgaggtaaaaatcattgcaagaagcgaaattctaaaagacctagagcctgaaatcaaaagttatgtagtcaaaaagattatcaatgatgttgaaatccacgaaaacaccaatgtcctaaagattaacgaagactcaatcgaaacagataatggagaatttgaaggcaaaacattaatagccaccggaagagtccctaattctgaaatactaaaaggacttgtggatttgaatgaagacggttcaatcaaggtcaacgaattcttccaaacatcaaaaccccatatctatgcagcaggagatgtcaccggaggaataaccttaaccccatatgctagaaaagagggaatttcagcagcaagaaatatggctggatacttgaataaatttgaagagatgattgttccccaatctttaactctagatttggatgtgagcttcactcaaaagacagataaagaagcagacccagataagattgaagatgtaatcatcccaggccttggaggacctcatgcattttggagaattctaagaggagaaacaggccttacaaagatttcattaaataccgaaaccgatgaaattgtaagagcaagccagatatccccatcttcaattgatgatacagcttatcttgcattcctaatgaatttgggaattaaaaaagaagcatttgatgactttttagaagttcatccatctactgatgcttattataaaattttaaagattatgtaa

SEQ ID NO: 472 - DNA, 267 bp, Methanobrevibacter ruminantium
  source 1..267: mol_type = genomic DNA
atgtgtattgctgcaccagctaaaattgtagaaatcgatacagaatctaacatttgtgctgctgattttggaggagtcagacaaaatgcaaaattggatcttcttccagatgctgaaattggcgattatgttttaattcatgcaggatatgctatagaaaaactatccgaagaagccgctaaggaatctttagagtcttggaatgaattaatggaaatgttagatgaagaagacagagaacgtgaattacaaatgaatggcttataa

SEQ ID NO: 473 - DNA, 495 bp, Methanobrevibacter ruminantium
  source 1..495: mol_type = genomic DNA
atgtgtgaggaaattaagttattgaaggatttgggatgtccagaatgggttatagaacattctaaaggtgtttcaagaaaagcagttcaaatagcgagcaattttgatgatgttgatattgagcttgtaagagttggaggtcttttgcatgatatcggaagatctaaaaccaattcaattgagcatgcagtcattggagcaaaaatagtttctgatttgggctattctcaagagatagtcaatattgttgaaaggcatattggaactgggctaactgaagaggatgctaaggaattgggacttcctataaaggattacactcctcagactcttgaagagaagatagtttctcatgcagataatctttttaatggtgcagatgaggttgatgttgattttaccatcaataaatggaaaagaaagttaggtgaaaatcatccatcaattgagaaaataaaagagattcatgaagagttggttggtcgttttgagtaa

SEQ ID NO: 474 - DNA, 909 bp, Methanobrevibacter ruminantium
  source 1..909: mol_type = genomic DNA
atgaaagttatttgtacagttgacgagtccttatacaggccagaagtagttcgttggagagaaagaatggctatgatggagccattaggtgaagtggttgtagcgcttccttgcagtatgaaaaagccatattccaattcacagtctcatcagaaatttaaaagagctaccaaaggctatcaggaagttatagttacctctccatttggtatttgtcctcgtgaaatggaaaacactttcccaattcagtcttatgatgtgacagtctctggagattggagctttgatgaggtgagaatctctggtgagttgttacgtgattatgtaggagataagcctgtcattgccaatgttcatggaggctatgaagaggtttgccgtgaataccttgacaattgtgtttatgtctgtcaggatggacgtcctacctctcctgattcaatctatcatttaagggaagagcttaaaaagtattctaaggtcaaacatagggataaggttttaaatgaacttagatccattgcaaaatatcagtttggtcctgaagcatataagataattagcgatgatgttgttgctaagggaaggtatcataggactatctatagcgagggaaagcaattggctcttttaaatagggatattggattgtatactctcaatttggaaggtggaagaagacttgcagagcttgacattcatgttgttgagattgattttgacttaaagactaattctgtatttgcgccaggaatttccaatgctgatttgagcatcgttccaaaggacgaggttgttgttgtaagggacggtgaagtggtaggtgttggaaaggctgtcttaactggaaaagagatgattgagtctactagtggaatcggtgtaaagataaggcataggaaaaaataa

SEQ ID NO: 475 - DNA, 288 bp, Methanobrevibacter ruminantium
  source 1..288: mol_type = genomic DNA
atgtctgaagaattagcacttgctgttaaagatgcagtttctgtagtaaacgaccctcacatgggtgtaagtattgtagatatgggtattgtacaatctattgcaattgaaggttcaactgctgaattggtaatcaaacctaccaatcctggttgtatgagtgttactcgtattgcagctcaagctaaagctgaagctttaaaagttgaaggtatcgataaggtaaaaattattattgaaggtcatgtaatggctgattctcttaatgagatgctcaatagagattaa

SEQ ID NO: 476 - DNA, 504 bp, Methanobrevibacter ruminantium
  source 1..504: mol_type = genomic DNA
atgtgggaaagtttaaattcaaaatttagcaaatatcctgcaagaatgactgtggctcaaaagatgtttgagctaggtttaagaatcggtgaagacaataagatttattgcggaaatcttaagatcagtgattctgctttagctgcagctgcaaatgtggatcgtagagttattaaatctacagttaatgtaattgttcaagatgaagatttatttgaggtcttttcaaacattgtccctgcaggaacattgcttaaaaacattgcaaaaaatttaggattaggtgtagttgaaatagaagctggagaagaaagcgaaggtattttggctgctgtagctacaacaatgagcgaacatgatatagacattcgtcaagcttatgctggagacactaaatttgaaggaaatcctgttttgactattattactgaaaatccaattccaggtgaacttttaaatgaatttattaagataaatggagttttaaaggtttcagttttataa

SEQ ID NO: 477 - DNA, 1074 bp, Methanobrevibacter ruminantium
  source 1..1074: mol_type = genomic DNA
atgctaagcgatcctattattcaaaagaattttccgggaacatttgaattcgaagaggccatggttattattgattgtctaaaggaatggcctaaaagcagattatgtgatgataaagctattgcaaggaaagccgctaagacaattgacatagacattaagacagttagggatgttcttgctttacttgaagtaaataactgtgcttataatataaagattaatgagctatgcattaaattaattaagcattatcgttctggaaaacttactcataagaagattgctaaaaaacttaagatagatgataatattgttgatcagttcattgaagaaaatgaatctcttttagaagaaactaaaaagacttattctcaagaaactttaatggctttaaatgatagtttcaatgactttattaaaggaaggaaacctcttaaaataaataaggatgaagaggaagataatccagatgaagattctaaagatgaaaaggctacagatgaagagttcaaatctggagaagtagaaattaaagaggaagttgaagaaaccaaagaagaagaggaagtagaggaagaaaaacctgctaaaaagagaactgttaatcaaaagttctggtatcttacctttgatgaagtaatcgattgccttaagaacggatatgctacagatgaagaaatatctgaaaaaatcggttgcaagttaaatatcgtaagaaaaatcctttacagcttatatgacatgcatttagcaagctataagagggataaggataaggaaacccaatggtatacttacgattggaaattcaatgaaagcgaatataaaaaattagaattgaatattgcaagtgccgaacttaagaagctaaatgaagatttagaatatgaagcgaacaatatgttcttcatttgtcctgtgggacactaccgtcttgactttgaggacgcttccactgtcgaatttatttgtcctgaatgtggggcagaattagaatttgatgacaattctgaagttgttgaagctttgaaggaccagattgcatatattgaagaaatgatttctgaatag

SEQ ID NO: 478 - DNA, 903 bp, Methanobrevibacter ruminantium
  source 1..903: mol_type = genomic DNA
atgacagacaatccaaactataaagaagcagaaactgagcaaggacaagtttacaaatatgttgagattagaggatatcaagttatccctattgaaacacattatataaagcctaatgaaagcatagactttatgattgatgacatctcaaaattatgcaagtccggcgactatttagtaatagccgaaactccaatatcagtctctcaaggaagattggttgatgaagcagactatactccatcccttaaggcaaaattcctagccacatattggagcaaatacttttggggatatgtccttggacctattctaggaataaaggagagaacaattaaaaaccttagaaaacttccagaagagtctaaaagacataaggaagttgttctccaattatatggttggaaacatgcattaaagccagcttcagaagcgggaattgacttaagcaatgctccgggaacttgcgtatcccttcttcccgaaaatccagaaaaggttgcaaaggaaatcagcgaaagccttatggaaaaaacaaatcaagatgtcaccacattaattattgacacagatgcaacctatagaagaaagaacaaatactttacaggacttcctattgcaatagatggaattgaagcagataagggagtttttggatacgcgttaggacaattgtctgaaaatatgggatccaccccacttggatgctcaagggaaatctctgttgaagagggaataaaaatagccaatattgctgaagactatcagaaatcattatctacagcaatggagacaatctatagcgcaaaggacgttttaaattcagacactcctgaagttactgtagaatccttggattcaattattcatacacctgctgttttagttagaaaaatagaataa

SEQ ID NO: 479 - DNA, 570 bp, Methanobrevibacter ruminantium
  source 1..570: mol_type = genomic DNA
atggaaaaatcaataacttattttgaaaatcccggtgctgagaatactgatgcagttatcgaacttgttcgtgaaagattagaaggttctaacatcaaatatgttgctgttgcatcttctacaggtgcaagtgccttaaagttaaatgaagctttaaaggatcttgatgtgacaatagtaaattgctcccatcatgttggattcagggaacctaataaggcacaaataagtgctgaaactaagactgaacttgaagagaagggaatagtcacattcattggttcacatgccttaagcggtgttggcaaaagcatttccaagaagtttggtggagtcactccagttgagatcattgctgcagtctatagaactttctctcaaggaataaaggtatgtgctgaaatttctatcatgcttgcagatgccggattggttcctgtaggtgaagagataatcgctattggtggaacaggctctggtttggacactgctgctgtattgactcctgcaaacatgacaaatgtctttgatatgaagtttcatgagattatagcaatgccaagaccttaa

SEQ ID NO: 480 - DNA, 1170 bp, Methanobrevibacter ruminantium
  source 1..1170: mol_type = genomic DNA
gtgaaatttatagatgatgcaatcaaagaatctgaggaaagtattgaaaaaactgcttctcctaaaaaatcagatgatgaattagataaagaattactcgacattatcagtcgcagtcgagctaaaattattgtagtcggtgctggtggagccggaaataacactatttcaagattgactgaaataggtattgaaggcgctgaaacaattactgtaaacaccgatgcacaagacttgttctacagtcaagctgataaaaaattacttttaggaagacaaacctgtggcggtctcggtgctggtggagaacctgccatcggtgaggaatctgctgaagaaagtgaagaagacattagagcagaattggaaggggctgacatggtatttgttacctgcggtctcggtggaggaaccggtactggatctgctcctgtaattgctaaagtggctaagaaagctggagctttaactgtagctgttgctaccatgccattctctgctgaaggtgtaaaaagaagagaaaatgcagaaatcggtttagaaaaactccaagaaaatgcagatactgtaattgtcattcctaatgataaattattagaagttgctccaaaccttcctttaaacaaagcatttatggcttccgatgaaatcttaggaagagctgttaaaggaattaccgaactcattaccaaaccaggactcatcagtctggactttgctgatatcagttccatcatgaaaggctctggtatggctatgataggtatgggagaatctgaatccggtgacagagcaatcgaatctgtacatgaagctttaagcagtcctttattagacattgacatttccaatgctaaaggagctcttattaacatttcaggaagctctgacttgaccttgcaagaagctgaaaaaatcgttcagattgttgctgacagattagatcctgaagctaatattatttggggagctcaaatcgatgaagaattgcagaacatgatacgcacaaccattgttgtatctggagtaaaatcacaatataattcctcttcaagcggaagtgatgatggagaatttactgatattgatgattttactgatgctgacattcttggtgaagacacagctccaaatgatccattagatgaattcctagacggaatcttctag

SEQ ID NO: 481 - DNA, 180 bp, Methanobrevibacter ruminantium
  source 1..180: mol_type = genomic DNA
atgaattatcaagaagaattaagtgatttttggaaacaatgtaaaagagttttaaaagtagctaaaaaaccagaccgtgaagaattttttgatttttctaaagttacagctattggtatagctattattggtgtaattggttttgtaattgttctattcggccaattattaggattataa

SEQ ID NO: 482 - DNA, 492 bp, Methanobrevibacter ruminantium
  source 1..492: mol_type = genomic DNA
atggaagatgataaaaattccatatttgctcttaaaacatcagcaggtcaagaaagaactgtagctagattgttaggtatgaaagcggataagcctggtgtagatattaaggcaatagttgtgcctgaatctttaaaaggttatatcattgtagaatctgctacaaaccttgatatgaagaaccctgatatgaaagttcgtcatttaagaggtattgtaggggcaaaaagagatggaaccattgatccatccagtcagataaccttggaagaagtcaaaaaattcttaaagccacaacctattatctcatctatacaaaaaggaagtattgtggaacttgtttccggtcctttcaaaggagaaaaatcaaaagttgtccgtttagatgaatctcgtgaagaagttgttctcgagttaattgaagcggcggttccgattcctgttactgttaaagctgatcaaattagaattattaaaaaggaggctgactaa

SEQ ID NO: 483 - DNA, 483 bp, Methanobrevibacter ruminantium
  source 1..483: mol_type = genomic DNA
atggctaaagatacagttgaagttcttctcgaaggtggaacagccactcctggaccaccattaggacctgcaattggacctttcggggtaaatatgatgcaggtagtagaagaaattaatgaaaaaagtgctgatttcgcaggtatgaaagtacctgtcataattactatcgacagtaatacaaaagaatttgaaatcgagattggtactcctccaacaactgcccttattatggatgaacttggcattgaaaagggcgctcatgaacctggtgctgaagttgcagcagatttatctgtagaacaagctttaaaaatcgcaagaatgaaattcgattccttactttcaaacgattacaaaagcgcaaccaaagagatcatgggtacctgtgttagtatgggaattaccgtagacggtaaagatcctagagatgctcaaaaagcagttgacgctggagaatacgacgatatcttagtagaatag

SEQ ID NO: 484 - DNA, 639 bp, Methanobrevibacter ruminantium
  source 1..639: mol_type = genomic DNA
atgacacaagagattattgatgcggtgaaggaggcaaaagaacaagctaagccgagaaacttcactcaatccattgatgttatcattaacattaaggatttagatgtcagaaaaccagaaaacagatttagcgaagaagtagctcttcctcacggacgtggaaaaccggtcaagatcggtgttatcgctgacggggaattagctcttggagctaaaaatgctggtgtcgatgttgtgatttccaaagaagatttacaagaatttggtaaagacattaaggcagctaaaaaagtagtaaactctgttgattcatttatagctcaagctgacatgatgccacttgtaggtagattcttaggtcgtatcttaggacctcgtaacaaaatgcctaagccagtgccagctagcgctaaaatcgagccattactcgaaagacaacaagctactattaaagttggcgtaaaacaacaaccatctattcaaatcttagttggaactcaagacatggatgacgagaagttggctgaaaatattgaagctgttcttgcagttttagaccgcaatttagaaaaaggaagaaaccaaataaaatccatgtatattaaagcgactatgggttcagtagtgagggtgatttaa

SEQ ID NO: 485 - DNA, 1008 bp, Methanobrevibacter ruminantium
  source 1..1008: mol_type = genomic DNA
atggctcacgttgctgaatggaaaaaagaagaagttaatgaacttaagggcattattgattctgctgaagtagtaggtattgttaacttattaaacattcctgctagacaattacaggaaatgagaaaaaccctttccggtaaggctaccatcagattatcaaaaattaaccttatgaaattagctttagaagattgtgtaaatgagaaagctaacattactgagctttcagattatatggaaggtcaacctgcacttgtatgtaccgacatgaatcctttcagattgtacaaaatattagaagacagtaaaacatctgctcctgcaaaagcaggcgctattgctcctgaagatattgttgtacctgctggagatactggtttcccaccaggtccgttcctcggtgacttacaacaaataggtgtacctgcaaaaatcgacaaaggaaaaattgtagttcaaaaagacactacagttgtagaagctggagaacctgtccctaaagctgtcgctgctgctttaactaggatggatatcaaacctatggaagtaggtatggatcttaaggctgtatacgaagatggttccatctttaaggcagacgtattggctatcgacgaggaagaaacctttgcagatattcaaaatgcatttactagagcattcaacttatctgtattcagtgctttcccaaccagtgaaacaatatccacaatcattagtactgcacataccaaagcttacaatgttgctattgaagcagctattcctactggtaagacttctgatatgttaattgcacttgcaaacgctaagatgttagcattagctggtgaattagcttccgatgcaatcgacgatgaaatcgctaataagttagcaaacgttgcagttgctgcagcacctgtcgttgaagaagcagaagaagaagttgaggaagaagaagaggaagaagaagacaaaagcgaagaaactgcagcacttggtttaggtgctttgttcggttag

SEQ ID NO: 486 - DNA, 312 bp, Methanobrevibacter ruminantium
  source 1..312: mol_type = genomic DNA
atggaatatatatatgcggcaatgattttgcacaccacagaacaagatattaatgaagaaaatgtaactaaaatcttagaagcagctggcgctaacgtagatgattctagagtaaaagctttaatcgcagcattagaagatgttgatattgaagaagctatggaaactactgctatggcagcagctcctgcagcagcagctcctgtagctgaagcagcagtagaagaagaggaagaagaagaggaagaagaagaagacgaagaacaagcagctgcagcagcaaccgctggtttaggtgctttattcggatag

SEQ ID NO: 487 - DNA, 726 bp, Methanobrevibacter ruminantium
  source 1..726: mol_type = genomic DNA
atgatatgtcctgagtgtggtgcggaaaatcaagactctgcaaagttttgcaagcaatgtggaacttctttaaatcctgttgccacaatgaaaaaaactaattctgatgaatcaagacctatcaagtcaggtatatttaatgaaaataattcttcaccttcctcctttgaagccaaaggatcaggtggagacaataaaaatctaattataatttgcttaactgtaattatttgtgctgttttgatagcaggaggcttaatattcctatcaaatggttcaaataatggaaatgactctagtgatgttggaaattccataagtcttccagacaattctgttaatcaaacagatgatagtcaaaatcaaactgacaccgaacctgctcctaaaaagtctagcgtttcagatatgaagatactgagcggaagcttcacaaccggaagctctctaagcgataagacttggtgttccgtttatgttggagaaaagtatgctggcgaggatgttaaaataagcgttttatacagccgtgatggctctgacttgaatcaaggaaagattgtgccaaaaaatgttggttcagatggtactgtaagcgttccaagtgcagatgcatttaagtattatccagatcatgctttagtaaccatttatgatagcaatggtaatgttttagacactcaagaggttatcatgagtgctaaaagtggtactcagacattttaa

SEQ ID NO: 488 - DNA, 606 bp, Methanobrevibacter ruminantium
  source 1..606: mol_type = genomic DNA
atggaaactaaaaatcttataatcatttgtgcaactgtaatattggctgttgtaatagttttatctgcttttatttatgtcaacatgggcaatgaaactcatataagttctaatattgcagatactttacaaaatggcgatgaaatcgttgtcaagcttgtggataaggataataagcctttggtaaataagaccattagcttaaactttaaagatgaaaatggcaagggcaatgccgttagctatgatcttcttactaatgacaaaggtgaagtatattataatgtcaatttgactgaaggaaaatatgtattttccgcagattatgctggagaaacatttattggctcatcaagtttaaataagtctgttgaagttaaaaaagatgttaaaactgcaaatctcagttctacagatacgactaaaaccgctaaaaccaagacctatacagattggcaggaagactatgagactggacgttatgacgaagacggaaatcctatctataggtctataatgtctacctccggaggccaatatgagcctggaatctatgaatgctattggtctgcaaatggtccaatcagtgaaagaagaattggttaa

SEQ ID NO: 489 - DNA, 348 bp, Methanobrevibacter ruminantium
  source 1..348: mol_type = genomic DNA
atgaaatgtccggtttgtggctgtgagaatccagatggctataaattttgtcatgattgtgggaatcctttgataatgcctgattatgatgaaatgaataatgattacccctcctttgatagcaaaaagcttatcataataggttatataatcgctatcctattcggttggggaacttttatattaagtgccatatttggatcctatggatttatcggtttcatcgggctctttttcccaggattcatgttaaatagcaaggattccaatatccgaaagcacgcctatatccaattggcaattatgattgtaggtatacttgcgacctttttagtcttatttagataa

SEQ ID NO: 490 - DNA, 726 bp, Methanobrevibacter ruminantium
  source 1..726: mol_type = genomic DNA
atgaataagaaacttaaaataatcctttatattttattggctttaataatcattattgcaggaattagcctttggtatttgatggattattctcctgcaagtgcagatgctaattctcttattaatggaacatcagaggtttcagtaagtaaaataaacaatggattgttcttagatggtcctggaaatgatagcgctgtcatattttatcctggtgcaaagatagaatacactgcatatctgcctttattaatcaatctgtctgcagatggtgtagattgctttttagttgaaatgccttttaatttagcattctttggaacaaacagtgcagatgaaataattaataatgcttcctataattattctaattggtatattggaggacattccttaggaggagtcatggcttcccgctatgcccataatcattttgataaaatcaaaggagtgatactccttgcagcttatcctgcagatagtttagagaatggttctgtgctttccatttatggatccaatgataagtccttaaataaggaatcttatgatgatgcaaagaaatatatgccaagcaatttcactgaatatgtgataaaaggtggaaatcatgcccagtttgcttcttatggcaatcaaactggagatggagtagccactatttccgcataccagcaagaaaatgaaaccattaaagatattcttttatacatcaatggttcttaa

SEQ ID NO: 491 - DNA, 2733 bp, Methanobrevibacter ruminantium
  source 1..2733: mol_type = genomic DNA
atgcttaaaatatttgaagatttaggatataagaaacaaatatgtaagacttgtggtcaagagttctattcacaagtggacagagacacatgcggagacgctccatgtgacgaatatggatttatcggaaatccagctactgacaagccttatgatttatacggaatccaagagacttttagaactttcctagaaaaagagggccatgaacctattagtcgttatccaattcttgcaaaaagatggagagatgacgtattcttagttggagcttcaatattttgcttccaaccttgggtaacctccggtttggtggaacctccagctaatcctcttgaagttgaacagccatccatacgcttgaacgatgtggataatgtaggccgtaccggaaggcacatgacctgctttacaatgggttcacatactgtaatcaataagcctgataactttatctattgggaagatgagacaatacgcctttgccatgagttcttcaagtcaatcggaatcaatacagaagagcttacctttatcaagtcatggtggaaaggtggaggaaacgaaggcccatgttatgaggtatgctgccgtggggtagagcttgcaacccttgtattcatgcaatataagacccttgaaaacggagataaggaagagattccaatcaaggttgtggataccggatacggacttgagaggattgcatggatttcccaaggaactccaactgcatatgatgcctgttttgctccggttgttgataagctgaaggaaatcactaatgtatccgttaacgaagagattttagctagaaatgctgagattgcaggaatgatggatattgaggatattggtgatattcgtgatcttcgccaacaggtagctgacagcttaaacatcagtcttgaagagtacttggaaaatgcagagcctatggaagctatctatatcattgcagatcatacaagatgcttggcatttatgctggctgatggaatcattccatccaacgttaaggaaggataccttgcaaggcttgtattaagaagaactatcagattcatgaaggaattagagatggaagagtctctatctgacattatggccattcagcttgacttcttaagggaattctatcctgaaatcgccgagtcccaagagcatatcatgaacatcatcaaccttgaagaggaaagatatgcaaaaaccattgaaaagggtaaaaagactgttaagagaacaatcaaacgtcttaaaaaagaaggaaaaacttccatgcctcttgaaacattgattgatttatacgacgctcaaggaatgcctccagaaactgtagaagagcttgcaagtggagataaggactttgaggtctttgtgccagataatttctttacaatcgtagcggatatgcacgaagaggataaggtagctaaaaaagagacctttgagcttgatgttccagagactgagcttgacttctataaggacatctatcaaaaggaatctgatggaacaatcattgaagtcgttgaaaaagatggcaatttaaacattattcttgataggacaatattctaccctgaagggggaggtcagccttcagacattggtataatttctatagaaggcacaatctatgaggttgtctatgctgaaaagttagatggtgttgtattgcataggatagccacaaaagaggatgaggatgtggcttcccttgtagaggacttaaggaaatatattggaactgaagtccatatggcaatcaattggaataggagaataacccttgcaaggcatcacacaggtactcaccttgtaattgcagctgctagaaagattttaggccagcacatctggcaggcaggtgcacagaagggtcttgcacgttcccgtatcgatttggctcattataaacgtatcaccataggggaattggatgagattgagaaattggctaatgagtatgtgatgatgaacattgacttggatatcaattggctaagccgtgatgatgcagagaagaaatatggtttgatattataccaaggtggtgtagtgccaggctctcaaatcagggtagttaagattccaggcatagacgttcaggcatgtgcaggtactcacctttccagaaccggtgaggtaggtccaattaaaatcaataagactgaaagggttcaggatggtgttgaaaggattgatttctcagcaggtcttgcagctattgattccattcaaaatgataaggcaatcataaaggaaagtagtgatgtatttagtgtaaccaatgatcaattgcctaaaacctgtgaaaggttcttcaatgaatggaaagctcaaaagaatgagattgcaaggcttcaaaaggaaattgctaatttaaaggtcagcacacttgcagaaaatgcatttgaagttaatggattgaaagtgcttaaggaaatccttgatgcaaacattaaagagcttcaaaagatagccactgactttacagacaatgacaaggttgatttggtcttcattggtaataatgagggtaagattgtaggttcagcaagtaagaatgctattgatagtggagttcaagttaataatattattaaggaagctgcttccctacttggtggtggcggcggaggccgtccaactttagctcaaggtgcaggtcctaatgcagataagatggctgatgctttagatttggctgttgagttattgaataaataa

SEQ ID NO: 492 - DNA, 2448 bp, Methanobrevibacter ruminantium
  source 1..2448: mol_type = genomic DNA
atgattaaaaagataacgattttgtcagttattctgattctgtttttagcagtttcaacggtagctgcaattgatgtggatacgaatgataatttggatgatggtagttcttctaattcagatttaattagttcttcttcattggattcttctagttctgatgatgtttcttctggttctagtgaggtttctagttctgatgaatcacttgatggaaataatttgtctgatggtaatgtttcttcttctgatgagtctgttggtgctgataatttgtctgatggtaatgtttcttcttctgatgagtctgttggtgctgataatttgtctgatgatgagtcatcttctgatgctctatctgaagaattgcctaaaactgaaacagtcattaaagcagacccaataaattataattatgcttcagttaaaggattaaccattaatctaacagattctgcgggacttgctttatccaataagactttgactgtcaaggtcagtgctttaaataagacttctaatctgactaccaattctaaaggacaggctatctttaagctaagcgcttctgttggatcatatgatgtttttatttcttttactggggatgaaagctatgctccatccaatgcaagttctaaaataactatcaaaaagtcctcaacaaagattaaattgagcaatattcacggatatttgactatttcaaattatgtaagtgtcacattactggattctgctggaaagcctataaaaagcaaatcagtaacaattcaagttaataaggcaaaatataatgtcaaaacagacagcaaaggcattgctaaagtcaaggttgcaaataagattggaacttactctgtgaatgctaaattcagtggagataagaattattacgcctcttcaaatagctccaaattgacaataactaaaatgaaggtttatattaaggctccatctgtaaagtattatatgacaaacagctctgctccttatttgacaattaacctgactaacgttaaaggcagtccacttgcaaaaaagaaagtctctgttaagataggcaaaaagacttatacattaaagaccaattcacagggaatcgctaaattcaagttcactaagaaagtgtcaagctataattgtaagattaattttaaggccacttccaatttctatggtgcatctgtaaattcaaagatgactattcaaaagatgccaacctcccttaaggcacctagcgttagcattaattcaactaactatggaaaagttctaataagcttaaaggatggaaagggaaaagccttgaaaaatactacagtcactgtaaatgtcactgaacttaagaaggttttcaccctaaagacaaatgccagcggagttgccacatttagctttaatggtgaaaagacattcaatcttaaaataaagtatgcaggaaataagaattatgcagcaagctctgtaagttctaaaataaacgttaaacagattaaggtaaagctcagcgatgtcattggtgcatcaagggtattgattgactatgtaaacagaacaaaggacttgccttcaaatgtccaatataataattataatttcactgtcactcagcttacatatttggcttctaaggcagttaaaaatataaacaataagaattatggagatattgttcttatttctgttccaaaaagctataagtcctctggagagatttatgatacagtttataagaaggactttgttaagatagcaaatagcgttgtcggatcttcttacaattataagaataaggagtatgtaagctattccatttataaggttccatttaaggtatattccattagctttgctaaggttctaaacttctatggaaataataagaaattgcctaattattcactctttacccttgcagactttgctaaggttaaagataatggaggatataatttctatctgacaactgataatattgcaggtaagaaatctgatttgaatatgcttaagagcttagctaagaccttaaaatccatgggatataatgcagtcattgtaggtatcggtccggatatacataatgtggcttataggtatggatgtactggaaacaattctgttttgcttgcttgcttcggcggagttgatgtaggatgcatagaagaatgggctggcgatttaggtgacttgaatggtcattcatttgtcaatagctatcaaggagctcatgttttaggattatggtttactaagccatatggtgcatctgtaagcttgaataagaaggtaggcattgcatgggatgcagattatggtttcccattaaacactccggctaaatatatgaaaagtcataatattagctatattgagactggaactgttgcaaatgcatgtaaattgttaagcgagggtaaaatgggtggtcctcaattgattagctaa

SEQ ID NO: 493 - DNA, 1161 bp, Methanobrevibacter ruminantium
  source 1..1161: mol_type = genomic DNA
atgaggtattttatgaattatgatttaatcattgctcgatatggtgaagtagcattaaaaagtaatcgagtaaggcgcagatttgaaagtcgtttagtaaataatataaaagcgtcaatagatgcggaagtgaaggttaaccaagcaagaatttacatctttccaaaagagtttgatgatgcaatagagaaactggagaggatatttggaattgtatcatattctcctgcaatatccaccaaatccacttttgaggatattgaaaaaactgttggggaatatgcagagcatctttatgaagaaggtcttttggatgagaacactaaatttgcaataagctgcagaagggtaggtcaacatgaattctcttcacaggaaatggctgcttttgcaggggctgttgtagttcgcaaatactcttgtcctgttgacttgtcaaatccagaacttactatctatcttgaagtaagagacggcgatgcttatgtttatcacgaaaagattgaaggtccgggaggccttcctcttggaactcaaggaaaggtcgtttcacttgtatcaagtggaatagactctcctgtagctacatatcttatgatgaaaagaggctgtcaggttattgctttatattgtgataatgagccttatacttctcctgaggcactgcagaactttaatgacttgatagatcaattgaatctatatgcaagcggagctccaatcaaaagaagggttgtaaaatatggagaatacctttccacctgtaaggcggaggctccagataagatgacttgtgttctctgcaagtctggaatgtataagttagctggcaaattggctaaaaagcttaatgcagaggctgttattgatggaagcagcttaggtcaggtagcttcccagacacttccaaacatacttgcaacccgtgaggatcttgatgttccggttttaagtccccttataggtcttgataaattggagataactagaattgcagagaaaattggcacattcgagatttccaaaagggatgatgggggctgcaaggcagttccaaggtatcctgaaacaaatgcagatttggaatttgtaaaacaggtaaaagaagagatgaatcaggatgaagagcttgaaaaggcttttaagaccattgtttattag

SEQ ID NO: 494 - DNA, 627 bp, Methanobrevibacter ruminantium
  source 1..627: mol_type = genomic DNA
atgagggattgtagcaattgcaatagggaatcttgccttttgcagaaagtagcaggaataataatggtttttggcagcttatactatattcttgctgaattgatttcagcaggatttttcaatgattccttaatcaacacctatctttttcataccatttcagaattgggagttcctgtggccaattctcctttatcctttttaatgaattctgcttttattctaattggaattactcttttattaggttattttgctaagtttagggattttattataaaatataaattaatcatttccattttggcggtcattacagctcttggagtgataattgttggctttattcatgctggaaatccattgactgatggctatcatagtttaggcgctgttatggctatccttggcggaaatgtgatgctgattcttgtttcaagagctatggctgaatttgaaagctatcagaaaatcacttttatattgggaattattggatttattgtcttttggataatgtttttcaatctagaaagcctttatatgcctgtctttgaaagattatctgtttataccttaataatctggaattttatgactggtttttatttgtataaaaatagttaa

SEQ ID NO: 495 - DNA, 567 bp, Methanobrevibacter ruminantium
  source 1..567: mol_type = genomic DNA
atgaacactaacagatttgaaacattttttgatgcgattatagcaatcataatcacagttcttgtattaaagttatcacagcctgcagctcctaccgttcctgcatttttagccttaaatgcaaggtttataacttatgcaatctgttatttggccctttttatcatttggtatgataatcataatttattccaggtagttgaagagataaataatactgtattgattatttatgccattcagatgtttgcaatttctcttcttccttattttgctacttgggtggcattgaatgtgaattcaattgctgctgagacaatgtttggaatcgattttcttgcaatacttattctttatgtattgtctatttatgcggtttatagggctgacccctataattgcggaatatctaaaaacaatttcagaaagatctattgctatattccgattataatcgttcttatagggatttttaataagctatacagtttatactccaggaatatttgtctgcattctgattgcactgatttgctggcttttcttttcaagacttcaaagacctga

SEQ ID NO: 496 - DNA, 522 bp, Methanobrevibacter ruminantium
  source 1..522: mol_type = genomic DNA
gtgattacagtgattgtccttgagattccaatggctgtagatggatcttggggagctttgcttgatataaaattggaatttattgtttatgcagtaagttttatcgtttgctttaacttttggaattataacaataatgtttttagcatggtaaataagatagatcataaggttatctggtcaataggcattgcaatgtttttcctatctttaattccttatttgactacattcgttgccttaaatcctgatgcattcttgcctagcttcttatatggtttggactttataatcgttgctattttgacaatttttactataaatgctttaaagaattcggataaggcaaatattgctcttcagatagcattggcagataatcagccatatgttacaacaatcgtatttgtattgtttggaatgatcgttggctattttatttatccattggctattgtgattgcatgcttgttttcaataattactctatggttaatttcttattataaaaagcatggctaa

SEQ ID NO: 497 - DNA, 1101 bp, Methanobrevibacter ruminantium
  source 1..1101: mol_type = genomic DNA
atgaaaactactgtaagtgtaatcaaagcggatattggaagtgtttccggacactgtgtatctcatcctgcattaatggaaaaatgtgatgaggttttagctaatgctttagaaactggaattcttgaagattactatataacccgttgtggtgacgacattgatttaatcatgacccacagaaacggtgaattgaacgaagaagttcacaaaactgcatatgatgctttcattcaagcaactgaaattgcaagagacttaaaattatacggtgcaggtcaagacttattatctgacactttctctggaaacgttaaaggtatgggtccaggctgtgcagaaatggaatttaaagaaagaagaagtgaccctgtaattgtatactgtatggataagactgaacctggtgcattcaacttgcctatattcaagatctttgcagacccattcaacactgcaggacttgtaattgacccaagtttacatgacggattcagttttgaagtctttgatgtaatggaacacaaaaaagtagtattagactgtcctgaagaaatgtacgacttacttgcattaatcggttccactggaagatacgtaattaaaagagtatttaagaaaaacggtgaaatcgcagcagcagtaagtactgacaaattaaacatgttagctggtgaatacgttggtaaagacgaccctgtagctattgtaagagctcaatctggtttccctgctaatggtgaatgtgtagaaccatttgcattccctcacatggtaagtggatggatgagaggttcccacaacggtcctatgatgccaaccagccaagaagaagctaacccaatcagatttgacggacctcctagggttgtaggtttaggtttccaagtaactgatgctaaattagtcggtcctgtagacttatttgacgaccctgcatttgatgaaaccagaagacaatctgcaaacattgcaacctacatcagaagacacggtccattcgaaccacacagattaccatctgaagagatggaatacacttcattacctggcgtaatggaaaaattagaacctaggttcgaagatatggatgatgactaa

SEQ ID NO: 498 - DNA, 378 bp, Methanobrevibacter ruminantium
  source 1..378: mol_type = genomic DNA
atgagtttttgtccaaattgtggagtggaacgaaaagaaggaagtcatttttgccatcattgtggctatgattatagagaagctaattcatctgggatgggctctagttctagttctgattcacaagtaaatcagaatcctagttttaattctcaagtaaatcaaagttctacttataatgtcccaacaaagcaaaatcctcataattttgctaagatcactggttatatattgtcctttttaatacctgtatttgcaatcgtaattggtatatatttgattttatctaaaaatgaggaagttcataaacatggaataattattatcggaatttctatagttgttcaaatactttctatgatttttatgatgggttaa

SEQ ID NO: 499 - DNA, 513 bp, Methanobrevibacter ruminantium
  source 1..513: mol_type = genomic DNA
atgattttaaaaacagcacgacttattttaagaccttggaaagaggaagatgcagaatgcttatatcattttgctaaaaatccaaagattggacctattgcaggatggccaccacataaaagcgttgaagagagcttagagattataaaaactatttttgcaaaaaaagaaacttatgcaattacaataaatgataaggcaataggatgtgtagggcttttattctatccagatactaatcacaagtgggaaaatgaaggtgtagaattaggctattggattggagaggaatattggggccaaggattagtagtagaagcatgcaatgaactcatcagacatgcctttgaagacattgatataaataaaatttatgctagttttaaatatgaaaatcatcaatctaaaagagttttagaaaaattaggatttaaatattattgtgatttaaaaaataaggattataccggagaagaattctatgaaatagctatgtttttagagaaaaagtaa

SEQ ID NO: 500 - DNA, 192 bp, Methanobrevibacter ruminantium
  source 1..192: mol_type = genomic DNA
atggcagatgtggatgttactgaaattagaattattttagaagacctttctaaagatcaattaactgaaattttagaaaaaaacggctataccagcaaaggtagcgaaaaattcctgattaaagaaatcatgactaaaatttcccacgacattattattgatgaattagaccagcttggcgttttagactaa

SEQ ID NO: 501 - DNA, 243 bp, Methanobrevibacter ruminantium
  source 1..243: mol_type = genomic DNA
atgaaagatttggaaagtgaagaaaagatagcaattgatattgccaaacttgaaagaaatcttaatcaagttgaagacatcaagtttgaaggaaaagaaaaggaagtttatgatagggcaatagattactggaatgattcaaaatattacctagagaaaaaagacacaagaactgcttttggttgcattgaatatagccacggcttgttagatgcgctaagaatgattcatggattaatttaa

SEQ ID NO: 502 - DNA, 597 bp, Methanobrevibacter ruminantium
  source 1..597: mol_type = genomic DNA
atgcttgaaagtttaagaccatttctcacaaaaatattagaacctatagccagccgattaaatataaatccaaatattgtaactataatttcgccatttttagctataatatctgcatatttctttgctacagggaatttgattggcggagcattattcatacttcttagcggatttttagatgttgttgatggagctgtagcaagataccacaacagatcaagcccatttggtgcatttctagactctacaatggacagatttgcagatgcaatcatattcattggaataatctttggaggttattgtaattggtttgttggagttttagcaatccattcagcaattacagtaagctatgtaaaggcaagagccgaatcacaaggagttgagtgcaatactggaatagccgaacgtgcagttagattgataattcttatggtgggagcggtaattgcattcatattcaattcagatataattttcacatactttatctacatacttgtagttctttcatactttacagtaggccaaagagtttaccacgtctggaaagagctaaataaaaagaaaatcccacaaagaagattgtag

SEQ ID NO: 503 - DNA, 666 bp, Methanobrevibacter ruminantium
  source 1..666: mol_type = genomic DNA
atgaaaatatttaaaatgaatcctgaaaatccagatatggatcttatagatgaggctattgacattatggctcaaggaggagttatattatatcctacagacactgtctatggcttgggagcaaatattttcaataatcaggctgttcaacgaatttataaaattaagcatagggaaagatcaaagccattatctgttttggtttcggatattgaaagcttggagcttatcgctcatttagatgatcattcacgtgaagtggttaataaatggcttccaggaccttttacttttattttaaacaagcaaaagactgtttctccctatgtaagttcaagcactaaagtaggtgttaggattccagataataagattgcaagagaattggcttccatttttccaataacaactacaagtgcaaatattgcaaatgaagagactttatctaatccacatgacatattaaaacaaattggtgattgcattgatttggctattgatgttggagacttgactgggggaaagccatcaactgtgattgatttgacttctgctaaaccttctttagttaggaaaggactaatttcaaatgatttggaatctattaaagaagatattggtgatatggactctaataaaaatgatattgatgatatgaacttataa

SEQ ID NO: 504 - DNA, 696 bp, Methanobrevibacter ruminantium
  source 1..696: mol_type = genomic DNA
atgaaaattttatctactatgcaagattatgaaaaaatatccactaattctcctttagatgaattgttagatgggggaattgataaaagaactatcactcagatttacggacctccaggtgttggaaaaaccaatgtttccttaaatattgcagttaatgttgcaagaagtggaaaaaaggtaatctatattgataccgaagggggaatctctgttgagaggattaagcaaatatctggtgaagattttgataatgttgctaaaaatatagttgtctttgaaccgacttcatttaaggaacaggaagaggatttggaactgattgaagattggctagcttctaataacagtgaagtggaattaatcgttcttgattctgctgttgcattgtttagggttgaagacgataagtcaagatcacatcttttaggtaagcaaatgcagcagcttgctaaatttgcagttgattatgatttggctgttttagtgacaaatcaaatctatgcctcctttgaggaagacagtgatgaaatggctcctgttggtggaacaatcattcaatataggagcaaaatcattattgaattgaaacgtgaagaaggaagcagtgaaagaattgccattttaaaacgccataaaacccgaagggaaggattagctattcatttctcaattacaaataatggaattgaatga

SEQ ID NO: 505 - DNA, 1161 bp, Methanobrevibacter ruminantium
  source 1..1161: mol_type = genomic DNA
atgatccaaaagaagaaatatgcaaaggcagcaaagattattccagaaggttataaatctgcgaatcaattctttgaatctgtttttcaagataaagaaatgatttggatgggtcaaaacacaaatgaattgcatattggtcacaatgaagaagttcataaggcaatgattgattgcattgaaagtgacgaatactgtaagtacccacctccagaaggatttacagagctccaatctttaattttaaaggatttggatttggaagacttaagcatttatattaatgcaggggcaacagaatctttatacttggctatgaatgccgttttatctgatacagataatgtaataactccagatccaggatatcttatcattgataattttgcaagcagatttgccggtgaagtaagggctgtaaagatttatagtgaagaaaacaattataaattaactccaaagcttgttagagagaatatggatgaaaatactagagtaattcttttaattgatccattaaacccacttggaagctcttacactgaagaggaaattaaggaatttgcagaaattgcaaaagaaaatgatttattcttattacatgacataacttatagagattttgcacaaaaacatactctcgctgcaaaatacgctccagacaatactataacctgttatagtttctctaagatatttggtatggcaggtcttagattaggtgctatcgtatcaactcaggaagttattgatgttgtcaaaagcattatcattaacgacgtaggtacaagcatggttgcacaggctggtgcaattgcagccttaaagactaagcctcaatggattgatagggttaaagacaccacttttgaaaatcagaagatcattaaggaagctgtggatcagtgtgaaggtgttttcttgccagtctatccgtcaagtggaaatatgatgggaattgacttatccggtgcaggaatcgactcagaagacatgtctcaatatctaattgacagaaaagtctttacaaggcaaggatcctatacaagcaatacctttggtcataaatatttaagagtaagttactcaatcgacccagaaaaggttaaagtatttgctcgtgagtttgttttagctgtagaagctttaagaactaaataa

SEQ ID NO: 506 - DNA, 1776 bp, Methanobrevibacter ruminantium
  source 1..1776: mol_type = genomic DNA
atgagtagaatttctattttagacaaggacaagtgccaaccaaagaaatgtaacacagtatgtatgcactactgtcctggcgtacgtatggatgaagatacaattgtaattgatgaaaagactaaaaaaccacttatttccgaagagctatgttctggatgtggtatctgcaccaacagatgtccatttggtgcaatcagcgttattaacttacctgaagcattagatgaccctatccacagatatggtcaaaacagctttgaactctttggacttccaagccttaaagaaggcacagtgcttggtttgcttggtcaaaacggtatcggtaagtctacaatcatgagaatcctatctggagagctcattccaaaccttggaaactatgaggaggaagccacttgggataaggtaattgaatattataaaggttcatcccttcaaaactactttaaggcgctccaagcaggagaaattaagaccatccacaagccacaaatggtggatcagctctctaaggtagttcaaggaaatgtaaagacccttctttcaaatgtggatgaaagaggcaaattggatgaaataatcgatgaccttgaccttaagaatgtgctagagagagacatgcaaaacctaagtggaggggaacttcaaagagtggcaatagctgctacagttcttcgtgaaggagacttctactacttcgacgaaccaacatcatggttggatgttcgccaaagattaaatgcagttaaagtaattcgttcccttgcagaagcaggcaaatccgtccttgtgattgagcacgacttagctacattagatgcattaagtgacaatgtccacttattatatggtgaacctggaggatacggtgttgtaagtggaaacaaaggtgttagagtaggaatcaatgcatacattaacggattcctccaagaggaaaacgtaagaatccgaaaacaggcaattgaattcagcattcgtccacctacccctgaagatgacggtgaagtcttaagcgaatacagcgatcttaaaaaggaatatgacggatttacacttgaagcggaagctggaaaaatctatcacgatgagattgtaactgcattcggttcaaacggtatcggtaagaccacatttgccaaaatattggcaggagttgaaaagccaagtgaaggaaacattttagaaaaggttgaaattgcatataaaccacaatacattgaatctgactttgatggaactgctcaagacttcctttttgctaacgccccaacatatggatccaatatcttcaacagtgaaatcggaaagccacttgcacttgaaaacctattggacaaaaaggttaagaaactaagtggaggggaacttcaaagacttgccctcgctgtaaccttatcacaggatgcagacacctatcttttcgacgagccaactgctttcttggatgtagagcaaagactgattgcagcaagagtaatcagaaagatagttgaaagcagaaatgcagcttcacttatcatagatcacgatatcgtatttattgattatatttcagacagagctatggtctttagcggagagcctggacttaatggtaaggcatctaaacctgcagaccttagaacaagcatgaatcagttcttaggagatttagatattacatttagaagagataaggaaactaaacgtcctagagtaaataaatatgattcttatcttgatagagagcaaaaagaacaaggagagtattattacttaaaagaataa

SEQ ID NO: 507 - DNA, 339 bp, Methanobrevibacter ruminantium
  source 1..339: mol_type = genomic DNA
atgaaacaggtaatggttgtaagaacagatataaagatgggaaaaggtaagatagctgctcagtgttgccatgctgctataggtgcttataagcaagcggataaggaaaaaataagaaagtgggaaaatgaggcctatgcaaaagtggttttaaaagcacctacattacaggatctttataatttaagggaaattgcaagggcaaatggtgtggcctattatttggtgacagatgctggcagaacccaattgccaaaatccactgtgactgttttaggattaggtcctgatgaagatgatgttttagataaaataactggtgatttgaagttattataa

SEQ ID NO: 508 - DNA, 816 bp, Methanobrevibacter ruminantium
  source 1..816: mol_type = genomic DNA
atgaataaaataaaaaagcatgaaagtaaatttacaaacaataggctacttaatcccgctgaatatatgccaaaagaggaagttgaaacattaaagcaagtatcctatttaatagtgctatttttactcttcatattcttcatatacagtttttggccaatggcaaatatgaaattcttctcatttttagaaattgtattgatggtatacattgcattaaacatagactatagcaactggaaaaacaaggtactgtttttctttttagtgccttatggatcaatagcatggttcctttttgaagaacttacaaacagcctattcgacatattccatatgataattcttttatactttatgaaagtctattatgagaagtttagggaatatactgaaacaaatggtttaggaataaccatattgctattatttaccataatatttattagttttattttaacaatgattgtagaaggagtctcaccgatcgattcaatagcaatggtctcaaatgcatttacaagtaatggatatgcagttttaggaagttcattcggtggaaaattaaacagcatactattggtttggagcggttatatcctttcaggagtaggtactgctacaatgacagttgctcttctttcaaaacacttcaataaaagaatcaaggaaaatgaaaaaacaaatgaagcacaatatgccgaattaaaagagatgattgaaagaaataatgaggaaattaaagagatccttaaagagaacaatctggaaaaaaagactgaagaagaattagaaaagaaaattatagaaccgtaa

SEQ ID NO: 509 - DNA, 711 bp, Methanobrevibacter ruminantium
  source 1..711: mol_type = genomic DNA
atgaattatttaaatcaaaattatgccactgtctttatgggcaatgactttttattgataattgcctcgttaatcataatgattttcatatttggatatggatcagtcataacaaaggatgtgataagagggggcaagaaactgcctaaaatatacattaaagagtgcaccatctatggaattaaatgtgttatagtggcactcatatactctgcagttcaaaccttagttatggttgacctttcccatagattcctttttccagaatttgaattagagcatgcccttacagatataactggaacattacaaatgttcactgcaaataatcctatattgattggcgaatatgttgtaataagtataatattaacctatatttttgtgttctttatggaaatttcacttgcaagacttgcagatgggggaaaattgcttgaatcatttaatttgcttgcaatcaaacgatgcatagacactataggctggaaaaaatatacaattgattatacaaagcttcttcttgcaataactattttaacttatctccaatatggattccaattcttaggattcttcgattacataacagatttgatttttggccttctagtcttcataatccaatttattggaattgggcaaatctataagatatataaaattaaaaaatatagcaatctggataggccgacaaaaaagagtgtttaa

SEQ ID NO: 510 - DNA, 915 bp, Methanobrevibacter ruminantium
  source 1..915: mol_type = genomic DNA
atgtcaaataaaaagtcatttcttgcaaaaattgaagagattatcttgatgcaaacaaaacctgattatatggattcctatgaaaaggtaaatgatttaataaaagagagattaaacgctcaagagaagcctcctaaaagcgccttattcaaaagcacatacttaaatggaacacagatattccattatggaaatagccaatcaaaaaatctgattgtttacattcatggaggggcctttataaatgaaataggattccagcatcacttcttctgttcatatatttctaaaaaattagatgcttatgtaatctctccagtttaccctttggctcctaagcattcctgcaatgaaacctttaatcaaataactgatttatataagtctttaattgaagagaataaatctaatggagataataaaaataataactataataacagtaataacaataaatccatttatctgatgggagactctgctgggggtggatttgtcttatcattctgccaatacttaaagacagtcaatcttccacaacctgataagatagtggtttattctccatgggtagatatttcaatggatgattctccttatgataatgaatccgatccgatccttggtgagataggccttagagaaataggaaagtcatgggctggagaattggatacaaaggattacagagtaagcccattgtttggagacaattctggcttggctccaatacttatctttgctggagacaatgagatattctataaggacatattgaagtattatgaaaagttaaaagaagataatgttgatgctcgattggttgtaggaagtggcatgtttcatatttatcctctatttccttccccagaggcaagtgaggcttttaaagagctaaaaaaagagtttgaataa

SEQ ID NO: 511 - DNA, 1044 bp, Methanobrevibacter ruminantium
  source 1..1044: mol_type = genomic DNA
atgagcaagaatagaattgaatggattgatctcgtaagagctctcgctattttaaccgttctatacattcatgcaacagatggaatctatattatctcctctgatttaatcccctattggactcctttttcaagagttttccaattcatatcactttttattggacgtataggagttccattcttcttaatgattacaggttatctattgcttgatagaacctatgacgatgagagagtcaaaaagttttggaacaagagctgtaagggcttggtcatagttacaatcatctggtccctgatttatgcagtgagcatacagcttgtggcctattccagcatacaagtcaatacaatagaagctggaaacctattcttcagccatatgtggtatatgccaatgattatcggtatgtatttatccatgcctttcgtagcgaatgcattgaaaaactttgatccaagaacaattaaccaagctacaatcgtattctcctgcctggcattcctgctgcctttcatttcgattgtatgtgagatgcaagggcttcagaatgtaaacatccaatactgccttggtttcagtggaggagtatatggtatctatatcatactgggttggctggttaagaagggactattcaagaagtattcctcaaacagcttgaggctgcttgcaatagtttcgtttataatttgcgttctcttccaatggtatgcattctctatagacttcagtttctcattatggtatgagttcccatttatcctaaccggatcatttgcattgtttgaattatgttcaagaagagaaaaggtcagaggatttagaggagttgaatttttagccaaatattcatttgctgtgtttttaatacacaacctgtttagaatcatattgcttcctatggtggtttacctgccatatacagaaccggttaaagcgattatactttggatacttttaataataaccagttatgcagctgcagttattatttatagaattcctaagttcggtaaatttattttatatatgagataa

SEQ ID NO: 512 - DNA, 300 bp, Methanobrevibacter ruminantium
  source 1..300: mol_type = genomic DNA
atggaattgataaaaaattataatgaaaaggaattaacaattgaaactggaaacaagatagatacaaccactgcacctgactttgaaaatgaaataatggatgaaatgggcaactttgattcattgactttagatttaaagaatttggaatacatttccagtgcaggcttaagggttttaattcttgttcaaaagaaattaaaagctgacgacattccgtttgttatcataaacactaatgacaacattaaaaacattctaacaatgtctggctttgacaagattttaaatattcaataa

SEQ ID NO: 513 - DNA, 633 bp, Methanobrevibacter ruminantium
  source 1..633: mol_type = genomic DNA
atgataaaattagcctattgcaatgtagaagaacttgacttaaaaagagcttacagcttagtctccaagagccgtcaagaaaaaatcgacttttacagattcgataaggataagaagctaagcgctggagcatatcttctattgaaaaggctattgtctgaggtgaatattaaggattttgaaataattattgaaaaatatgagaagccccgtatagtcgaccatgagaacatatatttcaatataagtcattcaagcaaaatggttttatgtgcaatatccgataaggaacttggcgtagatattgaaaatattgatggcgaaattgatttaaatatagctaaaaattttttctataatgatgagtataagtcgattatgaactgcgacaatccaagtgatgaattcttcaaatattgggtcctgaaggaaagctatatgaaatacactggccttggaatgaatttgaaactggatagttttgaaatagttattggagatgagatcaaacttaaagatgacgatagtgatttaaaattcaatctatttgaaatagaagattataaaattggaatagcaagccattacaatgtatatgacttgattgaatatgatcttaaggaactgtattaa

SEQ ID NO: 514 - DNA, 1875 bp, Methanobrevibacter ruminantium
  source 1..1875: mol_type = genomic DNA
atgaagactaaactaaaacaaatattaatctcatttattgtgacaacaatattttattttgcgctttctcaaacctttataactcaattaggattagggagcccacaaataggattattatacgtttttggcctattatttggcccttttggtgcattaggtgcatcattatcaaacgtagcaatagatgtttatcatggatatacctttgttcaaatactcccttcagccatcatcagctttggagtttctcttttggcatataagctttggtactccggatttaaatcagatgagtatacaaaaccaagattggatacaatttaccacctatgcctatttttagcaagcataatcatatgcggaatgatttattcagtaggccacggaaatctggcatatatcctaatcagcccagatatagaggaatcaataatcattccatccttcttgaactttacaaacgttgcattcattatgggtattgcaggaatttggctttttaaaagaacaaatctcatagagacccctaaaaaatcagagcgtcgattgaacaagaacctataccgtttgatcttttccttattaatggtcatgacaatagtctcattcatattcataattagaaattcagataatctcacaataatcacaggcctaataatagttgtggccctaatgtatgcctatatgacaaagccattcatacatgagatacaagaggtcaacgagaacagcataattgcaaagattgtccgcaatttcattataattaccctaatccttggattctttggagggctcgtttccatagccagctttgactatgttgaaacaagcattacactcaacatctacctccatctgatgccgattcttgtgataagcgacataatcataattctcttcttcattccaggaatcattatccttaaatacattggagataatgtagtcaagccaatcacctcattttccgaaatcgaaggattcatcaaggaagatgaaaagatagaagcggaagggctcattaaggtctattcagaatatgtcaatgaacagaatgaaataggaacccttgcaaggtcatatacagagcttatcaatcataacaacaactatatcgaaaacattcaaaagatcgaaggggaaaaggagcgcacaaatgcagagcttgacattgcaacaaacattcaggcagctgcccttccaactgaagcaattaaaacagatgcattcattgtcaatggatattcaaagcctgcaaaagaggtcggaggagacttctttgactattatgagttggatgatggcaatttagcaattgtaatcggagacgcttcaggaaaaggagttccagcagcactggttgccatgattacacaagtggtaatcaagcagacactgataaacaatcacgacccttcagaagtcctattctcattgaataatcagctatgtgtaaacaatcccgaatcaatgttcattaccctatggctcggaatatataataaaacaaataaaaagctgacattttccaatgccggacataatcctcctttaatcaaggaaaacggcaaattcaaatatttggatatcgaaagcggaattgtccttggaataatggaagacttccaatatgaggatgaggaaataaccatagatggagaattggttacatatactgatggaatcaccgatgcaaacaataatgatggtgaaatgtatggcgaggataggcttttagaattctttaataaatttaaaagcgataaagacccaatattaccattattaaaagacattaatgactttactaaagatacagaacagtttgatgacatgactttattatacttgaaagtgaatgattaa

SEQ ID NO: 515 - DNA, 378 bp, Methanobrevibacter ruminantium
  source 1..378: mol_type = genomic DNA
atgaattcaatgaactttaaagtagaaatagatgaattacatagactaaacgagtttattttaaacgaacttcctcatgaagactttatggtaaatctgattgtagaagagatctttgtaaacatagttaactattcccaaacagaatatatcatagttaatttagattacaaagagcctaatttaacaattgagtttgttgacaatggaatagaattcaatcctctttcaaaggaagattatgaagccccagacagtattgaggatgcaaaaataggaggtcttggaattcatctaaccaaggaaatagctgatgaactggattatcactacgaagatggtgaaaatcacttgatgattgttaaaaaagtagaataa

SEQ ID NO: 516 - DNA, 318 bp, Methanobrevibacter ruminantium
  source 1..318: mol_type = genomic DNA
atgtcatcaagcaaggaatatttagaatatatactggaacagctctctgaactggatgagataacttaccgtgcaatgatgggagaatacatcatctactaccgaggcaagatcattggaggagtctatgatgaccgctttctagtcaagcctgtaaaatcagcaagggaaatgatgccaaatgcaaatatggaattgccttatgaaggagcaaaggaaatgatccttgtagatgatgtggaagacaaggagtttttaagagaacttgtagaagcgatgtatgaagagctacctgcccctagaaaaagacgtaaatga

SEQ ID NO: 517 - DNA, 471 bp, Methanobrevibacter ruminantium
  source 1..471: mol_type = genomic DNA
atggacatcttagctaaattgctgaatgataaattagcatttgcagaaatcagctatacaatagaagaagcaaaaagtatatctgattcaaataagataccaattatgatttgtagcgaaattctaaaggaaaatgagccatttgcacattcctgggatgttacaagcgactcaattgcagcatatattgcaagccttttagatgcaaagcttttaatagcaacagatgtaaatggtatatatactaaagatccatccttaagtggagcagagcttattaaagagattgatgtaaatgaactgctgacttttgaagaatcatcaatcgatttgatgctgcccagtttattgattgagtatggattggattgttatgtcgtaaatggagagtatcctaagagagttttatccataatcaacaatgaggattgctcttttgaatatactttcataagaaatggaaacgactaa

SEQ ID NO: 518 - DNA, 162 bp, Methanobrevibacter ruminantium
  source 1..162: mol_type = genomic DNA
atggaaaaagtaaactgtcaatcttgtaaacaagaaataccattaattgaaccttatgttcaattcaactgtccagaatgtggtagacctatcgcaagatgtgaaagctgccgtactttcggtcactcttacaaatgcgaatgtggatttgaaggaccataa

SEQ ID NO: 519 - DNA, 270 bp, Methanobrevibacter ruminantium
  source 1..270: mol_type = genomic DNA
atgggagaagttgttaacactttaaaagtaatgccagaaagtccagaagtagatttagaagcattaaaagtagcaattactgatgcaatgcctgaagatgcagaattacacgaaattactgaagaacctattgcatttggtttagtagctttaaatgttgtattcatcgtagaagacggtgaaggtggaactggacctactgaagatgctattaatgctatcgaagatgtagctagtgcagaaattactgattctagaagattaatgtaa

SEQ ID NO: 520 - DNA, 1251 bp, Methanobrevibacter ruminantium
  source 1..1251: mol_type = genomic DNA
atgtttgatctattagcggcatgttttattggaatagcaattggaacaggtacaggaatggttccaggcatccatgtaaacactgccggagcaatcatgtttgcatcatcaggatttttgcttagtttcttatctcctgaatttttatgtatagttatggtatcaatgagtattgctcacgctttgattgagtttgttccatcaatgcttcttggagttcccgaagagggcactgcaagttctattcttccaggacataggatggttttggaaggaagatctaaggaagctatcagaatagtttcagtaggcgggtttggcgctattgttgtagtgatattaatgttgccaatatttgcagtggcattgccatttctgcaggatttatcaaagccttacacttggatgatacttacggttgtttctattttaatgatatataagttaagcaatggaaggctcgcatttatgtggtctatcttgttatttgtattatctgggattttaggttggataatgcttcagacccctatatcttcaggaatttcattaatgtgcactttcagtgggttatttggaattagcactattctttttagcttaaatgatagctcttcaattcctcatcaaaataaatactacgatttcgtaatcgataaggatacaataaagagcattttcgcaggaggcactgcaggagctatcttaggctttttaccaggttttggaccagctcaaggaagcattattgcacagggagtatgtggaacaagcgcagatggggatgacactaaaaattttcttctagcaaacagtggattgaatacttcagacaccttattttccctaatagcaatctatctgataggaaatcctagaagtgggattgcagtgtatatgtcctatttgatatctgaatttactttgtctcatttgatgatattcacttttgcttctttaattgcagtttcaatatcattgattatttgcttaaagctgggagacggcttttcaaacctaatgcaaggtgttgattatagaaaactgtccatatcagtaatcctattgatgatagtaattctctatatattcgccataatatatgaaggtcctattttatatctcacccttgcattgatcacatcaactgcaatgggtttgttgccccactatttgggggtcagtaaatcccatttgatgggggtcttgattctcccggctataataatctatatgcagatgttcatgtag

SEQ ID NO: 521 - DNA, 1515 bp, Methanobrevibacter ruminantium
  source 1..1515: mol_type = genomic DNA
atggctaaaacaattattccaaaatataaggtttcaaagtttgaatttacagaagaagagagaagaactctagaagagttgcgggaaaatctaatcgatctggctatctcagagagaatgtccaacttcaatgaggatctaatactaaacgatatcattcgttttttagacaatcgtctattctcaaatgcagattatgtgagaaatattgattttgagaaactggacagtttcaatccttcaaaatataagcatatcggaaatcctaaaaggtattctcaattctatgcaatattcaaggatgagattgaaaaatacaagaataatttggctcgaaacatgtttcaagagcttattggatatggggaaattggatttttgattgatgacgatgatttggaagagattatggtgattggactcaataagcctgtatttgtatatcatagggaatatggtatgatggaaactgatttaatcttcaaagaggaggaaaagattctaagcataatcgattcaattgcccgtgagacaaaccgcagaatagatcagcaatctccaattttagatacaagacttcctaatggctcccgtgttaatgcaaccattcctccactttcagcagatggcccaaccataaccattcgaaagtttaagaaagacccattgacaattgttgatttgataagatacaacacattaaacactgaaatcgcatcattcctatggctctgtgttgacgggcttggggtaaagcctgcaaatatcatagtctcaggcggaaccagctcaggtaagacaaccctccttaatgccctttcaatatttatcaatccaaaggagcgaatcgtcacaatagaagatactcttgagcttcaaatccctcataagcatatcttaagaatggaagcacgtacagttaatattgaaaatcaaggggaaatcacaatagaggacttggtaaagaactccttaaggcaaaggccagataggataattgtaggtgaagtgaggggaaaggaagctatcactctgtttacagcccttaacacagggcattcaggattcggcacattgcatgcaaacagttcaagggaaaccattacaaggcttaccaatgctccaatgtctgttccaaagataatgataagttctattgatttcatcattatggaaaaaagaatctacaagtcagatggattgtcctataggagaatcactgaaatagcagaggtggttggaatagaggaaggaacaatccagcttagcaaactctttgaatgggatagtaaaaaggatgagttcaagaatctgacaatcttaagcaaaacattggaaaacattgcaagcctaaagggagttcatatttcaattcttaatgaggaatggaaaaacaggaagaaagttttagattatttggtaagaaatgacatttcttctcaagatgatatatctaaagttctcgaggactattatattaatcccgactatgtattaaatatgatttccaattaa

SEQ ID NO: 522 - DNA, 552 bp, Methanobrevibacter ruminantium
  source 1..552: mol_type = genomic DNA
gtggtgatttttatttttgataaattttttatccaattaagtgattctatcataaatttcttggtttctatctcaaatctttttctttcattttttgataagaataatgattctaaagagaaatggggaaacgaaactaatcaatttgattcaagcaaatatgaggaattgaattattttaacaattttaaatctgttaatttaaattattcagataattctaattctggagacgatttaaaaaatgagaattattcattcatctctaatttaaacttatctaagatttttaataatgaaaatatctttgaatacttggaaaacaaatatttaaacaagcaagcaatgtttataactccaaatggcactaatgaaaatgaatcaaataaaaatttcctatataatttaaagataaaactagttgttttaatattagacaacaggttttttcaaataagatcttctcaagaccttttaaaactgttattttatgtcctttttaattataataaatcctttttccattcttattgctgtatttgtttcttttga

SEQ ID NO: 523 - DNA, 606 bp, Methanobrevibacter ruminantium
  source 1..606: mol_type = genomic DNA
atgttttttatattgtttgctttgtttatcctttatcttcctaaaataagacatgagaatgattattcatcaatctcaaaagaactgccctatgcattgcgccaattgtccactgaattaagggctggaaaaagcttgtttgatgctcttgattctattgttgactctgactatggtgttttatcaagggaattttcaagggttcttgaggagataaaatatggtgaaacaagtgaaaatgcctttttgaatctggagaagagggtaaactccaaggcattatctagagtaatctatgagatacttgcaagcttaaggatagggagcaatctgtcccattcattaaatattattgctgaagatgttaattttgatatgagaatgaagttaaaggaatatagtgaaaaattaaatgctttcattatgatttatacatttttagctattttagcgcctgtgattattttaacaatgcttcttgcagcttctgttgtaattggagatattgttccaagcagtctgctttttattctgtatggattgttctttccaatgataattgtgtttttagcatttgcaattaagaaattagagcctaagctgtga

SEQ ID NO: 524 - DNA, 1509 bp, Methanobrevibacter ruminantium
  source 1..1509: mol_type = genomic DNA
atgtacgaacttattaaggaatcaattaatagtgatgaaagtgctttggaattagctaaaagcaaaaaagatgtaatctctgttgtagatgcaatatccgatttaagctttgaagacaccatgaaacttggaacaagattcaagaagttcccgatcggctgtgacttaactgaagtggtggttggaacctgtgcatcagatttggaaaagatggatctcttcggcaactgcatgcttgcaaacatgatcggtgctcctatacacatatgcgcatatgcgttctcagacattgcagagaaatatggccaaagaggtgtggaaataatggaagaggtctacaatatcacagatgttccactggaccttgaccactttggaaaatacggtgccatgagattcccaaagcatattgtaggatgcggaggagactgctacaaccaaggaccaagctttaccgaatgccctagaggaagaatccacgaaagattgcttgacaaggaaaaggcagagcttgacgataaggaaacctgggtccaattatcatcttccgttgcaatcaacttaagcagcgagcaatgcaatgacggccatgcggcacctcttgaagaggcccaagacttggcagaccttgcaaagaaatatggaaagggccttgaagcaatcatgtttgtaggagacggatatgatgaacttatcacaggctttacaaaggcaatcgaaatgggtgttgatgtatttgtaattgaagggggaccattcaacagatgcgaaaacaccaacgaaagctttgctaagacaattgcaatgagcagagtcttatgtcctggaaaagttgttgccacaaacggtgcatatgaaagtgaatgcagagcagggcttagatccggactaaatgttataattaccggttttcctaaaaaccatcacggatacatgtgcggtttcgagcctggaactgcaagaagaggcaagttcggcctcccaagagtaatcaagatcatgaatgaggaaataagtgcaggcccaacaagagttcctgtccaaagagaagagctattggcattgacccatgcagtcaagcttgcaggacctgaaaacatctatcctaagacaatcggatcatttgcaattggagacgcccattgggctacaatacaaaactctaaaatgtataaggaaatgtatcttccaaaaaccttagaggaaatagctgatagcgtaaatggcaattcagtttcattgcatggaggaagattcgtttcatggcttgttgcaaaagagctggataagaaaggaatcgatgagataataatcactgacagcaacccatgggtagagaaagtcagcgtagacaatcttcaagaggaattgaatgcaactatcatcagaggccatgcagatgataagggagctggaatgattgctaaggaatctattgtaaccactacaattcctaaaatccataatgcaattaaatccaagattcctcatgcagtaaatatcatctaa

SEQ ID NO: 525 - DNA, 1017 bp, Methanobrevibacter ruminantium
  source 1..1017: mol_type = genomic DNA
atgaaagtagcaattttaggtgctggctgttacagaactcacgcagctagtggaattacaaatttttctagagcttgtgaagtagcagacgcaaccggtaaagaaaacatttcaatgacccactctaccattgaaatgggtgcagaacttttagaattagcaggtgtagacgaagttgtagtagctgaccctgtatttgacggcgaattcactgtagtagaagactttgactatgcagaagtaatcgcagctcacaaagctggaaaccctgaagatgtaatgcctgcaatcagagcaaaagtaggagaattagctgaaaccgtacctaaaccagctaacggtgctatccacttcactcaccctgaagacttaggaatgaaatgtactactgacgaccgtgaagcagtagctgacgctgactggatcatgacctggttaccagaaggaggtatgcaacctgctatcatcgaaaaattcgctgatgtaattaaagacggtgcaatcgtaacctccgcatgtaccatcccaactcctggattaaaccaaatctttgaagacttaggcaaaaacgtaaacgtagcttcctaccacccaggtgcagtacctgaaatgaaaggtcaagtttacattgcagaaggatttgctgaccaagcagctatcgacaccttaaaagacttaggtgcaaaagcaagaggttccgcattcaccttacctgcaaacatggtaggtcctgtatgtgatatgtgttccgcagtaactgcaattacctacgctggtcttttatcctacagagacactgtaactcaaatcttaggtgcaccagcaggattcgctcaaatgatggctaacgaagcattaaccaacgtaaccaaattaatggctgatgaaggcattgacaaaatggatgatgctttaaaccctggcgcattattaggtactgctgactcaatgaacttcggtccattatctgaaattgtacctactatcttagaatctttagaaaaaagatccaaatag

SEQ ID NO: 526 - DNA, 1002 bp, Methanobrevibacter ruminantium
  source 1..1002: mol_type = genomic DNA
ttgatagaatctatcttggaaaaagctaaaaatagagaaaagttaagcagaaatgaattgatccaattatttgaaatagatgatgaggaaactttaaaggaattatgtaaaatagcttgcgatattcgcaatgaatgttctgatgtaattaaattaacatccactattcatcttacaaataaatgtcaagttcaacctagatgcaaatattgcggatttgctgctaagacttcatccattggatattatgacgctttttataagtctgatgaagagatacgccaagctgcaatgtgtgttgaaagatcaggcattcctagaataagctgttctggaggacatggatataaaggaaagcaagcagtaaatgctgcaaagatagttaagggagaaacctcccttgaaatattggttaatgtcggcgctgatttaactcaagaagcagtagacgaattgaagaaatatgatgctgatactgtttgctgcaatttagagacaaccaatgaagacgtttttaactttgtaaagcctggtgaaaagttatctgaccgcataaacatatgcagaatggtatcagatgcaggtattggattgtcttccggtctgttgattggcattggagaatcctatgaggatagggttgaccatctattattccttggaagctttgagagcttagaggagattcctataatgggatttaatccatatgttgacacccctatggaaaatcaccctccttgctctatcgaagagcagctaaagacaattgcaattacaaggatcatgtatcctcgcattagaataactgttccaacacctacaatcggtcctgagaatgttgagcttcctttgatggctggagcaaacaatttggcaacagtaatccctgaagactatcctttagtcgttaagggagttggaaatccagaatacggcaatttgcatgaggtgatttcagtagttgagaatttgggccttgaggttcagcttcatgcttaa

SEQ ID NO: 527 - DNA, 474 bp, Methanobrevibacter ruminantium
  source 1..474: mol_type = genomic DNA
atggcctttgaggaaagtattagaaaagcttctatccaatcttatgaaggaacacgtaagggagacactattgaagagattgaagcaatccagaactatattcgaaatgcaaagattgttgttcctaataagaatggcataaaagtagaggtaataaatgaggttctagctaaattcaatattcctcctgctgaatatctgcaggtaaatactaattatgctgatttcagtagaatgcctgcaattgcaaaggctatgatagctgtagatcagtcagatgcagatttggtcattgcaagaggtcgtttaggaatccctggctctggttcttttttggtttttatggacagcaaatccaggattttaactgcagccacttccccatcccatataattcataatcagccactcgaaaagactgtttataaggagacattagaggcgttaaagaaagtaggctttaaagaagaatga

SEQ ID NO: 528 - DNA, 408 bp, Methanobrevibacter ruminantium
  source 1..408: mol_type = genomic DNA
atgaataatcaagattacgatactggaataagttcagaggtttttacagtcaaatcaaatatcaaattaatagatatttttaatttgattttagaaaagaaagcaagggctgttatggacttatttgatagtctaacaaacaaggaaacaatacataatgaaagttccatcataattattggaacctattttacaggaatagccattgcgaaatatttatcatataatggttttaaaaatattactatagttgatatttatccccatttggaaggttttattgattctaacttgggagatcctattgatgtgaataaatcttctaaaggtaaatttaaagagaatatagaattttcatcagatttgggcttaataagaagtgctgatgttgtaattgacactacttga

SEQ ID NO: 529 - DNA, 441 bp, Methanobrevibacter ruminantium
  source 1..441: mol_type = genomic DNA
ttgggaggaatagatgaaagccaatcagaatcaatttacacaaaggtctttttaattgaagaccctatagctgaagacaatgatgacttattgaagaataaaaacaatatctattctcgcataagcctggtgaattcatataataagttcattcttaaaacagaaggtttaaacacaaaaacctctggaaccatgactttgacaatagatatcttaaggcaatcaatgaatgagatattgtcaagggaaggagttctttactgttcatctgaaatgaccttctttgaagagattgtttttaaggaaaatgacttggataagttctttgaattaatagggtctcctgtaattaaagtttcaactattgctccatttgactgtgaggaaattattaaatgctttattgacaaaatctattctgaaatcttgattaggtggtaa

SEQ ID NO: 530 - DNA, 729 bp, Methanobrevibacter ruminantium
  source 1..729: mol_type = genomic DNA
atgtatgcaaatgatatttttaatattatagatgaattggtgcctcgtaaattggcattgaagaatgataaattcggctattttggaaagactttcgacaatttcgatattaaaaatattaaagtcatattagatttattgccagaagatgacttgaaatttgataagggtgatttggttatttcccatcatcctcctctctttatgccaaagactccaacctatgttgtccattccaattgggatattgttcagggaggggcaaatgacgctttggcttattatttgggtttaaagcctatttctatttttcacaagcagacaggcataggccgaatctgctcttcaacaaagacattggatcagttcttagccttggtttgctataagttcggtcctgaaaatgttcgattggttcatgatggcgactttgataagatgcttaggaaaattgctatagtttccggatttggcttaagcaataaggaatttattaaattggctaaggacaggtccgtagatgcatttttatctggtgacttgaaccattcaaatgcgatttatgcgaaaaagctaggaattactttaatcgatgtttctcatcatattattgagattccggggctatttgccttaaaggaattgctaagacgaaatgaggatattactgttcctgtagaaatgattgacaatggagttccttggaaatatatttctgctgatttttag

SEQ ID NO: 531 - DNA, 645 bp, Methanobrevibacter ruminantium
  source 1..645: mol_type = genomic DNA
atgattcaagaaatggaaaatagtttaattccaaaaggaagtattgatttagtgggatttggaagattaggtttaagaacaggaatcaatcttatacaggttcacagaggaggtccagctaagataacagttattgatggacagaagatctctgaatctgatataatatttctattgaaaggagctaaagtcggcacttataaatctgactttttaaaggaaatttccacccattcaaaggattttagagaagttgtttcaatcactgaagacataacagaggataatattgatttaatcactggagatgtggttgtaattgaaatagctggaggaaataccgtacctactgcagcaaagataattaaaaaagctcatgaaaacggctcaaaaacaattggaactgcaggtatattcggaattggggatgaagagattgttgtagcagacatctctgaatttgatgattccaatcccgctattgaagagttaagaaaagaaggaatccttgataaccatttagttataagcactaataggtttattagggatggaattccaataactccttatgtattggatgatattgctaatatcattacaagagaggccttaaaattacttattgaaaagaataatgaatag

SEQ ID NO: 532 - DNA, 609 bp, Methanobrevibacter ruminantium
  source 1..609: mol_type = genomic DNA
atgattactatcgcaactgcagaatgttttacacatgggattttagctcgtgaaatacatgctctcgctcaggattatgatgatatttttgcatcttcctattggggtttggttaacaaagtccaaaaggattgcatcaaggatgcaattcttgaagataaatgttccatttttgatttaagggatttgagtgttagctgtggattgttcattcctacattggatgctgtaaaatctgttttaaagatagaaaatccgctagagcctttgacacttattgatggaattaaggtttatgacgatgatggcgatagggaaatggctatattgatggcagaggctgctaaaaaggtatctggttctgatattggaataggcacaactgcagggattggatatggtggcatagctattgtcgatgatgatattgtcattagcacaagttctgatgtttatgctgatttggtaaatgtggattccgatgatctttatatgcgtcaaagaagtggaatagaaaagactttaaaaatattgatttattatttaaacgataatttagacattattaatcaaatgaataatgtgaaaatatataataaatcagaataa

SEQ ID NO: 533 - DNA, 2169 bp, Methanobrevibacter ruminantium
  source 1..2169: mol_type = genomic DNA
atgatttttacaatagaatatgataaaggaactcgcttaagagtgagatgtggtaaagaagcatttaccaaagaggaatcctatggcttagctgaaaccttaatcgactatgacttcatagatgaagtaaaggtgtctcatagaaacggaagcattcttgtcttatacaatgatcctaaaaaaaggatagaaattcttagaatcatatcaaaaatcagccaagataatttatatgaaacaaaggcaagtgataaggctgctcttgaagagctgaatgacaagtttgcaataaaaattgcaaagcatattctcaaaagatacctctttaagatcatattgccaattcctttaaggaaattaagaatgctttatcatgcgtcatcctatatctggagagggctcgacagcctaacaagtttccgcgctgatgtggcccttcttgatggaacagcaattactgcatcattattgactaaaaactacaagtctgtagggtcaatgatgtttctcctatccatctctgaaatgttagaagactatacaatgcaaaagaccaaaagcacattaaaaagcagtctggccttaaacattgacagcgtatggaaagtggagattgatgatgagggaaatgaaatcgaaagccaattcccattaagcaagcttgaaaaaggagacaagataagaatcagaaccggcgcgatcattccagtcgatggagtcattgcagatggggatgcaatgatcaatgaagcctccatgactggagagtcattagctgttcataaggataatggcaaggctgtccatgcaggaaccgttgttgaagagggctcaatagtcattgaagtccgctccgttaacgatgagacaagattgaataagatcattgacatgattgaggattcagaggagctgaaggctggaattcaaagcaaagcagaaaagctagcagattcaattgtgccatacagcttagctgcaacagcactgacatacctcattacaagaaatgtgacaaaggcattatccgtattgatggtagacttctcctgtgcaatcaagctaacaacccctatttctgtcatctcagcaatgaaagaggcatcagacaataggataatggtaaaaggtggaaagcacctggaagcatatgcaaatgcagacaccattgtctttgataagactggaacattaaccaatgctcatccagtattggaaaaggtcattccttgtggaaaatatgatagagatgaggtcttaagaattgcagcatgcattgaagagcactttgcccatagtgtagccactgccattgtgaagcaagccgaaaaagaaggattgcaccatgaggaagaccatagtgaagtggaatacattgttgcacatggaatctcaactacttatgacggcaagaaagcaatcattggaagcaggcactttttagaagaggacgaaggaatcagatttaccaaaaagcaagaaaaacttattgaagaaaatgcagaagagtattctgtaatctatcttgcaataggtaaaaaacttcaaggaatcctttgcattgcagatcctgtaagagacgaagcccatgaagtaataagtcagcttaaggcattaggcattgaaaatgtagtgatgctaactggagacagcgaaaacgctgcaaaaagaatagccaaggatttaggcattacccggtataaatctcaagtgcttccagaggataaggcaagcattattcaagagattaaagccgaaggccatcaggtcattatggttggagatggaataaacgactctcctgcattatctgctgctgatgtgtcagtagctatgagaaactcatcagacattgcaagagaagttgcagatatttccctactttcagatgacctttatgacttggcaactcttagattgcttgcaacaggcatgcttgataagataaatacaaattacaggcatattgtcatgtttaatggatcactgattggacttggattgcttggagtcattccacctacaacaagctcattgcttcataacttatctacaatgctctttggatatagaagcactaagtctgttttaggtgaaaaagaagaagtcgttattgatacaaacgtaattaataatgatggtgctttgattggccaatcaggcaaataa

SEQ ID NO: 534 - DNA, 279 bp, Methanobrevibacter ruminantium
  source 1..279: mol_type = genomic DNA
atggtagacagacatgaaattgtagacaaaatgtatgaaaacaaacacactttacttttcgtaggaggaattgcaactgcaattgtaggggcaaaaattttaaaatcccaaaccactaaagattacgctgcaaaaggaatggctaaagttctaacttgcaaaagcgacttagaagaatccattcaagacattaaagacaatgcagaagacattcaaactgatgcaaaagctgctcaaaaagaagcaatctgtgtagatgtaactgaagaagaagaataa

SEQ ID NO: 535 - DNA, 234 bp, Methanobrevibacter ruminantium
  source 1..234: mol_type = genomic DNA
atgattaaaaaattaagcgaactcaaatctggagaacaaggcaccttatcttcttacggaactggcggagatttggaattgaaaagacatttgctcggtatgggcttcattaaaggagcagatattgaagtagaaaaagtagctcctcttggagatcctatgcaaattaaggtaaaaggatactctgtatgtcttagaaaagaagaagctaggaatatcgatgtagaagtataa

SEQ ID NO: 536 - DNA, 2016 bp, Methanobrevibacter ruminantium
  source 1..2016: mol_type = genomic DNA
atggcaaatctcaaaataggtttagcaggtaatcctaatgtaggtaaaaccaccctattcaataatttgaccggtttaaaccaacatgtaggtaactggcctggtaaaaccgtagcacaagcaaaaggttcctataaacatagtgggaacgaagttgaagtaattgatttacctggtaactatgctttaagtgctcattcaattgaggaaattgtatcaagagactttatcgtagatgaagactctgatgtaatcgtgaacattatagatgcagcaaacatagaaagaaacctgtatctgactgttcagatgatggagctcggagctaatttagtagttgcattgaatatgaataagtacgcccaagacaagggatatacaatcaatgcagataagctttctgaattattgggagttcctgttgttgaaattgaagcaaatagtgatataggtaaagagcaattgcttaaaactattgaacaagcagctgcaaacccggtagactcttctaaaaaattggtttataacaatgaacttaaagagcatctcgctgaattgcaggctgttatagaagaagacaaaaacttacttgatgttccttcatcttggattgcaatcaaattgcttgaaaatgatgaaatcgttgaagagaagattgaaggatcttcaaaaagaaacaatatagtaaatgaaactcaaaaggtcaaggaccacttgaaaggcatatttggagaaggcagtgaagaggtaatcgcaaatgcaagatatgcattcattgacggattattaaaagaatctctcaccaagccggaccatttgaaaaccactataagtgaaaaaatcgatagaatcgttacaaacaggatattgggcttcccgatattccttgttataatgtatgcaatgtttgaaatcgtatttactttcggcgcacctttccaagatttgattgacgaattctttggaatcttaggtgatgccataatcggctcccttggagaaacaatgctttcttcattcctagtcaatggacttatcggaggggttggcggagtattggtcttcttgcctcaaatcattctattgttcttaattattagtttccttgaagattgcggttatttagctagagctgcattcgttatggataaattaatgcataagtttgtaggattacatggtaaggcatttattcctatgcttttaggaatcggttgtggtgttccaggtattatggcaaccagaaccatggaaaacgaaaaggacagattgatcactatgctgattgttccattcatgtcctgttctgctagaatgcctgtatacttattgttagttggggcatttttcgcagctaatgaaagccttgtaatcttctcattatacttgcttggtatacttgtagcagtcattgttgcatttatattaagaaagactacatttaaagaaatggacgctccatttgtaatggaattacctgactataaattgcctacaatcagaggtatcataatgcacacccttgaaaaatcctggggattcattaaaaaggcaggtaccattattttggtagcaagtattgtaatctggatgttaagctatttccctgctggtgtggaatatggatctgcagatagtgcaatcggtactatcggtcaggtcattgcacctgtgtttgctcctttaggtttcggagaatggcaacctgctgtagccttattatttggtcttgttgctaaggaggttgttgtcggtaccttcagctcgctctttggagtggcagaggagggagccgagattgctgcagctatgcatggaatctttactcctctaaccgcttacgtattcatggtatttgtacttctatacattccgtgttttgcagcattgggggcaatcaagcaggaaaccggtggatggaaatatccattgctgatggctggattgactttagttgttgcatatgtggtagctttcatagtttatatgattggactaggtttgggattgggttaa

SEQ ID NO: 537 - DNA, 198 bp, Methanobrevibacter ruminantium
  source 1..198: mol_type = genomic DNA
atgcaatgtagtatgtgtggttacgagtttgatcctcttgaaggagggccttgtggtgcttgtggacagtgtaaaggctgtaataaggctttttgtccaagatgcggatatgggaattccctttctactgtaaaggaatttgattatatatccaaacttcaagcaaaattaagggcttttaaatcaaaagcaaaatag

SEQ ID NO: 538 - DNA, 627 bp, Methanobrevibacter ruminantium
  source 1..627: mol_type = genomic DNA
atgcatatacctgatggttttatacctctttggcaatgtgcgatctactatgtaatcttgattattgcattgtatttcgctggaaaatgggccaaagcaaatctagatgaaaaacgtataccacttcttgcagtattagctgcaggtatttttgcaattatgtctatgaacatgcctattccatttggtaccagtggccacatggtcggtggggcattagttgctattgtatttatggctcctgaagctgctgttcttgtattcactgcagtattgcttatacaagctttattcttcggagacggtggaattaccgctttaggtgcaaatgtatttaacatggctatcgttggaggatgtgtcggtctttacacctacaaaggattaaacggcatcattggaaaatatccttcaatattcttaggcgcatggcttgcaacattagttgcagctgttgtctgtgctcttgagatggctattgcaggaactttcccattgagtgtgggagtcgcttctatggcactttaccatgcattcattggtttaattgaaggagtattaacagttattgttatatttgctcttgaaaaatacagaccagatctattggcatggaatagagaatag

SEQ ID NO: 539 - DNA, 294 bp, Methanobrevibacter ruminantium
  source 1..294: mol_type = genomic DNA
atggaattaagtaaaagtgacaaatatttaatcgtagtagggattatattctgtcttgcattagcagtattatctccttacattgcatctggagacccagatggattagaaaaatcagcagaagatgcaaacgttggcgaagatgttgaagctccagtaatggaagctccattcccagactatacctatgagcctttagaaaaaataggtgaaatcggcgtattgattctaggcgcgctgataacacttattgttgcatggggtataggttatgcattgaaaagatctgaataa

SEQ ID NO: 540 - DNA, 831 bp, Methanobrevibacter ruminantium
  source 1..831: mol_type = genomic DNA
atggcaatagaagaagttagaaatttggaagtgatcgcttctaaggacactatcattcataatttggaaggtagggttaagcttattgccatcttattaataatcgttttctgtgttttttcagataggctaatagttccacttgtattggaaatattcttgctcattgtaatgtatctggctgaattgtcctttaaggacagctttaaaagaatagctcttcttttgccattcggtggttttgttatcgctttccagccattcatccaccctggaaatatcatttggcaaggtccttatccttggttgtttataacagacactggtttaaattggacagttctcttatttgctagattaatcgtctgtttgacagctattgtcatcctttcatctacctcaccaatgcaggaagttgttcaatcatttagaaagcttggaatgccaagagatcttgctatgattttaacaattatggtcagattcctatttatctttgtagatgaattaagggacatcagacagtcaatgaagtctagaaactttgatcctttcaataagaagattccgtataaatggagagtcaagcaggtgggatatagcatagcgatgatgtttttaaaggcatatgaaaagggagaaaccatttatttaagtatggccagcagatgcttctcagacaattccagattatatcatgccaagactataattggaaagcatgagtatatatttttagcttgtgttataggcattgtcattgttttagaactggttgtattgttctattctggcaatttggattatttaggcgtttctttatctttataa

SEQ ID NO: 541 - DNA, 1350 bp, Methanobrevibacter ruminantium
  source 1..1350: mol_type = genomic DNA
atgagcttaatatattctataactagcacaataactagaaatatagaaaaaatactaagagagtcccttttatttacaatcattttcaatatattggaatttattgaaaatcaatgggtcaacagttattttaagggcttataccctagcgaaagattcctatcaattgtaaataagagtaagatcttaaaggaagagatattttcaccccttattgttttagtcacattcactctttttatacttcttgcaactgatccggtcccaagggatttgcagaccactataatcattgcttttctaagcttttttattggtgcaataatatttccaagatttattttgaataatcaattaaatcaattaaatgatgaaactaataccgacaataaagaatcaaagactgataaaagcaagcaaattcccttatttaattcctacgatgtatattcaataggattctgccttagcttaattggaattgtctttttgtttttaagcattgcctccgttggagggctgccaatactaaagtcctcattaagatattcacttaagccagcatttacaatgcctgtatttttaataattccaggtatcggacttatggcttcacattatctaaaccagtacaagaataatgaaatcagccgcagccaaacaagattcagattcttggttttaactgcaattggaattggaactgtccttacactccaatatagaaccccaatcattgccattttacttatgatgattataataggatattatggtaaaatactatcagtttgggaggtcattttaggtgccctgcttggagtatgtgccatcattggaattggatatttaagatcattgaatgagcttgcaataagctcaaatacaaatatattctccaccttaaactcaagggcaaactttacaatgcatgtattgaacctactgaattatatttcagggaatttcggactaatgcatggaaagatgatagcaagcgccatgcctggaagcgatcttggacctagaatgatggtgggcaaactgatagcttggagaacagaggttactgtaacccctacattgctaggacagatgctagtggatttcggaaaacttggggttgcagtggagatgtgcctgcttggattccttttaggaactggatataaaatagttaaaatcactgaaaactctttttacatagccctttatggcttgattttaacctattccattgtaggtgttgaaactggaatattggacatacagattttagcttacttctttataagtgcttttatctattttgcagttatattaaaagataaaggcataagaatctattaa

SEQ ID NO: 542 - DNA, 792 bp, Methanobrevibacter ruminantium
  source 1..792: mol_type = genomic DNA
atgaaaaaaccagggattttaaataaaattacaattattgacattctaataataatttgtatcattggagcagtgggattcgcagtttaccatatggttgatgatgactcaacaaaggcttcagctacctcctttgactattcaacaaacaataagatgcttgaaacatatatgaattattataaagatggaaaaatagttacaagcagccttattggaactaaatcaaacaccggcgaaaagattgaaatgaacggcacagtcctatggcttggagacaatcaaaacgataaggtaaacattgaaattaacaatgacggcaagcctatactcgctggtttctacaaagacacaccaaatgcagatgtctttattgaacagataagcctagagacaaatggagacagctatgcaaacattacagactttgtagtcagtcctaaagagattaagaatctaaaggaaataatatctaaaattcctaatgatacagaatatgaaatcagtacaagcatcgctatagatgacctagatagcgttactgctcaaaaattagcaaatgcattaaataaaaataagaaaccttgcattgtcttaaagaatagtggaacagtcatacttgaagtcaatagagccaatcagactgattttgaaatagctgacaatgtattaggagactttaaaggacagacaagcgagatacaaattagaatctataattctacagcacaagattccatagacattcaaaatgcatttaatgttttaagcattgctaatacaagtcattaa

SEQ ID NO: 543 - DNA, 162 bp, Methanobrevibacter ruminantium
  source 1..162: mol_type = genomic DNA
gtgattgatttagacgaatgcggagtatgtgaaaaatgcatacctgtctgtcctaaggaactaattgaaaaaaaaggatatacaatgattataaaagatggctgcgatgactgtggcatatgcttggatatgtgtcctttaggagccatctatgaggaatag

SEQ ID NO: 544 - DNA, 984 bp, Methanobrevibacter ruminantium
  source 1..984: mol_type = genomic DNA
atggcaggacttatctctggaattgttgctttgttcacctcttggctaggtgtctctggaacagtcatagggtctgttttcagctcatttctttatcaattcctttcatcctactctgctgagaagtatgaggagcgagttggggaaggaacttcaagaaagcctagaaacattggcagcgaaatagtctatatatttccaatagtggtcatagttataatagaagtgatcttcatactctctgacatgcattatgtatttgataagatctttgacattcttgagtatgggatattccagaacaatctatttaggttaatgggtcttggtcttattgctttaggggtttatccattgttaagctcaactaacattgaaaagatcaatggtgaaatcgttttagttgcaggaatatatctcttcatcagaggaatggtggatataaatgacttgaccatgcaagtgcataacatgttctttgctgattttgacttttttattgcaataatagttgttttagcccttgtatttgtaattttcaatgttttaagaaattctacacaggaatactttaataaggaagatggagattatgatgcagtgaatgatgagttcactcaaaaaagattctctaagcctagaagaaaatcaaaagctcgcaagattgacaccagttccttccataagggccaagagtataaagagcattatctaaacagtgattttaatgataagggtcataatcagagtcctaaccctgattccaatatggatgattatcataatgatgatttaaataattatcaaactcctcaagaggatttacctatctatgaagaggagattatttatctccataatccggaggatcctaataatccaataaagaaaagaatcttaaaaagagtcaatcctgattctcattatgatgatgactatgatgagacttatataattgatgatgccaaaaacgacaatttttaa

SEQ ID NO: 545 - DNA, 318 bp, Methanobrevibacter ruminantium
  source 1..318: mol_type = genomic DNA
atgagattttgtcctaaatgtggtaaaatgctaatgcctaaaaatgatattcttaaatgtgcttgcggatatgaggaaaagatatctgcagaagtagctgaaagggagtataaattcaaaggcgagagaaaaaaagagaataaggttattgttacagacaataataacattgcattgcctaccacaaagataacctgctataaatgcggaggcactaaaggggtttggtggacagttcagacaagatctgctgatgaagcccccacttattttatcagatgcgtaaaatgcggaaacacttggagaaggtctaactga

SEQ ID NO: 546 - DNA, 894 bp, Methanobrevibacter ruminantium
  source 1..894: mol_type = genomic DNA
atgacaacgaatgataaagtatctgattatattagctttcctaagacctttgaaagctataggtggtacaagccgatacttgtttttataataagttttataataactcttatactcggagcactgatagtggcggttttttatctgataatgggtcctgattttataatatccattttcaaagggggagctgaatcattaaacacttcaatgaacatattcttcaccgatctgattattattgcattcattccttcattgtatattgcatcaaagattgttaaggacaggcccttttcctcctattcatcttcacgagggggatggaacttcagactctactttaaggcattggcaattcctgtaatattgtatataatatatttgggggcagaatctctcattttaggatcagaaggcacatctcatttctcaatagcctttcttgctgtgcttttgatttccgtgcctctccaatgtattgcagaggaatatatatttcgtgggattatcatgcaaacattagggtcatggattgggatacctcttatagccatagttattcaagccataatatttactttgggccatggatatgacgccctaggactccttgaaacattggttttaggtattgcctatggattttttgcctggaaaacaaatgggatagagataagttcagcccttcatactgcgaataatttttctcttggcttattcatcatgcttggactggaagcatcaaattcctctttccaattatatgataagataggaggaattgtctatttaataatattatgtataataatgtattatgttggcaagaaaactgattggtttggtgaaatcccagaagactctcaaaatataggattattaaatttttaa

SEQ ID NO: 547 - DNA, 522 bp, Methanobrevibacter ruminantium
  source 1..522: mol_type = genomic DNA
atgattgaaattcgctttcacggacgtggaggacaaggtgctgtaactgcagcagaaattttggctaaagcagcatttaaagatggtaaatactctcaagcgttcccattcttcggtgtagaaagaaggggagctcctgttatggcatttaccagaatcgatacagagcctatcaacctaagatatcaggtatacaatcctgaccatgtgatagttcttgacgacggtctcttaaatgttgtggacgtctattccggattaaaagaaaatggtgaagtaattataaacactcatgaaaaagtcgaatctgaaagtcacaaggtatttgatgttgatgctacaggcatcgcattggaaattttaggtgtaaacatcgttaacaccattattttaggatactttgctaaaaagactggtgaagtaagtattaattcacttattgaagtaataaaggaaactttcccaggtccaattggagagaaaaacgcagtggcagctcaaaaggcttatgatatggcttag

SEQ ID NO: 548 - DNA, 243 bp, Methanobrevibacter ruminantium
  source 1..243: mol_type = genomic DNA
atggtttctattggatgtgcaatttatgaacctggaagtacacgtaagaacaagacagggagttggagaacttttaagccaatccttgataaagacgcttgtgtagattgcaataactgtctcatgttctgtcctgaaggatgcgtaaacaaggagcatgacattgattacgattattgtaaaggttgcggtatttgtaaagtagaatgcccagttcaagctattaaaatggaaatagaatag

SEQ ID NO: 549 - DNA, 1149 bp, Methanobrevibacter ruminantium
  source 1..1149: mol_type = genomic DNA
atggcaaaagaaattatgacaacaaatagagcagttgcagaagctgtaaagttagcaaaaccacaagttgttcctgtttaccctattactcctcaaactacaatatccgaataccttgcacagtttgttgcagacggcgatttggatgctgagtatattagagttgaatctgaacacagtgcgattagtgctactttaggagcttccgaagcgggagtaagagtattcaccgctacttcatctcaaggattaatgcttatgcatgagatattgtttgcagctgcaggtatgagagctccaatagtaatggcagatgcaaacagggcaatttctgctccattaaacatttggaacgatcaacaagactccatcgcacaaagggatgcaggatggatacagctttatgtggaaaatgctcaagaggcattcgacactgtgcttcaagcatatagaattgcagagcatgaagaggtcatgcttccagtaatggtatgtttagacggatttattttaacacacactgtcgagccagtagatttattggaacaagctgatgtggatacattcctcgaaccatacgtacctaagtttgcatttttagaccctgaaaaaccaatgtcattaggtaactttgcagaccctgaatattatacagaagcaagacatgacatgcaagtggctatggacaagtccatggatgtaatcaaggaagtaggtgcggaattcggtgaaaaattcggaaggacctacggcttgactgaaccttacctttgtgacgatgcagagatcatattggtctgtatgggttcaatggcaagtacagtaagatatgtggtagataatttaagagaaaaaggcgaaaaagtaggtctcttaaaaataagggcttacagaccattcccattcgaggaaattgacgaaattgtcaaaaatgctgataaattagctgtgcttgacaagaacttctcatttggtattggaggagcgctttttgcagacttgaaagccaaatgccacaaggaaacctatggtttcattttaggattaggtggaagagacgtaattcctgaatacattgaagaagctgtcgaattaactaaaaatccagtaaaagaagttacttggttaggcttaaaggaggatgaataa

SEQ ID NO: 550 - DNA, 867 bp, Methanobrevibacter ruminantium
  source 1..867: mol_type = genomic DNA
atggaatttcctgaagaagaattattggcaccaggtcacagaggctgtgctggttgcggagcagctatcgctgtaagacttgctcttaaggcattaggcaagaatactgtggttgcttgtgcaactggttgtttggatgttatgacatccccttatcctgaaacagcatgggaagtcccatggattcatgttgcttttgaaaatgcaggggcagtggcttccggtgtggaaagagcattgaaagctcaaggaaaggaagatgtaaatgttgttgctttcggtggtgacggaggtactgcagatattggtatccaatcattatccggtgcaatggaaagaggtcacgacttaacttatatctgttacgataacgaagcttatatgaatacaggtattcaaagaagcggagctacaccttatggtgcatcaacaaccacttcaccagcaggtaagcaaagcttcggtgaagacaagcctaagaagaacatggctttcattatggcagctcatggaattccatatgtggctactgcatcaatttcctatcctgaagactttatgaaaaaggttaaaaaggcagctgaaaccaaaggtccagcttacattcacttgcaacagccatgtaccactggatggggattcaagcctgagcaaaccattcaattaggcagacttgctgttgaaaccggtgcttggggattatttgaaattgaaaacggtgaattcagagtgacttacaggcctcaagaaagaaaacctgttaaggaatacttatccgctcaaaaaagattcaaacatcttgatgatgaacaaattgcaattatacaagaattcgttgacaaccaatgtgaagaattaggtatctaa

SEQ ID NO: 551 - DNA, 501 bp, Methanobrevibacter ruminantium
  source 1..501: mol_type = genomic DNA
ttggagaaattaatagtagataatgaattatgtgatggatgccaggattgtgaaaaagcatgtgcaggagtccatggagttcctagaatcactattcatgaattagacggttcttatttccctattcgttgtcaacaatgtgaggacgctccttgtgaaatcatctgtccaaccggtgcaatgagcaatctgggagtggatgttaccaagtgcatagcctgcggattctgtgcaatggcatgtcctttcggtgcaatcagcattcaatacagcaacgctcataagtgcaatcactgtgcagatagagaggaaggtcctgcatgtgttcgcgcctgttccaaaagggcaattgcagtccatgacattgcaaatgtcatcaaaaggaaacaaagggaacacattgaaaagatgtatggcttagacaagcctgctaaaaagaaaggtcttctcagtgtaattacaactgatacaagggctagaaagccattggatggagaatag

SEQ ID NO: 552 - DNA, 429 bp, Methanobrevibacter ruminantium
  source 1..429: mol_type = genomic DNA
atggatgaattaaaagtcaacccagaattatgtgtagattgcggactttgcgaacgtaattgtcctaacaatgcaattcgtgttcatgatggagtccctttattctgtatgcattgcagtcctgaaaaagcaccttgtcttgctgtttgccctaaaggagctatagttgccctaggcggagcaatcacaattaagcaggataaatgtatcggctgtggattatgtcatagcgtatgtcccattggggctgttaccatcaatgagataggtcaagccacaaaatgtgatctttgcgcagactatgacacccaacagtgcgttgaagcctgtccgacccatgctcttacaaatgatacagaaaagataattcatgataaacaggaaaaaatatccgaaggatttaagaaggttcaaactcttttgaaatag

SEQ ID NO: 553 - DNA, 435 bp, Methanobrevibacter ruminantium
  source 1..435: mol_type = genomic DNA
atgactttcatgaataatggtgcaaatataaaacagttccaattgctcaaattcataaatgagaattgcaatgatgatcatgtgatatccaaaatttcaattgtgcttcgcagggataagatagaggctccctattatatgaatactaaaattagattatctacatgtatggatggggaagaaaagggagttattcatgcaatggacattttaaaccatagcaggaagcataatctctgtgaatataaatatgatgaaatcaaatcactaatctttgacttattcgatagcgaccataagtccgaccaggtggaattctctcaaaatgacaatcgattgaagatatcttttatgtctaagaatgatgaggagttcaggaatcttttcgaaaattatcatgaactttttgaaaagatagatggtctggttgattag

SEQ ID NO: 554 - DNA, 255 bp, Methanobrevibacter ruminantium
  source 1..255: mol_type = genomic DNA
atgtcagatccattgattataaaaaaagaattattatttaatgaatataccgggcatgaagatggaaattgtttagaatgggttgatggtcgactaagcaatagtgatgaccatcatagaattccatgcaatcttgaagatgcttttgaaatagcaaaaaaacaaaaagccgtgcttgtaattcaacctgaatttcaggaacaatgcatatttgcagactttacaggtgaagaaattgatgaaaattgggattga

SEQ ID NO: 555 - DNA, 840 bp, Methanobrevibacter ruminantium
  source 1..840: mol_type = genomic DNA
atgataacagaaaaacagattgaagatactatttatcaattatacaaacaggcagctatcgtccttggagatgatgttaaatctgcacttgaagatgcattaaaacgtgaggatagtgagcttggtcagctaaatattaaagctatcttaaagaatattgaacttgctgaagaaaagtcaattccgatgtgtcaggatacagggctacctataatttttgtaaagcttggtaatgttcaagtggaaaacctttatgagggaataagaaaaggtgttgcaagagcaactgaagaggtgcctctcagaccaaatgtggtggatccaatcacaagggttaactctggcaatgtgggagataaagtgcctattgtggatatagagcttatagatgaagactacattgaatttacaatcatgcctaagggatttggctctgaaaacaataatgcccttaagatggcacttccagctgaaggaatagaaggtgttaaggactttgttgtggagaccgctcttaaggctggaggcaagccatgccctcctatagttgtaggtgttggaatcggcggaagctctgatatggctttgaaattaggaaagaaggctcttcttggaaaagttggagagcgtaatggcgacccaacattggcagaggtcgagcttgaatgcttgaatagaataaacaaggatggaaaaggtcctatgggtcttggcggaagaaccactgcattggatgtgaagattctaaagatggacactcatacagcagggcttcctattggcgtagtcattcaatgctgggcagatagacatgctacagctcgtttgagagatgattaa

SEQ ID NO: 556 - DNA, 1590 bp, Methanobrevibacter ruminantium
  source 1..1590: mol_type = genomic DNA
atgatacttattataaccggacacttggcctatcccttggtaaaggagatggcggataaatcaaaaaaggaaactgtagttcatatagcagagactcaagtggctgcttttttaactcctaatcaaattataaaggaaatccacgagtattttgaagacagattagatgatattgatttgatattggttccaggtttaataagaaaagacacattcctgattgctgaggaatttggaattccttgttataaggcatctacagatgcagcagaccttgctatggtcttggaccttgtggatgagctggaactgtcccagtcaacacctgctgataagcttatcatagaagagaagaagaagcaggccttgaagttcattgaagactttgaaaaagacatggaaaagagggaggaactacttaaaaaagagaacaatattcttgtcaggaaccttcctgttggtgaggatttcccaatgagggtattgtctgagatagcaagtgcccctatattgtcaaaagaggatttgattaaaaaggccgaattctttgtcgcttcaggctctgacatgatagacatcggtatgattgcaggtgaggacaggtctgatgagattcccgatttgattgatacattgaggccaattgtgggagacaggcctttaagtatagatacattgaatcctaaggagattgaagctgctgtaaaccatgggattgacatgatcttgagtttagacaatggtaattaccatgagattttgcctttgctcaaggaaaagaatgttcctgcagttattttgcctacaaacttctctgaaggctatgtgccacacagtcccgcggatagggtggcatctatgcaaaagcttgtggaagcttgtgatggacttgaagttgtctgtgaccttatattggacccagtcaacagtgcaagtcttgtggattcaataatagcattccatgatttccatgaggtggataagaagccgatgttctttggaataggaaatgtgattgagcttatggatacagattctgtaggggccaatgcagttcttgcaggtattgctatggaacttggagcaagcattctattcactccagaggagagcggaaagactcatggaagcgtaagagaattggcaattgcatctaagatgatgtttttagctaaaaacaggcaatccattcctaaggatttgggagttgaccttcttgtattcaaggacaagaagaaaaggtttgacttgaagcaggatgacaacgttcctatagtaaagcaggatcgaccgatcaagtttgtacgggataaggcaggaagctttaagataagggttgaacatggaattagcgtaaaggattcctatattgtggcaactcacttcaagaagacaaagccaaccataagctttgaaggaaaaacagcaagtgaaatctatgaagagatcattgaaaaagggcttgtgaccagattggaccatgcggcatatcttggtaaggaacttgaaaaggcagaaatagctatgcttaccggaaaagagtatgttcaagactttgacttgtttaaggatcctgaagagtttatttaa

SEQ ID NO: 557 - DNA, 357 bp, Methanobrevibacter ruminantium
  source 1..357: mol_type = genomic DNA
atgaatataaatggtgatttgatgaataaaaaaattactgtagacatattaatgttcatagcaataatagtggaatttctaagcctgcctattctaattcatgaaatagttggagtgggattattgtttttaattgcattacacttaaaatataacaaaaggtattttaaaacaataggcaaaggaaaatataaccttaaaagaactctaaatcttatcataaacataggattgcttgcttccttattgataaccataatttcaggaatcttctctagccaaaagtcattaaaaggcatgaagataggaaatcacaaaatttcacatattcataaatcatcttcatatttagtctaa

SEQ ID NO: 558 - DNA, 1161 bp, Methanobrevibacter ruminantium
  source 1..1161: mol_type = genomic DNA
atgaacgccaatccaaaaatacttctttacattctaatgatttcagcccttggaataaacactccattaagcattgtcggaatcatctcacaaatagcagagtatttcaatacatcaatagccatttcaggactctatgtaagctcatttacatttaccatagccatatgcggattgttcatacctgttttattttcaaaatacaatcgaaaaagaacctttgtaagcattttaacagtgtttgcaatatcaaacattgcaataatctttacaaaaagcatttacattgcctctttctttagaatattatcagccatattttatccggcattcatatcaatagcccttacagtttgcgaagaaatagccccaaaaggagaagaacaagattatattacaaaaattctgcttggaatatcaatcggaagcattgtaggccttcctataacaacaggccttggaacaatattcaattatcaagttgcaatgtcatggatctttgcaatcaatctattatccttaatattgataatcatattcttcccaaaaatcaaaggcaaggctaaaagttatgaaatgccattttccagtcttaaatcaaaggaattccttcttgctacaattggaataatgatgatgccaataggagcaagcatagtatataattaccagccatacttcctgcaggtagtcagccatgtctacacatataaactaagcatattcctattcatttatggactgttctcaatatttggaacttggcttggaggaaagttaatagctaaaagagacaaagcaaccattctcattttccaattaatatgtggaggagtgtttgtactcctttatctatttgcaaattatctgattccagtcctaatattgattctaatatttggaatcttagacggaatgggctacaatctcatccaatacattgaaagttcagtaatcccagacagcccagaacttgcaaacggagtgtttttaagcattttaaatggaggaatagctcttggaatagccataggaggattcttggtagacggatttggaataatgtccatctttattttcggagcactgttcttgctgcttgcattcatcatcctttattacattattggaataatgaaaatgcctctgaaatactcttaa

SEQ ID NO: 559 - DNA, 873 bp, Methanobrevibacter ruminantium
  source 1..873: mol_type = genomic DNA
atgacagatgaagaattaaccattgaagaaatagagaaaaaacttgaaagtactggatatatctcaaataaggagatcagcacttctgtatttttatctttatctttaaataagcctatattgattgaaggacctcctggagttggaaagaccgagcttgcaaaggctttggctcaatctttagaaagagacttcttcaggattcagtgctatgaaggaattacctttgagcagatcgttggagaatggaactatcaaaagcaattgctccatcttgaagcattcaagggaagcaagaaaggggaagattcaatcttcgaagaggatttctttataagaaggccccttctaacctctttcatgaatgagaagccatcacttcttctaattgacgagatcgataaggcagatgaagaggttgagagctttctgcttcaggctttaggtgaaaagcagattactgtaaatgacttaggtacctttgaccttcagaatgacttggttgtgatgctcacttcaaatgcccaaaggaatctccttgaggagactaaggacagatgtcttttcttatatatctcttatccttcagttgaacgtgaaatggctattgtaaaagccagattgccaaatgcagaagatggcttggttaaaaaggttgttaatatggttcatagaatcagaacttttaacctaaataagaaaccctctgtaagagcttcaatcgattgggtaaactctgtaatgcatttggataaggattataagaatgtggatgccgcactggaggacagtgttggggtagccattaagacagagcctgacaaggcaaaggtcgttaaagagatatttagaaatgaatacatgaatgactaa

SEQ ID NO: 560 - DNA, 1161 bp, Methanobrevibacter ruminantium
  source 1..1161: mol_type = genomic DNA
atgacagaaagaatcgtaagattatcaaatgacttgagaaaaaagggaatgcctgtaagcatcaggtccactcagactgcaatagatgcatatgctcttcttggggaagatgatttgcctactttaaaggatgcattccgctcaatttatgtcaaaagcaaatatgacattcctaaattcaatgagtcatttgacggtttcttcactaaaaagcaggttaaaaacctaaccgatgagcttaataaatccagcaggccaaacagcatgaaaggaaagctttcccagcatgaatggaaaatcaccaaacaaaagggtaaaggaggaaagcagattcagatgggtgctgagcaggctatggaatactttgcaggaagacctgttcttgaagacagggacaaggaccttgcaagggacaatgacattctaaacagtgacctatcaaagctgaacaagtacgatgagcgtgtatttgaattatgtgtagagcttggaagaaagattgcaaacaagcagtcaagaagaaagagactggctcgttccaataagattgatatgagaaggaccatgaggcagaacatgaagtatggaggggtcccgattgaccttgtccatgtcaagaagaagcctcatagaaagcagcatctcttccttaatgatgtaagcggttcctgcgaatggatcagcagctggtttttcatgctgatgtttgcatgccaaaagacatttaaagactcaagaatgtttgaatttgataacaggacaatagaaactactgaatttcttaaagaaaagtatatggttaatgcttttgcagaaatcagattgctacgtatgagaaatatgatggttagaggaacttccaatatgtacactgcattccagtcatttatgaaacaggctgacattagcaataagtcttatattattctcctttcagattgcagagattgggctggccctaaggttgatggggttcctgcaagtgtagagcttgtttcccaaatgtctagcatggctaaaaagcttgttatcctaaaccctgaggacaagaagaagtgggatgttgtagacagctgcgtttctttatacaggggagcaggtgcacaggtttatgaagttagcactttaaatcagttggctgagtttgttgcagatatgtaa

SEQ ID NO: 561 - DNA, 918 bp, Methanobrevibacter ruminantium
  source 1..918: mol_type = genomic DNA
atgcaatcttgtactaaatgtggaaatccaaagattattataaaaaaaccggcttctggacaggccttatgtaaggactgtttcatagaaagcattgagaaaaaagttcgccaaaccataaagcgtgaaaactttattgataggggagataaggttttagtagcattatccggaggaaaggatagtgtagtaacccttgatattcttaattcctatcgtgaaaggcatatcatagatttatgtgccgtaaccattgacgaaggaattgcaggataccgtgaagatggagttgaaattgccaaggcacatgcagagagacttggaattccacataaggtagtgtcatttaaggaaagttttggaattgatttggatgaaatcatggccaaagaaaaccacagaggatcatgtacctattgcggtgtattcaggcgatggataatcaatagggctgcaagggactttggagcaactaaaatagcaacaggccataatctggatgatgagactcaagctatcttaatgaattatcttgaggggaatactgaaaaccttgctaagattggtcctaagacagaatctaatgatgaattgtttacagttaagataaagccacttagggaaattccagaaaaggaaataggtctttatgctattgcaaaaggattggatattcaccttgcaggctgtccatatgcagaggagtcattcagaatggaaatttccaatattctaaaagacctaacaaaggatcatcctaccataatgtattcaacccttcggggatttgataagatgagaccagccattaaggaagagtttaaatccaattttgtttacaaaagatgtgaacgttgtggagagccttcttccaatagattatgcagggcctgtaccttcttggaagaattggattaa

SEQ ID NO: 562 - DNA, 201 bp, Methanobrevibacter ruminantium
  source 1..201: mol_type = genomic DNA
atgagttttaagttaaaaatcaaggataatgttgaagagagagaaatagatggagagttaacaattaaaaaattattggatgatttggatttatctagtgagactatggtaactaaaaagaatggtgaaatagttattgaagaggaaacaattgaagatggtgatgaaatcgagtttattcaaatcatttacggaggataa

SEQ ID NO: 563 - DNA, 720 bp, Methanobrevibacter ruminantium
  source 1..720: mol_type = genomic DNA
ttgtcttcaaatgctacaggaacaaggattcatcagtacatcaaaaaggaaactggctgttatgatccatatttttatcaaaagaaagagggaaatgaaattgcattgtctctaatgccaatggttagggaaatattaaaggaagataatgacttggaaacctatgttaagatagccattgtagggaatattcttgatttcggcacttttgatttggatacagactttgaatcattgatttttgaaggattgaagaaagaattggtcataaataaaatagatgaatttgaagaagccttaaagaaatatgataatgttctttatttggtggataatacaggagaaatagtctttgataagcttcttattgaaaagataaaggaatatgatgtggatattacagtggcagtaaaggaaaggcctatattgaatgatgcctgcatggaagaagcattagaggctggacttgatgagattgccgatttaatcactacaggctctgactctgtaggcgttgtcgaatccatgatatcagatgagtttaaggaaattctattggattctccttttgtaatctcaaaaggaatgggaaattatgagggattgactgaaatggatcttgacggacaggatgtctttgtattgttctgcactaaatgcaatgctatctcaaaagatttaggacttcctgaaggatctcatatcctctctaaattataa

SEQ ID NO: 564 - DNA, 825 bp, Methanobrevibacter ruminantium
  source 1..825: mol_type = genomic DNA
atgaaattcggatttattggttttggtgaagtctcatataccttatcaaaattgcttttagcattggattttgagattttaagttctatcgaaggacgttcccaaaaaactatagacttaattaattctttagatttaacccttttagatagttttaaagatgttgcaaaagagtctgatgtattgatttctgcaaacagtccagatattgctttagatattgcaaaaaactatggcaatttaacaaatggatttttccttgatttcaataatatttcaccaaaaactgtttttgaaattgaagatattttatccgatgacaagtttattgattctgcaatcattggcagggtaaattcggatgaattgaacatatatctatctggaagcaaggcacaattccttttagataaaataaaaaaagaaattggttctaaaggtattgatattaataaaatggactttaaaattaatgtaaaacttatcagtgataaaattggtgatgtttctaaattaaagatgcttaggtcttcatatacaaaaggagtgtctgctcttttagtggaaagctttgaattggcagaaaagttagatttggaagaggaattatgggagattctttcactaactgaaaatagagattttgaaagatcttccaagtcaagaatcgatagttcaaaaaaagcttctaaaagaagatatgaagaattagtagaagttttatactttttagataatgtagataatgtagatgagtctaaaatcatggctcgagccacaaaagacaagtttgaatatttgaaaaatagggaaaataaagaataa

SEQ ID NO: 565 - DNA, 1299 bp, Methanobrevibacter ruminantium
  source 1..1299: mol_type = genomic DNA
atgatagctataagtgcagattttgatccagtccataagggacatgaacaactaataaaaaaaggaaaggaaatagctgaagagaagaattcaaagctagtcatttaccttaataaaggatatagtgcaaatcatgccccattttttactccatttgatgcaagatgcagaatggcaaaggcattaggggcagatgaggtcgtaggggttgaaggactgcaccacagactcattttatcttatagtgtgccgattaggctagctcaaatgcatgaggatggagttaccgattatataactgcagcagacattagcttagaagagattaaaaactatgcagagcgttttatcaatgaaggaagctttcttggaattccacaggactttccaagccgcaatgtaatacgttggtatgcaatcaatgagtttctatcaaagaaattcaacagaaagatagattttcatcttattccagaagtgagctctccaaaaaagatttcaggaagatttatcagaaaagagatactcaataacaatctgaccatttcaaaggaaataagggaattgcttcctaaaacaagtatagaaatactggaagaggagatagaaaagggaaatgttcctggaaaaaggaacatgaaagtgcttaagcataagatgaacacttattcaaggtcaaatctgacaaatattgcatacttgaacggaaaggtaatcaataggatagtggaagggagattctataaggaagatgacgaatccatctgggcaagcttcagaagggcagattacggtccagtcatgacccgtcttgctgcaagctgcatagaggaggaagtcactaaagatgaagtcctaaagctgatgagacattatgaatcaaaaggagtaatccctccggaacaaaatgtggataaaatcattgaaagggcttggtatgttgctttggaagttgataagggagttccagccaaagaagcaaatgagaagtttagaaagaaagaaaacttgaaattgaatcctatgctaagccttgaagcaggattgaatcttacaaaattcgaagcaaaaaagattcatgaaggaattgaagcaaagatctttgtggataaggacaataagatatcctgtgagattaaggataagaagataaaagtaaaaaccgctttaaagttgccatcaatggaagtgacttatcttagatacatattggactcaaggtatattccagtaagcggagagcttattaaaaataagagaaatgattttagagttaaaataactattcatgattattaa

SEQ ID NO: 566 - DNA, 474 bp, Methanobrevibacter ruminantium
  source 1..474: mol_type = genomic DNA
atgagcataattgcaatttttctaggaataatagtcattgcattccctcttttaggaattattgcagcatctgatattcttggactatcagtcttattgctttcaattttcttgctcttaaacggaatatctgaagtggaatataacactacaaaagggcttttaaataccattattggactgataatgttggttgtaagcttaggattgatattcaacccaagcatattttcattcttaaccgctataaccatatatctagcaggaattttcttgataatcattggattggttgtgattgttggaaacagggaaaataagtataaattctggatgggaattattggaattatcttaggtgtaatctatataattcttggaacttatatccacaattcatttgttctcggttcattgattggaatatggctagtggctactggtatattaaacttattaagtgacggttattaa

SEQ ID NO: 567 - DNA, 1089 bp, Methanobrevibacter ruminantium
  source 1..1089: mol_type = genomic DNA
atggaaattagagaattaacaaaggaaatcagagacagatctatagaatatgcaaagccaaaggacttggataacttatctgccagctggtatcaagaggacctattatattcaggaaagggaaagacaatattccttattctacctactcccggatgctcttgggctcttggaccaagcggaggatgcacaatgtgcagctacatctcagactgctatctaaagccaatagaaacttccaaaataatcgagctctttgaaatggaactgggcaaatgggattttgctgaagactataaaaatggagagaagattgcaataaagctatttgcatctggaagctttttaaacccagaagaacttccaaaggaagctagaaattacatccttcaaagattggcagacctggatgaaataagcgagatagtcgtagagtccagacccgaatatgtaaaaaaagagataatcgatgaaatatttgaaataatcggcgacaagctatttgaaataagcataggccttgaaacttcaaatgaagaaaccagattaaacaagattaataaaggatttaacaataaaagctttgaaagggcaattgacaccattaagcagtcaaaagaaagctatgacataaagtcaaaagcatatatctttgttaagcctattctcttatctgaaagtgaagccatcgaagaagcaattgaaactgcaagctactgcgaaagcattggagttgatagggtttcatgctgtcctgcaacaatccatagaggaacacttattgaaagactatggagaagaggctcatacaatcctccttggatctggtcaacagttgaagtgataaatagaatcagagaaaatgtgaatattccggcacttatggacacctctggattcggctcaagaagaggcccatacaattgcaagaagtgcaataaagagctaaaacataagataattgattcaaacttcgaccaaagccaaatagaacatgattgcaattgcaagagtgaatggattgctgaagtcaagttctctaatttaaacaggtcaaaaactcaaaccaaacatttgcctttatattaa

SEQ ID NO: 568 - DNA, 957 bp, Methanobrevibacter ruminantium
  source 1..957: mol_type = genomic DNA
atgaaatttggtatagaattcgtacctcaaataccattagatgaactcgtaagattagtaaaaatagcagaagacgtcggttttgaatacgcatggatcactgaccactacaacaacaaaaacgtatacgaaaccttagcattaattgcagcaaacactgaaaccattaaaatgggtcctggtgtaaccaacccatacgtaagaagtcctgcaatttccgcttccgcaattgctactattgacgaaatctctaacggtagagcaactttcggtattggtcctggtgacaaagcaacctttgacgcattaggtattgcatgggaaaaacctgtatccacaattaaagcagcaatcgcagacattaccaccttattagacggtggaaaaaccgaagctggagcagctttaggtggagctaaaaaagtacaagacgcaatccctatttacatgggtgcacaaggtccaaaaatgttagaaactgctggtgaaatcgctgacggtgtattaattaacgcttccaaccctaaagattatgaagctgctatgcctatgattaaaaaaggaattggcgaccaagataaagatttcgatgtagctgcatacactgctacttccattggtactgactctgaagctgctaaaaacgcagctaaaatcgtagttgcatttattgcagcaggttcaccacctccagtaattgcaagacacggattaccagaaggattcaacgaacaaatgggtgaattcttagcacaaggtaacttcggtggagctattggtgcagtaactcctgaagctcttgacgctttctccgtttgtggtactcctgatgagttcatacctaagattgaagcattagctgacatgggtgtaactcaatacgtagcaggatctcctgtaggtaaaaacgtagaagaatctattaaattattaggagacgtaattgctagcttctaa

SEQ ID NO: 569 - DNA, 210 bp, Methanobrevibacter ruminantium
  source 1..210: mol_type = genomic DNA
atggaaaccaataggctggaagctttttatgatgcgataattgcaattattgtaacagttttggttttggaattgccacagcctgaaaccgctaccattgcaggaattttagctttgaaagtttcatatttcacttatcttgtcagtttccttgtttgccaatctctggcaatatcaccacttgatatatgctcatgtgaaaaaaattga

SEQ ID NO: 570 - DNA, 315 bp, Methanobrevibacter ruminantium
  source 1..315: mol_type = genomic DNA
atgtttgtaatatccttgattccttatttgacaatttttgttgctaataatccgaattctcttttaagcgaatccttatatggtttggattttattttggtggatattattctatttattatgagccggtatctgataaaaataaatgagaatagcgaatatttgtctgaagttttggatttgaaaaatgcaataattattccattcattttcctaattataggattcattataggttttttaggctatcctattgcaatcagcattgtctgtttgattacaatcgtaaggtcaatattatattcaattaaatag

SEQ ID NO: 571 - DNA, 483 bp, Methanobrevibacter ruminantium
  source 1..483: mol_type = genomic DNA
atgtttattgaaaaaagatgcacaggctgtcgtgaaggcagtgcctgttatctgacctgcacaatagcaccatgcagcattgaacatggaaatatagactactgcttcgaatgtgaggaatatccctgtgacaaatatgatggaattgaattatacgattcactaatcacacacaggaatcagaaaaaggatttgcaaaaagcaaaaactataggaatcgaaaactatcacaaagaacagcttgaaaaaaaggaaatcataaaccatattttaaacaggtataatattgccaacagacatatcttcttctgcctggcggtaaatctgcttgaagttgatgacttaaaacagatattaaaagactgcgatgaatcaacaaaagatatggatttaaaggaaagatcagattatataaaacatgaattatatgaattcgccaaaaaaagaaatatcatactcaaattaaatacaggaagatattga

SEQ ID NO: 572 - DNA, 252 bp, Methanobrevibacter ruminantium
  source 1..252: mol_type = genomic DNA
atgaattatgtagaagaagcagtacaattatttgaagatggttatatgtgttcacaagctgtcttagaggtattttgtgaagagtttggactttcaagagaacaggcatttaaaatcagcatatcatttggaggcggtatgcgtaaaggagaagtttgtggagcttgcactggtgctataatggcattaggtttgaaatatggtgatttcgaaaggatggcacaaataaggagaaataaaaggtcattatga

SEQ ID NO: 573 - DNA, 456 bp, Methanobrevibacter ruminantium
  source 1..456: mol_type = genomic DNA
atggatgatttgcctgaaatgatttcaatctggaatgaaattgtcgaggagggcaatgcgtttccacaagaagaagtactgacattaaagacaggtttggattttttcaacagtcaaagtcatgttggagttgcatttgacggtgaaattctcggactgtatattctccatccaaataatgtgggaagatgcagccatattgccaatgccagctatgtagtatcctcaaaagccagaggaaaatatattggtcaaaaactggttttggattcgattgaaaaagcaaaagaacttgattttctaattcttcagttcaatgctgttgttgaagataatttatctgcaagacaattgtatgaaaagttaggattcaaacagcttggtgtcattccaaaaggattcaggttagataatgatgaattcgctaatatatgtccatattatattgaattataa

SEQ ID NO: 574 - DNA, 660 bp, Methanobrevibacter ruminantium
  source 1..660: mol_type = genomic DNA
atgaattatcaagaaatatcaaatatcattaaagaaagcctaaaccttaaaaccagcccagttagcgtgaaattatttgaaaaagaaaaggatgcagaagaaatttttgaaaaaaccaataaaacaatacattgtcaggcaataataacagcaagtaaaggaaaatcattttatggaaccatagatgaaattggatgtccgattggagcgggaattttgggtctaaaggaactacctgaaaaaatacttaacggatcacaattcgataaaatgaatgtaacctcatctcaggaaagcgggaaagcattaattgattcagttgctaaaaacaatagaatagaagccattgcatacatgcctttggaggattcaaaaatagaacctgacgttgttgtggtaattgccaaaccaagacagattttcgatttgataagagccaatacttatcaggaaggaaaaagaatggacaacagtgtgggaggaacacaatcactatgcggagacattgtagtaaattcaattcaaacaaatgaaccccatatctcatttggctgtataggctcacacatggcaacagaactctcagaagaccaagtaataatcggaataccaatatccaaacttgaagaaatagctaattctttaaatataattaactaa

SEQ ID NO: 575 - DNA, 750 bp, Methanobrevibacter ruminantium
  source 1..750: mol_type = genomic DNA
atgaaatttaaattcaatacaccattaactgaaggaaagataatcaaaagaaacagccagttcaccttggatgttgaaatcaacgacaacattgaaaaagtgcactgtcccacaaccggacggattggaaatattgatttaaaaaatgttgcaggattactttccaaaagcgacaatcccaaaagaaaaacaaaatataccttagaggcaatatccatcagcaatctcaacagaaaagataaaaaatggataggaataaatcaaatagcttcaaacaaatatattgagctgtttttaaaaaatcatcttctcgacgggatgcttccggaatatagtgagattaaaagggaagttagtcttggaaaatccaaattggactttttagttggaagcacatatcttgaagttaagactccacttcaaacattacaaatagaatacgatacagatattaaaacaaaaaaagtttcatcattctcatcaactgacagattcataaagcatatcaatgaacttgcagacagtcttgaaagtaatgaaaaggcaatacttctaaatacatttcaatatgacaatccaggatatgaaatcttaaatccaagtacaaattatattgaagtcagcgaaaatgtggacagatgcattgaaaaaggattggagatatggcaggtaaatatgaaaatagaccatgaaggtgtggaattactcaaatactggaatacaacatcaaactttaggaagataaaatga

SEQ ID NO: 576 - DNA, 510 bp, Methanobrevibacter ruminantium
  source 1..510: mol_type = genomic DNA
atgaaaagcaaggataaaattgttaaaagtctaattgaactaatggaaactcatgaatttgaagaaataactgtaaaagatatatccgaactggctgaagtcaacaggtcaacatattatcgcaattttaaatcaaaagaagacatcataaaatacaagttagaatcgataatggacgaatacctgaaagaatttgaaagtaaaacagataaaacaaaagagacttatatccgaacaattcttgaaacatttctcaaacatgaggaatttttaaaaatcatacataagcaaaatcaaagctacatactgcaaaaagtactcgccaattactttggcgacgtattgaaagacacctctaaaaaggaaagatatcaagtctattaccatatcggaggaatttacaactttacaatatgctggattgaaaatgacatgaaagaccgaccggaatatcttgcaaaaataggtgcggagataacatcaaatattgaaccgtatttgcttaaataa

SEQ ID NO: 577 - DNA, 1059 bp, Methanobrevibacter ruminantium
  source 1..1059: mol_type = genomic DNA
atgaagcatagattaaatttagataataaagacccaaattatattttgttgaaagaaatatttaaaattatggattctagaaaatccaaaagtatattagcatcctatggatttaaaaacttaaatagaacaatatttacttttaaaattatatttataagtatgttctttggaattgacattccattcattttaaacgagcttaaatccaaaaaagaacttcgcaaatactttaatatttctgaagttttgactgcagatcaagtttataaaattttttcagaaataaactctgaaaaacttataaaatgtttaaacagaatcttaaactcaaggaatatggttaaaagaagaggaaaaaagacttttattgttgatgcgaccccagtggacgtagatattaatttccacagaaataaaaagactaaagaacatctggaaaaaattaatctcaaatggagttattcatcctctaaaggttattatattggatttaaagcaactgttgtattagattatgattctatgaatcctgtttgtattttagtccactctggagctccaaacgatgcaaaacttttcgaagaaattttagaaaaccttcaaaaaagacgaataatcagaaaaggagacacattaatctttgataaaggatattacagctataaaaactaccaaatcggaatcagcaaatacaaaatcattcctttcatttttccaaaagaaaaattcagcagaacccgattggatgacattttaacttatccactagccgtatttaacaaaacaaagagaataatgaaagaaaaaagattatacaacagtttaaaaatggaattaatgaaaaaaatagattcatgggaaaaatttaaaccaataaggggcaaaatagaagattttttcaaattattaaaacaaggcttgaatatgagagaaatccacaaatatactccaaaatcagtagaaaaaaccgtttatctaaatgtatttttaggagcactgattatatcacaaggattttactcaaaaacggccatacaacaattatctgaaaactaa

SEQ ID NO: 578 - DNA, 990 bp, Methanobrevibacter ruminantium
  source 1..990: mol_type = genomic DNA
atgggatgcatggggttcggagatccggaaaatggaatgcacacatggacattgcctgaaaaggaatcaatagaaataattacaaatggcctacacaatggaattaacttctttgatactgctatcggttatcagaatggaacttccgagcaatatgtgggaaaagcaatccgggaaaacgcttctcgtgaggaagttgttgttgcaacaaagtttctgcctagatcacaggaagatattggaaataatgtctctggaagacagcatatccacaatatggtcgaaaaaagccttataaatcttggcttggattacattgacctgtatatctatcatatgtgggactacaacactcctttatatgatcttcttgaaggattaaatgaggtcattgaagaaggtaaagttaaatatattggaatatcaaactgttttgcctggcaacttgcaaaggccaatgcacttgcagaaatggagggttttgctaaattcgtatcaattcaaggccattacaatttaattttcagggaagaggaacgtgaaatgattccattatgccacacagacaatattgcattaacaccatacagcgcactggcttcaggaagattgtcaaggctccctggtgaagaatctaaaagattaaatgaagattactatgccaaattgaaatatcaaaattccgaacagcaagatttaaagattatagaaagagtcaatgaacttgctcaaaattatggtgtgtcaatgacagaagtgtctctggcatggctacttacaaaagttacagctcctattgtaggggccactaaaatgcatcatgttgaaggtgcagttagttccgttgatttgacattaacggaggaggatattagttatttggaggaaccctatattgctcatgatttggtaggagtaatggcagacaataaggtttcagccagtgataacgagaaagtctggattaaacacactaaaaacaagatttaa

SEQ ID NO: 579 - DNA, 534 bp, Methanobrevibacter ruminantium
  source 1..534: mol_type = genomic DNA
atgaaaattatagttttgaaaggaagtccaaatattaatggttcttctaatcttcttgcagataacttcattaaaggagcagaagaagcgggccatgttgttggagaaattgatgctgctcatgcagacattgcaccatgttctggttgtgttagctgtggctatgaaggtccatgcataattagtgatgatatggatatttttagagaaaaaatccttgaagcggatatgctggtgtttgtaactccattatactattatggaatgtcagcgcagcttaaaattctaattgacagattctgttcagcaaacagttccattcagtcaagtcatttcaaatctgcacttataaccgttgcatataattcatccaattggacatttgatgcactggaagcacattatgatactctagttaaatatcttaatttagatgatcaaggcagaattttaggttatggttgtggcactccctcaatgacaaaatactctgattatcctaaaaaggcttatgaatttggaaaaagtttataa

SEQ ID NO: 580 - DNA, 1401 bp, Methanobrevibacter ruminantium
  source 1..1401: mol_type = genomic DNA
atgccaaatttcttctcaggaggagatcttatatcaaataataaaccgcaagaaacgtttaggggaaaaactgacagggctattaagaaacgacccccatggaaggaatacaacctgcatatagtttgttttgttctggttgccatttcaatggccattggagttaaagagattagaatcactgataccataagtgttttattattgcctttaatatatgccctaatcatgggtttggctctttttttagcaaaacctataaaatttataggtaaaaagcaatcaaaggtagctgaaggagcaatggttttatttataggagttttaattgctaaattagctatttcgagcggacaatccattgatattatttttaatgtcggcccctccttgattttacaacttttgggggatttgggcactcttatagcattgcccgttgctttgattttaggatttagaagagaagtaatcggtatggcaagttccatttgccgcgaacctaacttgggagtcattatcgacaagtatggtttcaaatcccctgagacaaggggagttttagccatttttgttataggatccattatcggcactccttttatcagcttcctatcaagcatatgcatttcgctcataccttaccatccatatgcctttgcaatggcttcaggcataggaagcgcaagcatgaatgctgcagcattggttccattggtgcatatgtaccctgccatggctacccaattggaggcctttgcaggatgcagtaacattctttcattttgtttaggcatttacatgtgcatattcatttccctgcctcttgcagaaaaattgtataaatggttatctccaatcataggtaaaggtgaggggagaaccattgatgacgaatatgctattgaaggagtaaaagatgataaatatgctacttctgaggatttgagttctggtaagattgaaagatgggtcactttcctcgtacttttctcaatcatcggcacagttggaaatttcataggttatcatacccctttgcttgatgtgttcatcggaatgctaatcatttcaattattacccttatcggaatgtgccttgagaggataattccatgggatatcccatcaatcatttatataagtttacttggtatttttttagccattcctggagttccaacttcagacattataataacttatgtctctcaaattgagttaactacaatctgcactgcatttttagcatatgtcggtattgcaatcggtaacgattgggaggaatttaaaaagattggttggaaaggaatcattatagcaataatcgtaatttccggaacttacctcggttctgcaagtattgcaaatctggtcttatttgtaacaggcatgatttaa

SEQ ID NO: 581 - DNA, 894 bp, Methanobrevibacter ruminantium
  source 1..894: mol_type = genomic DNA
atggcgcggagcgataaaactttggaagacattttgaatattattttttatgataaaccgtcaactcaagatgaaattgccgaaaaattaaagattagtcgaagatatgttactcaattgcttaaaccattaattgaagaagacattgtcaaaagggcttatgtcatcgacttgaataaatatgatgaaatttatggctcttcagaccctatcttcaatctcaaacagcattccgcattttttttaattgaaaacatgctaagcagcatgagcgagcatgttaaagaacaggtccaaatgtctttcgatgccattttaactaatgataaggacttggcagaacaagctttaaaactggattttaccacaaataatatgtatgaaaaagttcgcgcatctgttgaaactgtcgttgatgttgatccccattccaaactttccaagattttattgttcagcgaagcggcatacaattatgaacgcattggagattattcaggccatattgccaaatttgtcattaatgagaagactgccgtagacgatgaacttttagatatattaaaaaaaatgcataaatatgcacaaaaatctatttcatatgcaactgatgcttttattaatgggaatattgactcacgtggaaatttgatggatacagaagaaaaaattcatgaaactcaacaaaaagccatgaatctcattgccaaccaaatggttgaaacttcttttgaggatattgaaatgtccaattattatatttacatatcccgtgtagtgaaatcattcgaaagaatgggcgatatctcagtggaaattatggatttggctgctgaattccataaggatattccaaggccaacaactccacgttcatttagagaaaaaatttaa

SEQ ID NO: 582 - DNA, 1935 bp, Methanobrevibacter ruminantium
  source 1..1935: mol_type = genomic DNA
atggaaggaagcgaattacagaacataaaaggaattggagataagctgtcccaaaagattttgctaaaccttggaggagaagaggaacttaaccgggtcataaatgagcttgatcttgaaagacttatccaaattgaaggaataagccaaagaaaggcgattgaaataatgaaccaattattgggaaatcctgcacagaagtttttaaaaagcgaacgtgcaattcagctatatgaagaaatcattgaaaaaatcctcaaatattcaaatacaaactactctaaaaacagaatcttgcttttagctccaataaaggatgaattcattattgccgaaaggctttcatttgtcatgagcgctaaggaaagagtcagcaaactgcctcttgatgagctgaacaagctgatgagaaatctccatgagccaaagaatgcaaaggcaaactacgatgccagcaaggcaatacttgttgaaagcgctgaggatagcgattatctaatggaccttggactgaacaaatactatacaatcctaactgcctccgattcaccattcttcaaggaggaaatcagcggatatgagcttgtctattacatctactctgaagggatactcgactttggagacatgcctaacctcatcatgataagcaaggaagctgaagactaccagcttgtgcctgagattattttagattacttcaaggaaaacagggaactctttgagaatgtttgtaaaatccgaaagatcctaggtgaaagcactgtcttggaggatgttggtccggtcttagaggaacttgacaattacaagacccaagagattgacttggatggaatcgttcaggaagaaaagacctatattgatgaggaacttaaaactaggatacacaatgttgaccttgaaggagatgaagtccttgacttattaaataatgccttgccccctaagatagagaaaatatttgacgaaatcttgtctaaatcaaaagagaacataaaggcaaaaagtggaattgactttgatccattcatcaaaaaatatcctattgaaattgatgatatggagatggagagaatcaagatggagattctctcaagcagcgagaacaactattttgacatgaaaatcactgctgccgaacatttggctctcattaaggagcaggccgaaagggaggttaaggaaacaattgaatttgactttgaatatgccctaggaagctttgcataccattataagcttaatgctcctgaattttcaaacgaatatgctcttgaaggagcccttcatttggaattatgccttaaggagacagaggaagataatgagaatggagagattcaaaggatagattataaattgaatgagcaggagaatgtggcgcttttaactggagcaaacagtggtggaaagacaacacttcttgagacaatcagccagatagcgattcttgcacagatgggccttccagttccggcaaatatggctaagataaaattattggatgagatttatcacttctctaaaaagagatcattggatgccggagcatttgaatcattccttaatgtgtttatgccaattgtgacaagcgactgtgaaaaattggttcttcttgatgaacttgagggaattacagaattggaagccgctgtaaagatcatttcaagctttattgagatgataaaggacagcaattcctttgcaatcattgtaacccatatggctaatgagcttatgaagtatacagacattagggtggatggtattgaggcaactggattggatgagaattataatctgattgtggataggacccctaagatgaattatttggctaagagtacacctgagctcattataaaaagaatgtatgagaactctagtcctgaactgaaaaaggtctatggtaagatcttggagaaattctga

SEQ ID NO: 583 - DNA, 3054 bp, Methanobrevibacter ruminantium
  source 1..3054: mol_type = genomic DNA
atgaaattgcctgaattattagcccctgttggaagtgctgaacacttaaagactgccatcttatctggcgcaaactcaatatacctctctggagagaactatggtgctagaaagtatgctgaaaacttctcccttcccgaaataagagaagcgatcaaatatgcccatttgcataatgtcaaggcctatgtaacagtaaacaccctaatcaaggaaggtgaactgaagaaagtaagcgaatatttgctccaattatacaaaatgggagttgatgcagtacttgttcaagacatcggactaataaatataataaacaaacatattccaaaactcaatatacatgcttccacccaaatgaacctccacaatatagagggcatcaaatgggcctacgatcacaatataaaaagaatagtccttccaagggaaattgagatgagagagcttaaggaaatagtggaatatgcccattccttaggaattgaaatagagatatttgcacatggagcgctatgctattcatattcaggccattgcctcctatcctctcttcaaggaggaagaagcggaaaccgcggaagatgcgcacagccctgtagggagcaatatgaactgtccataaacaaaagcaaaagaatcagtccaaagaacgaaggaaactatcttttatccccaagggacctgtcattatatgaaaaccttgatgaaatcgtaaatttaggcattgatagcctaaagatagaagggcgaatgagaagcacagactatgtggcaactgtagttaagaactacagaaaaagacttaacagattaagatacgacaagacctcaaagtcattgaatagaaacataaatgaatcaatcaaaaaaaccaaaaagggaaagaaaggaagaaaatcagacttaaaaaagatagaggataaggaaaagatagaaagccttaagaagattcaaaaggaagaaaacagaaattcagaggaagaattaggactggtcttcaatagggagtttacggcaggtcatcttattccaaaaaacaatcctatgatcatgaacagaaagaaacctggccatcagggattatatattggaaatattcacagatacaatcctcaaacagaagagattcatatcctattaaatgacaatttaattcacattcccgaaaaaggagatggaatattaatagaaagcagaatcaatagagaaaactctgatgaaagaaacaataaatctaataaaaacaataaaaataaacaaaatgaatccaaatcaaataagaaagataaaaataaaaagaaaataaaaaggatggaaaatgatgaaaactatcattcaatcattcagacttatggatttgacatatcctcaaagcctgtcctaaaagattccaaagacaagcattggagaaaaagggaaaaggacaaggacatagaaggcaaactacttgttataaaaagagttagggagaacaaaagaatcccatttcctcttgagaagggctcaaaggtataccttacaaagagaaactccctgataaatgaagtcaagaatctaaaaagcgacaagtccaagcatatgataaagaaatccaatctggaactctactttagaatagacagcgacaattaccctcacctaaaaggaaaccttaaattggacaatggaaaggtaatcacccttaaaataagaggggaaatgccatgggaagaggcaatcaaaaagcctattacaaatgagaccatcaaaaagcaattgatgaagataggagacctcccttattatatcgaaaagattacagtaaacaacaataaaagcctattcacaccaataagcggaataaatgagcttagaagagaattctttgacaagcttgaagaggaagtaattaattcatacattcctactgatgaagatataaaaattgcagaagaaaacattaaggagttgtctaaagaactggatagaaagattgatttaaaggccaaagttaaatcagaacaagaaaacaatgatttaaaatccaatgccaaattggaaaataagaataagaattcaaaaaatctatccatctacataaatagcctagaaagcttaaaggaaataaataaaatcaatgatctttcaaatactctattcaatagaatctatttagaaataccgccaaatagaagactggatgaaattacaaaggatagaatagaaaactacaacccaaatgactcaaaagaacttaacataagctactgtgttaacttcctaaagtctgcaatcaacttggcccaagaccaagactatgaactcatatggaaattgccagacattgcacataagcaatccaaggaatcaatagtaaagatattaggcatactaaataaaatgaatttgcacattaatattatgactagtttaattggattagacgattcattaaaagataagtttaagctagaactttatggaaattatccgttaaatgtatataatgcatatagtgttatggaattaaaaaattataagacattatgcatatcacccgagttatataagaagaatattgaaaaattaatggaagactattatacaaacaaaaacaatgagggattatctgaaatggaaatcttggttcatggaaagattgaagccatgaccacaagaaaggaacttatttccaaaaaacaattgaagctaatcgacaaatataataagaagatgagaagggataaaatggacatctcttcaaatgagttttacctaaaaaacagaaaggatcaatattacccaataagaacaagcataaatgaggataatctgattattctaaactcagaggagttttgcctgattgatgagattgattacttgaagtcaattggaatcaaaaactattccattgactgcagatggaagggcattgattatattagggatattggaatggtttatagggattccctagataatgatgattatgacctaggtgagtttaaagaaattatcaataaacattcagagcaattgactaaagcaaattttgatataggattaaaataa

SEQ ID NO: 584 - DNA, 2586 bp, Methanobrevibacter ruminantium
  source 1..2586: mol_type = genomic DNA
atgacattacctgaattattagcgcctgcaggagactatgacattttagttactgctgtaaatgcaggagcagatgcagtttatatatctggcgaacgctttggagcaagggcctttgccaaaaacttcacacttgaagaaattgagaaaagtgtagaatatgctcacttaaatggagtaaagatacatgtaacagtaaacaccctcataaacaactttgaggttgttgatgttgtccaatacctcttcaaactctacaagcttggggtagacgcagttattgtacaggatgtgggaattatagagctaatcaaaaccctaatccctggtcttgaagttcacgcatctactcaaatgacccttagcgactatgactgcattctttgggctgttgagaatggaatatcaagaattgtctttccacgtgagataagcgtggataagataagggaaatcagcgaaaagctaaaatcctcaaacttaaatatggaacttgaagtattcggccatggagcactttgctactgcttcagcggaaactgctacatctcatcttataacagcggacgaagtggaaacaggggagcctgcgcacagccttgccgtaagcaatacaagttaaaatacaaaaactacaatgtaggaaacggattccttctttcaacccatgacttggcagtctataaaggtttggataaaatagaagaagccggagtattctccctaaaattagaaggaagaatgaagtctgcagattatgtagggacaatcgttaatgcatacagacatataatcgatggagatgagggggactatgaaaaagaccttcatttagtcttcaatagagaatttacagatggatatatcctaaaccaaagtccaggccaagtcctaggaagggaaagctcaggccacgagggagtctatatcggaaagatcatcgaaaagaaaggagagcagattaagatttccaaagaaaacaaggacttttcaataaaccttgacatcggtgacggaataggattcaaatataaggacaaaatcaagggaatctatattgacaacattaaagaacagactgacgattatataatcctaaataccacaagaaatgtccgtgaaggagataaggtactcttaagctattcaaagtcaacccacgataaattaaagaaattccataatgaaacaataaagcagcacatcccattgtccctagacatatactggaatgaggatttaagcctaaatgtcacaggaagattccagatagaggaaaagggaataaacaacaaaaacataatagagcgctttaactttaactatatttccgaaaccaagtttgaaaaggcattgaatagaccaataagcaaagaggatatagaaaagcaaatgctaaagactggagacagctcattttatataaaggaaatgaacattcatggcatgcctgaaaacactttcatacctattggaaaattaaacaaaatcagaagaaggcttcttgaaaaagccacaaatctactgcttgattattataagccaagcaaaaaagaagtgagggctacaaataaaaaggtaaatcaatttataaaggaatataaaacatatagtgacattgatctaagaaaggaaaaactgaacctatcaatatttgttgacagccttgagcttttggagatgacaaggaaacttcctattcataaatattattttgacccatcattctcattcaacagcccagaagagtattttgaaaagattaaggacctattgaaggaagcttattcaatagttggcaattccaataatccaaataataaatcaaaatcaaatgaagatgaaagattagttctagtcttgtcttcctttatttcagatgaagagatagaaaaactaagcaaaatcattgatgagctaaaagaagaaggaataagcatccctataatgtatgacactcccggaataggaaaaagcttcaatacagacatctatggaaaccacaacctaaacatctggaacagctacaatgtcaaaaacctctctgaatctggatttaaaagccttatcctatcatcagaactctcccataaggaaataaaggaacttgtatcaaaataccaatacattaaaggagacaaagaaaccgacctaaacataattattcaaggaaaccttgaagtcatgagcagcaaagacgacttttccaatttaaatgatggaaaagacttcataataaactctgcagatgactatgcaatccttgaggataagaaaagaaagaaattcaaatataaggttgtatttgactataataagcatagccatttcatcaataaggactgcctatgcctgatagaggaagtggagcttataaaggatacaggagttgattctgtaataatcgatacaagattctcatcagccaaatacagctctacaataatctctttatacctgcaggcattaaaagaggacaatacttatgacttaagcctgctaaaggatcaaattcgaaacataaccctatccagactaaatcaaggaaactttataaatggaaggttacatgaaaaagactgttaa

SEQ ID NO: 585 - DNA, 591 bp, Methanobrevibacter ruminantium
  source 1..591: mol_type = genomic DNA
atgtatatcgtattagaaggaatagatggtgctggaaaatcaactcaaataaactatttaaaaggatggctggaagataacggctttaaagttgaaacaattgttgaacctaccgatttggaagttggaaatcttattcgtcaattgttgactaggtctgatgctacaagtgacactatgcaaaagactttaggccttctttttgcagctgacagacttgttcttatggataaaatcgaaaagcttgaaagtgaaaggactgttgtaataagcgataggtctttttattcaagtctggtatatcaaaagccacaggattggattcgtgagataaataagtttgcaaaaatccctgatttggttttgctccttgatttggatgttaaaaagtcagttgaaagatgcgatggaactgatgaattcgaaaatgaggagtttttaactggagttaaagagaattatctggcattatctagagagaatgataattttaaaatcattgatgcgaataatggtccaaataaagttgcatctgatataaaaaaagctgttgctcctttatttgatatctgtgtagattgcattaggtag

SEQ ID NO: 586 - DNA, 207 bp, Methanobrevibacter ruminantium
  source 1..207: mol_type = genomic DNA
atggaagaagaaccaatttacgaaatgaaacttacaaacggaattggagaacagatgcttgctcatgtttttgaaaagttcgatgtggaactaaagcaaactgagttcggacctaaactccaaggaactaaagaggaattggaaaaagctcaagaatacattgttgaaatgatgaaaaaaagattagaagaattagataggcaataa

SEQ ID NO: 587 - DNA, 966 bp, Methanobrevibacter ruminantium
  source 1..966: mol_type = genomic DNA
atgaacatagaagaaaaaatagaattaatccaagaaggaacacttgaaatcatagaactggaagaattaaagcaaaagcttgaaaaagaaaccccaattgcttatactggatatgaaccttctggaaaaattcatttaggtcatgcagttaccataatgaagcttaagcaattgcaaaagttaggatttaagataaagatccttcttgcagactaccatgctttcttgaatggaaaaggaactgtagaagagattgcagaaactgcagaatacaataaaaggtgttttcaaggtttaggattagctgatgatacagaatacatcttaggttcatctttccaaaccggaagcgaatatactaatgatgtttaccaattagccaccataacaaccttaaaaagagcaaaaagaagtatggatcaagtaagcagacacgatgacaatccaaaagttgcaagcgtagtctatcctctcatgcaaactgctgatatgtctgcattaaatgtagatattgccttaggaggaatggagcaaagaaaaatccaaatgttagcaagggaaaacctgcctagaatcggaaaggaagctcctgtatgtattcacactcctttgattcatggtctcgacggcgatgacaagatgtcctcaagcaaaggaaactatatcgctgtggatgatgacgaaaagacaatcaaggaaaaaataagaaaaagctactgtccgcaaggtgaaatcgaaggaaacccaatgattgaaattgcagacttctttgtattctcccaacaagacacattcgtcatagaaagacctgaaaaattcggaggaaaccttgaattaacaaaagatgaactgcatacaatgtacagcgaaggcaaacttcatccaatggacttaaaaaatggaatcactaaattcctcattgatttcttaaagccagttagagaatttatggaatctggcgaataa

SEQ ID NO: 588 - DNA, 1041 bp, Methanobrevibacter ruminantium
  source 1..1041: mol_type = genomic DNA
atgttttgtccagaatgtggtgccactgatgttgaaatggtagatggaatctgcaagaattgctatttgaagaaatttcaattgatggaaattccagaaaacattaccgtaaccatctgtaaacactgtaatgctaaattagaggaaggaaaatggaaagacgaatatattccagaggatgagattatatatcgtaccttagaaaacaatattaaacttaatgatttagcagaaaatgaagagattgaactggaaatagaccaaatgcgaggaacaattgcagaatgttacattgaagcagtggcgacagttcttggagaggaaattgtagaaacccatacgccaaatgttaaaatcaaatattccgtttgtccagactgcagcaaaagaaatgcaggatactatgaagcagtaattcaacttcgtgcagacaatagggaacttaaggaagatgaaataatcaaagctgaagaaataatcggcagaacactggacaagcagtttaaaaaagacaaattggcatatattccacaagtggctaagcttaaggaaggaaatgactattatatcggttccttaaagtcagctaaaaaggttgtggaacatcttaaagaggagcttggaggaaaagtcaaggaatctccaaggctaatcagcgaagacaagtctacaggaaaaggattatacagaatctggatatcattaaggcttcctaagtttgaaaaagagaatataatcaagtataatgataaaatctatagggtggaagccattgatggaaatagaattctcctggccaatttggaaaatcaggactccttggcattgaaatggagagagtatgattcaattgaaaagatggaaaacctaaatggaattcaaaaggcaatcataactgcaaaatctccaaagagcattcaaatcctagatccagatgacttcagcccattggaccttgatatgaatgaaaaattagaaggctttaatatcggggatgaaattgatatattaaaaatagagggcagaatatttattatttaa

SEQ ID NO: 589 - DNA, 408 bp, Methanobrevibacter ruminantium
  source 1..408: mol_type = genomic DNA
atggacgattatgaaaatttattaaacagagcgattgatcaattacctcctgaagtatttgaaaccaaaaggtttgaaccagttaaagcttactctgttattcaaggtaatagaacattcattcaaaatttcaaagatgttgcagactcattaaatagagaccctcagcatatattaaaatacctgcttagggaattaggtacagcaggaaacctggaaggagtaagagcaatccttcaaggtaagttcaatcactttttaatcaacgaaagaattgacgaatatattgaaaaatacgttatctgtcatgaatgtaacaggccagatactaaaatcataagagaagatagaatatttattttaaaatgtgctgcatgtggtgcaaaagctccgcttaaaccattataa

SEQ ID NO: 590 - DNA, 1998 bp, Methanobrevibacter ruminantium
  source 1..1998: mol_type = genomic DNA
atgagtcccactaacaaaaccaaagcatcacttgcaagatttgaagaattcttctctacaatttacaaggacgatgtatttgaagttctagaaaaatatcctgatgaaaggtcattgacagtcgattataacgatttagaaatgtttgatccagatttggcggatttattaatcgataagcctgatgaagtcattacaacttcacaaaaggctatcaagaatatcgatccattgatgaaagacgctaatttaaatatcagattcgaaaatcttacaaacaacgttccattaagcgatctcttaagtaaatacattggaaagtttgtttcagcagatggaatcgtaagaaaaaccgatgagattcgcccaagaattgaaaaaggtgttttcgaatgcagaggctgcatgagacaacaagaagttgaacagacatcctcaagccgcataatggaaccttccatgtgtacagaatgtggaggaaggtcattcagactgcttcaagaggaatccaaatacatagacactcaaagcgccagaatgcaagagcctttggaaaacctttcaggaggaacagagcctaagcaaatgcttatggtattggaagatgacttggtggatgaattgagtccaggagacaaggtcaggattacagggactttaaaaacattcagagaagaaaaaagcggaaaattcaaaaattacatttatgtaaatcatattgagcctttagaacaggaatttgaggaattgcaccttagcgaagaggatgaggctaaaatccttgaattatcccaagaccctaacatacatgataaaatcattaactccactgcaccttcaatcagaggatacagagaggtcaaggaagcgattgcattgcagctctttggaggatctgtaaagcaccttgaagacaagacacgtttaaggggagatatccacatcctcattgtcggagaccctggtatcggtaagtcacagatacttaagtacgtatcaaaattggcaccaagaagtgtatatacaagtggtaaaggcacttcaggtgcaggtttgactgcagcggcagtaagagatgagcttggcggctggtctcttgaagcaggtgcattggtgcttggggaccaaggtaacgtatgtgtcgacgaattggacaagatgcgttccgaagaccgttcagcccttcacgaggcattggaacaacagacagtaagtattgcaaaggctggaatcatggctacattgaatacaagatgttcagttcttgcagctgcaaaccctaaattcggtagattcgaccgatataaaaccttagcagaccaaattgacttgccttcaccgattctttctcgtttcgaccttacctttgtaattgaagataagccaaacattgaaaacgatagaaaactggcacaacacattctaaagatacaccagtctgaaagcgtaaactatgagatagagcctgatctccttagaaaatatatcgcatatgcccgtaaaaacataaatccagtcctaaccgacgaggcaaacaaggtattggaagacttttatgtatctgtaagaagtgcaggggtggaggaagacactccagttccaattacagcaagacaacttgaagcaatcatccgtctagctgaagcaagcgcaaagctccaattaaaggacaaggtagaggcagtggatgctcaaagagcaatcacattgcaaaggaaaacattagagcaaattggattagaccctgaaacaggacagttagatatttcaagagtggaaggaggaacaacaacctcagatagggaaagaatgcaaaagatagaagaggaaatcaagcttcttgaacaggaattcgaacgagctcctatagacactcttaaggaaaacatgaaagagaaatatgatatgagtcctgaaaaggttgaaactcttgttaaaaaacttaaaggaaaaggcatcatatttgaaccaagaaatggtttctttaatactgcttaa

SEQ ID NO: 591 - DNA, 393 bp, Methanobrevibacter ruminantium
  source 1..393: mol_type = genomic DNA
atgttaatatcagtcttgggagtgattgtaattatcattatggtagttgcagctgcttatgttggatttagcgttgtttcatctagtttgactggtggaatttcctctggtactcaatatgatgagttagcaaccttaaaatccaattgctctagtttagaagcccaattcaatataaccggaactaagatttatgcaatgcaaaacattaccttagaaagagagtttgtaaatgctcaagtggagttaattaaggttcaaaatgatttggatagtgttgaaagtgcattggcatccggtcagcctgcttcagaagttgataaaagaatacaacaatcaaaagaagatttaaaaatagctcagcaggcttataatagtttatctgttaaataa

SEQ ID NO: 592 - DNA, 642 bp, Methanobrevibacter ruminantium
  source 1..642: mol_type = genomic DNA
atgggaagtagatggcaagtggaaaagaagaaagatccctattatagaagagctaaaagtgaagaatatcgttcaagagcatcatataaacttaaacaacttgataaaaagtataaaataatcaaagaaggaaacactgtagtggatttaggtgcagctccaggaggatggtctcaagtggccttggaaaaggttggggaagagggaatcgttgttggagtggatttgaacagaatcaagccattccctgaaaagaacttctatggaattagaggggacttcaccaaagagatagttcaagataagattatggaacttacaaacggcaaagcaaaagtccttatttcagatgcagcaccttcattaactggaattaagacaatagaccatttaaattcagttgatttagtggaaaccgttataaaaatagcagacaatatccttgaaaccgaaggaaatatggtaatcaaagcattccaaggccctgaatacaagcgcttattggatgaaatcaagcaggactttagaaaagtcaaatccacaaagccaccatcatcaagacacagaagcaaagagatgtatattgttggattaggctatagaaaaggtcctggaagtagaaaaagtagaaataaagagtaa

SEQ ID NO: 593 - DNA, 540 bp, Methanobrevibacter ruminantium
  source 1..540: mol_type = genomic DNA
atgttaattggattaatatcagacacccatattccagatagaagaatgaaacttccccaaaaagtattggatgcatttgaagatgttgaaatgattcttcatgcaggagacatcaccagccaaagcgttattgatgatttggaggcaattgcaccggtccatgcagttgaaggaaatatggacagggttgtaggggaaatgaatcttcctccatctaaaatagttgaagctgaaggccataaaataggaatagtccatggagaagtctatccaagaggagacacccaacagctctattacactgcattggaattaggtgtagacatccttgtaagcggccattcccatgttgcacagcttgaaaagattaaaaatgtgattctggttaatccgggaagccctacaaatccaagattgtcagacccttcagtggcaattatggaaataaatggaaatgatattaattttgaattcgttaaagtgggaaatcctgtttgttctgctttaaatttctttaaagacaaagcaaataaagaataa

SEQ ID NO: 594 - DNA, 1092 bp, Methanobrevibacter ruminantium
  source 1..1092: mol_type = genomic DNA
atgggaaaagttagtaaagaaaaaatattggagattttagatggctatgataaggaaaacattaccatagctactctcggtagtcacacttccttgcatattcttaacggtgctaaagaagaaggctttagaactgctattgtatgtgaaaaaggtagggaagtaccttatgaacgttttgaagttgcagatgaattcattatggtcgatgaatttaaagacatagtgaatgaagatgtacagcaaaagctaagagatatgaatgcaatcgttattcctcatggttcctttgttgcatatgcgggtttggacaatgttgaagacaaattcaatgttcctatgtttggaaaccgtgatattttaagatgggaagctgaaagagaccttgaaagaaaactattggtcaatggtaaaattagaatcccaatgaaatatgatgacccttcaaaaatcgaccgtgcagtaatggttaaattccctggggcaagaggtggaagaggatactttgtagcttcatctcctgaagaatttgatgctaaaatcgatgcaatgaaagaacgtggatggattgaagatgaagatgtggcacaagctcacattgaagagtatgtttcaggctgtaactactgtattcactacttctactctgctttgaatgacgaagtggaattgatgggtatggacagcagatatgaatccagcattgacggatttgtaagaatgcctgctaagggtcaattaagcattgatatcagcccttcatatgttgtaaccggtaaccaccctgttgtaatgagggaatccttgcttccacaagcatttgaaatcggtgacaaattggtcaaaagtgcagcagagcttgtaaaaccaggtttgaacggtccattctgtatacaaactcttgtaaacgataaccttgaagttgttgtatttgaaacaagtgcaagaactgacggtggtactaatacctttatggaaggttcttcctacagttaccttaagtatggtgaaggtatgagtatgggaagaagagttgcacgtgagattaaaaacgctttagaaaacggtggttttgagaaaattattacataa

SEQ ID NO: 595 - DNA, 513 bp, Methanobrevibacter ruminantium
  source 1..513: mol_type = genomic DNA
atggtagatgcagaaaaagcaaaacaacctaaggagagaaagaataaaaacagtaaccttccagatattgattttaaagcattaatttttggtgcagcagcatatgcatttttcccgcttgttgcataccaatacaatctagacattttaatggtatttgcagcaataggtccattatacataggatatactgcaaaaactgaacttaaatcaatcattttaggaattgtaggtgcaactccactattatatttagctttttcaggcatgttaggatcatacggatcaggtgaaatggcagatataatcatgactgtcggaattctcggacttggcgcattgatgggatactttggaggatacctctacagagataggcaaagaaataaagcaaaagcagggggtattgtagtcgaagacactcctaaaaaagaaaaacaatttgaagacactggaagtgtcaaaaagaatgttgctaacttattccttccaaaaagcagaaggaaaaaataa

SEQ ID NO: 596 - DNA, 375 bp, Methanobrevibacter ruminantium
  source 1..375: mol_type = genomic DNA
atggcaaaaatgaatgctgtgatattaggatttatattgacacttgttgtttacctattctttggacgctatgaattctggggtcttttaattgtaggattcattgtaggatatatagctcacgaaggaatattaggcggaatgtggaatgcagcccttgcaggagcattcggaacaatcatatcagcaatcctattcataatacttgtcacaattggaggaactgcaatgatgggattcctcggaggacttgctggatttacagtttcaggaattacaagcttgattgatattgtatttacaataatcaaatatatgattgttatgggaataactggtgctgtaggtggagccttaagcggagaaaaagaataa

SEQ ID NO: 597 - DNA, 969 bp, Methanobrevibacter ruminantium
  source 1..969: mol_type = genomic DNA
atgatggatttaatttacatattaataataattatcattgcaataatcgcatacaaaagcataaagatcataagaccttatgaaaaaggggttgtagaaagattaggaaagtacaaccgaactgtagaaagaggtctgaacattgttattccatttatagagacaatcagaaaggttgacttaagggaacaggtcgtagatgttcctcctcaagaggtaattacaaaggacaacaccgttgtagttgtagattgcgttatcttttgcgaggtcatagatgccttcaatgcagtatacaatgttgttaacttctatcaggcaattaccaagcttgcacaaaccaatctaagaaatatcatcggtgacttggaattggaccaaaccctgacttcaagagagatgatcaatacagaattgcgtgaaacccttgatgttgcaactgacaaatggggaacaaaagttgtccgtgtagaaattcaaagaatagaacctccaaaggacatcgttgaagcaatgagtaaacaaatgaaagccgaaaggatgaaaagagctacaattctagagtctgaaggttataaggaatctgaaatcaaaaaggcagaaggggacaagcaatccaagattcttgcagcccaagcggaagctgaagccataaagcaagttgcagatgcaaacaaatatcaggaaattgccattgctgaaggtaaggcaagggcaaccgaaatcacctataatgcaatccatgcaggtaatcctactaatgacctgattgcaatcaagtatctggaggctcttgaaaacattgctgatggaagagcaactaaaatattcttgcctactgaagtttcaggaatcttaggctcagttggaggaattgcagaattgtttaaggacgatcctgaagcattggaaaaatttgaaagtataaaagttctagaaaatgctaaagaaacagcagataatgaatag

SEQ ID NO: 598 - DNA, 420 bp, Methanobrevibacter ruminantium
  source 1..420: mol_type = genomic DNA
ttgtatttagaattttggataattttagccattatcctcataattggagaactgctgacaggtggattctacctattatccataggacttggatcgctagctgctgcaatatttaactatttccaatttagcattacaatccaaattgtggcatttattttagttacagtcatttttatcattctttctaggcctctctttaatcggcttaatagaaacacaattgataaaaaatcaaacacagagcgattgattggattgaatggagaagctatggaagatattgggcaaaaaaatattggagcaataagcataaaaggagaagtctggaaagccatttcagatgaggagatatctaaaggggaagaagtaaaaataataggtatagatggagttaagttaaaggttgaaaaactctaa

SEQ ID NO: 599 - DNA, 2598 bp, Methanobrevibacter ruminantium
  source 1..2598: mol_type = genomic DNA
atgattaaaaaacaaactaaaacatattcaaagaagcagatttacaagaatcttcatccgtttgtacgagaatggtttgaaaatagcttcgaagactttacaccagcacaaaaacaatcaattccagaaatacaaaagggaaaaaacatacttgtctcatcaccaacaggttccggtaagacactaaccgcctttctatcagtaattaacgagcttacaacccttgcagacaaaggagagcttgaagataaggtatactgcatttacatatctccccttaaggcattggacaatgacattgagcgcaatctagacactccgcttaaagagatagaaaaaatagctggaaagccattaaacataagaaaatctgtaagaacaggagacaccacacaatatcaaagaaacaagatgttaaaataccctccgcatatccttatcacaacccctgaaacattatccatccttcttgtggcccctaagtttagggaaaagctttcccatgtgaaatatgtgataatcgatgagatccactcacttgctgaaaacaaaaggggagttcaccttagcctatcccttgaaaggctacaggccttaatcggagggtttgtaagaatagggctctctgcaacggtatctccattggaggaagtggcaagatttcttgttggatacgaatatggaacagaaagggactgtttgctagtggacatcaattatctaaaggaactggacatagaggtcatatcccctgtggatgacattgtaatagctgatagcgaagacactcgccttgctacctatgccctattggatgatttgattatggagcataagactagcctgatttttacaaatacccgtagcgccaccgaaaggtatgtatataatcttaaaaagctctatggagagcacttcaacagcaataacattatggctcaccattcttccttatcaaaggaactgagactggaaactgaagaaaagctaaagaaaggagagcttaaggcagttgtatcctcaacatcccttgagcttggaatagatatcggatacattgaccttgtaatcctgataaactctccaaaatcagtttcaagggcacttcagaggattggaagaagcggacacaggctgcatgagaaatcaaagggaaggataatcgttacagacagagatgagcttgtcgaatgcagtgtgcttttaaagaatgcaaaggaaggaaagatagataatataaagattcctaaaaactgtttagatgtcctatcacagcatatctatggaatgggaatagaaaacccatgggacattgactatgcctttgatatcatccgaaaaagctactgctataaagatctctcaagagacgactatgaagacgtattaagctatcttgccggagaatatgtagagcttgaagagagatatgtctatgccaaaatctggataaactatgaggagaacacctttggaaaaaggggaaagcttgcaagaatgctctattcaacaaacattggaacaatccctgatcattcggcagttattgtaaaatgcgacggagaggtcataggaaaggttgaagaggactttatggaaaagcttaagaaaggagacagctttgtattgggaggtcgaacatataagttcaaatatggaaagggaatgacaataaatgtatcccctgcatctggacctccatcaattccatcttggtattcagagcaattgccacttgcatttgaccttgcagtggacattcaaagattcagatatatccttgacagcaagttccagtatggcagaagcaaggaagagataatggagtttctccacgactatctctatgtggatgattttgcagcaaattccatctatgaatacttcaatgagcagtatctctatgcgcagataccacataagcaaaagctccttgtagagtactacacaggatttggagggcgcaaattcgtcatattccatagcctattcggacgaaagacaaatgatgcaatagctagggcagttgcatttctagcctcagacttcaataagcgaaacataacaatatccattacagacaatggattttatttaagttcagatggaaagatgggggccttagaggcattgaacagattaaatcctcaaaactttgaaaacattctaatcaaatcacttgacaagactgaaaccctagcaagcaggttcaggcattgcgcaggacgctccctcatgaccctaaggagatataaaggccatgagaagtctgtagggcgccagcaagtcagaggaaaaatactgctaaagcacattcaagagatggacaataacttcccaattcttaaggagtcccgaagggaagctacagaggactatatggacatcaagaatgcaaagagagtcatctcatggattgacagcggagagatggaaataaaaacaataaatacaatcatccccaccccatttgcattcaatctggtttcccaaggatatttggaagttctccaccaggacgataaggcagagtttacaaaaaggatgcatagggcagttctagataagatcaaggaagagatggacaatcagttttaa

SEQ ID NO: 600 - DNA, 852 bp, Methanobrevibacter ruminantium
  source 1..852: mol_type = genomic DNA
atggttgaaaaattatcaattgatgaagctattgaagcattgaaagatgaagatgtggctaataggaaattagccatcaaaagcttagagcataagagcgacgataagattatcgaacctttgattgaagccactaaggatgaaaatgctcaagttagatttggagctgctgaaatattaggggatattggagattcagcagttgataaattattggatgaatttaataaggaatccggttcaaataaacgttttttagctgttgcacttcaaaaaactggcagcgaaaaggcagttgatgcatttgctgatgcattgaatgatgaagactttggagttcgaaaagtagctgtaagggcgcttggagaacttagggctgaagataagattgatgccattgccgaatgcataaatgatgaggatggtggagtaaggactgctgctatctttgctttaggagatattggaactgataagtccattcaaatcattaaggatgcaagacgtaaggaaaaggacaaggactttaagaagtattgcaataaagcaataaagcaagctgaaaaagttcaaaagtctggaggcaaagtcaagtcttccaaaggtcagccaatgagcacaattaaggaaatggaaaagcaagatccagaagctgccattaaggcttatgaagttcatgtaaaaagcggcagcactaaggacactccttataagcgtctcgctatattgtataggaagataaatgattatgataatgagactagggttttaaaattagctattgaagttttatctaaagaaaatcctagcaaggttggatggtttgagaaaagattggaaaaaatgacctaa

SEQ ID NO: 601 - DNA, 807 bp, Methanobrevibacter ruminantium
  source 1..807: mol_type = genomic DNA
atggatattttcaattatatatttcaaattatcgtttcggttttgatttttgcagcaatctttgctgttggaatattgctaagggataaaatagtccataagctaaatttctttgtaaatcctcagaattatttgcctgaagaggaaatacaaacattgaagcaggtttattatttgattttaattctaattttagttgtgtgtattctaaacttcttctttgacaataatatcatattgccaaacagtccggaattctatgtattcaattcctttttagatattatagtttcagtatatatagcaataatcatttatgacggctctaaaaaaagcaaaatattattgatattcctaattcctattccatcaattgcattcctattatttggcgaatctttaattgaatattgggattttgtacgtattcctgcattattatatattatgaagatattttatgataagttccatatttatactgataagtataatttggaaaaatcaatacttcttctcttttcaatagtgttcattagttttattataacattggttgctgaaaacgaagatccattaaacgcattggttatggtctccaatgcatttacaagcaagggatatacaattttaggtgaaagcactataggaaaaatagatagcatatttctagtttggggaggttatattatatctggagctgctacagctactttgactgctgcaattttaattaaacactttaatgctaaaatagagaaatttgatgaaaaatttgaagaattagaaaagttaatttccgaataa

SEQ ID NO: 602 - DNA, 846 bp, Methanobrevibacter ruminantium
  source 1..846: mol_type = genomic DNA
atgaataaaatcaaaatagctctttgtcagatgaatgtagtagacaataaggacgagaatatcaaaaaggcaattgaaatgataaaagagtctaaaaaacaaggagcagaccttgcaatattgcctgaaatgtttaactgcccatatgaaaacgaaaagttcattaaatatggagagaccctagaagatagcagaacattgaaatcaatatctgaaactgcaaatgaagaaaatatctatgttctagcaggatctgtacctgaacttgtcttaaatgattcttctaatgaaaataacttatacaacacatcagttttctttgacaatgaaggaaagatattgggaaaacatagaaaggtccacctatttgacatagatataaaggataaaatctattttaaggaatcagacactttaagtgcaggagatgactttacaatcattaaaacaccttttgcaagaatcggaattggaatatgctatgacataagatttgtagagctttcaagaattttagctttaaacggagcagagatattaattttcccaggggcattcaatctgacaaccggccctgcacattgggaacttctatttaggtcaagggcattggacaatcaggtttatgcaataggagtggcccccgctttggataaggaggcaagctataattcctatgggcattcaattattgtaagtccttggggagaagtaattgaagaattagactatgatgaagagttaaaaatagttgaattggatcttgatttgattaagcaagttcgagaagagatacctgtactaaaaaatagaagaaccgacttgtatgacatcaatgaaaaataa

SEQ ID NO: 603 - DNA, 1179 bp, Methanobrevibacter ruminantium
  source 1..1179: mol_type = genomic DNA
gtgaaatattgtcaagagtgtggaaatgcaagctatgatagtgcaccagtatgtggaaactgtggtgctaagctaggtccaaagtcagaggcaaattctacacccccaagtcgtgataaaaaagctaaatcaacatcaacttctagtgaaagttccatattttcaagcaaatccgacggatttagttccaaaataggcaaaaaaattggcagtttccaagtgagcagcactaacactgctgttgaaaataaacaggaaagagaagaagctttcttaaaacaaacttcaaaaccaagtttctctaaaactgcaacagaaggatttaagcaaaaggataaaggaataaaaaatcctgctacaaaatataatatgcctaaaaaagaagaaactgttgatgctaaagctaaggaagctcctaaaagggaagctcctaaaaaagaaattaaaagggaatcccctaagaaagaagttaaaaaagaagctcctaaaaaagaaattaaaccaaatattgttaaaaaatcagatgaaggttcatctggcggaataaaccttaaaaagattggaattatagcaataatcatactaatcattcttttaatcgcaggaatcggacttaatcaaatgcaaaaccagacaactgatgaggtgatgaactatacagacggcatcatcaatttcacctactctggtaactggtctgtatacaacaataccaatgcagattccaacatgaccgatcttgcattcaaaactaaagataaaactttaattggatttacaacaattcaaagcgatgaaatcacttatgaaaaaatcctatcagatgtaaatgacactgcccattccttaaatggagaaatccttgaatatcaagaggttaatgtgggaggcgtcccagctcaagagataatcataagcactcaagatcaaggctattccagatacctatgcatcttgcatgacggagtctactattgcttcgttgcaaacaatgcaaaatctgacaatcagaacttgacatctttgaatacaactgaaattcaaaatatgattaatagtattagttttaaggatgttgtagctggagacactgcaaaccttgatacaagctatcaggaaagcagttaccaagaggaaagctacgacaactataactatgaagacacaagcaattactaa

SEQ ID NO: 604 - DNA, 501 bp, Methanobrevibacter ruminantium
  source 1..501: mol_type = genomic DNA
atggtaaagaaagaaaagattaaatgtgataatattaattatgcagtttataggattgatgattgggaaaacgattatgaaataaacattattggaactgcaagagagattccagtaacacagcctacccttgagcatatgctaaagcagatggatcatattcgccaatcagtatttgaaataggtggaaaaaaggttaatggaatgattggattgtctatgcagtttaatccaagctttgcttcaagagacattgatgagcttatcgaacaggagcaaaaggagtttgattcaatcatggctgaattgaatgcccttgaattgaaggacgctaaggatgtaatattcttggacacagatgagtatgtcatatataaattagagtatgatgggcatagcttaagcccaaagccttataatgactacgctaaacagcatcatttggatgaaattaaacgtttgaaggaattaagtggagaaaggtttgttttagagctttag

SEQ ID NO: 605 - DNA, 726 bp, Methanobrevibacter ruminantium
  source 1..726: mol_type = genomic DNA
atgtctaaaattcaacaattgcaggaaataataaattcatcagacaatattgttttctttggaggggctggtgtttcaacagaaagcggaattccagactttcgctctgaaagcggaatctttaaaagcctggaaaaatatggggatgttccggagaatctggtgtctcatacttactactcagaccacacagaggagttctttgagtattataaggacactcttgtatttgatggtgctaagccaaatccagctcatttgaagttggcagagcttgaagaaaaaggcaagttaagggcagttattacacagaatattgatggccttcatcaaaaggccggaagcaagaatgtcctggagcttcatggaagcattcatagaaattattgtcagatttgcaataaggagtattctcttgattttattttaaaaagcgaaggcattccaaggtgtgattgtggtggtgttgtaaagccagatgttgtcctttatgaagagcctttagacaataggattctagcttatgcaatcgattacattcaaaatgcagatacattgattattgggggaacttccttggttgtttatcctgcagcaggtcttataaattatttccatggtggcaatctggttttaattaataagagtgagactggctttgattatatggctaatttggttattaatgagccaattggagagacattgtctcaaatcagagtttaa

SEQ ID NO: 606 - DNA, 573 bp, Methanobrevibacter ruminantium
  source 1..573: mol_type = genomic DNA
atggattttatttcaactctactgattgcaatcgcacttgcaatggatgcctttagcgtttccctaacaaagggattcaccttaaagaacctcacaaaaagccaagctttatggtttggaatattctttggtggatttcaggctttaatgcctgttctcggatggctaggaggaatccaacttgaatggctcattacaacctttgcaccttgggttgcattcatacttcttcttttaatcggttcaaatatgattagagaaagtctctctggtgatgaagaggatgagaaggactctgataagttttcatttaaggaattgacattgcttgcaatagctacaagcattgatgcatttgcagttggaataacatatgcagtactaaaagtagatattctaattcctataataatgattggagttgtagcatttatctttacaataattggactttatttaggtaaaaaaataggaaattactttggagacaagtttgagatagtcggtggagtgatcttaattcttcttggtgtaaaaatactccttgaaggtcttggaattttagttttataa

SEQ ID NO: 607 - DNA, 783 bp, Methanobrevibacter ruminantium
  source 1..783: mol_type = genomic DNA
atgaaatataaaatcttagaaaatcccaattataaagaggcatatgagctaatcgaagaaggattagtgaaaaaagcaaccatgctcctatttgcatgctgtaaggtaagctatgaaggccgtgcattaagtgaacttgactatggagaaagaataatcatgattaagccagacggctgctttttgatacaccaagacaataaggtggatccggtcaattggcaacctccaaaatcaaaaacaaaagctttgataaaagatgaaaccctttacttagaaagccacaggcgaaagccacctgaactattggaagttgaagttaaaaagattcattatgcaagatataacctgattgaagattatgaagagcttgaaagggcaggctatgaaaaggatatgggagatatgatttgggacaatccacatatcatagaggaaggattccgcccgactgtaagggaatatgctacagagcatggtttcattgacattttaggaaaggatgccgacggaaaccttatggttttagagcttaaggcaagaaaggcagggatcactgcagtaaaacagataaggcgttatctcactgactttgaaaatagggaaaacaaggaaataagacatgaagaggaaaagcaaaaggtaagaggcttgcttgttgctccttcaataggtgatgatgcccttgagcttttagaggaagaaggtattgaatttgtctcagtagaaccacctcgtgagcttaaaaaagataaaaaagtaactttagatgcatttaaatag

SEQ ID NO: 608 - DNA, 1377 bp, Methanobrevibacter ruminantium
  source 1..1377: mol_type = genomic DNA
atggaaatgaatgaaaatgttgaaatgattacaggagaccctaaaaaggcaatcaataaacttgcttggcctttgatagcaagcatgctcttgatttttttaaataacattatagacagtatctgggttgcagggcttgggcctgaccctcttgctgcaatcggctatgtcacacctctctttatggtgcttgtaggatttggaaacggtatcggtgcaggtgcaacctcacttatctcccgttatatcggagctgaaaagagggatgatgcaaacaatgcagcgattcactctgccatattaagtgtggttgtttcattggttctcactgtcattgcccttttgatattagagtccttgcttaagctaatgggtgctgggtctgtattgaaatatgcaatggactatggtgtgattatatttcttttcactgcccctatattgatacctcctatatttggtggtgctttcagggctgaaggagacattaaacgggcaactgtgcctattgcacttgttgctgtaatcaatatgattctagatccgatattcatgtatgtatttggctggggaatttcaggtgctgcctttgcaacaggtcttgctccatgcttcggtctttgcatgatgctctattggatattcattaaaaaggacacttatctctcatataatagaaaggatttccataataatttgaatatgtataaggatattttagttgttggaatacctgcaagccttgagcagttaatcatggctgcacttgcagttacagtcaattatatgctcacccttgtttcaggttcagttgcagtggctgtatatactgcaggatggagaataatctcattaggactcttgccagctattggagttggaactgctgccattacagtcacaggtgttgcatatggtgcaaagaaatatgaaaacataaggactgcatgcagatattcagttaagctaggtctcatatcctctattatagtatgcatattgctctttatatttgcagatcagatagcatatatcttctcttattcagaagcaagtgcacatctcttgcctttaattgcaggattcatacaattgatgtgtctatttattttatatgttccattcggtgcaactgcaggtaacgttttccaaggacttggaaagggaaccacttcatttgtattgaccacattcagggagtttgtccttgtattggtctttgcatatcttttaggatttgtattccatatgggagagactggaatttattatggaatgcttataggtggatttattggttctgtaattgcatatggatatattgaatattatgttgatagattgattaagggaaaggttaaaggaagcgatatttaa

SEQ ID NO: 609 - DNA, 768 bp, Methanobrevibacter ruminantium
  source 1..768: mol_type = genomic DNA
atgcaaaaagtaattaattctcattgtcacatttatccagataagattgcagcaaaggctgttaaaggaatacgtgatttttatgaccttcatatgtctttaaatgggactgtagatgatttgattgaagacggtaaaaaagtaggggttgttcattatctcatccactcagttgcaacaactccaaagcaggtcgagtcaatcaatgaattcatttcatttgaagtaaacactcatcctggcttgtttacaggcttcggcacccctcatccagatagcgaagacattgaaagggacctagaccacataattgaacttggccttaagggcgtaaaggttcatccagacttccagcagtttgccttaaacgaggagcgtgcttttaggatgggtgaggcaatcaatgaaaggggattgcctattatgattcactgtggcgatttcaggtataattattctaatcccgaacagttaaggcctttccttgaagagtttccagaccttacagtgattggagctcattttgcaggatggagcatgtgggagaaggctacagaggaattggctggaactcctaatctgattgttgactgcagttcaagcttatattcattgactccagagactgcaaaggacttgattcatgcatatggtgcagataaggttctatgggctactgactttccgatgtgggagtctgtaagcgagatggaaatgtttaataagattgatcttagcgaggaagagagaaatacttattctttatga

SEQ ID NO: 610 - DNA, 999 bp, Methanobrevibacter ruminantium
  source 1..999: mol_type = genomic DNA
atgtttgatgtggaaagtattgaagtggagtattttactctcaaggaatttaaatttaaaaacggagaagtcctgaaggatgcaaaagtcgaatatatcacctttggaactcccaaatatgatgataatggaattataaataatgcagtaatctatttccatggaacaagtggcaattgtcattctgcaaagcgtttatgcgaatctatgggtagcggagatatattggacacagataagttcttctttatttcattaagcactttaggcagtccaaattcagcaagcccatcttcaactggccttatgaacaagtttccagaatatgacatagaagatatggtcaatttccaaaagcagtttgttgaggaaagattcggaatcacccatattaaggggcttattggaaactctatgggtggatttgaagtcctgacatggggatgtgtctatccagattctgttgactttataatttctcttgtaagcagctttaaggtagggggccacaattatatattaagcaaggtgattgacaatatattcacttcagatccggattataatgatggcgcatatgatttgcctatttccgattctttaaagagaagcttaaagctctcatcagatgcaatgtattcatttggattgtcacgggaggaatatcgaaataaccttacaaatgaggaattaaccgaattcatggcagaatttgcagaggaaagccttgaagaggatcctaatgatgtggtctatatgaataaggcttccattgattttgatataagtgaagatttaaagaatataaaggccaaggttttaattatagcaatcaatcaagatcagtatttccctcctaatttggatgcaattccaatgagcaagatgattgaaaacaataaattggtcatatttgattcctgtatgggtcatgttggctctggtgaattgtttaagatagaagatgacttaagggagtttttaactgaattctactag

SEQ ID NO: 611 - DNA, 405 bp, Methanobrevibacter ruminantium
  source 1..405: mol_type = genomic DNA
atggaaataacttataaggatactcatgactttaaggaagaggacctaaaagacttgttcttatcagtggaatggtcttcaggccattttccagacaagcttgtcatagccatgaaaaactttgagacagtttattctgcatgggatggcgataagttggtaggtcttgtttcagctatggatgatggaataatgactgcatatgttcattatgttctcataagacctgaatatcagggaaagggaattggaaaagagctattgaaaagaacaacagatcattataaggattatttgagaatagttgtggtttcatataatgaagagattgaattctatgaagcctgcggctttgaaaaggcagatgatgcaagccctatgtttataacagaattatggacttag

SEQ ID NO: 612 - DNA, 285 bp, Methanobrevibacter ruminantium
  source 1..285: mol_type = genomic DNA
atgtttagcgttaaagttgatgattatggtgaaactgaagatgatatgcattttgtaacttatatgatttcaggattaagtgaagctgaattggattatcttattgctaatcttgaaggagagcttgcccttgaggatggcaatctgtttttaaatatattctattcaaagcagttcttcccatttggttcagatgatgctcatttcaaattggacgactttattaaaagggaagaaatagaaatgacttatttcattgcaagctttttagaggatatgaaataa

SEQ ID NO: 613 - DNA, 942 bp, Methanobrevibacter ruminantium
  source 1..942: mol_type = genomic DNA
atgataagcaaagaaacatttgataaggacaaggcaaactttaaaggaacatatcgtcctttgctaaaggaaatagacaatcctacactgcttcaaatagatgaactacatggaattgcaggggcattaagcggaaaaaaccaaaacatacacaataatatcctgcttttgcttgccagcataggaaccataattacaatcatattcttcatctattttgaatgggacataagcgcctttatcataccttgcgtgcttttgatgtttatcctaataggaattcatttagtctcaaataagttgaactatcatgataaatatcttgaatacagggtcttagcagaatcattaaggcttcagtttttcctaagctatgcaggagcccaggaaaaggttatagatatcctcccttggtttatcgagcatggagttccattggttaaagaggtattgggaaccttggatttcactgaattgcctcaaaagagagaaataagggataactggattatacaccaaaagaaatatcatgaaggggctcttcaaaagtcaaaaaagaaaatgaggacacagaaaatagtcacatatgcatcaattacagtgacaatagccacctatataattgcattgatctttgaatatctcatacccgcttcaactttcaatttaaatggagatataattcatctaggcatcaaattagctatggctggaatgtctgcattcacactctttttaggaagctattacggaaagatgtccttaagcgaaaagatagatgaccatgaaaggatggttgaactatatggaattatagaagacagaataagaacagaaggagaaactgatgagatactttcatatgcagctagagagttcctgattgaaaacagtacttggtatgcgtatcaaagcaagaacaagccagatttggttgtttaa

SEQ ID NO: 614 - DNA, 918 bp, Methanobrevibacter ruminantium
  source 1..918: mol_type = genomic DNA
atgacaacagaattacagaacgaaattattcaattgaaagaagagaagaatgcaatcattcttgctcacaattatcagcctaaagagattcaggaaatagctgattttctaggagattctcttgaattatgcatgaaagcaaaagagattgatgacaaggacatcatagtcttctgtggcgtagactttatggcagaaactgcatatatgttaaatccagacaagaaggttttaataccagatattgaagcggaatgtcctatggcacatatgcttacaggagaacaagtaatagaagctaagaaaaaatatcctgacgctgcagtatgcctgtatgtaaacagtctcggagaggcaaaggcagaatccgatattctctgtacctctggaaatgttaaaaaggttgtagaaagcatagaagaggataccattctctttggaccagatacaaaccttggagagtttgtacaaccattcactgacaaaaagatcattccgattccaggtgacggtcactgctatgttcacaagctattccataaggaggatatagatgatgcaaggaaaaaatatcctaatgctgagataatcattcacccagaatccaataaggaagttcaggatatggcagattacgtcttaagcactggaggaatgctttcacacatcagagatagcgaaaagcaagaatttgtcattggaactgaagtggatctcattacaagacttgaagcagaattcccagataaaacatactatcctttgcttgaaggagctatctgcaagacaatgaagcttcacacacttgaaaagcttaaagactgtcttgttaatgaggagcctttaatcaccgttccagaagacattgcagaaaggtctatttctgcagttgaaagaatgcttgacgcttctaaataa

SEQ ID NO: 615 - DNA, 807 bp, Methanobrevibacter ruminantium
  source 1..807: mol_type = genomic DNA
atgacaacaacagaatggctttatcaaattctactaaatctgcttgatttaagcacaatcatatcaattattgtaataatcatagctgcagcaataatcataaagctaggagaaaaatcacttctaagaatagagaaaaagtatgaaatcaatcttactgcccattatctcctaaaagacatccttaaatatggaattattataattgcacttgctttgatattgaatctaattggaatagaccttcaaaacatcatattgagcttaggaattgtcagtatcgtcatcggttttgcatctaaggacatcgtatccaatttcatatctggaatatttgtaattggagataagaacgtccaagttggagaaaccatagagattgacgggagaaaaggagccatcacaaaggttgggtttagaaatacaacaatgattggtatggataactttaaggtaaccattccaaactctgttctttcaaccaaaacatataaaaacttcccaatgggagaggattataggcttaggcttgatgtgatattgcctcatggatttgatatcttcgaatacaagcaaaagatgacagaggctatggaaaaatatgaatatatcaataaagacaaagaaccagtcattttagctagagaaataaatgaagaaggctctaaagttgaaatcagcttttggataaatgattataaggatagagaccctggaaaagctgtaatcttagaagaaagcaataaactaatttatgactatctcatggatgaaaagaatgcaggcatcttaaggatagttaaataa

SEQ ID NO: 616 - DNA, 912 bp, Methanobrevibacter ruminantium
  source 1..912: mol_type = genomic DNA
atggaaatcatatttttaggaacatcctctgcagtgccttcaagggagagaaaccatgctgcaattgtcataagagaatttggagaagtatttctctttgattgtggagaaggaacccaaagacagttcattgaagcaaatgtaagtccaatgaaagtggataaaatattcatcacccatttccacggagaccacatacttggattaggaggactaattcaatcaatgggacttaggcaaagggaagaggatctagatatctatgggccaagaggacttaaaaaagtgatgaatgcaatcacccataccggatacttcaagattgacttcaatcttaacattcatgaaatcgacgaaggaattgttgtagaaacagaaaagtacagaatagaaaccacaaaaacaaaacatagcgtcccaaataatgcttattcaattattgaaaagaaaaaacctcgtttcataagggaaaaggccattgagcttggtgttccagtaggacctgcctttggaaagcttcacagaggagaagaagttgaaatagacggcaaaataatcaagccagaacaagtccttggtcctcctagaaaaggccttaaggtaacttattcaggagacacaagaccttcctttaagcttatcgaacttgcaagagacagcgacattttaatccacgaagcgacctttgaagaagaagaccggcttcatgcatacgaacatgatcattccacagcaagggacgctgcagacatagctagagaggcaaatgtagggaaattgattctaacacacataagcccaaggtatcaggaattcagcgtcttggaaagagaagccaaggaagcattcgataatgttgaagtggctgaagactttaaggtttttaatataaacagcaaagacaaggaataa

SEQ ID NO: 617 - DNA, 831 bp, Methanobrevibacter ruminantium
  source 1..831: mol_type = genomic DNA
atggatgatataattaaatttatgcttgaagaggatgaaggctttggcgatatcacttcaaatgcattgattcctcaagataaggttttttatgctaagctaatctcaaaggatgaaggaatccttgctgggattgagataattaaggaaatctttttggaatatggaatagatattctgtcctctaaaaatgatggggatgaaatcaaaaaaggagatattcttcttgaaattgaaggaaacgcaagaaaaattcttcttttagagagaactgcacttaaccttcttatgaggatgtctggcgtagccaccaaaacccatagggttgtaagcagtgtaaaagaagtcaatgataaggttagagttgcaggaactcgtaagactgctccagcacttcaaaagtatgataagatagctatttcaattgggggaggagaccctcacaggtacggtttggatgatatggttttaattaaggacaatcatattgcagtggtcggatctgttaaggatgctcttagattggctaaagagaatgtcagcttttctaaaaagattgaaatagaggttgaatctgccgatgatgcggtgattgcagcagagaatggtgcagacattatcatgtttgataatatgagtcccaaagaagctcaagatagtttagatgctcttattgataatgatttaaggaatggtgtccttattgaaatctcagggggaattactgaggataatatacttgattatgctcctttagatgttgatatcatatctttaggctctcttacccatcaagcaagcagcttgaactttagcttggatatggattga

SEQ ID NO: 618 - DNA, 258 bp, Methanobrevibacter ruminantium
  source 1..258: mol_type = genomic DNA
atggctgaacttgataacaacataaaggaaaaacttacagaagtgtttaaagaagaattaggcaaagacgattttgaattgaattatctgattacagacaacgaaatcacatttttctttggcatctctgaaggaaaggaactttctctcgatggaattgaaaagatttctagcataatcgatggaggttatgagggaaattccattgttaatcaggaatacaggtacaaattcaatttagacccttgttctgattag

SEQ ID NO: 619 - DNA, 2097 bp, Methanobrevibacter ruminantium
  source 1..2097: mol_type = genomic DNA
atggaaaatcgctatcaagaacatcaatcagatttcaaatatctcctaatcatcaatgatgatttggaatgtgaaataaaaataagaagagaaggcaatgccagtgaaaagaacctaaaagataatattttcacaattaaagaagcaagtgataaggaattagaagatatcggcaggatatatgacttattcgaccaatttgcaatagaaaatacaagatatgaaaaaatccaaatggacaaaaaggcattcataaaattcgccctaaacattaaacctatcctaagggacaataatgcagagcttatctcatcaaaagagattatagaaagcgatttgaaacttatcatggatactgatttaaaggaaaatgaattctctttaaaaaaactaaacagaatcaaatggatagtgagattaaacaaaggaagaattgccttaagagactttgacaagcaaacagaaaacaataaggaaatcctaataaccagaaattacttcttcatacttaataggaatgagttccttgatataaaattctacgcatcctcacttttaaaaaccactgaaaatagcgaaatactaaaattggcattatccgaagagatagatggctttaaatttgaagtgggggaaaacttaaagagacttataaatccttcaagggtttatgaggttccaaggacattaaagggtgaattgaggacctatcaaaagattggctattcatggcttgtgcaaaacataagatctggctttggatccatattggcagatgatatgggtttaggtaaaaccctccaagtcttaactgcaatcctatattttaaggaaaaaggattgcttgaagaaagaccaagcctgattgtcgttcccccaaccctgatttcaaattgggaacatgagattaggaaattcaccccagaactatcatattacatctatcacggcacaaacagaagatttccattggaagactatgacattgtactaagctcatatggagttattcggaatgatttagaccttttcttagataaggaatggtttttatacataattgatgaggcccaaaacattaagagcccacatacacagcagacaaaagcgattaaggaggttaatgcatacaataagatagcattgactggaactccaatcgaaaacagactcacagactattggtcaatatttgactttacaaataagggatacctctcaagcctcagtgactttaaggatagctatgtctttagaattgaaaggctggaagatgaaagatcccttgagaactttcttgcaataacaaaaccatttgtaatgagaagacttaagaccgatgagcaaatcaagggagaactgcctgataggattgtaaacgatatctatgcaagccttagcaaaaaacagataaagctatacaatgctgtcttagatggaatatttgaagagatagatgaactcaaaggaattgaaagaaggggaaccatcctaaagacaataacttccctaaagcaaacttgcaaccaccctgcacagtttttaggctcaggcaaaccaaaaatcaaagaatcaggtaagatggaactcttaatcacaattctggaaaatataatggatatggatgagaaggtcttgattttcacccagtacgttaagatgggagagataattcaagatcttgtttcaaaaaaacttaaaagagaggttcttttcctccacggctcacaaagcagaaacgaaaaggcagagataatagacagattccaggaagatgacaactataagatattgattgcaacccttaagacaggaggagtgggtttgaatctcactgcagcttcaaatgtgattcactatgacctatggtggaatcctgcagtggaaaaccaggccacagacagggtacataggataggacaggaaaaggatgttatggtttatagatttataacaaaaggaactcttgaggaagaaattgattcaatcattaagaccaaattggatttagctgaaaaggcaataagcgttgatgaaacattcattactgaaatgactactgaagagctgaaaagagcattatccttaagattataa

SEQ ID NO: 620 - DNA, 435 bp, Methanobrevibacter ruminantium
  source 1..435: mol_type = genomic DNA
atggctgaagatgaaaaaatcgaagaaatcgaagaaatcgaagacaaagaggaagaaaacttaccttttgctaaagcagaagtagttcgtttaatgaaagaaaacctcgatgatgacaagatgattagggaaagagttaaagttgaaatgaacaagttcttaggagacattcttaaacaagtatgtgaacaacttaacgattatccttacactaccattgagtatgaaatgcttaaggagtcaatctatccatacactaacattaaaaggattaaccaagaaaaagaaagaattttattacacttaaatgctattaaagcagactgtgatgcattagctatggatgttgaaaagactctcaaattaaaagatgttgcagatgaagatgcattcactcctttatctgaagcacaagatgaagaaatggatgaataa

SEQ ID NO: 621 - DNA, 516 bp, Methanobrevibacter ruminantium
  source 1..516: mol_type = genomic DNA
ttgaatgaagcattgactaaattgctagaccttatgcaggattataatgtcattctgcctaatgagttcgtttcaatggctagaggaatatccatgattgaatctgttgccaccacattagatcctaaaatagatgtcatggcttccatcgaaccgatagtcaaagaggtaatggaagaaagaatgaacattaaggaatctctttcaaacaaaaaaggcagtttggtttattataagaacatgcttaagacacttcctccacttttaacaaacagcgttcataagataaacaatggagatatgaagcttcgctttgaaattgacagaatcgaccatattgtaagcaagttttcattggttgttataattgcagcccttctgatgagctcttcaataactatgaccatcaatagagggccaatgttatttgacatgcctttaattgcagttttaggctatatagtgacttttattttaggagccatagccgttgcaaattacatatacagcagataa

SEQ ID NO: 622 - DNA, 666 bp, Methanobrevibacter ruminantium
  source 1..666: mol_type = genomic DNA
atgaagcatagattaaatttagataataaagacccaaattatattttgttgaaagaaatatttaaaattatggattctagaaaatccaaaagtatattagcatcctatggatttaaaaacttaaatagaacaatatttacttttaaaattatatttataagtatgttctttggaattgacattccattcattttaaacgagcttaaatccaaaaaagaacttcgcaaatactttaatatttctgaagttttgactgcagatcaagtttataaaattttttcagaaataaactctgaaaaacttataaaatgtttaaacagaatcttaaactcaaggaatatggttaaaagaagaggaaaaaaaacttttattgttgatgcgaccccagtggacgtagatattaatttccacagaaataaaaagactaaagaacatctggaaaaaattaatctcaaatggagttattcatcctctaaaggttattatattggatttaaagcaactgttgtattagattatgattctatgaatcctgtttgtattttagtccactctggagctccaaacgatgcaaaacttttcgaagaaattttagaaaaccttcaaaaaagacgaataatcagaaaaggagacacattaatctttgataaaggatattacagctaa

SEQ ID NO: 623 - DNA, 111 bp, Methanobrevibacter ruminantium
  source 1..111: mol_type = genomic DNA
ttggatgacattttaacttatccactagccgtatttaacaaaacaaagagaataatgaaagaaaaaagattatacaacagtttaaaaatggaattaatgaaaaaaaaatag

SEQ ID NO: 624 - DNA, 132 bp, Methanobrevibacter ruminantium
  source 1..132: mol_type = genomic DNA
atgagagaaatccacaaatatactccaaaatcagtagaaaaaaccgtttatctaaatgtatttttgggagcactgattatatcacaaggattttactcaaaaacgaccatacaacaattatctgaaaactaa

SEQ ID NO: 625 - DNA, 348 bp, Methanobrevibacter ruminantium
  source 1..348: mol_type = genomic DNA
atgatagaattaaataagaaatatgtttttcatgttccactttataaatacaaagatgaagaattaatccctattgatatggatgacattcttgatgaattaatagacgaattctatcaaaacggatatgacagtctatatatgacaaatatagaaacatattataaatatagattcttaacagagattttaataagcatctttgtatcaactgaacgcttagcaaaagaaaatcaggagtttccagacagaatatttaaaaaatggtttaaaaagaacaataaaatattggaacaggaagcttttgcttatgagtataataataaaatgtttattgaaaagctttaa

SEQ ID NO: 626 - DNA, 600 bp, Methanobrevibacter ruminantium
  source 1..600: mol_type = genomic DNA
atgactaaggatgatattataactggaaaacaagcaataatcaaaatggactgtccagtatgcggaggcaataaaacagctaattacatcactcaaactcacgagcttgcctattttggagagatagtggaatccacaatccaatgtgaaaaatgcggatttcgccatagcgacattataacaaccgaacagaaggatcctgcaaagcatagcctgataattacaaagaaatcattgaattcaagggtggtcagatcccaatctgccacagtttcactgccagaaatcggaataaaggtagaacctggcccaaaatccgaaggatacatctcaaatgtggaaggagttcttataagattcaagcaagccacagaaagtgcattaagaatgtttgatgatgaggagtcccaaaagaatgcaaatgcagttctagataagataaatcaagtccttgctggagaattggaaaccctcctacttattgaagatccctttggacagagcaaaatcatggacgttcgtgcaaagagcgagcctttaagcgatgaagagttaaagaacttgaaaacaggctttactgttattgatgatgaacaataa

SEQ ID NO: 627 - DNA, 948 bp, Methanobrevibacter ruminantium
  source 1..948: mol_type = genomic DNA
atgaaaccatatgtaattctcataggaagcgcttcagggataggaaaatccacagttgcagctgaacttgcaaaaacattaaacattaagcacttggtggaaaccgattttataagagaagtagttagaggaatcataggaaaggaatatgctccagcccttcactcatcatcctacaatgcatattccagccttagaaatcaggaaaattacaaaaaccaagcagagcttatcaatgcaggatttgaagagcatgcatcatttgtgcttccagcagtagaaagggtaatcgatagggcaataaaggaccatgatgacattatactagaaggggttcatttaatacccggctttattgacatagaacagtttacagacaaggcatcggtctttttcttcatattaagctccgatgaggaggaccacaagaaccgatttgtaaaaagagccatggaaataagaaggggaggaaagcagctagactactttaaggaaaacagaataatccacgaccatcttatagaacaggctcaaaagcataatgttccaatcataaaaagctatgagattgaatcaaccgtcaagaagatgctatcctacattaatgaaacctgtgaaacaatatatctgaaaaacacagttgatgaattggataaggtaggagaaatcatattagacagatacagcggaagcataaagaatatctcctatccgatcaagggatttaaagagcctctcataagaaagatagatgtaagcgagataagggaatatgataagtttataaagaacctgaataagttcccagagaaaaaggaagaacttaaagaactttatagtttaactgactatagagcatatcgcatttgtgcaataaataatgaaacaattgaaaaaattaaaaatgaccttgataaggaaggtttgctctttaaagaagatatgtaa

SEQ ID NO: 628 - DNA, 1053 bp, Methanobrevibacter ruminantium
  source 1..1053: mol_type = genomic DNA
ttgtattctataacttcagttgaggatcttcaagaactcaatccatatgtgattatcggatgtggcggaggcggagagaaattctccaatcttgaaggtattgaaacagttggttttctagacgataatcctgaaaagcaaggaaaactattctgtggtttagaagtagcatcaaatttatctgatttatttgaatcaactgatgcaaatacagttgctgtcatgttgcctattggcgctgaaggcgcagcattgaaatatgcagttgaagcattggcaaatggcaagaatgcagttgtttcatttagatcattatctttatgtgaaaatgagtctttattaaaattagcaagtcaaaatgatgtagttattaaggaaattagtccaagattggatgtagttcgtgaaatctgtggtacagcacctgaaaaatgctgtgaagtgcttcctaagatttcttatgaaccaaaagctaaagttgtctttgttggtggaacttcccaagagtgtggaaagaggacaactaccaagtctcttggtattgaagccgaaaagagaggcatgaaggctgctgtcatttccactgatgagatgggattggaaaagcctactgtatttaactttagggcaggaagcttgtcagctatggatattccttctgcaattctctcatccatgaaatatgtggaagaaagggacagtccggacatcatattcattgaaggtcaatccagcttgactgaagatggaaaccctcatccaagaggattgtctgcttgcatattgattggagcaaatcctgatgcagtcattgtcggacacaggccaaaccacccatatcgtgagccaagaggaatcgattatgaggttaaggctattgaagctgttgttcctacaacaaaagtcgttggattatctataaaccttagaaataaggatgaaggcatgactgtggaagactttgaaaaagagtatggattgcctgcagcagatatgtatgatggcggagcatctaagttattagatgctattttagattatttagatgaataa

SEQ ID NO: 629 - DNA, 285 bp, Methanobrevibacter ruminantium
  source 1..285: mol_type = genomic DNA
atgactaaaatggaaattgaattaaatgatgaacaacttgaaaaagtaaaaatactagaatcacatgacataagtgtcggtgatgctatagacatgctttttgaagccagagatagggttatatccatcatagatgatatagatgaaaaagatctagaagacgatactccaaatacagaagaagccaaagcagagcaaactcaattaactgtaaaaacatatgatatagcaattgaagattataaatcccacataagctgggctaatgacttctttaaactctaa

SEQ ID NO: 630 - DNA, 345 bp, Methanobrevibacter ruminantium
  source 1..345: mol_type = genomic DNA
atggttgttcaagaacatatctgcataaatgaagagaaaatccaagagcatagtctccaattaaaatctcttgaatcagatgccgatttcaaagacaaaagaatggatgaattataccgcaaaatcgataagattgaagaaaaattagatgttctaaataacaatataaataattttttattgagaaattcccaggaaaacaaaaaaatggaaattaggctaacaaagatagaaaccgatattcaaaatcaaaaattagaatcccaaagaagaattgcacgaatgggaatagctctaactgcaattactatattaataaacatttatttcaagataatgcattaa

SEQ ID NO: 631 - DNA, 969 bp, Methanobrevibacter ruminantium
  source 1..969: mol_type = genomic DNA
atgaaaatcgccccaatgaataaagataaaggaggtgaaaaaattttagactacagtatattaaaccataaaggattcaactcttttgaagagaaaatcaagaggataaaagtccataagccctatgataagatccttaaaacctcatttaagaaaaatcccaatgggtttttggagatattggaaaagggagcaatatttgaagagtttgtggatagtgaaattataaatgctttttttagggaattgcattctgatattattataagagtttataagaagagaatctatattattgaatttcaaagcagcagattaaagctagaggatattttaaggtttgggctttatagggccagcatagctcatcaagaaaaaaaggacatacatctttatgttgtttcaaaagagccgataaagagggataaaattgaaaataagtatggagactactggtttactatacatgtcaaatcgttaaccgatatggattataataaagctttaaataggacaaataataaaatagagaatgaagaggaagagtttacagaggaggattttgtttatcttgaaattagtcctttaatgactcgaaaaaagaaaaagcagagacagttattaaaaagagtagctgagatgacaaataagttggatgggagaataagcagggaaaagttgattgaaatcaaatccatacaattcgtacttgcaacagaactcctaaacgacaacgaaaaagccaaaatagccaaggtgataagcatgcaatcagaaggaaaagaagaagtcttccaaggatacctaacaaaagaagaacgaaaacaaacctatgaagaaggaagagaagaagaaagagaagaaatcgtaaaaagcctagccgaactagatgtatcaccagacatcatagcaaaagcaacaaaaatgagcaaagcagaaatagcaacactcacaacaacaataatctaa

SEQ ID NO: 632 - DNA, 510 bp, Methanobrevibacter ruminantium
  source 1..510: mol_type = genomic DNA
atggagtatagattgccaaggatggaagatgaggatgacataagggacttcataagggagtgctgttatgttgaggaatgctatgtcatgctcaagcaggagctccttctttcagattacagcaaatgggtttctctaatacacagatatgcatctttaggcaatggaaaatggggaagatccttgcttcttcttgcttatgatggttctcgattagtcggaatactgcctatcagatatgaaatatccgaggactatgcttttctatatggcaatattggctatcatgtaagaccttccttaaggaatatgggctatgctaccaagatgcttaagcatggattggaaatctgcaaggaaaaaggaatggctcgggtaatcgttgggtgtgatagggataatctggcatcttctgctgtgataaagaaatgtggcggtgttcgtcttaggacattcaatgactcctatggcgttaacgattattatggaatttatctctcaagcgaataa

SEQ ID NO: 633 - DNA, 654 bp, Methanobrevibacter ruminantium
  source 1..654: mol_type = genomic DNA
atgaaaaccacctcagtgatagtccttttagttattttaggctatggattaaaggttactcaagacgtaatcaatggaggcaccagtctgcctaagataagccttaaggaattgctcaatttcggagtgaaaggaaccatcgtatatacattctatctgaccatacaagcttcccttttaggtttgatttccctagcaatgaatttccctgaatttgaattggaagagatgattctaaatcttcacgagaccatagaattgttttttgagcatgatcctatcagcttcatactatttatcatattaggacttctcattgtctatggaacaatattctttatggaaatcgctcttgcaatactagcagatggggaaacactaaaagcagcatttgactttaaaagaatcaaaagaacagttgaaacaatcggttggaaggaatatgctgaagactatacaaagattgtagcggctgttgttattttagtatttatcaatggatatttccactcttatggttggataagcattataataggagtattgactgatattttggcatttacagtggaatatcgtggaattggaaatatttatagaggatataaacagaagataaatcaagagacagccctcgaggatacaagcaattaa

SEQ ID NO: 634 - DNA, 1407 bp, Methanobrevibacter ruminantium
  source 1..1407: mol_type = genomic DNA
atgaagaagacaaaaattatagctagtgtaggtcctgcatctgattcagttgaagttatgagtgatatggttgagatggggatggattgtgccaggatcaatctctctcatgctaatcaagaggatattttaaagataatagatgtggttaatgaggtgcgtaagatatgcaatgtgcctttggcaattatgtatgacacaaaagggcctgagtttaggacttctgaatttaagcatggaggtgtgctgcttaatgaaggggacaccattaagatgagcaagacttgcatacaaggtaataaagaggaatttggagtcaatcataaagaagcaatcgactttataaacgtgggcgacaaggttctaatcgacaatgctctcttggaatttgaagtcattgacaagaaagaggattatgtgctattgaaggctttaggagatggaaagattctaaatcataagaccatcaatgtccctggtgttgacttgaagcttgattttataagtgatgtggataaggaggacatatcctttgcagcagggcattcctgtgattatttggccctttcttttgtaaattcaggggaagatgtaattgcagctcgtaaaattgtggaggacgccggaggagatgcccttatcatttcaaagattgaaagtcgcatgggccttatgaatcttgatgagataattgatgaatctgacggaatcatggtggctcgaggggacttgggggttgaggtaccaatggaacatttgcctataattcaaaaggacatcatcagaaaatgtcgtgaaaagggcaagtttgccattgttgcaacagagatgcttgcttcaatgtatgaaagccctagacctacccgtgctgaggtttcagatgttgcaaatgccgttttggatggaaccgattgtgtaatgctctctggagagacaactatcggtaagcatccggtccatgcagttgaaatgatggatcgtatatgcaattatgtggaatcgaccattgactatagtaagcataccttttacaagggaaaggtggctatcagcgatacaatcgccaagcttgtcataggagctagcgaatattcagacattaagctaatagtcacacctactttgactggatttacagcccgcaaaatcagcaatttgagatcaagctctgcaattttagcttgctgtccatctaatgacattgcaaggaagcttgttttaaattttggagtaaaggctgtaataactgacatttatgagaatactgatgaaatgattgataatgtggtggatattgctaaaatggaatttgatttaaacaaaggcgatcttatagtggtcacaggaggattcccattaggtaagactagaaatactaattccttaaggatattggaaatcgattga

SEQ ID NO: 635 - DNA, 1491 bp, Methanobrevibacter ruminantium
  source 1..1491: mol_type = genomic DNA
atggctaatgaaaatgaatggggcagcaatcttgcatttgtacttgcaatgattggttctgcagttggattgggaaatatctggagatatccatatgtgctttattcaaatggaggcggagccttttacattccttatctaattgcaattttagttttagccattcctctcatcattctagaatatggggtcgtctataactataagtcctcatttacaaaggctatcgtaaaaataaagcctaaattggaattttatggttggattcttcctgttgtcacttttattatgacaatttactattcaaccatattgggctgggatggaatctatttcatcctaagcttctttaagggctggggatcagatccaaatacatttttaacagtttccctattgcagtctgcagattcaataagtggcattttaaacttcattccagtcattgccatttcaatgattttcatatggctcataatatggttcatttcccataggaacttggatgaaggcttaggccgtgttgcccgatactttgttccaatgctttttgttataatgatagtgattgttgctttttcattgaccctgcctggagcatccattggtcttgctgagttgtttgatcctgattggtcccttttatacaattatagcatatggatggctgcattcggtcagatattcttctcattgagcttgggaatgggggctggatttacatttgcaagctataccaaaagggacatagacttgatttcaagtggattatgtgttgttttggctaatagtctttttgaaaactttgcagcattaggggttttctcaattctaggatatatgtcccttgagtctggagttgctgtttcaaagcttgtatcacaaggcacaacactgatttttgttgcatatcctaaagtgtttaatattttaggaggtgtcgctttgattttagggccactattcttttttacagtttatgttgcaggagtcacaagcatattgtcctcctttgaagtgctttcaatttccattcaggacaagttcgctttttcaaggaaaaaggctacaaccgctttatgcattgttggagggctggcttcaatggtctttgccacttcagctggaggttatttgcttagcattgcagacatatttgtaaataatattatggttttgttttcagtgattgttcaaaccatcctttttgcatgggtattcaaggctgaaaggctggtggactttttcaatgctaaaagccgatttttaaaacttggaagatggtggttaatccttgttaaatatatttgcccaatccttttaactgtaatctggattggagaattatataatcttataaaaatgggttcaactgaatttgtagtgattttaggagtattgcttgcaatattattgatatttgcatttatatttacaatcaggccagcaaaaactgatgaatggtttaaaaccgaagagaggattaagtaa

SEQ ID NO: 636 - DNA, 618 bp, Methanobrevibacter ruminantium
  source 1..618: mol_type = genomic DNA
atgggtgaagaagaattaatagaccaatatatgaaacctcatggcgaggaaggaattaagataattgaaagcatgaacgaagagcatcaaaatatctctgaatttgcatttgaatgtgtcaatctcggtgcatatgatgatataattgatattggctgcgggggcggcgtaaacatagaaaaattcctaaatgtgactaacggacatgtggatggccttgattactctgatgtgtctgttagcgaatcaatcaaaagaaatcagacttcagtagatggtggaagatgcaatgtaatcctaggggatgttactgacatgccaattggggatgagtcctacgatttggctacagcattttctacaatctttttctggcctaatcttgttgaaacatttaaggaagttaaaagaatcataaagccaaatggacaatttatgatagcccaaggaaccgatggaacaaatcccgaagatcaggaatggattgataccattgctggaataaatgtctatactgctaatgagcttgaagaatatttgcttgatgcgggatttaaaagagttgatgtatttaccaaggaaaatacttatcttttagttgttattgggaaaaaatag

SEQ ID NO: 637 - DNA, 498 bp, Methanobrevibacter ruminantium
  source 1..498: mol_type = genomic DNA
atggatttcaataaggaaaaattcaagatggtcttgcagtacatcatttacaaatgcggaattaaaaatactgttggaaggacagttcttcataaattgctatatttttcagactttaattattttgagctttataataagtctttaaccaatgaatgctatagaaaattagctagaggtcctgtgccagttcattttgaatctgttgttgaggaattgattgatgaaaagaagatctctttaaagaacaggagattgccttgcggcaagcttatgaacaggtatttctcattggaaaagcctgagatagacttaaaagaagatgaattagctgtcattgatgaagtcattaaggatttaagccatatgaatggaaagatgattggagaatactctcttaaggatatgcctgtaaagcaggctcatgataatgggagtattgactataatcttgtttttagccgcagtttacaatattcaaagagaactgacgattag

SEQ ID NO: 638 - DNA, 357 bp, Methanobrevibacter ruminantium
  source 1..357: mol_type = genomic DNA
atgttagacataccaaaagaagaccctcaagttagaagattcattaaactagttaaagaagagggatacagttatgaaaaagctttagaagaagttggagcagactatatcgatgagcgagattgggaatatttcggattcaatcaaagagaaggagattatagggacttttataatttaagacatcctcctaaagaacatcattacttatcagggtccaattcatcatcagggtccagttcaaataaaagacagtccagcaaatgggatgatttaaaatgttatatgagtgttttaggcccattgataataatctttgcaatagcaattctttggggagtttttaaaggagggtaa

SEQ ID NO: 639 - DNA, 486 bp, Methanobrevibacter ruminantium
  source 1..486: mol_type = genomic DNA
atggattctaaaaaaatattagttattttaggtttaactgttttagctatttttttagctagttcagttagtgctggtgacttgatttctactgggggttataatccagattcacttattatacttgaaggagccgattttaacattccagatggatttgaaagaattgaggataaatccattgcaaatcagacaagaaattcaggagtcttttcatccattttaaatagggaagtttatgggaatcctaaaggtgaggagatagtaatttctgttgtggattttgataattttgatgcaaatctgccaattcttagcatgatttgcaaaggctgccaaaagaaggaattgcttggctatccaggttttattggctctgatggaaactccactaagttttcttatgtatttgataataaggtggtgtctatatccgctccaaatgaggatttgattaatcaggttctagtggttgaggatgcatag

SEQ ID NO: 640 - DNA, 123 bp, Methanobrevibacter ruminantium
  source 1..123: mol_type = genomic DNA
atggctaaaattaattattcttatagtaaaaagtattgcataattgttttcattatgatgttttttatgaaaagaaattattccaaaaagaattataaaataggaaaaacagatattttataa

SEQ ID NO: 641 - DNA, 339 bp, Methanobrevibacter ruminantium
  source 1..339: mol_type = genomic DNA
atgaaagaccttattggattttgtggtttggattgtgagctatgtcaagcttatattgcaacaattaatgatgatgatgaactccgtgaggaagttgctaagcactggagtgagctcaataatgttgaaatcagtcctgaaatgattaattgtatgggatgtagagttgaaggggtaaagactccattttgtgattttatgtgtcctatacgccaatgtgctttggagaataattatgatacctgtgcagactgtgataaaatggagggctgtgaaaaactagtgatgatctttgaaaacaatgataatgcttataaaaatttaaaacatcattattag

SEQ ID NO: 642 - DNA, 549 bp, Methanobrevibacter ruminantium
  source 1..549: mol_type = genomic DNA
atgtctaggagatttgcagttatcgacactgaaacaaattggaatgatgaagtaatgtctatcggtgttttaatcgccagatgcaagaattttaaaagaacagactctcgccattacatattgcctaaggcagaggcagtagggggcatgtattcaaaatcaatgagagttacaagtcatgagattctgacaaagcataggaatgatgccattgacgatttaaggtatttgcttgattccaatggtgttgatgatttgtttgcatataatgcttcttttgataatcgtcatttgcctgagctttctgacttttgttggcgtgatataatgaaggttgcagcttataaacagcataatccatccattccaaatcatatgccctgcttcaagactggaagattgagaagaggttatggagttgagccaatgcttcagattttgggaattgaggactactgtgaaagccataatgcgattattgatgctagagacgagctgaagatcatggagcttttaggatatgatatagatttctatcctgaaatctga

SEQ ID NO: 643 - DNA, 609 bp, Methanobrevibacter ruminantium
  source 1..609: mol_type = genomic DNA
atgactgtgatcatgagcactaacaccatgggctatgcagatttggatttaagacctgctgaaatgcaaagaagcacaatgtacatttccataaacgaatgccctaattgcggatatgctgaatttgacttctcaagagaacctaaaatcaaaagagaatatcttgagtcagaagagtatcaaagctgtgagggaatcgaatttaaatcagaacgttcaaagccattctacaaagcttatctgattaatagaaaagaagaaaacacccaaaatgaacttaattttttaatgcattccatttggtcttgtgatgattccgaagattgtgaaaacgctagaaaacttagaagaattgcatgccaattgcttgaaaccattcttagcaatattgaaaaacataaagaatgggcagataaggacactttaatgctcatgaaatctgatttgatgagacgtggggagatgtttgatgaattgattgaagaatacgagactgtttcttttgaagatactcttttgaataatataaatcaattccaaatcaaaaaatctaaagaaaaggacagtgccagatacaccattggaactgtgataagcctttatggatag

SEQ ID NO: 644 - DNA, 627 bp, Methanobrevibacter ruminantium
  source 1..627: mol_type = genomic DNA
atgaacactaaggaaaagatatttgatgtgtctttagatctgttttcaaaaagaggatacgactctgtctcacttagagaaattgcagaagaggtgggaattaaaaaaagctcaatatatagtcattattcctctaaagaagcaatattaatggatatatttgaatattttacagatcttttcgaatatgatgatttaatcaacagtaaagagcttgtcttaagcgaagataatgatgtattgattgaaaaccctgaattgttttatcatatgggctctgaagccataagggggatgtttaaagaggaaagaaaccttaagatttggaagctgatttttatacaaatgcattataatgaaaagataaggaatttcttccaaaaggaaatgcttcttaagccattgatattttgggagaacttttttgctattctaaaagaaaaagggataattcgtgcagattccaatccgcagttacttgctaaggagtattatagctttccaatctttttgcttttagaaatctgtgcaaagtatgatgacattccagagagctgtttggatgacttctttaagcaagctgaagagcatgcaaggtttcttttggattgtgtgaaggtgaaataa

SEQ ID NO: 645 - DNA, 1092 bp, Methanobrevibacter ruminantium
  source 1..1092: mol_type = genomic DNA
atggattctaagtttaacattcaagaatatttggctaatggggttgaagtcatcttaaaggatgcctttaaagccacattaaagaatccaaaggaaggcttatatttggccaagtttgcaaagcacgctagaaaggccagtgaaatcagaagggaatatagcaaaaagggccagaatattccagttttccttatagcaagcataacaagttcctgcaatctccattgtgtaggatgttattctagagcaaataattcctgtagtgatgaggctcccttaaatcagctttcagctgatgattgggaagatatatttaaacaggcaagagatattggaataagtttcatagttcttgcaggtggagagccaatgattagggaggatgttataaaaaaagcaagtaaatttcctgaaattttatttccaatatttacaaacggaaccatgttaaatgaggattatttgaaattattggataaaaacagaaaccttgttcctatattgtctattgagggggatgagaagcttactgattcaagaaggggctctggagtctataaacagttgatggattctatggagacaatgaagaaaaagaatattgtatttggagcgtcccttacctttacaaaaggaaatatctcttccctactttcaagggactatattgaaaagctgcatgatttgggatgcaaggtggtctttttcattgaatatgttccagttaatgaggaaacagttgatttggctccaagcgacagtgaaagggaattattgctaagtgagcttgatgaattgcgcagtgattattcagatatgctatttttatcattccctggagatgaaaaggaatctggaggttgccttgcagctggaagaggatttttccatattaattcccatggaggggctgaaccttgtcccgcttcaccttattcagatataaatgtgtgtgagacttctcttttggaagctttggaatcaaacttgtttagatcccttagggatggtggtcttttgctggatgatcatgaagggggatgcgttctatttgaacataaagaagaagtagaaagtttatttgataattga

SEQ ID NO: 646 - DNA, 414 bp, Methanobrevibacter ruminantium
  source 1..414: mol_type = genomic DNA
atgagttttacagacaatttaaagaaaagtttaggctttgaagaaggagaatatggtagtggatatacttttgatgaaggttataatggtgaaccggacccattttttgaaggaattttgattccctataaatttccagaaacaaaggcttttatggaaatcatcttaattaaacctaaatctgttgatgatatggattatatttttgatcaagttgtagaagagaacaatcctgtgattatggatttaagtttcatggaaaagaaaggtgcagctgaatttaaacaagcaggagaaaaattaaaagttttaagacaacaatataatgctgaagctatcttgctttctaaatctgatgataaaaatttaattattgtgactcctgcaagagttaaattgattagaaaagagtaa

SEQ ID NO: 647 - DNA, 756 bp, Methanobrevibacter ruminantium
  source 1..756: mol_type = genomic DNA
atgatagatacacatatgcatgcagacgcaagaagcagtgaagactttgaaaaaatgtttattggcggaattgatacagcaataagctgctcatactacccatacaaagtaaataatgccgaaatactcttaaaccatttaaatagaatattgaactttgaacctaaaagagccatggaatatggccttgaattaaagattgccttaggaattcatccggcaaactcaattaaagacaatgaaataatattcgactcattaaaagaatggatagacaacaaagacataatagcaattggagaaattggtcttgatgaaaacacagagcttgaaaaggaagtctttaaaaaacaattagaacttgctgaagagacaaaatcaaaggtaattgtccacacaccaagaaaaaacaaattagaagttttaaaagacattaaagagattgcacttgaaaatatcaatcctaagcttgttgtaattgaccacataaaccttaacaccattgaagagataattgatgatgatttcaccataggattaaccgtccaaccgcaaaagatggaagttgaagaggccattgagattttggacaaatatgactttgataagtttttattaaatagtgatataagcaataaaccatcagatcctttatctgttccaaagacagtaagaacattgaaaagacttggatataaacaagataaaattgataaagtggcttttaaaaatgcagaaagcttttttaacttgtaa

SEQ ID NO: 648 - DNA, 813 bp, Methanobrevibacter ruminantium
  source 1..813: mol_type = genomic DNA
atgtattatcacgattatgtaaaagagcaattgcgatttttgaataattcagagattcgattgagaatattggcttatttgtctaaaaagccattcagtttagcagactttaaaaatagttcctttgtaagctatagctctatttcctctaatgtttataagcttacggatgaaggatttgtagagaagattgataaaaataacttcagattgacaaatattggtaaaatttacctgatttccttaatggagtttcatgatacaataaatacggtaaataatttctcagacttctggttggatcatgatgttcgggcattatccagcaaatatttaaagaggatttcacagctggaaggttctaagcttattcaaagcagacctacagatatctataagactcatgaggagtttagaaatctatttaaggattcagatattctaaaggtcattttcccttatttgcatcctgaatatcctagattgattagaacattgctttccaatggttcaaaaatagagatattggttccaagagtaatctgtcgacgatttatcaagagtgtgggagaatccttggttagaagctcgattaagcagaatgctctttcgataaagttcattgacgatgaggttaagcttgctttggctatttctaataaatgggtttctattggtctctttaaacgagatggaagctatgaccaaagcagattattggtttcagataaaaaggatgccattaaatgggcatataatattttcaaatcatatgataaaaaagcagaacttgtggaccttagaagtttataa

SEQ ID NO: 649 - DNA, 819 bp, Methanobrevibacter ruminantium
  source 1..819: mol_type = genomic DNA
atgattggtgatattaattttgaattggatagtgaaaattttagaatcatgcgtttcttattaagctcttttatgagaacagatcttttgttgactttagtgaattcttcttctcgcttgtgttccttgagatcgaatttaggaaagagttctgctacaatcttgcatggagttagtgagttggaagcctttaatttaatttcaaaggattccaaatattattgtctctcttcgaaaggttttatttatggcttggcattggataagctgtgtaagaatctatatatttttcagtcaaatccagaattctggcagaatcattttatagacggtcttccaagcgaatttgtagaaaatgcatatctcattaaggattccgtttatatatgcagtgataagcttgatatggaaaagccgattagggattattttaagaatataaagaattccaaaagcattaagattattttgcctatattttctgaattatatttggagatgattttaaaaactgttggaagcgatcatgacttggaattgatagtggatgaggaagttttcacttcaattaagaaatccagatattataggaggattatacgtctatccaaaggtggaaaaattattttgagaaaatatattggggatttaaatttatttttaacatttagcgatgaattcatgtctttgaatctatttgataaggatggattctttgatgattctgaaactattttcaataatactccagatggtgttaaatgggcagaaataatgtttgattactttttggacaattctaatgtggttgttttgtaa

SEQ ID NO: 650 - DNA, 1713 bp, Methanobrevibacter ruminantium
  source 1..1713: mol_type = genomic DNA
atgaatcatgaaaaaatgtcaaacatagcaagaaaaagaggatttttatggccgtcctttgaaatctattccggagtgtctggatttaccgattacggacctctcggagcaagcctaaaaaacaacatcatgcaaaaatggagaaagcaatacattgcaggagaaggcttccacgaaatagaaggacctaccgtaatgcctaaagaggtattaaaagcctctggacacgttgataactttacagatccaatgacaaaatgtaaagactgtggagaagtctttagagcagaccacattattgaagaagccattggagaagacgtagaaagccttgaaaatgaagagatggatgaaatcgttagaaaaaatgatatcaaatgtccaagctgtggcggagagcttgcaaatatttggaattataacttaatgtttaaaaccgaaatcggagcaaaaggagacaaagtaggatatatgagacctgaaaccgctcaaggaatattcattctattcaaacgattgtccagattctttaaaaataagcttccattcggtgctgtccaacttggtaaagcatatagaaatgaaatctcaccaagacaaggagtcatccgccttagagaatttacacaagctgaagcggaaatcttcctagaccctagagacaagacacatcctaaattcagccagattgctgatgaaatcttatatctatcatctcaagatgttcaaataaacaataaggaaaccttggaaatcaccgctcaagaagctcttgatcaaggagtggtatcctctgaaacattaatctaccaattataccttgcaagaaaattccttaaggaattaggcattccagatgaagtattaagattcagacaacacctacctggagagatggcacactatgcacttgattgttgggatgtagaatgcctaactgaccaatatggttgggttgaaatcataggtattgcagataggggagattatgacttaaaagcacatacagagttcagtaatgaagagttaagcatttacattgaatatgatgaaccaaaattagtcaaaaagaccattgtaaaacctaatttaaaattattcggacctgcatttaagggagactctcctaaaataaagacatatattgaaaatctcagcgatgaagaggtcatagaacttaaggaaaaaattgaaagcaaaggaaaattcacccttgagctagaccaaagctttgaaatcctcaaagagcatctattgtttgaggacattgaagaggaagtcaaaggagaaagaatcatccctcacgttattgaaccttcatttggtattgaccgtatcctttattgcacactattacattcattcaagacagaagaagatggtttcgataaggaatactttaaatttgctaatgagattgctccaatacaagtcagcgtattcccattgatgaatagagatggccttggagaaatagcaacagaaattacacataacttacgtgaagctggatttacagtagataatgacacttcaggaaccattggaaaaagatacgctcgtgcagatgaagtaggtgttcctatagccataactgttgactacgatacaaaagaagacgatacagttaccgtgagaaatagggacactgaagaacaagaaagagtaaaaattgaagacttaaaagaagtcattgaaaccaaatacctttaa

SEQ ID NO: 651 - DNA, 588 bp, Methanobrevibacter ruminantium
  source 1..588: mol_type = genomic DNA
atggctattttaagtgacagagatattaaaaaatacttaaatgaaggcaaaataacaattgaccctttagaagatgaaaagcaaatacagccgtcatctgttgacatgagactaggggatgaattcaaagtctttaaagttattagaaaacctttcattgaccctaaagacccagaagaccttgcatcctatatggaatccacaatagttccagaaggagatgcattcatcatccatccaaacgaatttgcccttgcaaccacatatgaatatgtaaaaatcccagatgaccttgtagcaagagttgaagggcgttcatcaatgggaagactgggagttaccatgcatgtgactgcaggctttattgacccaggatttgaagggagaatcacccttgaaatctctaatattggggcaatgccagtggcattatatccgggtcaaagagtatgtcagcttgtatttgagacaatgacttctccatctgaattgccttacggccatccagaaagaaacagtaagtatatgcgtcaaagaagaccagaaagcagtagaattaaatttgattatgaattaaatgaaaaataa

SEQ ID NO: 652 - DNA, 876 bp, Methanobrevibacter ruminantium
  source 1..876: mol_type = genomic DNA
atgaggaaaggattttacgaagatatcagtacatttttagtgaaacatacatttcacactcgttttttcctttcaagattaactaaaaaatctaaaattgctaaaaaaatcatagatagacttcttttccaaggtgacgaagtttatgttcttccaaacaaaaatacagtacaaaaaacaaaatctgccacaatctctgcaaacattgaagtcaaccaaagcttccagaaagacgattccgaattcgttccaagcgaaatattaaaaattgcaattagagaagcttcagacattgtcataatgaacaaatgcctttgcagaagctctaatgattgtcaagactatcctcaagacttgggatgcatatttttaggccctgcaagcagaaagatagcctcaaaatatggaagaagagctactgtagaagaggcattggcacatgttgataaagcagatgcagaaggattgagccacgttattggaagaaataagattgataccatatggatgcatgtaagccctaaagaagagttactgaccatctgccattgctgtccatgctgctgtctatggaaagtacttccagacttggacaatgatattagcgataagatcatgagacttgaagacgttgaagttcatccaataagcgacaactgtaaaatgtgcaaaaaatgtttaggggatgacatttgctttggcggtgcaatcagcttggaaaacgacaagataactatagatcaaaacaaatgtgtaggatgcggacactgtgttcaaacctgcaaattcaatgctattgagttaaattatactcaaaaatcagttgattctgttttaaatagaattggagaattagttgattataagaaacattaa

SEQ ID NO: 653 - DNA, 792 bp, Methanobrevibacter ruminantium
  source 1..792: mol_type = genomic DNA
atgaaatacaaagataaaaaatcagagagaggaaaagtaaaggaaatagttgaagatgaagaaactataagacttaaagaaaacatctatgttgtctttgtagaatgtgaatctcctggaaatgttggatttttagcaagaaccatgggaaactttggattgaataaattagtcctaatcaatccctgcacacttaaggaagaagcttattatcaagccacccatgcaagggacactgtagagaatgcaatgatttatgacactgtaggggaatttgtcaaagacaaaaagattgacttcataataggatctaccggagctcccggaggaagctataatatttcaagaattccattgaagcctgaagagctagcaaaatcaatgaattacaatgataagatagcgattctatttggaagggaaggaaatggactgaccaatgcagaagtggacatgtgcgatttgattgtaagcattccaaccgatccaagctatccgattatgaacatttcccatgcagctgcaataatcctttatgaaatctttaaaaacaggaatgagtttccagtgcaaggcctggaagaaagcacagcaatcgagaaggaatatcttatcaaggatatggaagaactcatcgataacttaaacattccagaacataagaagaaaaatggattgaaagtattcaagaacattgtaaatagggctttcattacaggaagagaagcccatacattaataggtattttaagacgtttaaatttaaaaataaagcatggagacgaatattaa

SEQ ID NO: 654 - DNA, 1527 bp, Methanobrevibacter ruminantium
  source 1..1527: mol_type = genomic DNA
atgataacagtttatgtaaagagattcgatagcgagaaggatgaggagcctcatatcgaagcttacgaaattgaagaaagcccaggaatgaaagtgctagatgcattagaagaaatcaacagaaaatataatgcagacattagctttagaagctcatgcaaagcaggacaatgcggatcatgtggagtaaagattaacggaaatggcgcacttgcttgcaaggcccaaataaaggacaatagattaattgaaccattggatttcccagtgattaaagacctagttgtagatagaagctctgcagatgaaaaggtaaagcaattgcaattaagcctaaattgcgatgatgagactgcacatgagaaattaaatcctaaagatattaaggacactaaaaaggtcagaagttgcattgaatgctatacctgtctttcaacctgtcctgttgtaaagcactttaaggaagacttcctcggaccatattacttaagatacctctctaaatttgattttgacccaagggacgaatcagacagacttattgaagcattagacagcggaatgtacaactgtacaagctgcggcaaatgcggttcaatctgtcctaaaagcattaacagctttggagatgcaatagaaaagcttagagcaatggcttatgctagggatttaggacctcttgatgcccataaaatgtttagggaaaatgttgtagcaagcggaaggtctgtaagcaaacctgaagagccattcattgaaacaatccataagaaatgggatgaagaaggcaaatattatactgatgacgaaagcaatgatgaaaacaaaaataaagaaaaagtggccttattcactggctgtatggtagactacagagcacaggaagttggatatgccttaatagatgtcctaaaggcaaacaatattgaaatagacattccagaaggccaagtatgctgcggctcacctcttcttagaacaggacaagtagatgctgtccaagagcttgtagataagaataaggaagtctttaaggattatgataaagtaattacaatctgtgcaggctgcggagccacacttaaaaacgaccatccgaaatacggctcaaatctcaatgtagaggacataagcgaattccttgtagataagctcgatacaagcaagatgaagccattgaacactaaagtaacttggcatgacccttgccacttatccagaggccagaacattaaagatcaacctagagacataatcgaaatgattccaggagtcgagtttgaagagcttgaacttccttgccaatgctgcggtgcaggaggaggaatcaagtccggaagaccagacattgcattggaacttgctaaagacaaggcagagatggttagagttaccggtgcagattatgttactacaatctgtccgttctgtcaaataaacttacaggatggtttaaatgcaattggtcttgataatgttaagacattgaatcttattcaattgcttaaaatggcttatgatgaataa

SEQ ID NO: 655 - DNA, 1992 bp, Methanobrevibacter ruminantium
  source 1..1992: mol_type = genomic DNA
atggcttatgatcaattagtgactagtgaaaaaggagataaactttttctgcttggtaatgaagctgctgtaagaggagctatagaagctggcgtatcagttgcagcaacatatccaggaactccttcttctgaaattggaaacatattgtcagtagttgctaaaagcgcagacatgtattttgaattctctgcaaacgaaaaggtggctatggaggttgctgcaacagctgcagcaagtggtcttagatcatttacctttatgaagcatgtaggtttgaatgtggctgccgattcattcatgactactgcatattctggagttaagggaggaatgattattcttgtagcagatgacccttccttgttttcatctcaaaatgaacaggatacaagaaactactcccgtttatcttcaattccaatacttgaaccttcaaaccctcaagagataaaggacatgatggtttatggctttgacttatccgaacagtttggaattccagttattctcaggacaagcactcgtgtgtcccatatgagaggaatagttgaaatgggtgagataaacagtcctaaatcaactacaaaggaagtcaagtcagataagcattggcttaaaggatactttgttaaaaatccaagggaatttgtccctgttccagcaaatgcacttgcaatgcatgagagattggttgaaaagataggaaaaattgaagatgaggccaatgaaagccctgtaaatgaggttgtttcatttgaatctggtgtgcttcaaggcaaatatggagtaatttcctctggaggggcattcaattatgcatatgacattgtagctggagaaaatcttggaatggacattttaaagattgcattatcctatccaactccaaaggacttgatttatgacttctgcaaaaaccttgaaggtgttttcatcgtagaggaagttgatcctatccttgaaaaggatgtccttgcagttcttggtgaaaagaatcttgattgtccagtttatggaaagatcgatggaactttcccaatggttcatgaatttaatccagatatcgttaaggaatctttcaataaggtaatctctgatttggccgatgatgaggaattaaaggcagaatataaggatgaattcggcaaagatttaactggcgatttgattgagacagtcgaaaaaatggaatttagccaaagtttgaatgatttggtggacaatattccaacaagggctcctacattatgtgcaggatgttcccatagatctgcttacttcgcttcagtaaaggcttatgaagaattaggatacgataaggaagatatgatctttgcatctgatataggttgctatacattgggaatcagccctccttatgagactgctgactatcttcttgccatgggctcatcagttggagacggttgcggattttcaattgcaacaaatcagcatgtcatgagctttattggagattctacattcttccatagcggattatctcctcttgtaaatgctgttcacaataagaacaagtttgttttaactattttggataataggatcacagcaatgactggaggtcagccaaacccaggaattcctattgacggaatgggagatgaggctcctgcaatttccattgaggatatagttgaggcaattggagttaaattcctcaagattgtaaatcctcacaatattaaaaagactgtagatatctataaggaagctcttgaatacgatggagtggctgttgtcattgcaaggtatccatgtaccctaatcaagggtcaaaagagaaagccagtgatggaaatcaaggacagttgtgtaaaatgcttgcattgtgttgaaaagcttgcatgtcctgcaatatcctatcttgatgataaggtgactgttgacgaggccctttgtaaaggatgtactgtatgtattcagatttgtccaaacaaggcaattggagtaaaaaaaggtgattag

SEQ ID NO: 656 - DNA, 639 bp, Methanobrevibacter ruminantium
  source 1..639: mol_type = genomic DNA
atggataatattaatagttcaagttcaaattcagataattctgatgtaaattatagcatttatatctctggtgtaggaggtcaaggaattattaagacatctgtaatcattggagaagctgcaatgcttgaaggatatgatgtggtaatgagtgaaattcatggaatgagtcaaagaggaggctctgtgtcaactgaacttaagataggcaatttcaagtcttcaattgttgaggaaaataaggcagatttgattcttgcatttgaacctattgaagtcttaaggggcttggataaggcaaataaggataccgctcttatatttaacactttcccgattgttccttcaactctcacacagactggagagacatatccagatattggtgatataattaaaaatctcaaggataattttgattccgtttatccagtggaaggaaacggccttgcaaaggatgcaggaagcattttatctttgaacatggtcttattaggtgcatgtgtggcaaatgacagtttcccactttcaaaagaaactgttgaaactgctatgaaacataatttagctcctaagttccatgagatgaatttaaaagctattgaaaatggttataatgcgattaaagactctttgtag

SEQ ID NO: 657 - DNA, 591 bp, Methanobrevibacter ruminantium
  source 1..591: mol_type = genomic DNA
ttgaatggaggtgttaagatagaatctactgatataagatatttttatagaaatatagtcaagtctggtaaaaaatatcgtataaaacataacaataaggattatggagaattcagcaaattatctgacgcactctatgaaagggactgcttattttattgcaagttcgactatgacctacttgtagaatgtgaccttccaaacaagtatgagaatatggaacttcctccttttccagaacatcgtccaagaggacagattaaaggattgaaattcaataaaaaggaaagagaaggagaaatagtctttgaccataaggagagaaagttctgtgtaataaggggagaggaacattttggaaagtataatacaatggttgaagcctattatgtgaagaaaatccttatggaaaacgattgggacaaagcttgcctcattcaaaacaagagaatcagagaagacatatttcttaatcagaaaattaaagcaagcactcctaaattaaataaatactgtccaaattgtggtaacaaagtaaaagaagaagatatcatttgtaaaatttgtggtatacggctagttaaggattaa

SEQ ID NO: 658 - DNA, 1839 bp, Methanobrevibacter ruminantium
  source 1..1839: mol_type = genomic DNA
atgaaagggaatattcttaagaatattgatgaaataattaaatcggattttaaatcagcattttcaaatccaattgtagttattgttctaataggcataattatccttccttccctttatgcggttttaaacatttatgcatgttgggatccttacggaaatactgatgaggtagtatttgccattgccaatttggataacggctccacttttaagggagactatattaacataggaaatgaacttgtcactgaatttaaaaataataacgatttcaaatggacatttgtttccgaagagaatctgcggacgggagtttttaatggaacatattatgcagggatagtcattcctaaaaacttgtcggaaaatgtggtttcaattgcgactgacaatcctaagcaggcaaaattggaatatgttgtgaatgtcaagacaaatcctgtagcttctaaactaacagattctgctgcaaacagaatttacatggcattgaatgcaaagatagttaaaataatcgatttggcagcttatgaaaagttgggggaattgcagaaaggtcttgcatcaggttcccagcaactctctagcggaggctatcagcttcaatcagggtctgcccaaatatcttcaggttcccaccaagtctcatctggagctaagcaagttaaggacggtaaacagcaggttagcactggagctgaaacagttaaaagcaaggcttctgatttggatgaaggtgcacaaactgttcaagagggctcaaattatataaaccagaaatctgaagaacttcagcagggttccgatgaagtgcaggctgccgcagacccatcgctaatgcctgatggccctgtaaaagactatgtagatgccagtgttgaacttgcaaatggaagtggcgaactggctaaaggttcttcacagttagcaaacggttctgttcaattggctaacggttctgttcaattggcaaatggttctgttcaattggctgacggttctgttcaattggcggatggttctgttcaattggctgacggttcagtaagtcttgcagctggagctcaattgctttcaagttatgcagtccaggcattgtttactgcatcctcttcattaggggcaacagcaaatgagcttggaagcgttacaggcattaacaaaacacttcttggaaattatttgtacgctccaatagcattggaaagggaagaaatgttttcagttccagattatggttctgacattgctccgttctatatcgtattgtcaatgtgggtaggagccattcttacctgtgtaatgcttaagacaggccttagcaccggtacaaaatattccgctcttgagatgtatggaggtaagcttgtgatttttgtaatcttaagcattttgcaggcttgcgttacaataataggatgtaatattttaggcattcatattgttaatctgcctctattcatattctcttgcatcttggtatcggtggtatttatgatattggtctattccatcatatctgcacttggacaagttggaaaagctattgcagttgttcttttagtgcttcagatatctgcaaccgggggaatttatcctattcagatcatgcatggatttttccaaacattatattcatatatgccaatgacttatggaattacattggttcgtgaagcccaattaggtacagtttggtctaattattggcctgctttagccatactttttgcaataggtattattacagttatagttgcattgttgattaaggtaaaagcggataaggcttctcattactttgaaaaacgtttagaagaaagtggattgttctag

SEQ ID NO: 659 - DNA, 276 bp, Methanobrevibacter ruminantium
  source 1..276: mol_type = genomic DNA
atgtatgaagataaattgtatgacaaagcagaaagaagagtagatgaaaaaattaagttttaccgtcatttgtacagctatattgctgttaatgtgatccttgcagttattaaccttattttctttaaaggtgactggtggttcttatgggtaagcctattctggggaatcggtttagtctcccattttattaagacatttgtaatctttaattattttgatgaccatcacagagattcaatgattgaaaatgaaatggcaaaaatgagaaaatag

SEQ ID NO: 660 - DNA, 447 bp, Methanobrevibacter ruminantium
  source 1..447: mol_type = genomic DNA
atggataagaaaatgattgtttcagtggcttttcttttattgattttggcagtggctttagtctctgtatttgatgaaagcaatagctctgaaagtaaagtaaacttaatcgtttattctgaaggcccaaagtccttatctgaacttgtcaatgaaattaagacccaagactattatgaaggatatgacaatgagacagttgcctggatggagtccttaggaaataagaaattttattatggtgacggaataatagttattatgagcgcaactgatgcaagcaagcttccttccttatatgtcaccgatgtagagctttttgagcattttgaatgtaacgttttggaaaaacgttctttaggaaatgtagagtatcctaaggatgtcctgtatgtcaagaatgtaaaatacatcggcgaggaatatggtaacttttcaggggcttaa

SEQ ID NO: 661 - DNA, 462 bp, Methanobrevibacter ruminantium
  source 1..462: mol_type = genomic DNA
atgaaagtacagttattcgtttcgaaagatcttgaagagccctatgctgagatttatactgataacttaacagataatattcaaaaggctatggttcttttggaaaatgatgaatcagatgatgatgtggatgagggcaattcaatccttgcagttaagaaggggtccgacattgtccttttagactttgaagacattttcatgataaaggttgaagacaagcagactaaggtcttctctcaaaatgcagaatactcaatcaagaagcccctttatcagattgaagaaagccttgattctgattttgttcgcatttcaaaatccacaattgtcaatttaagaaagataaagagagtggctccttcattaagaggaatgatgtttatagaattgaagaatggcttgaaggacaatatttccagaaaatatttaacagatttcaaaaaggctttagacctatga

SEQ ID NO: 662 - DNA, 432 bp, Methanobrevibacter ruminantium
  source 1..432: mol_type = genomic DNA
atggagattattaaaaggattgggattggagcatttgtaggatgttttgtagtgatgcttgtcatggtgcttggaacatatagccttggtccgcagaacgtcagcttttccggaactgaaatcattaatgcattcttcggatcaatagttgtaggatgggcatttgccttcagcggactcatttatgaaaaagaggacattccattacctattcaagtcattttccaaatggtaatcggattgggaaccctatttgctgtagcagtctatttaggctggatgcctattagcttaggcatagggcctataattacttggatagttattgcaattgcctttgctgcagtcttctggctaggattttacttatattacacattcctagcaagggacattaataaaaagatagaattatctaatgattttgattaa

SEQ ID NO: 663 - DNA, 1140 bp, Methanobrevibacter ruminantium
  source 1..1140: mol_type = genomic DNA
atgaagactatagtaaatggtttaattctaaaaggattagaattagaagcaaaaaaggaaaacatcctcattgatgacgatggaactatcttagaaatatctaaagaggttaaagaaggagaaattatcgatgcagataataagatagtctgtcctaggttcttaaatgcccatactcatattggagatagtataatcaaggatgaaggggaaggattatcccttgatgaagtggtaaagccacctcatggaatcaagcatgtcgcccttgaatcagctgatgacgatgttttgattgaagccatgagagagtccatgtgggatatgtacaatatgggagtaagccattttatcgactaccgtgaaggtggattggatggagtaaagcttctaaaggaagctgctaaggacattccaatcactccaataatacttgcccgagacagctccttctatggggaggatgcaaattatcatatggttaagatggcccttaagaaattgctaaaggaatccgacggcataggattaagcggctttggtgaaatcagcacaactgttgctgagattatctgtgaaaggtgtgaaagggaggataagatatcttctatccatgtagctgaaaatgagctcaatcagattgcctctcttgaaaagactggaaagagcgagcctcaaagggcatttgaagctggattcaatcagatagtacatatgaccaatcctaaaaatgatgatgtcgaattgctagcaaggtctgattcatcacttactgtatgtcctcgctcaaatggagcattggctgttggggttgttcctctttatgaaatcttaaataaaggagttcgtcccctcattggaacagacaatataatgataaattcaccaaatatgtttagggagttggaatttacattaaagataatgaaaggagtttctagaaatcacatagatgctagagaaatattaaaaatggctaccactaatgcagattcaagcatttctaatctgcctattgataagtcatatattggagaaggccaaaaggccgaactcatgattgtaaataagaagtcaaataacccttatttgagtttgatcaatcgaacagaagctaatgacattgttaaaataatctaa

SEQ ID NO: 664 - DNA, 876 bp, Methanobrevibacter ruminantium
  source 1..876: mol_type = genomic DNA
atgattgtaaaagatgttgcatctacagatgttattcatgttacagttcctggaagccgtgatgaagcattacgtatcatgaaaaaagaagatgtgtctgtagtgcctgttattaagaaagagactggaaaattagtcggtatattaactcgttctgatatgattaccaatccagatgaagagcaaatcgctatgttgatgactagaaatttgattactgcaaaaatggatgacgaattgtccactgttgctgaaaagatggtaacaaacgatatcagaagagtccctgtaattaatgatgatgatgaattggttggaattgtaaccagctttgatatagtttcccttgctattgcagatatgggaatcaaggaccctgttgaaaattatatgatcaagaccattccttcaacatgggatgagactcctttgaatgtcgcttttgaagtcatgaagttctttggattaaaatccgtcataggattaaactccaacaacaagatgaccggtatcctaactgaaacagatttcattgcagaaagcgaaatcatatctgaaagaactgagcacagctcttctgtaggtaccgaaggggacaaatggtcctgggacagtaccagcgttttatacattgagaaaaaccatcttaagtttactgacaaggtatttaaggacgttgcatccggtgatgttgtaactgcaaataccaagacaaaagtttcagtatgcactgaaaagatgaaatctcttgatgtggaacaattgcctgttcttggaatagaaggagaacttgtcggtttagtaagggcaagtgatttaattaaaagctttattataggctttaatttttctttttcttttatttttactttttag

SEQ ID NO: 665 - DNA, 1080 bp, Methanobrevibacter ruminantium
  source 1..1080: mol_type = genomic DNA
atgaaagccaatccaaaaatagaaaaagtaaaacagatcctaaaagattacaaaaagatagccttagcattctcagcaggtgcagacagcaccctccttgcataccttgcaaaagagtcagactgtgatgtgcttgcaatcacatatgacaaccagatctttccagagggatttttggaatttgctaaaagacgtgcagatgaacttggaataaaacacgaaattatagaaaatagtttcttaatgatatatgatgtggcacataatactccacaaagatgtctaacatgcagaagattgatgtatggttcaattaaacaagtggctaatgaaagaggatacgatattatcatagatggaaataatataacagaccttatccacgacagaccaggcatcctaatgaaatatgcaaatgggattgaaagtcccctcatagatgccaatcttgaaagctatgaaattcatgatttccttgaagagaatgatattgaatattcaaagtcaacaacctgtcttgcaactagggtgaaggcaaatgaaacagttacagaggacaaggtaaacaggattgactactgtgaagggtttattaaaagtactataggtgctgatgtagtaaagcttagggaagaaaagaacatagccaccattgaattaggaaataatgattcaaagaagatattggataaagaaaaactagagatcatattcaatgagctaaaagaagcacagtatgataagatattattaaacattgatttcactgaagatgaggaagagcttattttagattcagagcttcaaaagggaaaggaaaatctaattcttagaaagaaactgccatttgacattgaaatttccaaaacaggaaaagtaatcaatgaagcagataatgaatttatatcagatattcaaacaattgaagagataggatacataaaattaaaaatagataaaaaagagtctaaaatatttagagatggtaagattagcattgagaataataaaaacaaggaagatgctaaagagtctttagttaagatcttgcctttaataaggagagcaaaaccattttaa

SEQ ID NO: 666 - DNA, 642 bp, Methanobrevibacter ruminantium
  source 1..642: mol_type = genomic DNA
atgacaaagatcatagtttatttaggattatccattcaagaggaagaagctaaaaccatcttagatgcggattatagaactccagttaaaaggggagacatattaaaggcaatcagcgaaaagccagacataataggaattatagatggagtcttccaccacacccctgcagttgcccataaggagatcatgaaagccttgaaaatgggaatcactgtagttggagcaagcagtatgggtgcccttagagcttccgaactggatgaccttggaatgattggaataggatatgtctataaagcatacagaagcggaaaaatcacatcagatgatgatgtggccctcagctttgaccccgagagaaatgtgccaatctccgaagcccttgtaaacattgactacaagcttgatttggctgtgaaagaggaaataataagcgaagaggataaagaatacatccataatattgctaaggacatctattatccaaaaaggtcataccaatacatattctctaaagtggaaatggaagatgaaaagaaaaccaagcttattgattttatcctaaaggaaaaggacatcaaatatctggatgcaatagaagctctagagtacattaaatccatttctgaagaagaatag

SEQ ID NO: 667 - DNA, 1260 bp, Methanobrevibacter ruminantium
  source 1..1260: mol_type = genomic DNA
atgtttgaagatgttgaaatacaattctttaaaggaactcacagagtaagagatccaaaggaaacaatcgaaataaatgaaaataagctaagaactgcaggaatcacccgtctaactgaaataacagacttagacagaataaaaatcccagtgttctctgcaattcgtccaactgcacaggaaggcggagtcagcgtatatgctggaaagggagcaacaaaggaacaagcaaaggcatcagcgatgatggaaggctttgaaagatattctgcagagcgccaggatatagacaacgaaagaacctttgttgacacctacaacaatataaaatcaagccaagaactaaaggccctcgaccctagagaccttctattgccaaagaatttcaccacacagaatgtggaaaactcaaggctcgaatggattgaatcaaaggacataattagcgaagaaacaatctatgttccctcaaatgcagtgtttcacccatatattcctaccagagaagtaattcctagtccactagctatttttaaaggaaacactaatggtttggcatctggaaacataatagaggaatctgttctccatggaatctttgaagtggttgaaagggatgcatggagcctttttgaacttacaaaaagaaacaagaaggaaataaatcaggatacaatagaaaacgacatcataaatgagcttttagccaagttcaacaatgaaggaataaatataaagcttatggacataacagcagaccttaagataacaactgtagctgcaagcgctgatgatacagtactgaaggacccggcactcctcacattaggtgtaggcacccatcttgaccctaatatagcagtgataagagccttaacagaggtggctcaaagcagagcaacccaaatccacggaacccgtgaagacacaataagagcagatttcatgagaaagtcaagctatgaaggcatgaaaaggatgaacaaacactatttccaaaaggaagaagatacaattgacctttcagacattgaagacaagagctcacactcaatcaaaaaggacattgaaacaagcattgaagaggttcagaaggtcggattcgataaggtcctatacacagaccttacaagagaggagattggaataaatgtggctagagtaatcattccaaaggcagaactctactcattggacgaggaaagattaggaactagagccttggaatatgatagaaaagcacgtagaggactggtctaa

SEQ ID NO: 668 - DNA, 1044 bp, Methanobrevibacter ruminantium
  source 1..1044: mol_type = genomic DNA
atggtttcaagtgaaaataaagttcatgattttcatataaagaatattttaaagagattggaagaaaaagacttggatgcaatgatggtggctaatttcaacaatatctattatctttctggctacttatctacaagctttgcatttatgatagtcaaggaaaatcctatcatatttgtatctgggatggatttggaaaatgcaaacaacaattcttctattgatataatcaaatatgagtctgcagatcagatggttgaatatttgaatgaagaggagattaaggaccttgccatcgagtctgatttgactgcaaatgcctaccaaaagtttaaggactttaatctaactatttctccagctatttccatagaaaggatgataaagaccgatgatgaaatcgataaaatattcaaggctggcgaaattgcacataagtcattgttggagcttgatgtaaggtcaaagcaggaaaagggtgctgaagaatgggaatgtgcatatgagttaggctatctcatgaggaagaatggagcaagcacagaatcattcgatacaattttcgcttcaggtcctgtttcttcacttccccattccacaccaaggcatcacaagttggatactccggtattggttgattatggttgtaagtttgaaggatattgctcagacaccaccagaacatttgtctataatgaaaagcaggaagagatttccaagattgtgcttgaggctcatgacaaggcaataaaagcagttaaggaaggagtaaaatcctgtgaagtggataaggtggcaagggatataattacagaatatggctatggggataagttcattcatagcacagggcatagctttggattggatattcatgaaagcccgtcactgtccttaaaggatgagaccattcttgagaagaatatgtttgttacaattgagcctggaatctatcttgaaggggaatttggtgtcaggatagaagatatggtcttagttgataagaaggctaaaatagttggcaatctgcctcctatcctataa

SEQ ID NO: 669 - DNA, 930 bp, Methanobrevibacter ruminantium
  source 1..930: mol_type = genomic DNA
atgtttgttgaagatttaataaataatttatcaaattttatagaaagcagattaagcgataaaatattaattttcttacaggaatatttcttaaaggcaggaatattcactttggcctctcaaatcattgctatattgttcatttcaattgtttttacattgatattggctttgatgattgcattgttattttcatttgatattcttatggcaattctattggctattttcattcctcttttgtcttttattctatttgtttttataaaatccgagcgaagaagggaagagcttgaaaactcaattccggactttttaagacaattggcttcaatgctgcgggttggaatgagtcttgagaatgctcttgttgatttgtcagagcatggaaacggcccattatatgatgagctgcgccgtgtggttgttgagataaggatgggaaagtcttttgatgaatcctttaggaatatggcgaaaaggcttgactcaaaggatcttgaacgtagttttaagattatcttaaatgctcataagagtgggggaggtcttgctgatgttattagtgatgtcagtgatgatttaagggctatgctgattttaaaaagggaaagaaagtcgtctgtaatgatgtcaatcatgtttttggttttggcatctgttgtagctgctccctttgctttgggaatggttggagtctattcttcctttatgattgaattgaacagatcaagtgccatctgtcaacttgccccaacggttgctctgatctatctgatcattcattcgattttggcaggatttctcatagctcttattatgtatggggatattaagaaaggtgtaaagttttctattccaataaccgcattagcatttttcttattttatcttattaatgtgtttggactatcctttttcggattctga

SEQ ID NO: 670 - DNA, 225 bp, Methanobrevibacter ruminantium
  source 1..225: mol_type = genomic DNA
atgtttagcatttatttaaaaaatgattttaatagattattcaaggaagataaagcacaggggtctgtagaattaattttacttatcggaggcataattgtaattgttttggtttgcatgtttgtttataagtcctatatggggggattaggtgatgaattggaatctaatgaattagaatcattaaataactcttttgaagaattatcctctaaatttgagtga

SEQ ID NO: 671 - DNA, 1416 bp, Methanobrevibacter ruminantium
  source 1..1416: mol_type = genomic DNA
atgaaagtattgattgatggagaggattttgacagcggcgaccattatgaagtaaaaaacccatatgatggtgagcttgtagatactgttccaatttgttttaggcaagatgtagatagggccatagatgcagcaaatagggctaaaaaggaattgcaggatatgtctgcaaaggaagtgtccaataatctttattctgcttatgaagagctcgaatcaagaagcgaagaattggcaaagcttatagtcttggaggctggaaagccaattaagcaggctattggagagcttaacaggtcttgtgagacattgaagtttgcagcagaggaagccaaaagaatctatggagaatctgtccctatagatgctacaggttctgtagatgagcgttttttggcatttacaaagaaagtacctttaggtgtcgttggagcaataactccattcaattatccggttaatcttgcattgcataagatagctccagccattgcagcaaagaatgctgttgtggtaaagccttccactgaagctccattagctgcacttaaattggttgaaattattgataatcatttcccaaatggggtgataaactctgtaactggctatggaagtgaagttggagatgcattggttgtttcagagggcattgataagatatcatttactggaagcattgccactggattgtttatctcttctcgagcaggaatgaagaaattgactttggagcttggtggaaacgatccattggtcgttcttgaagatgcagatattgaaaaggcagttagtgctgcggtgtccggcgcatttctattctccggacaggtttgcataggtgttaaaagaataatattggataataagattgcagatgagttcattgacttatttgttaaagaggcaagtaaattgaagatgggcaatcctatggatgagtctacagatatcggtccgcttataaatgaaaatgcttcaatcaatgttgaaactgcagtaaacaatgctataaaagatggggcagaacttattttgggtggaaaccgtaaggactgcttctatgagccaacaatattggatggtgtcaatatgtctatggaccttgttgcaaatgaaacattcggaccagttgcacctatcataagggtagatagaatagatgaggcaataaaagtggcaaatgacaccagatacggtcttcaagcaggtgttttcactgaaaatgttcatagtgcattaagatgtgcaaatgagatagatgcaggttcagtcttaatcaataaggaatccactttcagaacagatgccatgccatttgggggattcaaatcaagtggaatgggtaaggaaggaattaaatatgcagttgaggatatgtgcaagtttaaattgattgcttttaattgtaggtga

SEQ ID NO: 672 - DNA, 726 bp, Methanobrevibacter ruminantium
  source 1..726: mol_type = genomic DNA
ttgtgggatacagctaaagattatagaattttagtagctatgcatgctcgtgagttatttttaagaactgttcaaactggaagttttagaggtaactggaataagaaggctacaatagaagaaaccaaaaagatggaagctgacttaaaatcattgctttactgttatcttgaaggggatgctcttgctaattgtgaagatgttcaaaagcttgaagataaggctggaagaattatagagttccttggcggtgaagattggaaccataaattcatgcaaggggctcctaaagacgaaagggaaaagacagaagagaacattgcaaaagtaagatttttcctagacactatcttaggccttagaaacaggtttaagttcggccctattgatgatcctatcatgggaatcgatgtaaaggttggagagataatgagtgtcagcaagcatcctaaagccgattccttaatgatatgtaatgtaaatattggcaaaagggccttaaaggtcgttaccaatgatttaactgttaaggaaggcaatagggtaggggtttccctgcttcctccggcaacattcatggatgttgtgtctgaaggaatgtttttaggaatgaatggtagcatattaaaagaagttcaaggtgatttgggtaatatgcctaatggaatacctatggaatctttaaatgagactaaaaatatgataactgcctttttagacagttaa

SEQ ID NO: 673 - DNA, 417 bp, Methanobrevibacter ruminantium
  source 1..417: mol_type = genomic DNA
atggtggaagttacccaattatatgatttagatatatatactttagctggacaatacgtaggtcaagttcatgatgtagttctcaatatcagatacggaaccatctctagacttcaagtaaaagctttagaacctgaaaaaaagagtgcaggttttagagacatcttcagaggcggattccaatttgtacctgaagaagaagtaggaagaacttatcaagaaggtttgcttaacattgaatttgacagagtaactgctatcggggacattatgttaattgatcctcaagatttaaaaagaccaaaacctcctgtagcaggagaagaaatgtcaattcgcccaagacctgaagctccaaaacaagttcctcaagaagttcctcaagaagtcgctccaaaaccaaaagaagtaatttaa

SEQ ID NO: 674 - DNA, 762 bp, Methanobrevibacter ruminantium
  source 1..762: mol_type = genomic DNA
atgattgttggaatattaggttgtggcgcaatagccaatacaatagttaacgagtttctatctgatgatggaatagatattaaatatttctatgatacagacattgaaagggctgagaatcttgcccagatttctaatggtatagctgttttagagatggatgagatgttggacaatgtggatttggttttagagtctgcatcccctattgctttaaaggttcatgccttaaacatcattgaaaacggaaaggacctaatggttatgagtgttggagcattgatggataaggaatttagacaaaagattcataaggctgctcaagcaaacaatgcaaaggtctatgccccatctggagccattgtcggtttggatggaattaaggcggcatccattggaaagattaaaaaggcttcccttactactagaaaatcacctaagtctctaggtcgtgaagttgaagaggaagaaatattatttgaaggaaaggcctctgaagctgtagagaggtttccggtaaacattaatgtggctgcttccttaagcattgcctgcaatatggatattgacgttaagataattgtagatcctaaggtagataggaatgttcacgaggttcttgttcaaggggactttggtgaatttagatcaagttctgagaatgttccatttgctgcaaacccaaagaccagtatgctagcagcattttcagcaattaaattattaaaaagctttagtgagtgtttctctgttggtacatag

SEQ ID NO: 675 - DNA, 759 bp, Methanobrevibacter ruminantium
  source 1..759: mol_type = genomic DNA
atgaaagattatgaaatttattcaaatttaaaggttccaaagaattctaatattattttacgtttggatggccgtaaatttcatagcctagctaaatatttggctttaaaaaagccatatgacaataattttgctaaattgatgtctgaggtgtccttagacatttttaatcagttttcacctaaattcatttatacattttcagatgaaatcagcatattattggatgaaattcctttccttggccgtgtagaaaagttaaattcagtattctcatcaatagcctcaagttcattcacctatcacttattaaatgattttaaagatgatttcaatatggataaattggatgaagatgataggaatgtcatttttccagtttcattcgattccagagtaattccaattgtaaatgaagacatttatgattatttcaaatggaggcaggatgaggcatggagaaactgcgttaatgcctatgggatttgggccttaaagaaggaattctcacctcaaatcgcaaatgaaaagattaaaggtttaaaatcaagcgaaatccatgaattattatttaaaaaaggaatcaatcttaatgacgttgacacttggaaaaagagaggaattggtatttataaaatagaaaatcaaatagaaggatttaatccggttaaagaagaaaaaacagtttcttatcgcagtgaagtttttgttgattatgaattggaattgtttaataaggaatatttttataggttttaa

SEQ ID NO: 676 - DNA, 921 bp, Methanobrevibacter ruminantium
  source 1..921: mol_type = genomic DNA
atgggatttaaagatttaatctcaaaattgaatgaaaaaaatcattttgaaaaggtttgcatagatcaaactgtaattgattcaatcatttattattcaaagaaatcatatcctgatgagtttttagccatgtttgacggttttgttaagaacgaagttctttatatcagtggcttaatctttttaggaggtgaacgttctcatacaagcgctagctttaatgattggctgcttccacctgatcaaaagaaatggggaactgtacattcacaccctggtttaaatgcaaggccttctggcgctgatttgacaacattctcaaaatatggttcttttcatattattctttgtgagccttattctcttgaaactatgatggcttatgattcttatgggaatatgagaggctttgaagttggcaattttgttgatggtaaggatgatgaaatctataaagaccttgaggaattaagaaaagaaatagaagaagaggacggagagctcactccatctatatttgacctagatcaagacttgtccttttttgatagcgaagaggtaaaaaccaataagtattctcatgaattagaggatgaatttgggaatttagccttagataatgatggctctaatgatttcgattcaaataatttttctgaggatatcaattcaaataatccaaattcaaatgacttcacttcaaaccgcttttatccatcaagaaatgtctcagatgaagatttaggttctattgacttaaatccgcaggttattagaataggtggagaaaaagtaaatggtcaaagccctaaattaggcattatcattgaatttagggacgggaaacctattttaaaaagttatactgtggattctcaagaaaatgaagattctcaagaaaaagaggattctgataaataa

SEQ ID NO: 677 - DNA, 1575 bp, Methanobrevibacter ruminantium
  source 1..1575: mol_type = genomic DNA
atgaaagcattagtcgcagatgcaattaacgaaaaaggaatagaaaatttaaaagaagtatgtgatgttgttgtagatactagcatcactcctgaagaattactagaaaccattggagaatatgacgctatcctcattagaagcagaacaaaattgcctgctgaagtaatagaaaaggcagacaatcttaaaatcattgcaagagcaggagtaggtgtagacaatgtagatgtaaatgcagctaccaaaaaaggtatcatggttgtaaatgcacctgaatccacttcaatcactgtagctgaacacacaatgggattgatcttaagcaccatccgtaagatagcaatcgctgataaatccactaaagctggaaaatgggagaaaaaagcatttatgggtatggaacttagaaacaagactcttggtgtaatcggtatgggaagaatcggttctcaagtggttaacagatgcaaggcatttgaaatggatgcaattgcatacgacccttatttacctcctgaagttgctaaaaacatgggagtggaattatacgaagacattgaagacgtattaaccagagcagacataattaccatccacgttccactcactccagaaaccgaacactcaatctccacagaacagttcaagatgatgaaagacaccgcactcatattcaactgtgcacgtggcggagtcattgatgaagatgcattatacgaagctttagttaacggagaaatccttggagcaggtttagacgtatatgaaaaggaacctgcaaccaacaataaattattcgaattggacaatatcgtctgtacccctcacattgcagcatcaaccaaagaagctcaaagggatgcagcaatcattgtagcaaatgaagtaatcaccttatttaaaggaggcatgcctaaaaacatcataaatatgcctcgcatgaacaacagcgaatttgaagaaaccaatgattacttagaactctgtgaaaaattaggaagctttatcacccaagctacaagcagcccaatcaacaaattggaaatcacctacaaaggtgaaatcaacaagctccctagcaaagacctattcactagaaccatcttgcaaggaattttaaaccctgtcactgaaactgcagtgaatgcagtaaacgctaccaccgttgctaaagcaagaggaatcagcattacagaagcagtaagtgatgacagcgaaggatatgacaccttaattaaagttgcagcaaaaaccaaggaaggacaaatgtctgctgaaggtacctacctccacgaagctaaaatcataaaggtaaatggatactgggtagatgtaaaacctgaaggaaacatgttcattgccaaatacaaagacattcctggaagcattggtgcaataggaactaaattcggtgaagaaaacattaacattggtatcatgcaagtaggaagagattcaactggtggagaagccatcatgattcttacattagatgaaagaccttctaaagaagctgttaagaaaatcaaagacttagacaatgttagtgatgcaacctgtcttaaattatag

SEQ ID NO: 678 - DNA, 339 bp, Methanobrevibacter ruminantium
  source 1..339: mol_type = genomic DNA
atggtaaaatttgaagaattccctatttccagtgcaaattatattccaggttataaggtagttgaagaaaaaggatttgtatacggtttaaccgtacgtgcccgtggccttggtggagacattggtgcaggactaaaaggtatattaggtggagaaattaagcaatatgttaaaatgatggaagagtccagagaagaatccattggccgttgcattgaacatgctaaggaattaggtgcaaatgcaatcatttcagttagattggattcagacagcatctcccaaaacatgcaagaagttttagcatatggaactgctgttgttattgaaaaggaataa

SEQ ID NO: 679 - DNA, 774 bp, Methanobrevibacter ruminantium
  source 1..774: mol_type = genomic DNA
gtggttttaggaaatgctccttttcttgcagatgcatattttggtcataggactcgtttatataatttagatcttttaagaaatccaaataatgtaagcaaaatcatagaaaagtcctatgattgtggagtgagatccattaatcttgcaaataaggaaaacctacttaaggcatttgggatggcttgtgacaatggagtcgagatgcaggcagtttccaccattggaaagacagagatggattatgtaatccctgattatgatgaggcaaggcgagaggccacctggaaggaggacattgaaaacttggctcagttcgacaattccataatgcttgtagatgagtttcttatcgactcctatgattgggattttatcactgatatattggatgcaatcaacgatacaggtattccatctggaataatcacttcttttccttttaaaacttctctagagcttattgattcaccattacttgaggataaaaacttatttgacttttatatgattccggtaaacaagttaggttatatgatggatgttcctcattttaagtctgacaagcaggaagagttgaagttgatgcttgataagatagacaaaaagataataatcaataagatattggctgttggcattcaaaggcctgaggaagctttcaatttccttaataccttggattttgcagatatggtttcagttggcattgcatcagagagggaagctgaagagacctttggtatttttaagcaaaatttagattttttttaa

SEQ ID NO: 680 - DNA, 810 bp, Methanobrevibacter ruminantium
  source 1..810: mol_type = genomic DNA
atggactatttaaagaagattcccgctattcgttggaaagatggaaaatacgaagaagtggaagagaaaacagttagcgatgagaatatctatttttatattgatttattgcctcctcgtaagttttccacatatcctgcagatttggaggactttggtgtagggtattgcttaggtgatggtctggtaaactcatacgatgatattctaagcattgatattgacggcaagcatataacaatcaaaaccaagttcaatcatggcgcagatgaggataataaggaagcagatgaagaaaagccagatgtggatgctgatgttttaggctatcaaagcgtaatgtctgacagtgcaggaggatggagaagcgagcttaaaaagattgagccaatcgaatccgatctagttgtaaatgcaagtgaaataatagagaatatgaaaaggcttacagctaaagcagagatttggcaagccactggaagtgttcatgttgcccaattggtttatggtgacaaattcattactcgtgaggatgtaagcagacacgttgctgttgataaggtaattggtgcagcagctaaggcaggatttgacctatcaaagtgttatgtgacttatagtggcagaatgcctgcagatatggttataaagatggttagagtaggtgttcctattttggtttccaatgctgctcctgcaggttccggctatgaggttgcagtgaaaggaaacattactttagttggctttgtgcgcagcaataggtttaatgtttatgcttctactagtaggatagatttggataaataa

SEQ ID NO: 681 - DNA, 432 bp, Methanobrevibacter ruminantium
  source 1..432: mol_type = genomic DNA
atgtcagatgagaataaagataatagagtttataatcttctaataactaaaggaacagacccagaaggccaatatgaattttataaggagagaattgatagtcaaaaggattttttatatgctgaatataacactcaagataacgagctaaatgatgatttgtttgaagaagtagatgttatagtattgctttatggtctttatcatgataatacggagatttgcgatgagttaataaaaaaatcaaaagaattgagcattccttttcttttggttcgctcttttggtgttgaatggatattgcaggatttggaaagtaaggctgatgcagtggttggatggaatgggcattgcattgttgatgcaattaaaacccttgttgatggtggtggcgagtggatcaaaccatgtgatattgaagaggaatattaa

SEQ ID NO: 682 - DNA, 168 bp, Methanobrevibacter ruminantium
  source 1..168: mol_type = genomic DNA
atggaacttaattcaaaacattacacaattattttaatcatagcaataataattgcagttattatgacctatatgactggaataaaaaacccaatcattattggactttgcatacttgccataattgtaattctagctaatttataccttactaagcttaaaaaatag

SEQ ID NO: 683 - DNA, 981 bp, Methanobrevibacter ruminantium
  source 1..981: mol_type = genomic DNA
atggctgtaactaataggaatcaattaataagagaagtttatcaattgctaaacaaggagggctttgaaacatccaatatatatgatcaaagctgctttgatatagttgctcgaaagaaactgctcattctacttttaaaaatcctcgtaaatattgatagcattaacgaatctcacgttgaagaaataaggcagatttccaatgttttcctagcaagcccaatcatagtagggctaaaatccaaaaatcacatccttgaagaggatgttgtctatgaaaggcatggtcttccagccattgggcttcagactcttaaaaatatgattatctatgacgaatatccggaaattctagcagaccgtggaggatattatgttcaaatcaatggaaatgtcctaaaggaatacagagaggaatataacctatcattaaaggatttggctgaccttgctcacgtttcaagggctaccatgtacaaatacgaaaatggcatggtgagggcaaatacagaaactgcaatgcttcttgaagagattctaaacacaaagatcactcttgacattgacctttttgagccttatcaagaagacattaagctaaaggcagatacaagcaatctaaatcagacacaaggaacaaacgctcaaaatcttgctaaattaggatttggtgtggtttccacaaacaagagcccatttgatgcacttgcaaaagctgaaatagctaccaaaaagaaagacaaccctttgattgcaaatttaaatgttcaagatgagcagaatacaaagacattgaagaaaatggcaataagcttaaaggatctttcccttgtaacctcttcagatccgttctttgtccttgcagacgataagattaaggattccattgatggaattccagtaataaagtcttgggagatgaaagaatttgaaaattccaaggagtttttaaagttgattaaggaaagaagaaataattga

SEQ ID NO: 684 - DNA, 1293 bp, Methanobrevibacter ruminantium
  source 1..1293: mol_type = genomic DNA
atggaaattttatatttttattcaagttcagtgattattatggattatttttacataggaatagatgatacagactctccagatggaatgtgcactacatttttagcatcctccattttaaatgagtttgagaggagcaatattaaaattattgattatcctaggcttattcgattaaatccttttgcaaggtttaagactcgtggaaacggcggggtctcattcaagctagacattgatgaggatactgatttggcaaaggagattgtgctaggttatgtaagggagctttccatgtttgactgtgacaacacaaaccctggagttgtcttctatgagggtgaaatcactgaagagatggttgattatgcatttaaggcaatttattccattatcactatagaggaagccgaagaatttgcaaaccatattggggctgaaatttataagttcaaaaagggaaggggaataattggctcaattgcagctatttcctgccctttagaggattacacctatgagcttttggcgtatagggaaccttcaagatatgggactcttagaaacattgattatgattctgttgttagaatggataaggaaacttaccctgaaacctttgaaaatatcgatggcaagtatttggccatagagcctaagactccatgtcctgttttatatggaattagatcaaacagtcctgaggtattggaaaaggcaagggaaatggtcattccaaatgaaaccattgcagacagttgcatatttaagacaaatcagcatactgacatgcatattcaaaatgcagataggataagtgacatgaagcaatattcctgctataggataaggggaaccgtcaaggaaaggccacatataatcgaaggaggccatatgtttttcactttatatgatgattccggcgagatagagtgtggagcatacgaaccaaccaaggactttagaaagatcgttgccaaattaagagaaggggacgttattgaactctatgggggaataggcgagcaaaatacatttaatatagaaaaattccaagtcattaagctaaatgaatttgtatatagaaaccctgtttgcggatgtggcaaaagaatgagctctgctggaagaggaaagggattcaagtgcaaaagctgtggaaaacgtatagaatcagatgaaaaggtgcctgaaaagattgatagaactttaattaatggcaaattctatgaaactccagtctcagcaaggagacacttgtctaaaccgttgattcgtatggatttggattag

SEQ ID NO: 685 - DNA, 1251 bp, Methanobrevibacter ruminantium
  source 1..1251: mol_type = genomic DNA
atggctatcggtgtaaaggagattaagattaccgacaccatcagtatcctattattacctttgatttatgccttggttttaggtttagccctttatttggcaaagcctattaagtttataggcagaaagcaatctaaggtagctgaaggggctatggttctatttattggtgtattaattaccaaattggctatttcaagcggtcaagccatagccagtattttccaagtggggcctgctcttctcttgcagcagataggtaatttaggtactcttatagcattgcctatagcactctttttcggctttagaagggaagtcatcggtatgacaagttccatttgccgtgaacctaacttaggagtcattatcgacaaatacggttttaaatctccagagacccgcggagtattggctgtttttgttatcggatccattttaggtactccattcatcagcttcctatcaagcataagcgcttcactgattcctatgcacccatatgcctatgcaatggcttcaggtgtgggaagcgcaagtatgaatgccgctgcccttgctcctttgatgcatatgtttccatcaatggctactgatttggaggcttttgccggatgcagtaaccttctttcattctgtttcggtatctatatgtgtatatttgtatcattgcctcttgcagagcgtatgtataagtggctatcccctcatataggccatgacaaagaggaaacaattgacgatgagtatgcaatcgaaggggtaaagcatgataagtatgcatctaaggaagagttaagttcaggaaagattaaaagatgggctacattccttcttatattctcattcaccgttgctgtaggaaattatataggatatcacacttcattgctggattcattcattggaatgatcattatttcacttataaccattctgggaatgtctcttgaaaggataattccttggaatattcaatcaatcatttatataagcctgattggtataattgtggctattccaggcatgccaactgctgatttcattgtgcgttatgtttctcaaattgatctgaccacaatatgtactgcattcctggcttatgtaggtatagctataggaaatgattgggaagagtttaaaaagattggttggagaggaatcattatcactctaattgtaatttctggaacttatttatgttcagcaggaattgctcatttgactttagtggctactggaatggtataa

SEQ ID NO: 686 - DNA, 2964 bp, Methanobrevibacter ruminantium
  source 1..2964: mol_type = genomic DNA
atgggaggtgaaataataaataatgaaaaattaaagttaattttaattttaaccttaattttttcaatattaattatgaatacagtcaatgcaagtgacaatggtatcattgcagaatacgctgatatctccacaattccaaatgatgaaaaggtttctatcaatgaaaatgactatgatacaaattattatgagttacctgataaaaaattagatcatttagaatcaaatgataatcaaaatcatttagaaatgaatgataaaaaactaaatgatggaaactcaaataatgattttaactatatacaagagttgatcaatagtcataaagatggagattcaatattcttagaagacaaaacatatataggcaatggaagtccaattatcataaataaaaacctaaatatttatggatatggctataaaaatttatccgatcttgacataaaaacaatactggacggaaactccaaatcaaacatatttatcattaataagggaattcaattaaatctttatggattaagccttatcaatggaaatacaagttatgaggatggaggagccatctataacaatggactattgagtatagatagctgttcaatttcaaacaataatgctggcggaggagcagtatactcctctgaaggctcagaaattgaaatatacaacagtctctttgaaaacaatagcggacttcttggaggagccttggatttggaaaatgcaaatgcaataatatccaagtccacattcaaaggcaacagatgcaatggagacggaggagccatttacaataatattggaaagctaactatctctaattccaccttttcctttaacaagggagctcgtggcggtgttatctacaataatcatggaaccctatcaatatacgattgtgagatgttcttaaactctgcaagccaattaggaggtactgttaaaaattggggaagctgtgaaatatacaattccacaatcaaaaacaatactgcagacatgtacggaggaggattatacacctttgaatttaagatgactgtaaatgattgcctgatagaaaacaactatgcagatgaaggaggaggcctttttgcagatgcagacagcagattgattgtcatcaattccaccataataaacaacaatgctaaaattggagggggaattgatgcaaagcaagcttatctgactgtaaataactcttccattataaacaacaatgctaaaagcaatggaggaggaatctatgctgacaagcaccctgcagaaatccataacactaatataaaggacaataatggaaattccggaggcggagtcttcataggagacatatcagcaaaaataagtgattccaccttaaatggcaactctggagaaactggaggagcaatattcaataaaggaaaattgattatagaaaaaagcaccctaaactcaaatgaagccaattacggtggagcaatctataatcaaaagaacctaacagtaaacaaatcctcttttgattcaaataaagcctatgaagctgcaggaatctataacttaggagactttttaatagagagctctaactttaccaaacaatctgtaagccacaaagcaggagtcatcttaagcgtaaacggaaacattaagattaaagattccatatttaagcaaacaagcggagcagatgaaggcggagtaatctttacaagagaagggaatatatttatagactcctcactgtttctattgaacaatgccttaagttatggtgctgcaattgataatagcgcaatcatgacaatccaaaactccttattcagcagaaacaaggcatttggtgcaggtgcaattgacaatgggggagatttgactgtcacaaactccactttcacaaacaataaggtcacaaacaacggaggggcgattgacaataatggcaagctttatatgagcggatccgttctagtaaacaataccgctcaaaactacggcggagccattatctctagaaaagatacaaatatagagtattgccaaatattggataattccgctccagagggagatgggctttatgatagcggagattacttattaataagcaataattggtggggagaaaacaatccaaactttgatgaactcttaaacttcaatattgatgaagacttcaaatggattgaaatgaattttaccaattcaaccccccttatgcaaaaaaaggtctctaatttgaccataagccttaatggaaaggataaaaacaacaatagcttcaaattagagaatccagataaattgcctattttaaaatcaagtattcaagtggtaagcgaagacagtaaaattaagtacaatttgaatattgttaatggttcagcttccacttcaactgatatgaagcttgcaaagacagtaaatgcaattttggataatgagattgtcagcttagatgttttggaaaacaatgaatcggatgatgattccgaggattcagacgattcaaatgactccaatgatgaatcagataatccgaataattcaaatgataattcagataatgttactgatgattcagatgactccaataagtccaataatccaaacaatcatcaaagcaatggcaataagaataatgataataataagaattattataataaaaatggtttaagatattctaaaatgaaaaatagtcttttaaattctattgattcaaatttagacaatgattatttaaatttaaaagaaaataatgaaaataatgatgattcaaactccaataataaggatatgaattattctgataaaaaaactgatttgaataatgagagttctaataaggaaatcgatgaaaatgagaccaaattatttgatataaattattctttattaatcataccaattgcattaatcctattggttctatttgcatttagaagaaaaaataaggacgattaa

SEQ ID NO: 687 - DNA, 1434 bp, Methanobrevibacter ruminantium
  source 1..1434: mol_type = genomic DNA
atgattattcatgaattgtctagatttctaatagatttaaaatatgatgatattccaaaggaatctattgaaaaggccaaactctgctttttagattatctttcagtttattttaggggattggaaagtgaaaactctaaaatagccattaagaccatatataaactatttggagataattttaattccttgaataaggcattcatcaatggaatagcatcccatagcctagatttggatgatggccatagattggctcaattgcatccgggttctattgtcttttcaagccttttggcactcataagcgataagtctttagatttagacatttcaacagagaaattcattgaatctattgtggcaggttatgaagtagctatcgctcttggaatccttgttaatccaaaccatagaaatcagggatttcatagcacaggaacaataggaaccattgctgcaggtgcagttgcttcaaaaatccttaatttaaatctagaacagacagagcattgcttaggattgtgcacaacccaatctgcaggtcttcttgaggcagatcatgctgggactatgggtaaatctttccatgttggaaatgcttgttatggcggaatcatctctgcattccttgctaaaaatggttttactggaggagaatccataatcgatggtaaagaaggatttttaaaggccatgtccttaaaaacttatgaggattatttggatgcagataataatgatttagactatttaagaatttctaagtttttagaggataatttaggcaagttccatataaatgaggtttatttgaagaaattcccattttgcagacatattcactcttcaattgattcaactctctatttaaaggaatctattgttaattcggatgattttgattctttagattctattggtttggattcaattgattccattgaagtaaaaacctacaagatagcaagtgaacatgataatttcaatccaaagaatccacaggatttaaagcagtcattgccttatgcagtggccatttctctggttttaaatgatttaagtttagattcaattgatgaattaaaagatgatggtctttttgatgaaaagtccaataaggaatatgttttaaaaattaaagaaattatatcaaagataaatattatctatgacaaggatttggatgatttggctcctcaaatgcgtccttctcaagtgacaattaaattcaaggacaattcaagggatagcattaaacatactgtctattatcctttgggtgaagtggaaaatccattaagcgaagaggatattttagaaaagttcaagcttttaaatcctaagtttaatattgataaattacaaataattaaacatatggaagaatattcaattgatgagctttttagggagctagatttgattgattag

SEQ ID NO: 688 - DNA, 876 bp, Methanobrevibacter ruminantium
  source 1..876: mol_type = genomic DNA
atggatgaaactaaaaattcattaaaagaattaggcattaatgaattgcatgatgattatgtgtcccaaaagcgatttgaagatggagggcaatataggtttgaagttccaggaattcaaggtccttctgcactcgagtctcttttaaatgcttgtgatgattttgatttaaccattcacagagccactcaaaccaaaggaataatgttcttattggatgaagagatagaagacatggttgatttggctgatgatgcaaatattcagttattcttggctgttggcccaagggctccttatgatacaagtgctaccgttcaaacagaagagggaaaaagaataggctatcgtcttagaggatataaaaaccttgtctatgcaatagaggatgttaaaagggctgttggccttggagttagaggcatcctattgtatgatgaaggcttgctctttgccctttctaaaatgagggagaatggagagcttccatctgaccttaagtttaagctttctgcacatgctggatgttccaatccagcttcagctaagttatttgaatcaatcggattgaattcattaaatccagttcgtgaccttcaaatccctatgttagcatccctgcgtgatgcaatagacattcctattgatgttcatactgaaaatccaaagtctacaggaggtttcatccgccattatgaggttccagaaatgattaaggtggcaagccctatctatctgaagactggaggatctgttgcaaagcatcatagctgggatacaacagaccaggaggctcgccaaagagctaaacaggttgctttaattagggacttgattgaaaggttctatcctgaggctcaaatgtctaaattatga

SEQ ID NO: 689 - DNA, 885 bp, Methanobrevibacter ruminantium
  source 1..885: mol_type = genomic DNA
atggatttaattaaaaaagttgaagatgcagttgttaaggcaggaagcggatatagtgaagatagattaactgcatatgaaaacgcattaagactggaagaagaaaagggaaatgaaaatgcagtttgggctttagaacaaatgattgaaaactttaaagtagcaaaagaaaataagcttcccctatgtgatgacacaggaatccctcatataataattgagataggttataatagggagattcctaaaaacttttttaatgatattaatgcaggcatagcaaatggtttggataaacttcctggaaggcctatggcagttaagggcaatgatattgaaagaatcgagcaatcaaagggtttatatgccgagtccaatatgatgaaacctgcctcttttcttattgaagagaaggatgattccacttatggaagaaaaataggcatcgatgatgataagataagaataaatgtccttctagaaggtggaggtcctgaaatcagagctaaaacatatagggtttttcataagagagattcaaatatcgtatttaatgaagcactcagctggctaaaggagtctttgtctatgttgggttgcactccttcaattccagccattggcataggaagaagccacttcgaggcaaattcattgatgttaagggctatggttcatggcaatcttaatgatcaatcagatattgaaaaatacattgcagatgagttgaataagacaaatatcggtcctttaggccttggcggtgtgacaactgttcttggatcttttgtaaatattggatatcagcgagctagcggcgttaggatagttgcagttaggcctgcctgttttgttgaacctagagtttctagctttgaattttaa

SEQ ID NO: 690 - DNA, 849 bp, Methanobrevibacter ruminantium
  source 1..849: mol_type = genomic DNA
atgagtgatgatcaaaagccttacaaaaatggtttcaagtttccagagcaaagcattagaacaaaaattaccgaagtaagtcctaaccgattatccactcgaggtttcaatcaggaggaccttattgagaatctttcctactctgagaatgtttttttaatattgagaggaagattgcctgatgagaaggaagctaaaatattcaatcacattcttgtttccttttgcgaccatggtgtcactcctccaagcacacagtctgcaaggcttatcgcctcatctggagcaagcataaacaatgcagttgctggaggattgctgtcctttggcaaaaatcatgcaggggcaattgaaaaagccatggctttgtttcaggaatcaatcagtggcttaaatttggaagagacagaccctgacgatgaaaacaagagaattgccctcttggccatagaaatcgtaaaccgctacgaaggcgaatcaaaaagagttcccggttttggccataggtatcatgataaggaccctagggcagctaaactgattgatttggccattcaagaatcagccattggtcctcatacaaaactagcccttgcaattgaaagcatcttaaatgaaaagaaaggaatttgcttgaatgttgacggtgcaaatgcaggtcttttatctgatttgggctttgatagtgacttaggattgggaatttttatgattgggcgtttgccaggtctcattgctcatgcatttgaagagatgcaggaggaagagaaattcagacgattctgcgatttggaaaacatagtctatgaaggttttaaaaataaaaggattgatgatggcgaagaatga

SEQ ID NO: 691 - DNA, 510 bp, Methanobrevibacter ruminantium
  source 1..510: mol_type = genomic DNA
atggaattttttgatgttattgaaaaaagatacagtatgagaggttttgaagacaaagaggtagagcaagagaaattagataagatcttaaaggctgctcaaatcgctccaactggagttaacttccaaccttttaaggtaatcgtaattgacactaaaaagtataaggaagaattaaatgcaatctatcctccagaatggtttacacaagcgccaattgctctttgtgtagttgcttccaaggaaagggcttggacaaggaaattcgatggcaagaatattgcagacatcgatgcaacaattgtcatgacccatatgattcttgcagctgaagacttaggcctaaacacttgtttcattgctgcattcaagcctgatgaagcaaagaaatttttggcacttgatgatgaatgggaacctgtattgttcactcctttaggatatggaaatgcagagcctagagacactcctagaaaagcaatagaagaattggtaatctataaagattaa

SEQ ID NO: 692 - DNA, 372 bp, Methanobrevibacter ruminantium
  source 1..372: mol_type = genomic DNA
atgaaaccaaagatagttcgtgcaagggacaaagaggtaatgaatcaattggcaaagctttttgaagagtctaaatacactgtcaagtcccaggataagaattatgtccttcttaagaagaataattatggaaatcctttaattcatcttccattcatattgattggactgttcttcaatgcatttgctattctagttaatgtggcctattttgcctacagtgtttttaaaaagtccaatgtaatcttaattacaactgaaaagaatgatgaagatggcaatcccttggaattcgatgacgtcggtgaaattgaagtattctacgaccaagaaacttgggataaggcgatagaattatctagattggaataa

SEQ ID NO: 693 - DNA, 339 bp, Methanobrevibacter ruminantium
  source 1..339: mol_type = genomic DNA
atgagaaaaattatattattggctttttcagctcttttaatcattttagggctttggaattatatgagtgtacctaaaccaggtttagacattattgcatcatcccttgtgcttgttgcagttggttggactcttgcaatgtctgtttttgaacctaactggattaaagcagctatcttcattgacggattggtatttgtacttgtatctatcacattcttagtaagtcctatcaattatgtgttccttctctttggaattattttggttgctatagctgttttagcttatcttagaaaattaccagacaatatattaagatacttctacagatcttaa

SEQ ID NO: 694 - DNA, 315 bp, Methanobrevibacter ruminantium
  source 1..315: mol_type = genomic DNA
atggcagggatatcagaagctattacccaaataaaaaaggctgaaagtgatgctgattccttagtagaacaatcaacagtcgatgcgaaagcaatgattgatgaggctcatgttaaagctaatgaaatggttgaagctgctaagaatgaagctaacgaagaagctcaatctactgtttttgatgcagaagaaaatgcaaagaaagaagctacttctatatcttctcaagctgatagcgatgttgaagctatcaagaataaggctagaaataatatagatgaagctgcttcaattattgttaaaaatattttatag

SEQ ID NO: 695 - DNA, 2007 bp, Methanobrevibacter ruminantium
  source 1..2007: mol_type = genomic DNA
atgtttagaactgcgagaatgcgtaagcttaatgttataactttggacaaatacgctggtcctacggtcagtgcacttcacgacgagggtattgtccaaataaatgatatttctgaacgtattcagcaagatcctaagctagcagaacttttgaaaccttcaaaagttacaccttatactggtaagctgtcctcacttcttatgaagacaagcgcactttccgatcttctcggagatgccctttcagaaggtcagtcccttaaggacacccttatgtctttcataagccccgatcttccagttcctaaagaagtcgaggatgttgatacagaaagctttatagcttatgctgaatcaacattaagccaggttgaggctgaaacaaaaggtattgaagataagttagccgcactagacagtgaagaaagtaagcttgaatcaaataaaagtttagcttctaagcttaaaaatctggatatggatttagctcttttaagcgattcaaagtatacttctaccattgttggtaggatcactgctgagtcagctcagaaattcaaaagtgaatacagtaagattacagaggatctcttttacgaattggttccagatgatgagaaggagtacaatattcttgttgttgtcgtagccaacgagtttaaggatgacatctataccttacttaggaaaaatgaattcgagaagtttgaaactgaggatttacaaggaagacctgacagtcttatttcctcttgcgaatccaggcttcaggctatcgaaagtgaaagatcccaagctaaagctgatttgaaagttgtagcagaaaaatgggatgatgaagttcttgctttaaaagaacaattggaaaacgaaaaagagaaaaatgaggttttcgcaacatttgctgaaaccgacaagactgttgtccttgaagcatgggtgccagagaaaaacctggagcaagctcaaagcataattgagactgctacagatggccacgtgatcatggaaacagaagaggttccagacaatgctgaagacgtacctgtactgcaggaaaactgcacatatgcaaaaccttacgaactattggttgaaatgtactctccattgaagtacaatgaaatcgaccctaccttattcgtagctattacatatccattcttcttcggtttctgtttaaccgatgcaggatacggtattttagttgcacttataggattcatcctctatagaggaatgggtaaagtcaacagaaccatgcacgatggtggtctaatcatcattgcaagtggtatatggtccattattttaggtctgtttaccaacggtttcttaggggacatgtggactaggattttaggtttaggacctgctcttcctacagttatcgattcaatcaatgcatttaagttcccagcaacaatcttggttattgctatcgtaatcggtatcatctataccaatatcggtttcatcttaggtgcaatcgacaacttaagatacggagagaagaaagaagcaatcggttctcaaatcgtatggtttgtatttgagcttggtattatccttctcatattaggattccttttcccaacattcggaatgattggaatggctcttggtgcagtattaatcattgcagctcttggaatgctcatatgggctaacggcgcatatggtcttatggatgtctttggatttatgggagatgtattgtcatacgctcgtctattggctctctgtttagctacaggtggtattgctatgaccgtaaacatcttgaccaatatggtaaatgacatgattccatttgttggtatcgttttagctattatcatctttattggtggacatattgcaaacttccttttccaagtattaggtgcaggagtaaacgctttgcgtcttaactatgtagagttcttctctcaattctatatgggtggaaaaaactcttaccaagcttttaaagcgaaaagacaatttactaaagttaaaaaataa

SEQ ID NO: 696 - DNA, 486 bp, Methanobrevibacter ruminantium
  source 1..486: mol_type = genomic DNA
atggtagaaattgctttaggtactgctttagcagcaattggtgctggtgtagcaattggttttgctggtttaggttccggtttaggacaaggtatggcagcagctggatctgttggagctgtagcagaagataacgatatgtttgctagaggtattattttctcagcattaccagaaactcaggctatttacggattcttgattgctattttattacttgtattctcaggattattaggtggaggagaaggtctctccacaactgcaggtattgtagctataggtgtaggtgcatctattggatttgcaggtttaggttccggtatgggacaaggtatggcagcagcttcctctgttggtgctatcgtcgaagataacgacatgttcgcaagaggtattatcttctctgcattaccagaaactcaagctatttacggtttcttgattgctatcttacttatggtattcggtggaatcttaggttag

SEQ ID NO: 697 - DNA, 681 bp, Methanobrevibacter ruminantium
  source 1..681: mol_type = genomic DNA
atgagctctggggcagataaaattgtctctaacataatgtctgaagctcaaggcaaggctgatgcaaacattggcgaagctcaagctcaagtcgatgcaatattggcagatggcgaaaaaagggctgaagccactaagcttaaaatctctgaagacgctgcaaagcaagcggaaatgagatatcagcaaatcatctctgaagctaagatgaatgctcgtagggcagaattaggggcaaaagaagaagtaatcgaagaagctttcaataaagctactgaagatttgacaaatatggcaaataccaacgatactgaatatgtggacgctttaattgaaatgattaaggaagcagctgtagaaatcggcggcggagacttaatcgttttattgaaaaaggaggacattcctaaaattgaaggtaaattagaacatatcgtaggtttaataaaatctttaatcaaacgtgaaaaaccttccgatttaaatgtgattgctaaagaagtttctcgtgaaactgatgttgaaactactttagaaattggagaacctatcgataccattggtggagctatattaagaacaagaaatggtgaaattcaagttaataacactattgaatccagaatgttaagatttaaaaaatcattacgttcagaagttgcaaaaacattatttgattag

SEQ ID NO: 698 - DNA, 1155 bp, Methanobrevibacter ruminantium
  source 1..1155: mol_type = genomic DNA
atggctgatgaaattgctacaataataagttccttaggactttccaatgaggcatttttagcaatagttcttttagcgtttgtagttattggtgcaattattgtaattgtcgcaactagaccaattttagatgtttacccatatcttcatcctaatgcaagagtaagagcaagaaaaggaagattgtttgatgagaaacagatttcagaacttgttgaagcaaacaacgttgatgaaatcacaaactatctcagaggatctcctgactatgcagactacttggataattatacacttgaaaaggcattggacattcagcttggtgaaacctatgacatggtttccagaatggctcctaaagagattcaatcttcatttaaagtaatggctaaaaagtcagacatcaataacattaaaagtttattgactgctaagcaagcaggattaaacgaagaagcaactgctgaccttttaattcctactggttctttatatgaagatatagaacgtttgaccgacgctgatggtgtaactggcgttgttgcaggattagatggaactgaatacgctccagtattggaagaagcacttccagaatatgaaaagactggaatggtccttcctttggaatcagcattagataagtattacttatccaaattgctcgcttcctctgaaaccccatctgatgagaataagcagatactctattcttatgtcggtaatcaagtggatgttgcaaatatcaaattaatattaagagcaaaggctgatggattagactatgaagctatcagcccatacatgattgatagtggatatcaattaagagaatggaagcttaaggatcttatggaagctgaagacgtcactggtgtcatttccggtttggaaggaaccaaatactcagacgtccttgttgaagtgcttcctgaatacaatgaaactggatctgtagctctctttgaaaaggctttagacaagttcttagtcgactctgcaaaatcctattccatgaaaaagccattaggcattggacctataataggattcctctcacagaaagaggttgaagtcaagaacttgaaggtcattgcaagagccaaaagagaagctgacttcccaatatctaaaattagggagatgttagtatga

SEQ ID NO: 699 - DNA, 318 bp, Methanobrevibacter ruminantium
  source 1..318: mol_type = genomic DNA
atgagtgatgtcgctataattggggatatcgatactgttactggttttaaacttggtggagttaaaagaggtattattgtaaataatgatgaagaagctaaagatgctcttgatgagttattgaacgatgaaatttcaattattataattacacaaaagatagctgataacataagagaacatattaatagacgtcttggttctgatgtcttaccgatggttattgagataccagacaaatctggttcatctgaaggcggtgccgatcaaatggcagctcttattaagagagttatcggggtagagatggttaaatga

SEQ ID NO: 700 - DNA, 1755 bp, Methanobrevibacter ruminantium
  source 1..1755: mol_type = genomic DNA
atgattaatgaaggaaatattattaaaattgcaggtcctgttatcgtcgcagatgggatgagaggaactcaaatgtatgaagtggtaagagtaggtgaagccaagcttatcggagagatcattgagcttgaaggcgacaccgctaccattcaagtttatgaagaaaccgctggggtaaagcctggcgagaaagtggaaagtactggaggtccattgtctgtagagcttggacctggtgtaatgggttccatttttgatggaattcaaagacctttggaagtaattaaaggaatctccggagactacatcgcaagaggtattgatgtagactctattgacaaagagaaaaaatggactttcgaacctattgctaaagtaggagacaaagttgtaggcggagacattttaggacaagtacaagaaacatctgctgttgtccaaaagatcatggtccctccaatgattgaaggtaccataaaatccatagcttcacaggctgaatacacagtacttgaaactattgcagaaatagaaactgaagatggaattgaagaaattcaaatgttacagaaatggcctgtacgtaaaggtcgtccatacaaggaaaaattagacccggacattccacttattaccggtcaaagagcacaagacactttcttctgtttagctaaaggtggtgcagcagctattcctggtcctttcggttcaggtaagactgttacccaacagcaattagctaaatgggcagacgcagacattgtggtatatatcggatgtggagaacgtggtaacgaaatgactgaggtacttaccgagttcccattccttactgacccaaaaaccggaaatcctattatggacagaactgttcttattgcaaacacttccaatatgccggtagcagctcgtgaagcatgtgtatacaccggtattacaattgctgaatacttccgtgaccaaggttacgacgtagcgctcatggcagactcaacttccagatgggcagaagctatgagggagatttcaggaaggctcgaagagatgcctggggaagaaggttaccctgcatatctcgcatccagacttgcacagttctatgaaagggctggaagggtcatcacattaggtcaagaccctaaggaatcttccgttactgtagtaggagcggtatcacctcctggtggggacttatccgaaccggttactcaaaacaccctacgtatctgtaaggtattttgggcattggatgcatctcttgcagataagcgtcacttcccttccatcaactggttgcaaagctactcattatatgtagagagcattaccaactggtggcaagaaaacgcttcagaagaatggagagcaaacagggaccaagctatggtattattacaaaaagaatccgagcttgaagagatcgtacaattggtcggtcctgatgcattgccagattctgaacaagtggtattggaaactacccgtatgttaagagaagacttcttgcaacaaaacgcatacgacgatgtagacacttactgttctccaattaaacaagcaggcatgttagaaaccattcttaagttccacgaagcagcaagtgcagctgtaactcgtggcgcagatgtaaaggaaattgcagctttaactgttaaagaggacattgctagaatgaaatacatccctgaagatgaatttgaagcaagagtaaaagaaattcaagaaaaagttgtaacacaatgtgctgaggtataa

SEQ ID NO: 701 - DNA, 1386 bp, Methanobrevibacter ruminantium
  source 1..1386: mol_type = genomic DNA
atgaacgcagatattaaaacaagagaatatacaacagtttctgaagtttctggtcctttgatggtagtagaaggtgttgaaggtgtagcttataacgaaatcgtagaaattgaagctcctaccggagaacacagaagaggacaagtattggaagttaaagatgatgtagctgttgttcaggtattcgaaggtaccactgacttaaacaccttaaacactaaagtaagattcacaggcgaaaccgctaaaatcggtgtttcaaaagacatgatgggacgtatcttcgacggtactggtaagcctattgacggcggtcctgaaattatcccagaacaagaattggatattaacggtaacccaatgaaccctgcatcaagagaattccctgcagagtttatccaaactggtatcagtaccattgacggaatgaacacccttgtaaggggacaaaaattacctatcttttcaggatcaggtttgccacacaacgacttagctgctcaaattgcaaggcaagctaaagtagtaggttccgacgacgatttcgcagtaattttcgctgctatgggtattactcacgaagaagctaacttctttatgagagatttcgaaagaactggagcacttgaaaaggtaaccgttttcatgaacttggcagacgaccctgctattgaaaggattcttactcctaagatggcacttacaactgctgaatacatggcattcgaacttggtatgcacgtattggttatccttactgacttatccaactactgtgaagcattaagggaaatttccgcagctagggacgaagtgcctggtcgtagaggttaccctggatacatgtacactgacttagctggtatctacgaacgtgcaggacgtattgcaggtaaggaaggttccattactcagatgcctattttggtcatgcctcaagacgatattactcacccaattcctgacttaaccggttatattaccgaaggacaaatcgtattaagtagggatattcacaggaaaggtatctatccacctgtagacgtacttccatccctatctcgtttgatgagtggtggtatcggcggagacaagactcgtgatgaccacagtggtgtatctgaccagctttattccgcttacgcagaaggacgtaacttaagagaccttgtagcagtagtaggggaagacgctcttactgaaagggaccaatctttcttagcatttgctcaagctttcgaagatgagtttatcactcaagctaaagatgaagacagaagcattgttgaaactttagatcttggttggaaattattaactatattacctaaaacagaactcaaaagagttaaagatgaatttattgaaaaatactacccagaataa

SEQ ID NO: 702 - DNA, 693 bp, Methanobrevibacter ruminantium
  source 1..693: mol_type = genomic DNA
atggcagaagaaatactagaaggtattaacccaacccgtatggagctacttgctcttaaagatagagaaaaacttgctgtaaagggtcacagtttgctcaagcaaaagagggacgctttgattaaggagtttttcgatatcttagacagagttaaaggtgctagggaaaacgctgaaactaaccttagtgaagcttacgaagcacttactgaagctcaaatcattatgggtgacttagctgttcaaaaggcagctttatctgttaaggaatctgttaaagtagatatttcttcaagaagtattatgggtgtttccgtacctattgcagatatggaaatggaatcaagaactttagttgaaagaggctacggcttttcagacacttcaattcaattagacgaagccgctaaaaaattcgaaacagcgcttaagtacatcattgaattaggtgaaatcgaaaagacaatctatcttttagctgatgagattgaatctaccaagcgtagagtaaactcacttgaacatattatgatccctagattccaagcaaccatcaagtcaatcaatatgaaacttgaagagatggaaagggaaaacttcgttagaatgaagatgattagatctactattgagaaaaacgaagcagaagctttagctaaagctcaattaaaagcagcaaaagcagaagaataa

SEQ ID NO: 703 - DNA, 2859 bp, Methanobrevibacter ruminantium
  source 1..2859: mol_type = genomic DNA
atgattagtctgtcttttgtttcggcttcatatgctctagactctaatcatttgggagaaaatgatagatcttgtcttaattcttgttcttctttaaaatattctttaggtgataataaaaataatgacttagataatagtgctgatttgaatagtttaaatcccaatagcaataattgcttaaattccaataaaaataattgtaattgctattgcaagaatcaaacagatcttaatgatgatttaaacgattcagataactgtcctgacagttttgctaaaaagacaaatattaatcatgataagcagttgaatgatggtgagatagatttctccgagcgcaataatcaaatcttcctgataagtcctgaaaacttcagtgttttctttgatgaaaataaccgcttaaaggaagattatgggggatgcacccttgtatttgaaggggatttcgctgagcttggcataatcgacatatcatatccttacactcgaatcactgcaaaggaaaactcattcaagaatactgcattcaagctttctgcatctgatatcgaactttccaatctaaacataagtttggataaggaatttaaagataacgaatatgcagggattttggttctatctgattacattagcatctacaatattaccctaaactatacggttccagccaatacaaacggattttgcatctacagcaaaggtgaaggctttagaagaatcactgatttgtccttaatcaacaacacaatcacctttacaggcaataatctaaatgaggcttgggattatggcattttccttgataagacagataatgccttggtttatggcaattcacttggttcatatttgccattatgtgaagacaattggtataataatgaatatggtgctgtcagcaagatgtccagcgctggctttgtagctcaaagctgtaatgatctaaagctgtccagtaatgaaatcaatacctatgttacagattccacccaaagctcatttgctatggattcatgcatattatatgattgcagtgaccttactgtcgaaagaaacactctttatctggaggacattgacagtcaggacggcaagaacaataccttgcatggatttgacttgtatctatgtgacgatgcgataattgccttcaacaatatcgatcttttcacaatgggaggcaatgacgggagaaaaatcacatctccattgcaagtgaacggaccatcagacaatatcagaattgcatataacaatattacaagttctaatttcggttctaactgtggaatatattcccataacttctatggggacacacaccttgaaattataagcaatttcattgatgttgcaggctttgcaaactctggagaatggtcacttctatctggaattgaagtccaggattcagatgacgtaatctggaataatacaattatcgtaacaaatctaggtgatttcaaatataataacaaggtctatggaataagctattcacaaaataggaacaactataactctacattcaatgtccaatacaataacattacaacaaatggatattatgctgtatatttaggtaaggatgattatcctgttgtaaattcaaccgttaagaacaatgtattgaacacttatataaccggaggaaatccggcagtgtcaattgcaaatgataataaaaacaatcctatcgtaaacaatacagacaatgagtttaaaaacatctttaaaaatagcagttttcctaaatggcttaaaaacttcttgagacaggacactaaagtggacaaggacttttcatggattacagatgctataaatcctcaatcaaacggcactggattttctaatgacactggaaatggcacagggataatagataatgatggtagcgacactgtaggaaacaattctgaaggcagcgattctatcgttaatggaagcacttccgctaatggaacaggcaatggaacttctggaaatgccacagaaccacaaaatccgattgatgacaatcaaggagataattctggaggctcaagttccagcgacaattccacaggaagccaaacagataacgaggattccaatcagaacaataccgaccctactgactcaaaaccgacaaataatacagatgtcccagtgaatcctacaaacactagcgataagccagttaacagtacagaaccggtccccgctaatgatacagagccagttccagcaaatgatacagagccagttccagcaaatgatacagggccagttccagataacaagactgataatccagttaacaatacagaaccggttcaagaggatgctaataaaaccgattcagataatactgaaccaatcaacactacaaaagacaatagcactgaaattatcaataagacagaatcagatgatgatactaaccagactgtgttaaaagacgatgatttggatcctaaagaatcacacgaaaattctcaagatgacaataagaatccaagtgatgatgaagagaaatcaacacctggagattctggaaatgagttaacagatcctgaaagcaattcagaaagccctcaaaatcaagaggaaaactcagagaattcgaatgatgattctagtgagccttctagttctacagtcggcgattcacattcagattctgcttccagtccaggtcttagtgatgcttccagcagcaagaatgcatatgaattggataagcctgtagaggatttagttacaaaatctgttgattatatctcacttgcgggaatctgcattgttactttgttattaattttattcggttataaacgtcaaaaggatattgaaggagaagactag

SEQ ID NO: 704 - DNA, 639 bp, Methanobrevibacter ruminantium
  source 1..639: mol_type = genomic DNA
atggttgacgtgggtggaggaattctaacttatatcttagacactcttagtcaaagtttacagattccagtaatcatattcttacttatattcgctgttggagcaatcatccttttaggaggcctaatcagagaatatagtcatagaaagaccatctcagatgctgaaatgagaaatattattgatgcaatcaacaaggctaatgacaaatctgagattttatccattgtagactcttcagatattccaaactctcaaaagactgttttaagagagattacagattctgactgggacaatgaatcaagagtgggccttgctaaaaagcttataagttcaagagaaaagagactcgaaaagcgcttgtcatacactgacataatcactcgtatcggtcctacattagggcttatgggaacactcattccaatgggtccaggacttgctgcacttggtacaggagacgttgtaactttgtcaaatgcaattattgtagcatttgatacaactgtggtaggtatcggttcaggtgctcttgcatatgtcataagcaagataaggcgaagatggtatagcgaatacattaacaatattgatgttttaactgatgtggtattgaataagcttaataaattataa

SEQ ID NO: 705 - DNA, 342 bp, Methanobrevibacter ruminantium
  source 1..342: mol_type = genomic DNA
atggttaagattagtcgtaaaaatagttttgatgaaagcagtgaagaagaccctatgtcaggtgttgccaatcttgtggatgccatgttggttattgcagttggattgctggtgtttttagtcattagctggaatatgcaatctatcatattcaatgaggatctatctccccagcaaaagcaagaggctattgatgccatgaatcaggttattgaagtggatcaggggcaacaattaaatgagactccagatataagcaattcttcaggtgaaggctataccgaaatgggtaaggtttatcaggaccctaagacgggtaagctgataatgattgaaaattag

SEQ ID NO: 706 - DNA, 1323 bp, Methanobrevibacter ruminantium
  source 1..1323: mol_type = genomic DNA
atgggaaaattatcattttcagtagctcaaaggttcggcaaaaagggcacagcccttccaggtaaggttgcattgaaattcaatcctaatctgcttgaagaactatccaaaaaatgtgataagatagtctttatcacaggaaccaatggaaagacaacatcaaacaacctttcaacacacgttctaaaaggagggttcaatgatgtcctctcaaatctgaatggttcaaatatgattcaaggagttttaacccctttcattacagattataaggattcctatgacgtaggtatttttgaagttgatgaaggctctgttccggtagttagccaattcatgaagcctgattatttcataataaccaatttcttcagagatcagctagaccgatacggtgaagttgaaaccacaataaagatggttcatgattcaatcactcctgaaactgttctaataattaactcagatgagccatccttgcttagattcgatgaccttccaaataagaaggtatactatggaataaacaagacaaagtttgcacaagatgatattgatgttgcagagtccattttctgccctaaatgcggaaacaggctaagttatgagtatatctattatggaaatgttggaaaataccactgtgacaagtgcggcatagaaaaccatcctgcagactatttcattgaatctgcagacctaatcaatggctcctataattttacagtattaaacgacaacaaaagagaggaatacactctcaatctgatgggcctctataatctatacaattccttgggagtgataagccttgctaaggagataggccttgactacaatctaattaaggaaagaataaacaatttcgaatacagattgggaagaatggaaactttccactttaaaaataaggaccttgttttggtcctctctaaaaaccctgtaggcctttctgaagtattcaatacaataacctatgatgaaagccaaaaatcagttatgtttatcttaaacgactatgctccagacggaaaggacgtatcatggatttgggatgcaaatttcgatccagttaatcacatccctaatatggatgcattctattgtgtcggaacaagagcagaagaccttgcattgagattaaagtatgcaggagtggatgaaagccttttaaagatatatccggcaaaagaccagtttgacataaacgaggcagtcgatacaatatcaaaggaaagcacaaaggcttatgtgataggaacattcacagcaatgcctgaagctcgtaaaatcctagtaaaaaaagaacaagaaggtttttaa

SEQ ID NO: 707 - DNA, 777 bp, Methanobrevibacter ruminantium
  source 1..777: mol_type = genomic DNA
atggataacttagaattaacagtaatgaatatgtactccgatattttaaatacatacggagacataggaaactttagatgcatcaatcaaagaatcagatggagagacatctctttaaacattcaggaatgtacaatcgacaaggatgatgactttgaatgggaagacatcgacataatcctaataggtggaggctcagataataaccaatccattgtatctaaccaccttctagagcaaagaaaagatcttgtcgagtttattgaaaatggaggagtccttctggccatttgcggaagctatcaaatgttcggaaacaaatacctagatgtagacggcaaggacataccttgccttgaagtctttgacatagaaaccacaagccgtcctgatagactaataggggatattgtaatatccaatgccatcccagattcaaataatgtattaaacaaggattttgatttcaaattgaaggatatggttggatttgaaaaccatggaggcagaacctatcacaaccacgaccctttaggccatgtaaaggtcggattcggcaataatggtgaagacaaaggggaaggaatggtatataaaaacttcctagcaagctatttgcatggtcctttcttgccaaagaacccacacattgcagattatatgatattcaatgctttaaatagaaagtactcaattacagagataaaagacctaaatgacactattgaaattagggcacatgaaagaatgttaaaacgtttattgaacgataaatag

SEQ ID NO: 708 - DNA, 1287 bp, Methanobrevibacter ruminantium
  source 1..1287: mol_type = genomic DNA
atggaaaatttacttattatgggaattaatacaagaccaatggttaattctgcattgaaattggattatagaacatattcagtaagttattttaagacttatgatttcgttagcccatataatgaaaggcatgttttagaccaggaatctgtagactcctgcggattctttgaaaggaactactctcctcaaaagctattggatttatccagggaatatctattcgacttatctaaagaacacaattcaaaaaagcaagataatgaaaataatgaagatatcgatgaaatcgataaaatcgtacttataactggaatacatgctgatgactttaaaggggaattttccagattcaagaccaagattagaggaaacataaatacaaaggatcttgatgataaatttagattctatcaaaaaacaaagaacaaatttgatgttcctctaacttttaaactaagtgatgtagatgaactaagagatattcttaaacaatacaataacaatcaatttattttaaaaccccttaaaggaaatggtggtttaggaattttccttatagattatgatagcttaaatgaattaaataatagcaataatcctttggaaaatatttcatttgatgactacatattgcaggagtatattgagggcacaagcatatcatcttcagttcttggaactaatgatgattgcgttaatctctttaattcaagactagttacagaaaatgatttaggaaatgataattttgcatatagtggaaacattgtgccattggatgtgaatagctttaactgttttaatgaatcttttaaaggattggggattgattcaaagcaattaaacaaagagatgaaagagatttccgaagacctgattaggcaattccgattgattggatctaatggagttgactttattttagatagggaaaacaatctaaaggtcattgaaatcaatccaagacttcagggaacttatgaattatgtgaagagataatggacttgaatcttcttgatgcacacataaaggcatgcgaaggagaattggtggaagttcctaaacttaatggcagatatgggattaaaaagattatttattcatccaaacaggttaaaattggtaatttgagtttatcaaatgtctatgatgtcccttatgaaggagttaagatagaggcaaatcagcctattgttactttgattgattcaaataaggatttgaaaactgcaattgggaatataaatactgcagaagagttggtttataaaaatatctattag

SEQ ID NO: 709 - DNA, 981 bp, Methanobrevibacter ruminantium
  source 1..981: mol_type = genomic DNA
atgaacatattttcaactgaagaaacatattatggcactagaaaagactctccagtactgctgccttcatacaacgaatatggagacaagctccatatcaaggacgtattcgattttgaagagatgctggaaaactacatcatcgaaatggaaattagaaactattccgaaaacactgtaaagacatacagctccatcataagaagcatgatagattatatgagctcagaggaaggagtctacgatggaagaaaattcctagcatgctttaaaaagtatataagagacctaaagaaagaccaagacgtttcacaaaactacatatacctaaacacagtggtctgcaagaagttccttgaattcaatgacatctattttttagaggatgttcaaaaccctaaaagaacaaagtcactccctaaatccctgactgaaaaggaagtgaaatcacttatcgatgcagttcaaatcaccgatgaggacagcgaacttaagaaaaaagccaaaatgagagacaaggtcattcttgaattcctatactctacaggacttcgtatttcagagcttgtcaagctgcaaaaaaaagatattgactttgatgagaggacaataagggtaagaggtaagggagaaaaggatagaatagttctttttgacgaaaatacgagagatttgatagataattatatagaaacacaaaaccagaagtcagaatatctattcatcaacaagaacggcagaaagctaactccaagatatgtccagatgatgataaaggagtatgcagaaaaagcgggaatcaaaaagaaagtaaccccccatgtcttaaggcattcatttgcaacacatcttctaaagaatggagttgatataagggtcattcagcaactattgggacactccagcctttccaccactcagatttatacaaacgtagatatggatacaataaaatccgtatatgatcatgcaagagagtag

SEQ ID NO: 710 - DNA, 1338 bp, Methanobrevibacter ruminantium
  source 1..1338: mol_type = genomic DNA
atgggaaaaggagtagaattaactacaactaaatatcttattcacgctcaaattaatgccaacggaatcgtagaaaagcctgatgttgtaggtgctgttttcggacagaccgaagggcttttaagtaacgatttagaccttagggaacttcaaagaaccggaaggataggaagaatccaagttatcattcattctaacggcggacgtgcaaaaggtgaaattgtaattccatccagcttagatagaatcgaaaccgctatccttgcagcatctcttgagaccattaaccgtgtaggtccttgtgaagcttccatagaagttcttagggtagaagacgtaagagctgtgaaaagacaacaagttatcaatcgtgcaaaagaaatttatatgggcatgatggaaactgtctctcctgaaagcatgaaaatgattgaagaaatcagagaatcaatgagagttcatgagatctctgaatttggagaggaaagacttccagcaggtccaaatgtacatacttccgatgcaatcattgtcgttgaaggaagaaatgacgttttaaacttattaaaatatggaatcaaaaacactgtagcagttgaaggagtaaacattccaacaagcgttgcagagcttactaaaaaaagaactgttacagcatttgttgatggagaccgtggcggagagttaatcttaaaagaactcttgcaagtgggagaagtagattacattaccagagctccaagaggcaaagaagttgaagacttggaaaaagaagaagtcttagtggctttaagagacaaagctccaaccgaacaggtaatcaataatcttgacttcaatctagacactcaagcaaaaactccaaaaaacaaagtaaacagaacagacagaagagcaaaaaacttcaataaatctgacaagttccatggaaataaaagaaacgatcgtaaagacaaattcaatgacagaaaagacaaaaacggaaaaaacgatcgcagaggaaaagacagaaattctagaggtcgcagagacagaggcgacagaattcctgaaagcagaatgaagttattaaagaacatgttaagagacttagaaggaactggaaacagtgaaatcttagatgattctttaaacctcttaaaagaaactaaagtcgaaaccctttatgaagacttaaaagaagacatcccagatgctgatacaattatcttcgatggagtaatcagccaaagattagtggatattgctcattcaaaaggagttaaaacattagttgcttttaaatccagcagagtaattaaaagacctgacaagctcaaattaattactttaaactaa

SEQ ID NO: 711 - DNA, 756 bp, Methanobrevibacter ruminantium
  source 1..756: mol_type = genomic DNA
ttggaaggtgttattttggcaaagattaaacctaatgatttattgaaaaaaccatcaaagatagaaaaaatggaactggatcagattgacataagcaaataccaattttcaatagatgatttggagggtaaggacagttccaattacattttactcaagaagattcttgattcaagctcttcatgtcaagtttccgatgcatatgcctctgtatccggacgcagcggagtacttgatggattaaagccaatgaatagaaacaaggtctatggtagggtttttacagctaagaccaatacaaacgattggggaacttccttgatggctatggacaatgcgagccaaggagaggttctattcatctacagctatggagataaggcctctgtttggggagagcttgcttccacatgtgcaggtgagaaaggaattgctggaacaattctttatggttatgcaagggatatggatgctctaatcgacttggattatccagtatacgctcttgactattgtcctaatgcaggtaaggctttagggcttggaaaggttgatatagtgcttgaaattggtgaagacataataaagccaggtgattttgtatttgcagatgagaatggtgttgtattgattcctcaagagctctttggagagactatggtggcaacattcaatgtaaaggtcaaagagagctttattattaaggagcttaaaaaaggcagattattgtctgaaattattggattggaaagatag

SEQ ID NO: 712 - DNA, 363 bp, Methanobrevibacter ruminantium
  source 1..363: mol_type = genomic DNA
atgaaatttttaggaaatatatcacaccttgcaaattctggaaagcttatcgccaagtcaagccagactccacctgctggagcttttgtttttactaatgataaacagaaaataggtaaggtatataatatctttggcccagtgaagaatccatatatctctattaatctttacaggtcagtaaataaaagagatcttgaaagtagacaaggtgaaaagctttttgtttctacaaaaagagagatggaaaaagataagaaaaagaaaagaagcaataaatctaaaaaaggcaaatattctaaaggcaaaaacaagtctaaaccatctaagaaaaagagatccaataaaaaatctcgcagataa

SEQ ID NO: 713 - DNA, 795 bp, Methanobrevibacter ruminantium
  source 1..795: mol_type = genomic DNA
atgggtcctgaatggagagcatttgaccatgaacaaagagacaaacgtacaagggtaggcgctccaattacttacacaattcacgataaaggattaagtaccatgatcgattggaggaataaggacatctatggtagagatattcctgcaagaaacagagctcaatggtatcgtttaagaaaatggcaaaggaaaatcagaatttccggtgctaccgaacgtaacttggcttttgctttaagtgagttagacagagactcttccagattaggtcttccaagaagcgtaagggaagctgcatctgttatttacagaagtgcagttgaaaacaagctcattcgtggtagaagtattgaaggtgttgtagcagcttctttatatgctgcatgcagacaatgtaaagtccctcgtactttagatgagattgcagaggtttcaagggtaagcaagaaggaagttggaagaacttacagattcttgacaagagaattacacattaaattgcctccaacatctccagtggactatgttcctagatttgctagtgaattaggcttatccggggaagttcaatcccgttccattgaaatcattgaaaaggcaatggaaaaaggtcttacttcaggaagaggccctaccggtgtagcagcagctgcattatacattgcatctgtgctccttggagaaagaaagactcaaagggacgttgctgatgttgcaggagtaactgaagtaactataagaaacaggtataaagagctaactgaacagcttgagacgggagttactttatag

SEQ ID NO: 714 - DNA, 2106 bp, Methanobrevibacter ruminantium
  source 1..2106: mol_type = genomic DNA
atgaagcttagtattatcatacctacatacaatgaagaggaatatcttcctaaactgattgaaagcataagatctcaagagtttacagattatgaagtcattgttgcagatgcagacagcaatgataacaccagagagatagctgaagcttacggatgcattgtcgtagatggagggcttccagcaatcggaagaaataggggcgctgcagttgctaaaggagagatactgctatttttagactctgacttggaattgaccgaacattatcttgaaaatgtcatagaagaatttgaagaggaagatttgggaattgcaatcacccagatgacccccctctcccaaaagaaaagggacatctatcttcataacttagccaattggtttatgatagctgtagaaaacatcaagccacatggtgcaggatgctatggaatcatatccagaaaggagctccacgacgaatgtggaggatttgatgaaaacctgacatttggagaggatacagattatattgaaagagtggctgagataagtcagtttaaagtccttagaaatgctaaaataggagtttccacaagaaggcttgaagaggaaggactttataccctccttaagcaatatggaaaaagcactgtaaatgattttaggggcaaaagaacaagcgctgaagatttaggatatgaatttggacatgaatcaagctctaagcttgaaagtggtgtgcaggaatcagttccaaaacttgaaaacggcgtgcaggaatcagttccaaaacttgaaagcagtgcagatataagttctcaaatagaagataactctccaagtcttgaagatgaaatagacattgaaagtgaccactatccaataactgctcttgacagcacagatatggagaggattgcagaaaagtccaaaaacagaaagcaaagttcatttaaaagaaggctcaatgagtttaaggacaaggaatttgaaaccaacgagcttatcgaatatgaggatgaatcaggccatataaaacatgaggcagttggccttgacagccgaaagaagatattctattccatctgtggagagggaatgggacatgccatccgaagcagcgttatcctagaacatctaaccaagcatcatgacgtttatatattctcaagcgaacgtgcctataagttcctatctgaaaaattcgacaatgtatatgagatcggaggattcaatacagtctatgaaaacaatgtggtgcggactaaaaagacattcttcaaggcaatgaaggcaaatcctacaaaccttaaggaaggatataacgtgctctataaggaatgcaaaaaggttaagcctaatataatcatatccgactttgaaaactactccagcatgctaagcaagcttatgaacattcctcttatcagccttgacaatatccatatgataacccaatgcgattatgactatccgcctcaccacaaggcagacatgcttactgcaaaggcagttacaaaatcatatatattacgtccaaaaaggcatataataaccagtttcttcttcccaccattgaaacatcctaaaatgactgccctttatccgccagtcctaagaaaagagataatggatttagaaagtgaatctggagaccatgttcttgtctatcagactgcagagtctagcataaaccttatggacgaacttaaaaagttagatgaagagttcattgtctatggcttcaacaaggatgggactgatgagaatctgacttatagagccttcaatgaagacaagatctatgaagacatgagaacagccaaggcaatcatagtaaatggtggattcaccatgatttcagaagccatttatcttaaaaagccaatctacagcacaccagcacataagaactttgagcagattctaaacggcttttatgttgaaaagttaggttatggagagtcacatgaggaccttgatgttaagaagatagagaagttcctggataatcttgatacctatcagaacaacttgaataaggttgaaaagtgggataatactgcaattctagaagatcttgatttaagcattgaaatgtatgcaaagaagaattattaa

SEQ ID NO: 715 - DNA, 1059 bp, Methanobrevibacter ruminantium
  source 1..1059: mol_type = genomic DNA
atgaatttaaaaataaacaaatatattccatttggaataatattaatcatacttggagggtctttatacttcttaagtggcatagaccaattcataagaccatttacccaacctattctaatgggctcctcaaagggtaaggacatactattctttgttctatttggaataacaatcatcttgtcctccattggagataatgagaggattcataactatcttatgaatctatcaattccagaaaagcttaaggacaaggacttttatttaaagctctccttgatcttgtttttaataacagcaatatcaggattagctgtagaattgtacttaagagcatctcttgggcttaactggaatacaatacttgtaatcatgaatcctagccttacaagcacaagctttctccattcccatttatataaatcaatatttggaattatccttggaatcttcttaagccatattccagcaggaatccatacaggaagctcattaagtagctatgccccaagtgtgataagcctgctctttatattgattccaataacttatatttctatggttctatctaatcaaaggcgaaaggcagcttctagaatacttttagcctttacaagcactcttggaataatcggattgattgacggaggcctctttgcaactcctgcaatcggaggaatctatggaatccttatattgatgtacaatgaagagattttagatggaatttcagactttataactgaaaaagacaaaagagatggaataaaagagaaattaaatgaggaattaagggcgattaagtcaatctttaacaataaaaatataaagaaatatttgaagattgccttgcctcatattgcattgattctaataatcatcttaaggttctctgttgcattctatggtgcatgtccagattcttatgaattgattatatctaatggccacgatcttgatttagatgaatatgatacattaaatatatcagaaaatggagataggactgttgttcatctttccaatcaatataatgagatggaactttttaaatga

SEQ ID NO: 716 - DNA, 738 bp, Methanobrevibacter ruminantium
  source 1..738: mol_type = genomic DNA
atggttccattgcagtttttcctattcacttcagttggagttgacccttcccttgccatgatggtctctcttggaaccagccttgccatcattattccaacggcgtcctctggagcctatcagcatcagaagaagaacaagtccattgtcagaccaggaataagattagctgtttttggaattattgggggattctgcggaggtcttttagcaaatatggttcctacaagaatcctgcagatgatatttgcctgtctattgatttttgtagctttggatatgctatttggctccaggtccgatggggaaaaggcattaatcgatttcaatttgttaaatggaggtatcgttggattttccataggaatcatctctggattgcttggcgttggcggaggagtctttttgattccatcactttgcatactgtttggattcagcttgattgaagctattggaacatcctctgtattcattgcatttacagccattggggggcttatatcttatatttacacaggttttggagtaaatccaatgccttattgcttaggatatgttagcttgataaactttgtagtgattgtattgttttcagttccgatggcgactataggagctaaattagtttataaattgcctgagaaaagattaaaacaaatctttgcaataattttgatttatatggcaattaaaatgcttggattcgatccaattagcatcttgttaggtctataa

SEQ ID NO: 717 - DNA, 915 bp, Methanobrevibacter ruminantium
  source 1..915: mol_type = genomic DNA
atgccatctgaaaaagtgaaagaatttaatgaaagccttaaaacaaaggaaggaagagacaaattcttcaagcaaatattttgtatagctattggaacagtggtaggtgtagccacatatgccttctgcttatactttaatcttgcaatattcggatggaatattggattggcattatcccctctcactgcaggatacgctgaaagcattcttgctaaaaagatccttaatgagagcacaggtgcaataagcgcattcattcttttcataattactgtagtctacggattcttcatatccaactctaccttaggattcaatataattacagcaggaagcgcagtggtaattattcaagcagctatgcctacagctacaaactatctcctgcttgcagtaggagtgggaatcctaacttatgtaacaggtttcttaaagaagttacattctgccttatataagggatataagaaaatatttaagagagagccaaaaagagctgaaagatactatcagaagcaagcaagccaagtgcatgcattctatgatgaaaatctggatataaatagtttaggagttcttataatgacactggagtatcctcctaaagaattaaatatcatagagcaaaagggaatatatgaaaccagacatattttcggttccaaacagaaggaagatataaaatccggacttgaagactccttggaagaagaagtcataaatagagtaaagcttgcaagagataagacattagttaaattgattaaagaggttaaagccgacggatgcaatggtctgatgcatttgcataccacttatgaaaccctagggacagaaaagggagaccacattgcacaagtggttatgagaggaactggtattgttattgaaaaagaggaagaggaatattaa

SEQ ID NO: 718 - DNA, 327 bp, Methanobrevibacter ruminantium
  source 1..327: mol_type = genomic DNA
atgttattatcttctacaagtactttagaaagcaaaaccatactaaaataccatggattggttagcggcgaatcattaatcggtgccaacatctataaggatctcttctctggagtcagagatgttgtggaaggaaggacttcaacttatgctgaagaacttgacaatgcaagaaatgaagcaattgcaaccatggaagaaaaggctaaggaatatggtgcaaatggaatcataggattgaaaatatcctataacaaccttggcggaaccatgggaaacaccattttagtaaccgtttatggaactgccgtaacttatgaagactaa

SEQ ID NO: 719 - DNA, 189 bp, Methanobrevibacter ruminantium
  source 1..189: mol_type = genomic DNA
atggtagaaccacacaaacattgtccagtatgcggtagtccaataccaatgaaagaaagagtatgctctccagactgtgagaaagtattagaaatgaatcagaaaaacattagaaaaagcagaatcatgttatttgctgtgattgttgtctttattctcgtatgggcatatttcatgttctttaaataa

SEQ ID NO: 720 - DNA, 795 bp, Methanobrevibacter ruminantium
  source 1..795: mol_type = genomic DNA
atgaccggattaattgacataggccttaatttgatgcacagatcatttgataaaaacagggaagagattatcaataatgcaatatccaatggagtgagccagtttgtaataactggaacaagcgttaaatcaagcaagattgccttaaactatgcaaaggatgagaaatggaatggaatactcttttcaactgcaggggtacaccctcatgatgcaaagacctgcaatgagaaaacccttgatgcattgaaggaatttgctaaaaacgattgcgttgtagccattggagaatgtggacttgactataacagaaactactctccacaggatgttcaaagggaatggtttgaaaatcaggtgaaattagcccaagagcttgacatgccattgtttctccatgaaagggaagcccatgaggatatggttaagattttatcaaaatatcctgagatgtgcgagaaggcttgcgttcactgctttaccggaacaaaggaagaggcagaaaagtaccttgaattgggatgttatattggagttaccggctggatctgcgatgagagaagaggacagtcacttcaggaagctgttacagtcattccacctgaaaagatgatgattgagactgatgctccgtttcttattccaaggaactttccaaaaaagcctaaatcaaataagaacaagccggaatatttgcctcatatcctaaatacaattgcagagtataaggaatgtgatagcgcagagctaggtgaggctgtaagcaagacaacaagagagtttttcaagatatga

SEQ ID NO: 721 - DNA, 678 bp, Methanobrevibacter ruminantium
  source 1..678: mol_type = genomic DNA
atgagaattgtagtggctattggcggatccatactattaaagacttatgatgcacaaagatttcaagagtattcagacattctaaaggacttaagcaatgaacatgagatattcattgtagtagggggaggaaaacctgcaagggagtatattggagttgcacgtgatcttggagccggagaggcaaaatgcgatgaccttggaatagaagtcacaagagtcaatgctaagcttctattgcttgctcttggagactatgcttatcaaaaggttcctcataactttaatgaagctcaggaatactctgcaagcggaaagatagttgttatgggaggaaccgaacctgcacacagtacagatgcagtatctgcaatattagccgaattcgttcaagccgacatgcttatcaacctaacttcagttgacggaatgtataccaaggaccctaataaattcgatgatgcagagctcatttcagagattacagctacagacatgatggatttcattagaaaccaggatgtaaaggccggaacatatgaattctttgactttactgcaattcaaatgataaagcgttccaatctagagactgtaatagccaatggattcgaacctcaaaacctaatcaaagcgattaatggtgaaaagataggaacaagagtcatatctgattag

SEQ ID NO: 722 - DNA, 7728 bp, Methanobrevibacter ruminantium
  source 1..7728: mol_type = genomic DNA
gtgagtttaaataaacttaagattggtagagtttttatttgtctttttattttagtttttatttcttgttcaattaattgtgtttttgcagttgatgatttagctttcaatgatacatattattctgatttagattctgttaatggggattattcaggttttcttagtgaaggagactttaatggaggctcttctgtggttgttgatggtgaaattgactcctctccaattgccaataataaaaagaattcttcatttgcccttactagcaaaaaggattcatcttcaccttctatttccacatcatcaaaaaacaataaaaacaataaaaacacttcttctttaaaggaaaacaagaccgccgccccatcttcacaacgtgtattttatgaccgcgacatagtgtctgatgaagatgtaatcggacctggtcatgaaaacttggactggattaacctaacacatgtcgacgacagcctattttcagataattcaaaggaagatggagcaaaaggcagcaagattgccaccaccattgtcgcaagcaacctagttaaatattatctcaatgccagccaactaaatgtcggcttgaaagactccaacggcaattacctctccggaaaaacaatcaatttcacagtaggcagcgcttcatacatacgcaccaccaactcatcaggcagatgctccctaacaatcaacctaatgcctggcgtctatactttcacaatcagattcctaggagactcctcatattccccaagcagcaaaaatgtcaacgtcacagtcctaaagatgcccacaagcatcacagcaagcaacctggtgaaatactatcacaattcaagcagcctaatcgccacattaaaggacacacatggcaaccccctatccaacatgacagtaacattcaaaatgggatcaaacaactataaccgcaccaccaacacaaacggaaaagccacactagcactaaatatgatcccaggaaacttctccgtaaaaataagcttcacccacccaagatacataacatccagcaaaaacgtaaccgtcacagtcttaagcatgcctaccagcataagcgcaagcaacctaaacatgacctatggagacggcagctacctaaacgccacattaaaggacgcccataacaacccattatcaaacaaaacaatccattacaaactaaacaacaccatatataaccgaactaccaataataacggtcaaacatccctaataatcaacataaaccctggaacttaccaattcaatatctatttcaacgaaaactattaccaaaactccaataaaacagccacagtaacagtcaacggcatacccaacagcataatcgccagcaacctagtggcatatgtcaacgaatcaccaactatagtcgcaaccttaaaggacgcaaacaacaaccctttatcaaataagaatctgacatttaacagaacaggcacactaacaaacatcttaaccaatgccaacggccaagccacatacaacctaaacggctgcacaggcaatttcaacataaaaatcacattcaatacaaccggctacgcattcagcagtaaaacagtaaatgtaaacataaaattctggccatccacaatcactgccaatggtgccacaacatactttacagacacagtacagctctcagcttgcctaaaaggagaaaacaacacccctctagcaaacaagaatgtcaaaatcacatatgccaataagaacataactcgaaccacaaacagcgcaggaaatgtctattatgactttaacgaaaatgtaggcacttacaatgtaaactttagctttaaagagaactattaccaaaatgcttcaaaaacagtcacagtcacagtcaataagatgccaaccagcatcactgcaagcaatctaaacattacatatcaagacggcagcagcctaatcgcaacactaaaggacagccacggcaacccaatagccaacaagacagtcaatttcaaaatggaaacaaacaactataacagaactacagatgccaacggaagggcaactctagcattgaatatgattccagccacatttaatgtaaatatcacattctcccacccatcatatcaaacatcaagcaaatcagtaacagtaacagtaaaccctatctccaacagcataatcgccagcaacctagtggcatatgtcaacgaatcaccaactatagtcgcaaccttaaaggatgcaaacaacaatcccttatcaaataagaatctgacatttaacagaacaggcacgctaacaaacatcttaaccaatgctaatggccaagccacatacaacctgaatggctgcacaggcaatttcaatgtaaaaatcacattcaatacaaccggttatgccataacgtcaaagacagtaagcgtaaacataaaattctggccatccacaatcactgccaatggtgccacaacatactttacagacacagtacagctctcagcttgcctaaaaggagaaaacaacacccctctagcaaacaagaatattaaaattacatacggcaataagaacataacccgaaccacaaacagcgcaggaaatgtctattatgactttaacgaaaacgtaggcacttacaatgtcaatttcagttttaaccaaaactattatcaaaatgcctcaaaaacagtcacagtcacagtcaataagatgccaaccagcatcaccgcaagcaatctaaacatgacatatcaagacggcagcagcctaatcgcaacactaaaggacgcccacggcaacccaatagccaacaagacagtcaatttcaaaatggaaacaaacagctataacagaactacagatgccaacggaagggcaactctaacattgaatatgattccagccacatttaacgtaaatatcacattctcccacccatcatatcaaacatcaagcaaatcagttacagtcactgttaatgagatagcaaccaatcttgcagtaagcaatctaaatatgatctatatggacggcagtcatctagccgccactctaaccgatggcaataacaatcctttagccaataagacaatcatttataccttaggcaatgtaaattataattacaccactaataatagcggtcaaaccagcttaatgattcatttaaatcccggcacttatcagtttacagtccagttcagcgaaagtcattaccaatcagctataaaaacagtgacagtaactgtaaaccctatttccaatagcatcattgccaacaatctgcttgcttatgtcaacgagtccccacatattcttgcaagcctaaaagacagcaacaataatcctataatcaataagactttagtatttaacagatcaggcaacataactaacatcataaccaatgccaacggccaagcaagctacaatcttaacggatgcactggcaatttcaatgtgacaatcacatttaatgccacaggctatgcattcagctcaaaaacggtaaatgttaacataaagttctatccatcaatcatatcagctaatggtgcaacagactattatggcaataccattcatctgtctgcatctcttaaaggagaaaataacactcctcttgcaaatagaactgttcatatttcttatgccaataagaacattacccgcacaacagacagtgcaggcaacatctattatgattttagagagattccaggaatctataatgtctgttttaattttaatcagaattattatcagaacgcttcaaaaacagttagcgtagttgtccttaatccgccatctcctaatgttaatgtaagcagcggtttttataatgtctcttatttgctaattaatgtgtcctctaatatttctggaggaattttatattctagtttggataatggaaccacttggtatactggagaagacaatatctgtttcaatttaacagaaggcaattggtctgtctgttcttactattctttaaatggtttcaatagttctattgtttataataattttattattgatggtagtgctcctttagtttgggcaagcaatggatctgggttttataaacgttctttagatgttaatttaacaagtttggatattgtagataagaatcctgtcatatattacactttggacggtagcttgcctaataatctaagtgctatttatactggcccaatacatattaccagtaattatggcctaacaaaattacagttctatggtgttgatagatttggacataatagttctattgtttgtgtgaattatttccatggaaattatgtggctaatttgaatagtggaaaatattttgatagtgtacaagatgctattgatgatatggacactataaatggtgatgttattgaagttaataaggatttatctggagcttgtgatttgaataaaagtgtctatttgcgctcttcatgtctaaataattttacttggagtcagccgaatatagttattcatagcaataattctgttattgagggttttgattttgatggaagttctatgcattctgttattttagcaggtgtttctaattgtgttataatgaacaatagattttccgttgttgaatatggtatttggtcttccttaagtggttataataatgttattatgaacaataatttttcttcttatggtttgtcaatttcattcatttatttgtctcctatatatggtggagagaatacttatctaattaaagataatatttttaatcattcacgatgtggaatatgcttagaatcttctttgaattctattattagtggcaatgttttcataggttctaattatggtttaaaaattaacggaaacaataattccgtagtttataataatttaagttttaattcttatgcggtttgttgttttggagacgataatacattaatgtataataatattgttaataatgtttatggaatttatggagattattcaaacttgactgtaaattttaatcgtttttataataatagtgctttcggcctttatgcatctggaggtccaattaatgcttgtaataattggtggggtcataataatctttctgtaagcgaggattatggatttgatatttgtcttcaaacagacaatattgactatagtagttacataattttaaaaaattacaaatcctattttgaattaagaaataattttatagataatgtttcttgtgttgttgatttaaattggaataatttaaaggagtatgtgggagagtttattgatggggtaaatgttaagtttgttgatatgaaaacggggccttatcctcattggattgctattgaatctggtcaagcattatataaaacttcatgtgtaaatcaggttaataatgttattattagtttggatgatgagattcaaactttaaattattccagtttttcctcttcggtaaggttttatataaacactacaggtttcataagcaataatagcggaaatttggataattttgttgcgaacgaaaatggatcttattttacttttgatgttattttagatcatgatgtcgattgggtcagttatgtttggagaaatattggtgattttaaatctgaattggacttgattgttgatggggatattgtttccacatcagttgtggagagttcattttataggaataatttaaataatatctcaagcaatgtttttgatgcaatattgttatataatgattggtattatagtcgtttaaattgggctaaggcagttgtgtatgtttatctttctttggagtataatactactgatcttaatgatgttcaatacatttatagtaatgttaattggggatgtttaagtcctgaaaggaagaatcaactgttaaacgatcataatattacttttaatgatgcattatggaatttaatacagaactcctataacttgtcagatgaggatgtgatttttattaaaaatcatcataaatctttcaatgattctgtttgcgtttctgctcattattatggaaatgataatgagataataaatttaaataatataaataataatacattagcttattccggaggtatggtaattggctcgtggaaggcacctattatgtatgttgatggttcttatcaacattttataggtaataactcggacaatagtacggatatttttacttattatcataattatgggaatggcagtattgattgggcttattcaactaattatggtaatttaactaatggcacttatgatggcttgatgacttttacttttgcaaatgataaagttaatggcagtgttttaaatcattatttaagtgagaaaaatcgtactgatgttaatggcagtctggtttattccaatggttttatgaaagcggcatatggcagctttcttgaaggtttgttggttatctatatggatgatttggtggcagatcttgtttcttcaagatataatgcctcttgggaaagggtcagtcctatggttatgagtgttagagatgaccatggcaggctagtcatgagcggagagtctgatttttattttggccgtaagcttttatgtgatgatgagaatataatcaagagcttttatttcgcttgttcaagtgttttctcttccattgaacattatgttcaccaaactttattcccagaccgtatagggtatggtgttacagttgatttgggccgtcttttagctgatggtgaatgtctttctattgttgatgaaggtcgtttcatttatatctgtcctaatgaatctgatgagatttattatttgtgctttgataaattgactggaatcttgatggatgcctccatacttggcaatgatgcttattgctacagtaatcaacagacagaatgggcttttacattaggggaggagctgatagataattgtgatttgatttgggattatttaaatggattggatgtggatatttgtgctttgaatgtttccacacaagacatgttaaaggtttgttatggattcaatattctatctgatttgtttacctgtgctttattgtccgaagtaaatattctaatagaatctattggtttggaggaatcttttaatgccattgttcctttagttggagtattagtttcttctttggagaatattggatcttatgttttagatgaatacctgtctaatcctaagtttttaagcggtgttgtagggggcttattatttgaggctggaatgatagctacatgtacaggtgtaggggcccctgtaggcttggctttaatgggtgctggaacaatatgcacagcatatagctcaggattaatagattataatgacaatgatgggatttacttcaacaccactcttgaaaatcaggccaatttcggattttcaatgtcctgtaatcttattagtggaggtattgggggtttagcatcttcttctgcttttaaagctacagggtctgaagttatacaaattgcaagtaaaaatgctgtaatagactcaaaaggattttatacaacaactatttctactaaatatgttgcatatgaaggttcaagtaatactgtaagtagatatgtgattaatcgaatggtaaattctcaaaatccttctaaaaaaatctttattttaaaaggatgtaggaatattttagattctttaatgcaagattgtatatgggaagaaagaaataatcttttaataaagtaa

SEQ ID NO: 723 - DNA, 567 bp, Methanobrevibacter ruminantium
  source 1..567: mol_type = genomic DNA
atgggagtattagctagtgttgctggaggcatattttttgaagcaggcatgattgctacttgtacaggtgttggtttgcctgtaggtttggctttaatgggtgtaggtacaatttgcactgcttatggctctggtttatttggcatgacagacacgggcaatttctattctaatctaactgatgaaaatttagccgattttggcttttcaatgagtttaaatctcattgggggagggtatagtgcagctgctgcgaaatctacattaaggactgtaggaggtaaatcggttcagatttccatatctaaagcggcatttgcaagtgaccaaagaggtgcatacaccacttttcatacaattagttctaaaacatatattcaaaaagttgaaaatggtgcattcagtaactgtggagaatacttaatagaacaagaatttggaacaacagtaattgaaaatataagaaaatcattaagagttttatcaattgattatgctttaaatttttgttatgattttcttaaagaaaattatataaagagcttagatggaggtttatatgtataa

SEQ ID NO: 724 - DNA, 168 bp, Methanobrevibacter ruminantium
  source 1..168: mol_type = genomic DNA
atgaatgctgcttatggtagttttcttgagggtttgttggttatctatatggatgatcttgttgctgatgctgcaggggagcgttataatgtcaattggacacgtgtcagccctatggtcatgagcgttcatgataatataaaaggacatatcttacccgggaagtga

SEQ ID NO: 725 - DNA, 1359 bp, Methanobrevibacter ruminantium
  source 1..1359: mol_type = genomic DNA
atgacaaaacttataaaaagagaagttaaaagggaatataacgaggaaagtcctctaaagcttaagatagctaatgccatctctacttttacaaatcctccgattatttgtattcctttgtttttattgatttcatttgtgcttgcatctaacggaaatccgttttcaagtagtttcagctttgactggatgctatttgccaaatgcgagatcatttcacttgtatttgcatctgtccttcctatggcaatcataatctactgggcaaagaagctgaatacagataaggacatctcaaatcgtgaagatcgcttcattccccttatcgtaggggtgttgtcctacctgattggctttgtaatatcatttttcttcgaattgccaaacttcctgacaattcttctcttatgttatgcagtaaacacattcattgtcatgctcattacaagcctatggaaaataagcatacatacaacaggattaagcggacctgtagctgccctaatcatgcttcttggacctattggtgcattatttggacttttatatcctgtcctaatctggagcagggtcacccttaaaaagcatacaatggctcaggcaatagcgggaggaatattcggattcgtattcactgttggtgaaagctatctttatatgcgcctgtttaaaatgagcgttccaggccttgtgccgttagcggaatgcttctggatcatatttgcccttgttgcctgccctatagttcttggaatatgcgggcttttggaaaaaagaggaatcgaatcagttataagggcaaagctattccacctattggctttcatcggatttgcagcattctacttctacggaccctctagcgcagtcttgattcttatattaagcgctatagtaagcgttttagtaacaatatttgcaggagatacattctcatggtataagggaatcagcagaggacttgaaagggaaaacctatcaatagtgctctcacttgcttgcggtctgatttggatatatgtggcaatgaattacttcaatatagaaagtgcaataatcgctacaataattgtggcctttgtaggagcaatagcagagcctgtggcaatcaaatatgcgagatataagttccctatgaagtctttgcttggaaatgatggaaataagtcaatagaaagctctgtggtggcattgattgttacaatgattattcttctattgtttactcaaaacgtatttgtttctatagctgtagggcttctagtctgtctgattgagacattcgttccaaaggaattggagaatctggttattccagttgcttgtgcaattatacttggctttttgcttcattattaa

SEQ ID NO: 726 - DNA, 3789 bp, Methanobrevibacter ruminantium
  source 1..3789: mol_type = genomic DNA
atgttgaataaaaaaataataataattttaacatttattttaatattgtctatttcttcagcaagtgcatctgcagattcaacagatgaaacaatcttatcagatgattctgcagggcttatcaatttagacaattctaataataatctttatttagatgataatcaatttaatttagctaattctaattcagataattccaataactttaatctagatgattctaattcagataattctaacttttatctagatgaagatttagacaataaaatcaatgaaaatataaaaaacactaaaacaatcttaaaggagaataattcatcaattgcttccttttcaaacctttcacatattctatcaaaggcttcagcaggagatacaataatcttagaaaatgattataaatatgattctgcctatgatagtcaatatcagggaggaattgaagtcaattccatcacaatcgacggaaacaaccattatatcgatggaaatggagaggccagaatattctatttggcttcagacaatattgtcttaaagaacatcaagtttataaacggtttcaatagtcaagggggagcaatctatgcaaaaggaacaaatgtcaatataactgactgcatatttgaaaacaatcttgccccagataatggaggtgcaatctatgttgaaggaaatgcttcaataaaatccgtaaaattcataaataactctgcaggatatggaggagcagcatatataaacgattcctccattcttgaagatctgatattcacaggcaatgtggccaatattgaagggggagcagtttacattggaggctcaagcaatataactaactgtatttttgatggaaaccttgcagataagggtgctgcaatatttattccagctaaagaaagccctatgactccaagtgaggatgttccttttgatgaatcagatttaaattctacagatatggatttagattctacagatatggatgataattctaccgattacaatttcacagatatggatgataattctaccgattacaatttcacagatatggatgataattccacagacatggacgattaccctgatgaaagcgatgaagacttcccagatggaggagattatgtttttccagattggtgggaaggtgatgaattcgaatatgatggaattgaatgcataaacgttttcataactaattccacattcatcaattcaaatgatttctataggggagccatcttctcagagcacgacaataacatatccattgacggatgcctatttgaaaacatgagctcccagtatgctccggcaatctactgcaacgtcatggtaaacatactcataaacaatactggcttcaagaatctccatgcaaatggaacaggtggggcaatggcctttttggataatgtatatgcaatagtagataactgcagcttcaaaaacatatcttcctctaaaaacggcggagccatattttatgattcaaacagttggggacactcctctcctgtatcattaattgtccttaattcaagcttcttaaattgctccagcgactatgggggagccatagttgttttaggaggaggattcaaatctaaagacagcagcttcataaacaattctgcaagatatggggccggagcggttcatgtctatacagattatgacattttagtttatgacactgtattttacaacaaccgattgaatgaggacaatacatcatttggaggagccctctttattgactctgccgaaaaggcgataataaataacacccgatttgtcaataactcaaatgatgcaatatatgcttatgaatctcgaataaaaataaataacagctatttcgaaaacaacgatgaatatttgcgcagcatctatacagaaggactgatattaggtgataacaagtataatgatgacacattagttgatttggattatgaccctacatatatcattataggaacaggagaaggattaaagctggatttaataaataacacaatagatgtaactacaattccttcaagctttttagctgcagactggggctggatgagcccattcaagaatcaggatttctcaggaggatgctggtgcttctccacctgcgcagcgattgaatctgcattgcttaagtcaacccaaaagacctatagcctttcaatgcagaatatgcaaaagctctccacagagtattccaaatatggaaacaaccatattgtagaggctggatcaacaattgttgctttgcattatgccctttcctggatgggagtattcccagaggagtatgacacctttgacatgattggaaaattaagcagacaaatctctacaaacgagaccattcacattcaggatgcagcattcacctatcctagaagcatatcctatgatattgaccaaataaagcagactatcatgaagtatggaactgtaaccagtgatttctatgctgtgaatgaggctccaaacttcaatgaaaacacttcagcattctattgcaacgagactgacggaagggatgcaacccacgctgtagctgttgtaggatgggacgacaactatccggcaagcaatttcttagtcacacctccaggagacggtgcatggattattaaaaacagctatggtgaagaaaactatgaccatggatatgtctatgtgtcctactacgatacagtattcaatattgatggcggagttgcatatctctttgaaaatactgaaaactacactaaaaactaccaaaccgacattggaggagacatattcctagttaacgacagcgatagctattcctataagaacagctaccagtcaataggagatgattacattagtgcagttggaacctgtttcaatgatgcagatgaggactatactgtagaaatctatgtaaacaacgtcttaaaaacaagccaaagcggtaaatctccatttagaggattccatacaattaaactggaaaaccaaatccaagtaaagattggagacaatttcactgtagtaatgaaaacacattcagtgcctatagtaaacacatcaagaatgcatttcaaggccaatgtatcattcatagacaatggaaccggatggaaagacgcaagcgatgacaatgcgacagtgctcttaaaggtctataccatggagactctaagggaaaatcttacagacagaatccctacaagaatagactgcaaaaacatgacaacaacagctgtagcagcagaggacggaagaataggcaagtactttgtagtcttcttaaaagacgaaaacggtacagccctatctaataagccaatcaagataggtttcaatggaagggtctacgacaggacaacagatgagaacggaagcgccaagctccaaataaaccttgcttataagggaacctacacattcgctataggtttcttaggagataatgattatttaggagcatttgaagtagctaagataactgtaaaagtccagactcctaaattagccacttcaaataagtcttataaggcaagtgcaaagactaaaagcttgactgccacatttaagactgctaatggaaaagttgttgctaataagaagatcagtttcactgtaaatggcaaaacttatagtgcaaagactaattccaaaggaatagctactgtaaaggtctccttaaacaagaagggaacttatagttttacagttaagtttgcaggagataatacatttgctgctgttagcaagaagggtaaattgactttaagctaa

SEQ ID NO: 727 - DNA, 1245 bp, Methanobrevibacter ruminantium
  source 1..1245: mol_type = genomic DNA
atgagtgaggtatcctcaaaggaattatatgagtttaagaagacattaaaagaactcgcagaaaagaaaggaaaaggaacagaacttgtttcaatgtatgttcctccagaaaagcaattaagtgatatcattaagcagatgagagacgaattaggacaaagcgctaacatcaaaagcaaatccacacgtaaaaacgttcaatcagctattgaagtaatcatgcaaagaatccgtatgattacaaatgaaaacaaggatctccctaacggttttgtgctctttgtgggaatgattcctaaaggcggtcccggcactgaaaagatggaaactgtagtaatcgaaccgccggagcctgttcaaacctattggtacatctgtgacagcacattcttcctagagcctttggaagacatgattgcttcaaaggaagtctatggtattgcagttatcgacagaaacgaagcaaccatagcaactttaaaaggtaaaagaattaagattaccgctcacttaaccagtggtgttccaggtaagcataaggcagggggacaatcacaaagaaggttcgacagggtcatcgaacaattggctcatgagttcttaaagagaatcggccagcatatggatgacgacttccttccaatcaaggatgaattgaagggaatcgttcttggaggtcctggatacactaaagaggatttctacaatggagactatatgcattatgagcttaaggacaaagtcatcacaactgtagacacttcctacactggagaatttggtattagggaaaccattgataaggcttcaggtgcattggaagagttaggtgttataaaagagaaaaaacttgtccaaagattctttaaggaacttagagatgacaacggcctttattcctatggtgaaaaggaagttagaacaaacctccaaataggtgctgtagatattcttcttctctctgaagaccttaaatcaaaaagattaaccttagattgtcaggcttgtggattccatgctgaagtaacccaaaaggaaggtcaaaaagtagaggatctaacctgtcctcagtgtaatgataagatgaaaatcacaaaagaagaggatcttattgaagacctttcaaatattgctgaagacttaggcactgaagtggaaatcatttcaactgaaaccgatgaaggtatgcagttatatagagcatttggtggtatagcggcgattactaggtataaggtaaactaa

SEQ ID NO: 728 - DNA, 654 bp, Methanobrevibacter ruminantium
  source 1..654: mol_type = genomic DNA
atgagtgataaagaggtttatggcatagtattgtctcaaaagttaacaaaggacaatgtaaatatgggagttgtcatggggaccgagaaatttacattgaaaaggatagagcttaatgaagatgtgagattaaagccccaagataagattctgattacaaaagacagcgaagaacttaaaaagaccgatcaaaaattaagctatgatgacttaagcaatgaagaacagatcgaagctgaaaaagcaattcatagcattgtgattgccaatgaaaacaagtatgtaggatttttcaataagcaaagcaaggacggaactcagcttcacttattggaaggcatcagccgaaagaactcaatgaaaatcattgaagaaaaggaattgaatggcgactttgaaagctttgaggacattgacaatagaatcagcttcattgacgacagcgaagacctaattgcaaaaagagtattatatgaattaagcgaacttaataaggtaaaaaaaggaagacctacttatttatttgcaagtgttaaaaggtcatctaaaaaggaagttcttgaattggatgaatttgaggatgatgacagtttctttattgaaaagttaaaaagagagggcttagttgaacaagagggaaaaagaattagataa

SEQ ID NO: 729 - DNA, 426 bp, Methanobrevibacter ruminantium
  source 1..426: mol_type = genomic DNA
atgactgatttaaacacttgctctaatgaaaagttatcctttaaatataatgacaaatgggaattggaagcaattccattggaaaacaatcctgactgcattgctacattaagctatgaggacggcagcctattgaatgtaattgcattcccatcagagctagagtcattagacatctttaaggaagttgttgaagcaagcttaagggatgatggggcagagatagtatcctctgagatagcaaatgtaaacaaaaggccttcaattcagattcattccaaggtaacaacccctgaaatcagctttcaaatgttttcagtcatcttcctggaggaaggattcttatacatatttgaactaagggcggtaagcgaaatagtccacgaattcatggaaattgtaaaaagctttgaaatcctagaataa

SEQ ID NO: 730 - DNA, 804 bp, Methanobrevibacter ruminantium
  source 1..804: mol_type = genomic DNA
atgattatcaaggctgggaaaatcaataaagctagaggcaatatagttctcacaattggtaaggaagatgtcaacaagcacaatcttgaagatggagacttcattatccttacaagtgatgaatatgaggacctaaaggcttcctctgaaattgaagtctctacaatggaagtaattcccgatgatgaggcagtcatcaaattggaatatgacctaaaggaagcaaagtcaaaggaaaagatccttttctccaaggttgaagagcttgaaaagctcaatttagaattgactacagaattatccaagattgaaaaggagaattatataaataaaacagtattgacagattcagaatccggttctcttcttgaagaaatcaaaaatgtcaacgataaaaacgaagagctgaattctgaaataaagaaattaaacaaggacctaaaggaatccgatgaggaaagaatcgaacttctacaggacatgaacgtattaaagacaaagatgagctttgatgcaggagagatttcaagacttagggaaagggaatccaaatacagagaagtattggagattatcctaaagtcaaataagaacatccttgatgaagcggtcaataagacagttacagcaaccatccatgagataaacaaggagctgtcacagacaggattaatcagaagaatcagaggacttacaattgtaagagagcctgaaataagcaaggagtccatttccagcaatgcatataaacagctggaaggagtcattccagatgaatatttcctggattctccagatgaataa

SEQ ID NO: 731 - DNA, 504 bp, Methanobrevibacter ruminantium
  source 1..504: mol_type = genomic DNA
atgggttattttagaggtgaaataatggaagaaatcacatttaatgaagaaggaatcaaatttaagtatttaagcaattggagagaacaggcaaaagagtcagttggcccaaattgcataaaggcattggttaaggttgtagagggcaagccttccacaatcacagtttataaaaacgatgcaggagatgctaaggctgttgcccaattggaagagcctttcaatgaatcattcaaaagtcaaggttggaacattgtaaaatcagctattttaaatctcaacggcaatcctgtctttaatattgtatccgacgctcaagaaggagatacaattttagaaaacaatacttctgccataataaacaatggaaagatgtatgtatttgaattgatgcattttaaagacttcccatatgcatataatgattatttgtcaatcatggactctcttgaatttgtaaacgaagaggaaatcgaagagactgaagaagaatcagaagaataa

SEQ ID NO: 732 - DNA, 423 bp, Methanobrevibacter ruminantium
  source 1..423: mol_type = genomic DNA
atgtctaatctattccaaaatgaccaattaagtttcaaatatccaaagaattggaaactagtttcagatgatgaaatcgaaggctgtttagctatcttagattccgatagcaaacacagcagagtgatgatattcaaatacccagaggaaggactgtcattggaatatcttaaaaacgcaattgaagacattccaagagaagagagcctaaaagtaatatcatccaaccttacaatattggcaaacaaggaaacccacgagcttatagcagaagatacaagccatgagcctcctttaagaacccattcccttacaaccatccacaatagggacgcttatggattcaatttcatgggattcggattggacaatccagacgaagagggattccttttcatgtataggactcttaagtttgaataa

SEQ ID NO: 733 - DNA, 612 bp, Methanobrevibacter ruminantium
  source 1..612: mol_type = genomic DNA
atgactttaaaagaagaaaaagacaaggtccgaaagtcaatctatgacaatctattcaataatggattttccaatcgaccaaatggtgactatggcaaaatcccagactttaagggctcagatattgcagctgaacttttatctaaaacagaagaatggaaatcctcaattacaatattctctagtcccgacgctgcacaaactccagttagatatttagccttaaaggacaataagaaccttattatggcaagccctaatctcacacacggctatctcttcctggaaggacaaaatataaaggaaatcgaagaagcttcaactaaggaaggggcatttaagcactgcagtaaaaaggacatatcaaacataaatgtcgaccttgttgtagaaggctctgttggagtggacagaatgggacatagaataggaaagggaaaaggatttgcagatatggaaatagaagatttaaagaaaagaaacatcattaataataccacaccaattgcaacaaccattcatccattgcaattagtgaatcacattccaactgaaagccatgatcaaagaataaacatgattgtcacaacaagagagattataagggtctaa

SEQ ID NO: 734 - DNA, 546 bp, Methanobrevibacter ruminantium
  source 1..546: mol_type = genomic DNA
atggcagatttaaaaggtactaaaaccgaagcaaacttagcagcagcatttgctggtgagtcccaagctcatactaaatatcaatatttcgcaagcaaagctaaaaaagaaggatacgtacaaatccacgacatctttatggaaacttccaaaaacgaaaaagaacacgctaaaatctggttcaaacttttacacgacggagaagttccagacactatagctaaccttaacgcagcagctgatggtgaaaacgaagaatggactgcaatgtacaaagaattcgctgaaaccgctaccgaagaaggtttccctgaaatcgcaggcttattcaccatggtaggaaatattgaaaaagaacacgaagaaagatacagagctttactcgctaatgttgaaggcgaagctgtattcaaaaaagaagcagaaatcgaatggaaatgtatcaactgtggtcacatcgtaaaagctcctgaagctcctttcatttgcccagtttgtaaacatccacaagcttacttcgaagaaagagctaccaacttcaaataa

SEQ ID NO: 735 - DNA, 159 bp, Methanobrevibacter ruminantium
  source 1..159: mol_type = genomic DNA
gtgtctaaaaaagaagataattgtcaaatagatgattgctctagtggaacttgtgcacctgtcagtcccttttcaaaagagggaatattatttttaattttcatcattgttttattcatagttctgtttttcttattatggactaatggattgatttaa

SEQ ID NO: 736 - DNA, 429 bp, Methanobrevibacter ruminantium
  source 1..429: mol_type = genomic DNA
atgagtgacatgtggggtctaacagtcagaggaatatgcgaatataatgataagatcttgcttcttaaattaagatcaatctcagctcacgacccatgcaaatgggaaattcctggaggcaaggttaaaaagtgcgaatactttgattctgcattaaaaagagaatataaggaagaaacaggaatggacataagcattgactcattataccatgtcattcaaaagaattatactgcctgcaagactggagaaaaaatcaaatccatacagcttatcatgaaagtttcaacaaattcagatgaagttctcattagtgatgaacatgatatgtatggttggtttacaaaggaagaaattaatgatatgattaaaaataatgaattaactcctccggcaaaagcagctttttgtaaaacactattggtttaa

SEQ ID NO: 737 - DNA, 507 bp, Methanobrevibacter ruminantium
  source 1..507: mol_type = genomic DNA
atgagcatgctttccaattatagactaaaagaattgctgaaaaaagagagcgaaatgactgatgaagagtatgagctctttctaaatgaatttagaaagtctgaacttttcataccaatccaagtggacctagattcccttgacttaaaggacgttcaattaaatgaaatcaatcatataaatcaggagataaacttcagactgaaatcatacgagagcaaggacaaaaaaagaaccatccctctttttaccgatgagcatgagattgaaagacttaagatgaatacaactgtaggatctttgttcatgagggacctgtgtgaatcaattatgcctataagagacagctttgaccagataatcattaatcctaaaagcgaaaagtcctttaagatctctgtagatgagttcttggatttattcgatgaggatagggaatttgaagacctgatgaaagaaatagaaaatgatgaagagtttattgagatgatgaaaaaggaactctga

SEQ ID NO: 738 - DNA, 405 bp, Methanobrevibacter ruminantium
  source 1..405: mol_type = genomic DNA
atgaccctatctgacaataagaagctaaagaaattattaaagtccaaatctagagttaaaattgaaaataatccaaatctcttttataaggagtttctaaaatcaactctctttgttccggtgattgcaataaacgaagatgagaacctaaacgatggagacacactagacctgcagattggattctttgatgaggaaaatggagatagaaacatctatatctttaccgattcaaatgagatggaaagggctgattataagataacatcaatagctgtaaatatgaaagagctatctgttattctatcccagtttgatatggactttgattatattgtaattaatccatatggtccagacagctataagatagattatgatgagtttaaaagcagaactgaataa

SEQ ID NO: 739 - DNA, 480 bp, Methanobrevibacter ruminantium
  source 1..480: mol_type = genomic DNA
atggattttaaaagagaaaaatacatcgaagttttaatatacatcattgcaaagactgccaataagaagaatgttggaaagacagtcctagcaaatatgctttatttcattgactttgactattatgaattatatggtgagtcattgactggagagacttattttaagacaataaacggcctaaagcctaagcatttcgatgacactttaattgatcttattcaaagggacataatctatttgaaaagggaagctgattatgacaataagctgaagaaatattatattgcaaggattccagacaataagctttcaaaaaaggaatattttgttataaccgatgcattagatagattcagtaatctaagcgcaagcaagttcaattatattctatcaaaggacattccttttaagagtgcaaaaatggatgggcaaatcaattatgagtgcgtattccatagattggaaaaaactaattaa

SEQ ID NO: 740 - DNA, 723 bp, Methanobrevibacter ruminantium
  source 1..723: mol_type = genomic DNA
atgatatgtccaagttgtggaagtgaaaataaggaaggttctaaattctgtaaaaactgtggtgaaaggttaactgatagttctagacctaccagcaccaatgctagtgcttcatctcaatcaaagagcaataagaatcttttgattatttgtgcaactataattatctgtgttgctgttgttgcaggggctatcctttttatgagtggccagtccactgattatgaggtggcaagcggtgaggctactaatgatcattcatcatctgccttgaattcctatgacagttccaattcaaatgatgaaagtcaggatgattcagcatcagcaagtgaagattcaagcgattcggccgatgaatataataagaatcataaatggggaaagagtttccaagaagcatcagaatatttccctgaagcatctgaaacagttgttactcatgttttctatgaagcagacattgacggaaatggctttttgactgacaacgagtttaaagactttaagagcttggtcagcttcactagaaagtatgcagcagatgtaactaataatgattatgttgacactcccgacctttgggagggagatggaagcgttagaacaagatactgtgcagatcatggtagaatagcagttggcagtgatgacaggtgtccgtactgtgctaaaaaaggtcaggacagtagaaccagaagcggttcaaccagatatgtttaa

SEQ ID NO: 741 - DNA, 849 bp, Methanobrevibacter ruminantium
  source 1..849: mol_type = genomic DNA
atgaacgaaatcattgataattataatgtgaatgaaaagatagaaatagacaactttgaactggaagacataattagcttaggagtaaacaatctgaccattgcagatgaagaagagttcttcaaattacttaaagaagcccaacttttcattttagttcaattgaacaaggaagaagtctttgatgtagacaatcaaaaggttgtagaggtcattaagcctatacctccacttggattcaacttcatgacactaactgtcaatgaaaatgaaagatcaattgttgcattcacacgaaaggagataataaaggaaatagggcttaaggcagaccatattgtaatgaacatgagagaccttgcaaagattctcatgggccttggagataccttctcatcaataataatcaatccccagaccgaacattcaataatgataagcataaacacattcttaagcctctttatggaaaaacctaaaaatccatttataggatcccttgaacagactctagacaaattgaaaaacgattatgtggaacttgacaatcattatatgtttttcatccgctcagactatgaatttatggaaaacgaatcaaaagatggagtctttgtagcaaagatgcctctaagggcaagcaccgatccaaacttccaggcaaaccttccaatattgcataagctgatgatgatggaaggtcagaaagtgttatatacaggtaatccaaacgaggaacaaaccgatttcgatgttttgatagctccaggaactgagtttgaaaagtattatgatgaggatggtgacacttccgtttggagatgtgtaaaacagccattctatgaatag

SEQ ID NO: 742 - DNA, 429 bp, Methanobrevibacter ruminantium
  source 1..429: mol_type = genomic DNA
atgcaagatgaaccaaataaaaaaataaatagagctaaagatgatgagaacttactttttgcaaggggagaagtcattcgattgatgaaagatcaccttgacaaggacaagatgattaccgaaagggtcaaggttgaaatgaacagattcctaagtaatgtgctcgtagctgtttgtgaggaacttaacaaatacccatacaccaccattgattatgaaatgctaaaggaatcaacctatccgtataccagaattaagcagattaatcaggaaagggaaagaatcctggtgcacttgaatgcaatcaaggcagattgtgatgcattgggtatggatattgaaaagactttaaagctcaatgagtccgatggggaggatagtgactttgttcctcataccagcagagtaaaagaggatgatggagagtag

SEQ ID NO: 743 - DNA, 1446 bp, Methanobrevibacter ruminantium
  source 1..1446: mol_type = genomic DNA
atggataatgaattcaaaataaactatctgcttaatatattaaaaacaactccaaaagtagtttcagacaggataataaaagatcagacaagattgaattttagaaaggattattatgaccttaaggaaagcattgataattttcttgaacacgacactgatgatagattctacatattgcctggccttaggggagtgggaaagactacaatagtctttcagctttatgactacctgaccaatgaaaggaacattaactcaaatcatatattataccttgatctagaccgattgaaggaccaaggaccattcaatctcttagaatatcttgatattttcataaaggacatcaatgaggaagcctatctcaataactggccattatttattttcatagatgaatcacaatattcctcaaactgggatcatgtaggaaagataatctttgatgactataagaacgtatttataatattcaccggttctgacgcattgaatcttcaaagctctatggactctgcccgaaggtctcttaaaaaggaaatctatcccctaaattttgcggaatacttatatttaaaatatggctgtgaaattccaagaggcataagtgattccatattcaatgcaatcctcttcaatgattttgagaatcttataaaagacgaacgctacattcaattaaatgtttataataaattcaaaagagatattaacaagatttgggacgaatatatacaatatggaggatttccattatcatttgctcgaaaaaaccatgcttcaataatccaactaggtcttgatatgaaaaataggatagttgaaaaggacctcgacatagtgctttcagtaaactcacagacacggctaaacacctattctctaataaatatcttagcattgcagaagcctggaaccttgtcatataacaaattggcaaagaacttggaaatctctaaaaaaaccgttggcaatttattgaatgcattggaatgcacacagatgatattccatatagagcctcatggagcaattacaaaaagaaacagaaggccttggaaatattatttcctttcaagccagatgaaagcggcaatctatcaaaattccggccaagcaactaaaacaaaaggagaatatatgggaatactaactgagaatctggttggatcattattatttatgatgaaaaacaaaagaaaacaggattttggaattttctatgaagaggaaaaggagagggctgattttctaatcaataccattgatggtaggataatacctattgaagcgggctatggcaagaagggcaaaaggcaggttataaattcaatggaggaccatggaagcgaatatgggattgtggtttcaaacaagactcaaagcattaaaatagaagagaatgtcatattcttacctcttaagacattctctatgctttaa

SEQ ID NO: 744 - DNA, 693 bp, Methanobrevibacter ruminantium
  source 1..693: mol_type = genomic DNA
atgacagaaatagattggtttaaatttgaagatagggattacgattttccattttataaaaagaatccccatatttcaaaaatgggctggcttgtcttattctttgtttttataattggatccatcttatcaatgagcgataagctttcatattcaatattatgttgcatagtctttatcgttccagtattatatttcctagactgggactataaggcaatatttagaaagccatctctcaaggacattgcccttgcagtggcactttttatcggatatcttatatatgcaataattatgggagcaatattggaatctgttggaatagtgagcagcggaatcattgatcctggaagcatagactggacagtacttattaagagcgtcttttcattaatgggggaagaattcatcaagttccttccattcatattcttcctaagggtgctttacaagtacacagataaccgtaaattgtctgtggtgatttcagtcgcattggttatggccatgtttgcatctttgcatgcatacaattgggtcatgttcatatatgcattgttcatacaaggctttggatcaatttttgagttttttgcatacatcaagacaaaaaatataattgtttcctatataacccattattgtacagatgcatttatctttgcaatgctactgcttggacttggataa

SEQ ID NO: 745 - DNA, 1593 bp, Methanobrevibacter ruminantium
  source 1..1593: mol_type = genomic DNA
atggataaagaaacaaaagaacgtctaggagaaatcagagctgcgatgaagaaatacggctttgataagattttaggcgaaagcgcaaaaaacaggatacgcggaaaagatgaggaagaagagagcctcctattggatagcgaagttccagtcaagttcagacttatgcttcaggaacttggaacaaccttcatcaaactaggccagctcttaagcacaaggcctgacatggtaggggaagacattgcaaacgagcttgccaaccttcaggacgacaaccctgcaataagctatgagcaggttaaggcaatagttgaaagggagcttgaaggagacattgacgaactctttgccgaattctcacatgagcatcttgcaaccgcatctatcggacaggttcacgaagctaccttaaatacaggggagcatgttgcagtcaagatccagaaagagggaatcacagacaagattgacctggacataaggataatgaaatacattgcaaaccgtgcagacagattaagcggcgagcttaagaaggtaaatctccctggagtgatggaagagttcgaccgcagcatccacaaggaaatcgactactacaacgaattcatgaacatgcaaaggattgagatgaactttgtagacaatccaaatgtccacattccagcaacctatcctaaatactgtacaacaaaggtccttacaatggaattcattgcaggagcaaaactgaatgacgtatatgcaagcgaaggagacgaatttgacaagaaactccttgcaaaaacagtgattgactcctatctccaacagcttctcatagacggattcttccatggagacccacaccctggaaacatcatgattctggaagacaatgtattgtgctaccttgaccttggtatgatgggaacctttgacgaggacttcaaacgcaacctcgcagaggcaatcttactcattatggaccaggacattgacggagtaatcaaccaattgatgtacatggacatcttagactatgacattgacacaaagccgctcaagagagacctaaacgatctcttcggaagatacttcggagtggatcttaaccgtttcgacggcatccttggagacctccttaaactcatgcaggaatatggagtagtccttccaaatgagcttgtgacaatggcaagaggagtctcaatggttgaggcaatcgcacacaaccttgacccagagattgacatattcgaatccctcaagccaatcgcaaagagaatcgccagagaaaggctagatcctaagagatacctcaagagcaagaaaagcaacataattctatatgagcatatgttccgtgccttgcctcagcttcttacaagaacagtccataagattgaaaacgaggagctccagttcagattcgaagtggacataacagacaaggtatctatagtagcattagtatccgctcttattgtaggttcatctgtagtctcattcggaccaagagcctttgacatgccggtaatttcaattataggctacataatagcaatcatcttaagtattgtcggcataagaaagttcgtattaaaataa

SEQ ID NO: 746 - DNA, 498 bp, Methanobrevibacter ruminantium
  source 1..498: mol_type = genomic DNA
atggatattagaaaagtaattggaataatattaatcattttgggtttaatctttgcaatctacccagtttacagcgcccaagcagtctcatggattgcaggagtagctctaatagcatttggtattggcttaatcctcgacggattctccatatggagcatgatggctggagtttcagcagcaaaaatattgctgggaatcatagcagccataatcggattcatgttcctatataaagtggatgcattatccttcattattgcatatcaattctatataattggatttatactgatatttgtcggtttgctaggtatttttatagcaatagatggaatatcaagagccacagcaatattgactttaatcttaggtataatatgcattatctgtgctttcttctcactttcacagccattatacactgcagttatcgttggaatctgtatgataatggagggaataaccttcctagcaagtggcataattgatgaatga

SEQ ID NO: 747 - DNA, 795 bp, Methanobrevibacter ruminantium
  source 1..795: mol_type = genomic DNA
atgggacttgcaaaagaggctagggatttagaaagagaaaacaaatatgatgatgcttttgaacttgcagaagaagctaggaaattagaaaaaaatggcaaatatgatgaggcaattgaactgatcttgaactatctggaccaaaatcctcaatataagacgattgactactaccatttcgcaaatcccatagaggaaatcctatttaatgtttatattgaagatatcgattcagtcaagacactgaatctggaagagtgtcttgagctgatttattttacccttgcaagagcatatggcaaaaagggagataaggaaaaagaagagaaatatttaaagattgcaaataagatcaatccggtctctgcaataatactgcttagattatgcaaatactgccaatccatcaatgagaatgaaaaaataaaggaattggctccagacatcatgaaatactcttataacagcaaaatattgatagagtcatacctcacacttgccttttcctatttagatgataagcaagagaaagaattatataatcatttgatgcaattttatcttactgttgaaacaggaacagacttttgggattcaataaaggaagatataaaatacttagaggagcatgagattcaagtgggctttaatccagaaatgtttagcatattaaaatatttgattgcccttcacacaaaacaaggccgggaagatactgcaaagtattttaaagacatattgtatttaatggaggaatttacaaagtctttaaatgaattaagatacgatagttag

SEQ ID NO: 748 - DNA, 1014 bp, Methanobrevibacter ruminantium
  source 1..1014: mol_type = genomic DNA
atggattgcattaaaaacggaataatgggacagattgtaggagatgcgcttggattacctgtgcaattccagcctcgtgaagaacgtgacatagaccccgtgactgatatgataggggatggcgcttttgagcttccagctggaagctggtcagatgatagcagccttatccttgcaacaatggatggcttgattaagagtctgaatggagataatgtagattctacaagcttaaatgatataatcgattgggaaattattatgagaaacttttccgattggcttaatttgggagaatacacaccatatggattttcctttgatatagggggagccacaagggatggaatctacaactatgatgacggatgggagccattggaatgtggaggcatcggcgagagagacaatggaaacggctccttaatgaggatcttacctattgcattctttatttattatttatccaaaaaatattcatttatcgaagaagacaagatgactgctgttcataatttgtcttcactcacccacagacacaagagaagccagatgtgctgtggaatctatgtgaacattgctcttgaattcatagataattttgaaaatgggaaatgtttagacttagaggaacttatatcctctggaataaacaaatccaaggaatattattttaatgatgactcatttgaggaagaattgcatcattttgatagagtcttttcattgaatattcaaaatcttccgcgtgatgaaataaaaagcggaggatattgtatttcttcccttgaagcaagcatttggtgtcttttgaataatgagaattataaggataccctcctgactgcagttaatcttggatatgacacagatacaactgcctgtgtagttggaggccttgcagggattttctatggctatgaagatattcctgctgattggattactcaattggccaaattagattatattgaaaatatgattggaaagttttctcaatctttaattgattag

SEQ ID NO: 749 - DNA, 408 bp, Methanobrevibacter ruminantium
  source 1..408: mol_type = genomic DNA
atgtatgatttgacaaagatccaaaaaactttcaatgagagggtatttagcagattagacgatgagattcttgaaagaaatggaattgataaagatgaggaactgataagagaagagttatttaggcaaagggaaataattacagtgccttttggacatattgaatattttttagccattgaagatgaaaaagtcctattatatgtcgagaaggcttcaagaatgggttcccataacatctgcatcattgatgatgattcatatgaatgcattgacgtttatgatgggtatcctccagaattgaaggaaagataccttgaccatttgaaaaggattaagaaaaccagaaatagatttgaggaaaatttaaaaaaattatcagaagaaaaaagtataaaggagaaataa

SEQ ID NO: 750 - DNA, 966 bp, Methanobrevibacter ruminantium
  source 1..966: mol_type = genomic DNA
atgcaatttggaaattatgcagtggaaataagctctgaaaatgagaatcatttaatcaattatcttaaatttaataatttcaaatatgaaaaagatcttgaaaactgtagcgaaaaagaggaatatgtgattgtaatcaatatcatagagagaatttactataagataaagaattatttggcaggaccaatactctctgaaaaggactttttagataagatcaattataataaatacagcattcataaaaaggcatattctaatgatggcaatttaatctatgaaggttataccatctatgaacaaggctatggggaaatagcctatggtcttggaacatcctactttccaaatggaaataaatgtcatgaaggagtatttgaacgtaaaggattgcttgaaggaaaggaattttattcaaacggccaattaaaatttgaagggacttatggaagatgcagaggttatggaccacactatcctagttttggaaactattactcaaaggatgggcaactgctcttttcagggaaattcaaggtcacttttggaggggtcggctatcccatgataaaagaacctaaatataagctacttgaaaaaggcaggccaagatacatattaaaaaaagatgaagatataactaagctaatagagaaaaacaccaatattgaaaataaaaagtatcctatgacttttgaggaatttgaagagaaggtattggaattgttctttgaatatcatagcgatgaatttatagaaatattaaagaaaagattggaggactataaaaagatagagcctaattttatgaaagccctgtataaacatagctgttgggtatatgacagcccacatatctatggagacacttgcaaattacaatttgaaaaagaacgtttaaggcattatccagtatatcgccttagagtgattgttgggcttgaagatggattcaggggatga

SEQ ID NO: 751 - DNA, 567 bp, Methanobrevibacter ruminantium
  source 1..567: mol_type = genomic DNA
atgatatctattaatataaaagaaatgagaaaggaaaaaatctatgaaggcagagtaaagatgggacacggaggaagaggaacaatccgtctgcataattccaatataggagaccaattatacgtaatatttccatcctacggcaagaaggaagacaaggatgggaacttggaaatagatgagatacttaggaagaccgttgaacttggcaaggacggcaaaaataacatagattttaacagggaatacagaggccgcaaatgcatcatcattaaaagggaaagtctaataaaactcgaatttgcaaaatggaaaataatctatgatggaatagtcaaaaaatcattcaatggacaaggacttataagagtaaaggacatgttcctaggagaaagagcatttgtagtctttggggaaagcctcaatgactcaaatgagaacataatggtctcagttaatgagatacgtaataagggaattcatccagacaatgaccatacaagccgagtcttgctttctaaagattacgtaaactgcaaatgccttgtagtcctccaggaagcttga

SEQ ID NO: 752 - DNA, 1491 bp, Methanobrevibacter ruminantium
  source 1..1491: mol_type = genomic DNA
atgagcaaaatacatttatcaaaatccaaatactgcaaatgcgtccaatgtgaaaagatcctttggctcggcagatacaagccggaggtggcagcagttgaggataaggaaactatttttgaaaatggcagaaaggtaggtgagcttgcaaaaggcctctttggagaatatgaagacatagaattcgacataactctcactcaaatgatagagaaaaccaaaaaactgcttgaagaaaaaccaaatgtcatcacagaggcatcattcagctatgaaaacaatttctgcagcgtagacatcctaaaaaacgatgaagatggtgttgaactctatgaagttaaaagctccacatcaataaaagagatataccttgatgatgttgcgttccagtactatgtattgtcaagccttggcctaaacgttaagaaggctgctcttgtctatgtaaacaatgaatacataaggggagaagacttggacattagccaatattttatcatagaggacataactgagattgcaatggcaaagcaggatgaggtaagggccaatatagagcatatcaacaactttatggaagctcacgatagggacaatgagccaaatatggaaataggaatgcactgttgcaatccttattcctgtgatttctgggcatattgtacaaaagaattgccaaagccaaatgtatttgacataagcggaatgtataagtcccagaagtttgaaagctatgccgaaggcaaggtctcatttgaggacttgaggagtgcaaacatcaatccaagatatcttgagcagatagactttgaactaaacgacagagggccaaaggtagaaaagcaagccataaaagactttttaaactctcttaagtatccgttgtactttattgattatgagtcctgcaattatccaatccccgagcttgaaggaactaagccataccagcaaatacctttccaatactctttgcatataataaaagaagagggcgctccattggaacataaggagtttctaggagacatcaatgacaaaaacatcatcagaacatttgcagagcatatgataaatgatctccaagaagacggtagtgtaatcgtatataataagtctttcgaatcagccagaaatagggagattggagagatgtatccagacttaaagggccagatgaatagaatcaacgataatatggttgatttgatggttccattcaggcaaaggaactattatacaaaggaaatggaaggctcctattcaattaagtatgttttgccggctttatatccagatgatccggagcttgattacggcaatctgccatcagttcataatggtggtgaggcgtcagatgcattcttgaatctaaagggcaaaagtccagaagagcaagagcaaacaagagaagatctgcttaaatattgctggctagacacatatgccatggtaaaaatctgggagaaatttaaagaagttgcaaaataa

SEQ ID NO: 753 - DNA, 348 bp, Methanobrevibacter ruminantium
  source 1..348: mol_type = genomic DNA
atgaaattaagaaatttgcatttagactataaagatgaaaatggagatctccgctatgagctaagaaacggagcccattctatgaaagatgcagaaggcttctctccagaggaattctattcatctttggataatgtaatcagagtattaagcccaaacaattcatttagaccaattgaagcctaccctagcaataatggaccaaaagctctatttggattcttattttatttcttaaaaggtatgggctgtaaaaagggcttacaaaaagaattcgattatttagaacagttcattgactatgaaattgatctctttatgattgtcaatttcttaagagaattataa

SEQ ID NO: 754 - DNA, 756 bp, Methanobrevibacter ruminantium
  source 1..756: mol_type = genomic DNA
atgccattggatataattgaggatatatggaagtatacaacaaataataaaacatttcttttaattattttggttttattctacttgttttgtatgttcatgcaaatttttgatgaaatgaggatatcctatgcactttatctgtcaatgataccttatattttcattgcaggctatggaatggctataactaaagatgtaattgataatggtaagcgattgcctaaaatattaatcaaagatgtcattgttttgggaataaaatcaactgttgtttttattgtatatctttctgttcaagggatatttttttccctagtatcttatctatgcaattttccaataattgatgttgaagacctattgttagatttttttgaaacagcacctttattatttcatcataatcttgtaaatacgcttatttttattgttgttgattttgcagtattttatttcaccatgttcttcatggaaatgggattagctaaattagcagacactggcagatttttggatgcttttaatttgattaagattaaaaagattattgatataatcggatggagactatatgcgaaacattatacagtaattatatttttattgtgggttttctcattgcttatagacgtagagactccattttttgttcttgattatatttttaaagtatttttaggtttattattgttcattactcaatattggggcataggtgcagtttatagaatatataaaattaaaacaaactaa

SEQ ID NO: 755 - DNA, 294 bp, Methanobrevibacter ruminantium
  source 1..294: mol_type = genomic DNA
atgattagcagcgaagaaaaagaaaagattaaatctgatatagtagagaaagtaaattcagtcttagaaaaatataatgaatcatttaggatggacaaggtaactgtcttaaatagagcggaaacagtaaaattcatgggaagctatagggtttatgagagaagaaactactgctctgtttcaagagagatcaattctttcttaaataaatatggagacgttgagataaaatccaaaaagataagagatagcggaatgaaatttacaactgtaagctttaattttgaattataa

SEQ ID NO: 756 - DNA, 822 bp, Methanobrevibacter ruminantium
  source 1..822: mol_type = genomic DNA
atggcagaaaatgagataaaactattcaatgataaacaaatccgtactaaatgggatgaagagataggagattattatttttcagtaatagatgttatagcagtccttacagaaagtagcaatccaagtaggtattggtcagaattaaaaaagaaaatttgtgaagaacagggtcaacctttcgaaaatatcgaaaggttgaaacttcccgctaaagatggtaaaatgagattaaccgatgtagctaatactaaacaactattacgtatcatacaatcagttccgtcaccgaaggcagaaccttttaagcaatggttggctcaagtgggaagtgaaagactagatgagattgttgatcctgaattaggtatggaaagattaaaaagtacttatcgcaaaaaaggttacagtgaaaaatggatttctcaaagaatgagaagcattgaaattcgagatgatttgactgccgaatgggatcgtgtaggtgttgaagaaggtttggaatatgctatattgactaatgaaatcagtaaggcttcatttggattgactactcgtcagcataaaaattataaaggtttgaagaaagagagccttcgtgataatatgaccaatgcagaattggttatcaatatgttgggggagttggctactactgagattagcaagacagagaatcctggtggatttgaagagagcaagcatgttgctaagcgtggaggcaatattgcgggcaatgctcgtaaggagttagaagctaacacaggtcgtaaggttcttagtaaggctaatgcgaaggataagaatttgttagaaaactga

SEQ ID NO: 757 - DNA, 294 bp, Methanobrevibacter ruminantium
  source 1..294: mol_type = genomic DNA
atgataagcatcgaagaaaaagaaaagattaaatcagagatagtagagaaagtaaattcagtcttagaaaaatataacgaatcctttaggatggacaaggtaactgtcttaaatagagcggaaacagtaaaattcatgggaagctatagggtttatgagagaagaaactacggctctgtttcaagagagatcaattctttcttaaataaatatggagacgttgagataaaatccaaaaagataagagatagcggaatgaaatttacaactgtaagctttaattttgaattataa

SEQ ID NO: 758 - DNA, 786 bp, Methanobrevibacter ruminantium
  source 1..786: mol_type = genomic DNA
atggataatagaaatatactaatcattattggaataatagtcctaatcgctgcagcagggattattctagtgatgttaacatcagaaaattatgaaagaatggagatagtgccaaacgggacaagcatagatgttccattaaacaagaccacatatgatggagaattccagagcgctagagtttggcattgggacaagggaatattagtcacatacaatagccatgaggataaaaacattttaagagtaagtgaattgggcatttacactctaaataaaataatagaaactggagaaaaggaaaatatcgatggatttacctcttatgtaataaatgccgatgagatattggaaatcgagctattcgatgccattaaattacattataccggcaaattctattgcattccattagctaatggaactaccggcgacgttatcataatctgttccaacgacagggacgaggcagttcatatggccaaatcaatccagtacaagaatgtttttccagtaaatagcgatttcaataacacaattgaaactgtggagaacctgagcgaatatctggagtcaacagtaaatgactatgcaaacagcactgattttgacaatgccgtttcaactgtggaaaacctaactggaaatctagagtcatcagcaaaggattatgtaaatgatgccaatttaagtgatgtcaaaacaacagtggaagagaaaactggaattaatattgatgatgctaaatccgatttggagcaatacattggaaagttgacttcataa

SEQ ID NO: 759 - DNA, 231 bp, Methanobrevibacter ruminantium
  source 1..231: mol_type = genomic DNA
atggcagaactcatggacaaaatatttgtagtgataggatacattcttgcaatactattcccaatagtcggaataattgtcggagcattattatacttcttgaaaaaggaagatgcattctaccaaacacatggaaaatacataatcattgttggtattgctatgattgcaataaatatccttttaattgcatttggcataattaccataccacccgtgggacaggtttaa

SEQ ID NO: 760 - DNA, 861 bp, Methanobrevibacter ruminantium
  source 1..861: mol_type = genomic DNA
atgaatgaaagtcaagacattgaagaaacaacaaaggtagacaacagcagacttgaagaacttctacagctctttaaggatgaccctagtcctcaaaatgttcaggaacttggagaggaaatcaaaagctcacagctttatcttccagttgtctactcccaatcaatgatagaagatatcttatctggagatgttggggaagttcgtgaattcaaagagcctgccggctttgatataaacttcctaaccaataatagaggagagaaggccataccactctttacaagcgatagaataatggaagaggcggggctaagaagctctgtaattgtaatgcatgtggaagaccttgtagatagccttcaagggacagagaacacttatcagctagttacaatcaatccgatgactgaaacaggcatcgacatgcctatccttacctttttgaatatgtttaagaaaagagagatgagcgaggaagagaaaagattccttgaaagcatgaatcgtatgctagaggtgctggaaaaccattcaatagcccttgaggagaagactgcattctttaaccgaggccctcaggactttatgaaagaggtagctgtcgatggggtctttgttccaaacataccattcagcgtaagcacaatcaaggagtttgaagaggatgtttccccatacctgaatataatactgatggatgagggaaaaaggatagtctactttggagagcctacggaggagaatccgtttaatgtattattggctccaggatgtgaaattgagatggtggaagaggtggatgagtttacaactgtgtggaaatgcggcaatcagccattctatgatggcatgaaatga

SEQ ID NO: 761 - DNA, 144 bp, Methanobrevibacter ruminantium
  source 1..144: mol_type = genomic DNA
gtggcaaaagccacaaataaatatcgaggtgattatataacaagattaaatgaaaccaagtatgtcgaatttaatattggaaatgcaccaaaggctatgatatttagccgatgcgatatttcaaaaggaggaagagagacttaa

SEQ ID NO: 762 - DNA, 321 bp, Methanobrevibacter ruminantium
  source 1..321: mol_type = genomic DNA
atgtccttccctactcaaatcaggaatgagcaagaattccgtcttgcccttctgcattttttaggcgatatcaatgtgggtctagtttatacaaagaaatttttcaaggagtttatgggtcttgacaattctgtacggcagatattggtaaatcagatcaagaacgctttgaaaaaccctggttgcggcaaattcatgtctcataattataagggtgaaaaagccgttagggttgataaacgttatagattgcattttaaatatgataaaaaagaaaacttatttgagctagtatctttttataaaaaagactatcaataa

SEQ ID NO: 763 - DNA, 1332 bp, Methanobrevibacter ruminantium
  source 1..1332: mol_type = genomic DNA
gtgtctaatgaatgtctaagatgcggctatgcaaatgaagataatgaaaaattctgcattaactgcggtgcaaagcttatggaagctgattcatctattccagatgatataatttcctgctatttttgcggctataaaaaccatgaagacaacaagttctgcatcaagtgcggcacaaggattcatcatgaattgccctatgaaaacgaattgactgagatttacactagatacggcgatgttgtggatttcaacaaagtttcctacaatatttattataaatacaacttgcctcaagactgctttctcctaaatagcgagcttaataactatgaaaagtatcatgaggaatatgatatggaatgtcccttttgccatcaaaactccttttccgttatagactctgatatctctataggaagcgttaaaattacagagttccatgaagacgagtatcattgcagcagctgcggtttggaaattaaattatgcaagaaagatgataaaaagattcccggccgcagatatttgatagcaaatatggacaataaggaacattggatctggaagaaatacggcaaaactccattgtacaaatatgaattggacgaaattttcaatggaggccttagtgatgacgataaggcaaggctactcagcatacatgcggattataatcgaaaagccataaaaatagttaatagattcagcatttatgtttctgtaaggtttgctgcagaaatcctatcagaggaggaaaactctctaaagccaattgacaccaccttctttttggatgatgacgaggaagcctatttcatgttcacagatattgattacagcaagcctatggtccgttattccacttttgggcaatcccaaggtacctatgatgcagtcacttacggccaatctttcgataatgcattttcctatttgaatggcaggtcattctatgccgacacaatgggatatttttccaccagcacatactcttcaaccgtatcctatgaaaaggtcaaggttgtagacaggggaattctccttttaaccaataaaagattgatattctcaggctccatccactcactggatatcgacatcgacaagatcttgaacctggttcatgacagacaatcccttatgatccatgtcaaaggacgaagcaacattgttaaattctctaatctagatagtaatacattttatttgaatttagatggcagacaacttagcctaaactttacaggctacctcttaagaaccttgattgtcaagttcatgagtccaaagaaaaagaggaatcttttgaaatcaaaaggaagcctttaa

SEQ ID NO: 764 - DNA, 318 bp, Methanobrevibacter ruminantium
  source 1..318: mol_type = genomic DNA
atgaatataagtgaaaaaataaaagaaatgcaaggggatttaggcaaatatcatgctttggagaaaaaagaaggagaatgtggattggaaaacctgattatgctcatactaaatgacggaggccaattcggtccgggcaaaatcattggtgaaagcagtgaatttttagactttatgttttataagagacaaggaccgatcttctctctcagcataaagaaggaacaccttagcggattttcaattttccataaggcaattgatgatgagaaacaagcagcagccaatattggaatccccaaggcattgtatcaataa

SEQ ID NO: 765 - DNA, 324 bp, Methanobrevibacter ruminantium
  source 1..324: mol_type = genomic DNA
atgaatttcagtgaaaaaatcgaagaaatccaaggaaaagtcaagagttacaattcagagattaaaggcatgaaaaacattccatcagaaaagatgattagggtcatgatggcagaaggagaaatacttgagccatgcatgatcattggtgaaagtgatgaatatattgatcttatggttgtggatttagacaagggaccagtttttacagtttccataaaaaaggaaagaatagttggatttggcactttccataagcctttagatgagttggcctatcctgaagaagagctaaatgcagtccctgctgcattatatctctaa

SEQ ID NO: 766 - DNA, 309 bp, Methanobrevibacter ruminantium
  source 1..309: mol_type = genomic DNA
atgcaaataattgaaaaagtggaaaaggaactggaaaagcttggccttacagtggatacggttgcaaacgatcatatcattgaagcatgtgtcaccaaggtttcattggaggacaacttaagcaaagtaggaatcgatttcgaccaaattgaaaagaagctttatccctattcaacatttgtcattcaaatgattcaacatctcgatgaagggggatccactgaagatatgattagggcattcctaatcgaagcattaaattattcactggaattaggggatgcatttggaatctctttagaggaatag

SEQ ID NO: 767 - DNA, 249 bp, Methanobrevibacter ruminantium
  source 1..249: mol_type = genomic DNA
atgaataaacaaaacgtatttgctttgatattattaacaatcattcttttatctgtagttgctgtcagcggatgcattggaaaatcctctgataattctgcaagcgattcatctggagattccgatgattccagtaattccatatttcacagtggctctgacagtgacgatgatgataatgatgacaataatgataaggacgacaaaaacgataatgataaagacgataaagatgatgatgacgattga

SEQ ID NO: 768 - DNA, 639 bp, Methanobrevibacter ruminantium
  source 1..639: mol_type = genomic DNA
atgataggtgacgatgacttctttatgcagaatgcagactatcactatggagctagcgactcagagaagatgtatggaagaggctatgatggctcttcagactatgttccaagatactcatcaggaggcagctatggatcttcctctggtgcagaaagctcagaagacggtagccttggaaaatactgccttataggaattctaattgttcttgggatagttgtttttgcaaacattggcattccagcaattactaattcattgtccagttcagtgacagtggatgatttgaatattacccgatacatctattcaaaccagtataactcaaaaatcactaccgattatggatatcagattacatacaaagagagaagctatggccagcatgccacaaatgttattttctattcgaaaaatgggaaagtattgtataatgacagccaatatatgggaacttgctatcttggggaagtgccatacataatctattttgatggaaaggcagactatgcaatatttgaagtatataaaacccaatttgattctggtgagtgcatataccgtgaaagagtggatgttgataataaaaatgtgataaaagagtttattaattatgatacattgtatgatgattaa

SEQ ID NO: 769 - DNA, 786 bp, Methanobrevibacter ruminantium
  source 1..786: mol_type = genomic DNA
atgaaatattgcaagatatgtagaaaggaatttccaagggacttgatgttttgtccggaatgcaactcctttttagaacctgtatcacactctaaaacccttgacgaaggaattgtggagcatggaatcaatagaataatattctttgatactgaaacatccggattgaatcctaattactgcaaaataatcgaacttggaatgcttgtcattgaagacgggaaaataatagaggagtatgataagcttatcaatattggagaaaggatagattccacaatcacaagaattaccggaatcactaatgatatgctgatagatgaaggagtgagtgaaggggacgttgctcaggatttaaaggaaaaattaatctctggaacattgatgatagcatataattgccaatttgacttgtcattcgcctatggtctgcttaaaagacattaccctcatgaggcagaggcaatcattgaggatgttaaatggctagatccaatgaccgtttttaaggatagaaaggcctatccccataagtttagcgatgccgttgagcattatgatataaggaatgttaatttccatagggcgattggtgatgcaaaaggattgtatgaagtttgtttgtcactgaaggatgaacgtgatgaccttggagaatatataaatgtctttggatataatccaagatatggaattaatggattgaaattcccatttatagaatataagaaacattattataatgattctatggtttctccaaataatattcttcctaagatatga

SEQ ID NO: 770 - DNA, 948 bp, Methanobrevibacter ruminantium
  source 1..948: mol_type = genomic DNA
atgaaactggaaaactttaaatacgagacaaatgacaataatttgataaattattatgaaattgacaacgacaatcccatactgcttataattcatgcccaaagcacaaattcaagtagctattctgatgtggtaaaggatttgtctaaaagatttcatttgattcttgtggattgctacggccatggaaaaagctcccacaacagggataaatacaatatagtcagtcagggggatgacttgattgattttatcaaatcaaaaactgatgaaaagatatctgtactgggccattcctcaggagggctcatcgcctgctatatctcttcaagatcagacctttgcgacaatctgatactggaggaccctcctctcttttcaagctctggagagaaaagatttgactattacaactatcatgacctttccacagtctgccataatttcatcaatcaggatgaggagaaggactttgtctattattacttcatgaatcagtatatgtggaactttttccctgaaagctcaagagaaaaaattagaaataaatccggagcatctgcattaaaatacagagaaaaacatccagataagcccttgaaggttcgcttttggcctaaaaatgttttagaggcctttaatggaatggaggaatatgacccttattttggagagaacttctataatgactcctttaactgtgatatagactatgctgagctactttcaaacataaagtgcaaaaccctgtttttaaaggcaaatacgaaaataggggaagatggcattatccagggcgccttaactgatgatgacttaaatcaggtgatgaatctgattgaaaatattgaagttgaatactttgactgtggccatggcatacacaatgaaaagaagaaagaatttgtaaaagcggttattggaacaacaaagatttttacaatttaa

SEQ ID NO: 771 - DNA, 3282 bp, Methanobrevibacter ruminantium
  source 1..3282: mol_type = genomic DNA
atgatgaggaaaacaatatttggagttatatttatcgtttttattttattcagcatttcaacggtttcagcaaacgatgctcaagttgacatgcttaatgatgcaagtgatgtggaattaaatcaagacttgaatgctcagcctatttcatcaaattgctatgataataatcagaatttaaaagctcaacctatttcagattgctctgatgagctacagaaatctgatgatgatttaaagctttccgaagggggatcaacaagtttcaaacagctttgtgaagatttaaataaaagcgacggcgaatttaatctaactcacagctataaacatgatgaaagtgatgaagagaatacagcggttttttatatggaaaatttggtgataaatggaaataataatattatagatagcagcaaatcaaatttcaactttaaattttccaatgaagcaaacattaccatcaatgatttgactttcacaaatttcaataaatccctatttgtaatcagtgacagccaattgacctttaataacgttaactttactaattgttcctcaaatctttcattgattgcgataatgtttcctagcaatttgactataaacaactgtaatttctattcaaattcatttgcaaattatctcgacggaccatttaacaaattagagatttataattcaaattttgatgggacaaattgtttagattctgctattaaagagaataggggccaactagtcattgaaaattccagctttgagaatttcacaggggttcatggaagcataataaactacaagggagactatttctctattaaaaactccaaattcatcaattccaattcaaacttcactggaggagcaatcattgtaaaatatttccctattgcctatgaagaaggagattcatttgtctatcgtcactctaatgacatgctgattgagaattgcacattttataatctttcatcttccagcaatggaggtgcaatccatcttgaccttgattcaggctctgaaggtattgtagaaactttaattgtaaaatcttccaacttcacagactgccactccaagtttggaggagcaatatccattttaggcggttatttaaacatttcctattccaatttccaaaacaatagcgccagctttgaaggaggggcgatctactcctcatggaccaatgcaaagattgaaggctctaattttactgccaatgaaggaagtcaaaatgcaggggcattatactttgacaagggaaaattgacaatcaatgactgtaagttcattgataataaggctcttaaggaacgagagagaactgcaaatgcaatctatgctcatgatgtagctgcctatttctccaattccacttttgacaatggaggagtatcagtttatgcagattttgcaagcgattcaaaaattgagaatgtggataaaaatgatgacatcttcctaatggacaaccatgattatatcgtttcagttgaaagcaagggaataaagcttaacttgaccggaaatgaaataaatgtcgacagcctcccatcccactttgacgcaagagactggggatggacaacttctgcaaaaattcagggagacaatactgactgctgggcatttgcatcaatatcctctttggaaacctcatttgcaaaagcctcaggggttttatataacctctcacagaattatcttcaaaagctccaattgaaatatttctattcaggagacaagagaaacagcttgacaggcttttcatatagcggtccaggctatgcattaagctggtatggggttttgcctgttgacaatggatatgatgaccgcggaatgattgcagacactgaccttgaggatgaaagaattcatgttcaggatgtgctgtttatagataccggaagggatgacgctgtggaattgataaaatgggccatactgaaatatggcgctgtcactgttcagcgaggcataaacggaccttatggtgaactaccaaccgaaggtgacgacattgccattatgagtcatggaacccatttcatttcacttataggatgggatgataattattttgaattagaggaaggtgatgacgatccgcttcataaatttgcttggataactaaggactccttatccggtttttcaactgctgattacacaaaatttgatgctatagacaattatgcaattgtccctcaaagggctgcagttgcctatatcttcgaaaatgacattgactatcatgtgaactatcagacagacctaactggattggtcggattcgatgccaattacaactattattccaatgagtttgtttcaaagtatgatgagtttatcggagctgtaggaacctacttcaatgaatcaggaatcgattattcctttgatgtttatctaaatagtgagaagatgctttcacaaagtggagtgagcgaatttgcaggtttcaggacaatcaaattagatgaatatatccatataaaagcaggggatgtgtttaaagtcgtctttaaaagcaattccattcctttccaagcatattcaagacagcattatattgaaggaatgtcccttgcaagcgctgacggtgaaagctggagtgaccttgcacctttaaataagaccgtatgccttaaggcatataccgtaaaggaggataaggaagtgagtccaagcagagcatccactaagatagattgcagtaacatgaccaccactgctgtagcaagtgcagatggaagaattggagagtactttgttgtcacattaaaagaccaaaacggaacagtgatagcaaataagccaataaaaataggtttcaatggaagagtctatgacagagtcacagatgaaaacggaagcgcaaagctgcaaataaacctcgcatataagggaacttacacatttgccataggattccttggagatgagaactatcttggagcatttgaagtagctaagataactgttaataagcaaagcccaaagcttgcaagtccaaacaaatcatataaattaacagcaaaaacaaaaacattgaatgcaagccttaagagtggaaatggaaatccagtaagcggtaagaagatcacatttacagtcaatggcaaaacttatacagcgacaagcaattccaaaggagttgctactgtaaaggtaagcctaaataagaagggaacatatagttttactgtaaaatatgctggtgatgatacctttgctgcagttacaacaaaagcaaaattaacaattaaatag

SEQ ID NO: 772 - DNA, 1146 bp, Methanobrevibacter ruminantium
  source 1..1146: mol_type = genomic DNA
atgacaaaattaggtatgggaatgatgagacttccccttcttgatgaaaacgattttaaaagcatcgattatgatgaagtaaacaagatggtcgatttgtatatggaaagcggattcaaccattttgacactgcattcgtctatcatgaaggaattggggaagaaagcttaagaaagtcagttgtcgaaaggtatcctagggactctttcaccgtttcaactaaattgcctctatttgtaatcactgaggagtcacaattggaaggtctcttcaagcagcaattggataattgcggtctggattactttgactattatctattgcataatgtaagcggatttacagaaaacgcctggaagaatgttgacttgtattcatttatccaaaagaaaaaggaagatgggtttatcaagcatattggcttatcaacacatggaaattcagaattcttagatgggattttaagcaagcatcctgaattggaatttgtattacttcagataagctatcttgactgggaagatgaggcaatcgagtcccgaaaatgcttggaagttgcaaagaaacataatgtgaaagttatgattatggaaccatttaaaggaggatttttagcagatgttccgcaagaggcagaaaaaattatgaaagattataatccggacaaatctgtcatttcatgggcaatgagatttgtagccaatcttgatggcgtatgccttgttttcactggtgcaagcaacagcaaacagcttgaagagaatattgaggaatttaaaaatgctgatccgttgaatgatgatgagattgagattctaaaggaggtttctcaaatcattaataagaacatcactgtagactgtaccaaatgcagatactgtgttgacaattgttcaagcaatattgatatagcaaagctctttgacatctataataagcataagctgcttgatacagatgagtggacccctcatggaaacgcttacttgaattattcaaagcttccagatgttggaatagcctctgactgcaccgaatgtgaaatctgcatagaggaatgtccgcagaaaatcaacatacctgaagttttaaaggatgttgcaaaaacctttgaaactggaatttatggatttgggaatgaatga

SEQ ID NO: 773 - DNA, 201 bp, Methanobrevibacter ruminantium
  source 1..201: mol_type = genomic DNA
gtgagtgaaataccagttgcaccagttgtacgtatcttaaaagaagcaggtgcagaaagaattactgatgacgctaaaaaagcatttgctgacgcagtggaagcttccgctgaagaattagctaaaaaagtcatcaaagcagcagcacacgctggcagaaagaccgtaactgtagatgacatcaaattcgtctgcgaatag

SEQ ID NO: 774 - DNA, 2208 bp, Methanobrevibacter ruminantium
  source 1..2208: mol_type = genomic DNA
atgggtttccttgataatgttaaaaaaatttttgattctggtgaaaataaagaggttaaacctcgaaatggtactggaaaaatagataaagttgaatctgttgaaagtaaaagtaattatgttaattttaatgaaaaagatgaacaacaacaaaattcagaggacctcattaatgatgaaatacttgatgaatcaacatccaatgaaactagaaatttcacatatctaaataatttaatccatagtggagttaaagagattattttggattcggatattgtttatggtaatgaggatgaggaatccagacatggcattaaattaaatcttgataacctagttattgatggtaatggatacacaatagatgctcttagagcaagcgaaatatttatttgtgatgctaggaatattgtgataaaaaacattacattaaagaatgggttttctcatcaggctggggcaataaataatcagggagagttaacaataataaaatcttcaattaataataatgaaggaaaattagccggaggaatattaaatcttggtgaattaaccctagatgaatctgtaattgctaaaaataaggcagaacatactggaggaatacttaatttctttggtaagctaagcataacaaaatccaccctcaaagagaacattggaattggcaataaagcaatatctaataacggaggggaattaactataaataaatctagaatcattaataaccagatagacacaaagacaaattttgttaataaagccaggacagtatttgttaataaagccattaaagcacgacgtgatgcagttatatcaaatgggggttatttaaggataagtgattctgaaattttaagtaatgaatcaaagtatataattttaaacatagagttctcaagaatatataatactatttttaaggctaatgagtcacaatatatcatatataatgataattatgaggataatggattatctagtttaggtatttttaattgtaaatttatagaaaataatgcaaaggcatccatagtttataatgatggaaacttgtgttcaatagataatgccctttttgaaaacaatgcctcacacaaaaattccaatattattacaaataaaagtaacctaacattaaataatcttaaaataaaagataatggaaaaaacatactaaatgatgattatatatttataagaaatctatcgccacaaattgaaagtaaaataattggagaaggtctagctgaaaatatcaaagatataaagccacaagaagaaaaatttgattttgggtatttagataaaaagatccatgataacaaaactggggaaataatcctagaggaagacatacgatttgaaaattatgaaatggattattatgagggcggaattgaattagatatggacaatttagtcattgatggcaagggacacacaattgagggggctaagaaatcaagaattttcttaattactggaaagaatattaaactaaaaaatataatatttaaaaatggatttttatacaaagattatgacaatctcatgaataaccaaggaggagccctaaaaaccaactcgaattgtagtttgacagtggaaaattgtaaattcctaaataacttctcacaagatggcgggggagcaatacacagcaagggaaatgtagacattataaaatcaatcttcactagcaacacagtaaaaatgtttggcggtggtggagcaataaataatgatgggaatttaagcattagagaatctacattcacaaacaactctgcagaacggtacggcggggcaatatgtaataaaggagaaataagtttatttgattctacactcacaaataacatagcaaaagttcatatttttaaaacatcttatggtaaaggtggagcaatatataacaagggcaagttgactatttctaattcctcattatccaaaaacacagcacaaattagtggtggagcaatatacaactggaagcataatgaaagatacgaacctatcattacaaaacagaggggcagtgaagcaatgtgttatgagggtgagttaataataacagaatcaacactctacaataacacagcagaagaatctgatggagcaatatacaacgaaggcaagatgaatattactgattgtgacattaataatgactccaataataaaaatacttga

SEQ ID NO: 775 - DNA, 1407 bp, Methanobrevibacter ruminantium
  source 1..1407: mol_type = genomic DNA
atgaccactttaaaattaacaagattaaacgaacctaacattgaaaaactttacgaaatgaaatcagccctcagaaacatccttgaagaaggagatttcaaaaatctaaacaccatattagatttccaggacaaggacggtagcttcaagctattctccacatacagaatcccttcagatgcaagggttgacttctgccatgagccaacttacatctgctcatccattcttatgaaagcatacttaacaggagattctgaattaagacaaaagatagaaactccactaatccacggattagaaagatgctgctgcagaaacttaactggccatggatacgattcacttcaaggacaaatcgacgccttaaacatctttatgaaaggagggcttagagaattcattgatcttcatcctgatttaaattcaaaattcacagaaatgatattgaatatcatggttgaatttgatgctcgcgaagagcaaggaatttttaaaggcacatggggcgaagactacaaggaagacatactcaaaataaacgaatacttcagcactagaaaagtgtttgtttatggaacactcatgaatggagaaagcaaccatcacttccttgaaaacagcatatgccttggaaaagctgccattgaaggatatgacatgtataatgtaggaggatggtatcctgcaattatacctggaaattcaagaatcattggggaactttacgaagttcctgaaaatgacatggcttcaatagacatgcttgaaggagaaggaagcctttacattagaaaatgcgaaattacaactggcaatgaattggcttacatctatgaatacgctcaagacactgaaggacttgaaaaaatagattcatggaaggattacgtctggtatgtatcctatggaagcaacatgctagaagaaagattcctttactacatcgaaggaggatgctttgaaggcagtgcctcctatagatacccttgcgaagatcctacaagacctcttgaaaaaagagccatagacatcccatacgacatgtactttggaaattattctgggtcatggcatggaggaggagtgtcctttttggataccgagaaagaaggccatgcattgggaactgcatatcttataacaagagagcaatttgagcatgttgcagctgaagagaacggcggacgccccccaaatggaaatggctattggtatgaaaatatcattaatctaggggagatggatggctttgagatgcttacagtcaccaataaggatcttagggaatataataggccttctgatgaatatctggagaccttagaaagaggaattagggaaaactggcctgatatgtctgaagaggacatagatgactatcttaatagttgcattagggaatag

SEQ ID NO: 776 - DNA, 1059 bp, Methanobrevibacter ruminantium
  source 1..1059: mol_type = genomic DNA
atgaagcatagattaaatttagataataaagacccaaattatattttgttgaaagaaatatttaaaattatggattcaagagaatccaaaagaatattggtatcctatggatttaaaaacctaaacagaacaatatttgcttttaaaatcatttttataagcatgttctttgaaattgacattccattcatcctaaatgaactcaaatccaatagaagactctgcaaattccttaatatttctgaagttctgactgcagatcaagtttataaaatcttttcagaaataaactctgaaaaacttataaaatcattaaacagaatcttaaactcaaggaatatggttaaaaggagaggaaaaaagacttttattgttgatgcgaccccagtggacttagatattaatttccacagaaataaaaagactaaagaacatctggaaaaaattaatctcaaatggagttattcttcctctaaaggttattatattggatttaaagcgactgttgtgatggattacgattctatgaatcctgtttgcattttaatccattctggagctccaaatgatgcaggactttttgaagagattttagaaaaccttcaaaaaagacgaataatcagaaaaggagacacattaatctttgataaaggatattacaggtataaaaactaccaaatcggaatcagcaaatacaaaatcattcctttcatttttccaaaagaaaaattcagcagaacccgattggatgacattttaacttatccactagccgtatttaacaaaacaaagagaataatgaaagaaaaaagattatacaacagtttaaaaatggaattaatgaaaaaaatagattcatgggaaaaatttaaaccaataaggggcaaaatagaagattttttcaaattattaaaacaaggcttgaatatgagagaaatccacaaatatactctaaaatcagtagaaaaaaccgtttatctaaatgtatttttgggagcactgattatatcacaaggattttactcaaaaacgaccatacaacaattatctgaaaactaa

SEQ ID NO: 777 - DNA, 2427 bp, Methanobrevibacter ruminantium
  source 1..2427: mol_type = genomic DNA
atgaacaatgagacaaacgctttcactggaaacaatccagaattatacaataggctcaaatcaagcataaacaatgcagagagcattgatatcatagtttcttttctcatggaatctggagtgaaattgattatcaacgacttaaaggaagccatttccaaaggagtggaaatacgcatcctaactggaaactatctaaacatcacacaacctcaggcactttatttattgcgcaaggaattgggatataatttagacttgcgcttttacaatgttgcaaataaaagctttcaccctaaagcatatatatttcacaatgaatcagacagtgaaatctatataggctcatccaatctatccaagggggcattgaccgactcaatcgaatggaactatcattttaaaaggtcaaaaaacctagaagacttcgattccttttaccaaaacttcgaagatcttttttataatcaatcaaccattgttgatgacgaggctttaagggattattccaagaaatggaccaagcctagattcccagtcaaagaggctgaaagcatagaagaatatacacaaacccctagcgaaaccctatttgaacctagaggccctcaaatagaggcattatatgctctggagagaagccgtgaagagggctttgacaaggctttggtagtggctgcaacaggtattggaaagacataccttgctgcattcgattcaataaaatataaaaaagtcttattcatagcacacagagaggaaataataaaacaagcagcaaaaagctttaaaaatgtttttccaaccaaaacaattggattcttttataaccagcataagcaaacagacaaagacatgatattctccctggtccagacattgggaaagagcagctatctgaacgacagctatttcaagagagatgaattcgactacatcgtcgttgacgagttccatcatgcagttgcaaacaattataaaaagatattggactatttcaagcctaaattcctattgggacttactgcaacccctgaaagattggacaacagggatgtatttgcattatgcgactataacaacgtctatgaaataagacttaaggaagcgataaacaagggatggcttgttccattcagatattatggaatctatgacgatacaatcgactattccacagtcaacatgagaaacggcaggtatgatgaaaaagatttagaggaaaagctgatgataaaccgccgtgccaatcttgtctatcaccatttcctgaagtacacctctaaatcagcaataggattctgcgcctcaagaaaccatgcagaatatatggcaagctatttcaacgagcatggaatagctgcagcatctgtctatagcggcgagcagggagagcactcccaaaaccgccaaaaggccatagatgatttaagagatggcaaactcagaatcatattcactgtagacatattcaatgaaggtcttgatctcccctccatagatgaggttctcttcctaaggcctacacagtcacctacaatattccttcagcaattgggaaggggacttagaaaggacaagggcaaaaagtacctcactgtccttgactttataggaaactataaaaaggcgaatatggctccattcctattgagcggaaaagactatgattcaagaacccttctaagggaagctgtccttgactttgaatatcctgaggactgtttcatagactttgatttccaattggtggatctctttaagtatcaagcaaagagtgaacttaaggccaaggatagggtagtcattgaattcaattctgtaaagacagaattggaccatcgtccaagcagagtggaactctttttgcatatggatgatgcaataataggagcaatgaaaagaactccaaagattaatctcttcaaggattacatgagctttctaaatgacaacaaagaactaatggacgaagaggaagagtttctaaacagccctgcacatgagttcttaaaggccattgaaaacacaaatatgaccaagtcatataagatgccaatattaagggcattctataacaatggaagcataaagatggccatttcagatgatgatgtctatcttgccatgaaggagttttatgactacggttcaaatggagtggacatgcttaaggataaaagctcaagagactataagtcatggtcaaagaaagactatgtaaatcttgcaaagagaaacccaattaagttcctcaagaaaacccatggagacttcttcatagacaaggaaggattcgctttggcattggcagacaatctagaacaattcataaatctcgacagctttaaaagacactttgaagacattattgaatacagaacccttagctattataaggatagatttgagaaaaaacaagtataa

SEQ ID NO: 778 - DNA, 579 bp, Methanobrevibacter ruminantium
  source 1..579: mol_type = genomic DNA
atgagtgaaaattattatgattccaatgcagatgactttttcaatggaactgtaaatgtggacatgagcccccaatatgaggactttctaaatgaaatacctaaaaacggccatatcttagatgcaggatgcggttcaggaagggacaccttggctttcaagtcattaggatacaaggtaacctcatttgacggctcaattgaaatgtgcaggcttgcaagcaatcataccggccaagaggtcctccatcttcagtttcaagaaatagatttcaaagagacctttgatggaatctgggcatcagcatcccttcttcatataccaacaagtgaaatagatgatgttttaaaaagattaaaaaagagcctaaagaaaggaggagctttctatgcctccttcaagtatggaagctttgaaggagagcgcaatggaaggtatttttatgacttaacagacataactgcaaaggaactcttcacaaaaaacggatttaatataaagaagatctggtttacccaagatgcaagaaaagaaagagaagatgaaaagtgggtaaacatattggcaatcaaggattaa

SEQ ID NO: 779 - DNA, 630 bp, Methanobrevibacter ruminantium
  source 1..630: mol_type = genomic DNA
atgatatgcccaaattgtaacaaattttataatgataattttgctttctgcccacattgcggtgcagaaaaaccagaacctttaacttgtcctaaatgtggatttaaatctaatgaatttaaattttgccctaagtgtggcgctgaacttaaaaaatctgctattaaaaaaccaaccaaaacctgttcaaactgtggacatgagaatgcaattaaccggaaatattgtgaaagatgtggaactgatttcccaagagaagaaaacagaagatttgaaacaaaaatagaacaacccaaaagaatacttttagattatgtgaataaattccaaatagaagaaaatattaaaaaagaaattataaatgatataaacaatgaaaaaatcactaccaaaactgaaataactataagagtaagacaagctcaaaaagaaaaaaaagagcaagacaaaataagaaaagaaaaagaagaaaaagaaagaatgttagaaaacgaatattatagaaactccgaaacaaatactcaatatcatacatatgatgataaacctgacgttttttacggaggaaatgaatatcgtgaaatagaagaaaatacattaggagaatacaattactatcgagaatattga

SEQ ID NO: 780 - DNA, 540 bp, Methanobrevibacter ruminantium
  source 1..540: mol_type = genomic DNA
atgactgaatacaccatatgtcctgcatgcaaaagaaaaaacagcataaaagaaaaatattgtttagactgtggacagaaactaatagaagaaaaggaaaatgaaataatcagagatgataaactcgaaattccaaaggataagatcatccttttggatttgaactatactctcatttctaattcctggaaaataagacatgaggaattgcctcaaaagattcttaaacgccaatatgaagatgaattggtggaaaaaattaaggacaattatgttattttaatcacagcaagtccttataagacctcttttgattcattgaagcatattgaagagaatactgacttgaaaatctctgaatcctattggaattttggcaaacgtcctcctgagctaaaggaatactggcttaagaaagcagttttgccaagtcatggagatgattcaagcaaatatcttgcactcgaatccaacaaggatacaagagaaatgtatgcaaggtttggaatagaggcaagaccgaaaagtgattttatataa

SEQ ID NO: 781 - DNA, 837 bp, Methanobrevibacter ruminantium
  source 1..837: mol_type = genomic DNA
atggaatattatctccagcagttaacaaacaatcacttggaatacttatttgaattaaaatttgttacatcagaattcgaacttccaggattggctgatgatattgactgcaaaaaactagaggaatgtggtaaaaaatcagaatccttaaggattgatggtttaggatttgataataaaacaaactcatttgttattatagaatataaaaatcagtatgataaatgtgttatagatcaagctaaatgttattataaaaatctactagacaaaaaagaagcatatatcgaaaaatattatgaaaaatttggtaaagataaagaagttgaatttgactttgataagacaagagcaataataattggccctgaattttcagagcaacaaaaaaacagaaaagatcctgattttgattttgaactttacacagtatctttatgcaaatacaataataagatttatcgagctttatacaaaaaggttgattcaaattttaaaagagaattatatttcagctcagaggatttgaaaataactagatgttcactgttagagaataaatcagataaagtgaagaaattatataaggattttgaaaatatattatttgaacgatttgatgatgatttcattttagatataaggtatattgttgatggagtttccattacagcagaaaaatcttctatatgtcttttacgggttaataaaaagtcaattaagatacatttttatactgatgaacttgaagatgaaacattaaatcatgaaaatatatgtgatgtgattgataatattaatacaatttataatcaaaaaaggagaaataaaaaatga

SEQ ID NO: 782 - DNA, 561 bp, Methanobrevibacter ruminantium
  source 1..561: mol_type = genomic DNA
atggaaaatcctgtagatattactgccattgacggaatcaagagaatctcaaagtcatatgacattgatacatcagaatactatgatgatggattatatatctcatggataagccttataaagtccaaaaacgatactgtatgtccagactgcggaagcaaactgatgccgcttacattatgtcctagcgaagaaatgatggaactggatgaaatgggctttgatctggagaatcataattattactgcaggaattgcgattatgaactctatatcgatgttttgaatatagactgcgaaaatcatccgatagaatgtgcttatctatattataaacttgatgaaattacaaaatatattaggcataatgaatatagtgatgaattgaagtcaaagatggattactttgatgatgaggagttcaatgcattcatcagtaagctgaaggaagttgattacatctatgaagatgaagaagggtatgtgaaacttgtggatgatgtggaaaaccattggtttaggcattacataaaatataagaggctttgcagagagctttga

SEQ ID NO: 783 - DNA, 120 bp, Methanobrevibacter ruminantium
  source 1..120: mol_type = genomic DNA
atgtcaattgataaattacttttagaaatatacgaattaatcgaatctgaggattatgaaaaatccttagagctgtgcaatcagattttagaatttgatgaaaacaataaagatgcttaa

SEQ ID NO: 784 - DNA, 1500 bp, Methanobrevibacter ruminantium
  source 1..1500: mol_type = genomic DNA
atgagaatgacaccaagttctcatagcagcttgaaaaaagctttttttaaaaaaaatacatacggaggcatcaccatgaataaaataaaacttactagacaagacgaacctgattttgacgaactttacagaatgattggagaacttaaagacttcctaaaagaggatatgggctctcgaaactggatgaagaatctagagactattcttgatttccaggacaccgatggcagcttcaagctatttacaagctacgaaataccatctgatgcaagagtggacttctgccatatgccaacatacatatgcacagccattctaatgaaatcatatctgattggagattctaaattatctaaaaaaatagataggcctctcagaagaggattgaaggcctgctgcatgagaaatcttatggggcatggatatgaagcacttgaaggccagattgaagcattgaatatctttatgaaagcggggcttcgtgaattcattgatctttatcctgacatgagtagaaaattctccaaaatgattagcaatatttgcggatccaattttgaaatgcttgaaagcttgaggaacgctttacttggcccatggggagaggactataaggaagacatccttaagataaacaaatacttcaatacaagaagagtatttgtatacggaaccctcatgaatggagaatcaaaccatcatttccttgaaaacagcaattgccttggggcaagcactgtagaaggctaccagatgtataatgtgggatggtatcctgcaattgtacctggagatgggatgatcattggagagctatacgaagttcctcaagaggacatggctagaatagacatgcttgaaggggaaggaagcctttacattcgcaaatgcgaaatgacttcttctaaatccttggcttatatctatgaatttctggaggatactgaagggcttgatagaataagttcctggaaggattacatctggtatgtgtcctatggaagcaatatgctttatgacagattcatttgctatatagaaggaggatcctatgaaggaagttcctcttatagaatgccttgcgaagacacttcagcccctgttgaagtgagagcagtagagattccacatgacatgtactttggaaattattctgggtcatggcatggaggaggagtgtcctttttggataccgagaaagatggccatgcgttgggaactgcctatcttataacaagagagcaatttgagcatgttgcagctgaagagaatggcggacgctacccagatggaacaggcaattggtatgaggatatcataagccttggagatatggatggctttgagatgcttacagtcaccaataagaagcctagggaacaaaatgagccttctgaggaatatctggagaccttaaaaagaggaattagggaaaactggcctgatatgtctgaagaggacataggtaggtatcttaatagttgcattagggaatag

SEQ ID NO: 785 - DNA, 843 bp, Methanobrevibacter ruminantium
  source 1..843: mol_type = genomic DNA
atggttaattatggtgatgatagtttagagaatccggatgatattactctacctttttttgcatatgggatatttaaacctggagaaatagcatactctaacattaaaaagtatattggcaagaaaaatgaaaaaactattaactatgctatgaaacaaagggacggagttccaatattacttcctgaagagaataatggaaaaacccatggttatatattcaaatttaatgataatgaaagagcttatgatacaataaaccataacctatcaaataaattatatgaatggggcacaattgaacaaggaaagattaatgttttatttggaaaagaccctgatattggaagtgatgatattgggccggactttgatcgagagaactataaagggaaagatgacccattttttaaagaagcgcttgcaataaaacaatatgtcgaatcaaatgatttcacttcaaaagatgatttttatgatttacagaggtattacatattattgtggtctgcaattgaaagatgctgtaaattaaaatacaataaagagagtgatggtaaaaatcgtgaggaattttcaaaagaaaaggaatttatagatgcattagacaaatgtgatgaaacaaattatagggaaatctataaaacagatgatttgactcctagaaaatttgacacagatgaaccaaaatggtgtataaattattattatactcttagatgcaatattgtacatagaggcaaatcaaatgttaatagagatatgggattgcttttacaagcaaccaaggatttattaaatatatttgaacacatacttgatgaaacatttaaagaagaataa

SEQ ID NO: 786 - DNA, 414 bp, Methanobrevibacter ruminantium
  source 1..414: mol_type = genomic DNA
atgaaaaaaataattcttggaacatgtatcttattcttgttgattagtgtcgcatatgcaggaactgtcgatatattcacagccccttccccattgcaaccattaggcaatagtggtttcggagatggacaaggccataatattcaaatttttgagtttactgaaaacctttacaaaacctggtttgaaaatgataccgactatgttgtagaaaagtatgaaggaaacaatggtctttatttatatgccgatgatgaaaatgactgcggtattttagagattgttgaaaaggatggcaaaaaatatatcgtaaattcctggactcctaaaggtcctagcgaagctcaaacagttgtggaaaacttacatgactttaatgagttaaaccatctgactccaataacaacattataa

SEQ ID NO: 787 - DNA, 954 bp, Methanobrevibacter ruminantium
  source 1..954: mol_type = genomic DNA
atgaatattgattatgacggccacaacagtaccaatccaaacaataattctatagttgaaaacaacaataataatcaactatctcttcaagttcctcaaaaatatgaggattatgacataatagaagaattacaatgctttaattgcaatcaacatacttttatccaattaaataaaaaatctcttttgtcaaataaggtggtttactactgcactaattgtggaatgtcctttgaaaagcaaggcaatggattcaaattagtggacatatccgataaaagcaatcgcatgtgggagttatataacttaaaaaccttaacttggcctgaatgggaaagaatagcaaatggaggattatctgataaggatcaagctgaaaaggataagcagctagccatagaaaaacaaaaggaattggaattgcaacgcaaaaaagatttggaaattgtagtccaggaattggctaaaggagaagttaatttaaagccagtaagctctccagttattttgaaaaagaatgaaactgcttatcttagtttaccaaacattacattaagcgagcctcgtgccgttagagtgtctaaaagtgggggttatggaacttcatataggtttgctaaaggattcagtgttcattctggtgttggggaaagcagaagcgtttctcatgatgaaattatggcaatagataccggaacatttgtcataacaaacaaaagagtaatatttgtaggcaataagaaatctgtaaatatagatttaaagaagatattgtccatgactgtatataaggatggcatttccattcaaagggaaaataagcagaaaatagaatatttcacaaaaacaaatcgtcattccatggactttactattgatggtaggacacattctttgcctttggaaggttattttataaaagcaataatattaggtcagattgctaatttataa

SEQ ID NO: 788 - DNA, 849 bp, Methanobrevibacter ruminantium
  source 1..849: mol_type = genomic DNA
atgagaaaggaacgtattaaatcctatttgggaattatatttgatcttttggtaattttagacttgattctaatatttatctctttgcctatacaaggccttcacttgattgactatgcaggttttgtaagggcttttgacttaacaatctgttttctcctattaatcgaattcttttatggattatataaatcagatgctaaagccaaatatttcaaagaacatttcctagatttaatcgcttcaataccattcgatttaatcgtatttgccttattcggttcaagttccattatacttaatttggctcgtttcttacgtttggtcagagtcgtcagagtgtttagggctgtaaatatagttaaaaaatatggtttggaaaaggttattaggcgtactcatgcagataagatatttattgtcatagctgttatagttgtcatattcactattctcttaactctttccggtcatgaaaacatatccgacagtttttattttgttgtgatcaccttaaccactgtaggctatggcaatgaaggttttaatgagcctttagcgaaatttgtgacattatttttaattattgtcggtgtattggtcttcagtactatcactggtgtaacctcatccttctttatagataagatgctggaagagggcatcagtgtggatgagaacttacatttcataaatcaaaagttaaacttccatgaaagggaaatggaaaaaacaagaaaagaattggctgaaattaaaaaggaattggaaaagtctaatgagaattcagaagaattaaagcaagaaatatctgaattaaaagagttaattaaagaaaataataagtaa

SEQ ID NO: 789 - DNA, 1044 bp, Methanobrevibacter ruminantium
  source 1..1044: mol_type = genomic DNA
atgttttgtcataactgcggaagtgaaataagtgatgatgctaatttctgcgtaaattgtggagctaagctaatacgacttgatgaagaaaaagctcagccttccaaatcttccagtagaggcttatccaacaagaaaacagacgaacaaaaggaaacatcctccggcagaggattattcaacaagaaaacagacgaacaaaaggaaacatcctccggcagaggattattcaacaagaaaacaaaggaacaaaaggaagccataaaggaaatcaagtcttacactaagggtaattataagagattcaggcagatcattccaagatatggcatattagcaatggaagtttcacatactaaggttttcaatggaataatcaaaacaatcagaaaagaaattgaaaacgagaatctgactgccgatcagattgaaggaagagtctttcagcttctaactgaagagtatggagagcctatgagtcaggaagaagctgatgaattgttcaatcaacaaaatctccaaacaaaacttgaaaatgaaagaaagttggaacaaaagttcggcgttccatttcaaaatagggtatggttcaaatgcactgttgaagagatgaggcattccactttcaccaacactaatgacagagacattgttgacggatatgtctttgttgaagacacttttttggagatagttaaggaatcagttttcttaaagtcaaaaatggggactagaaaaatattctatgacaacattgcaagcatagaccatgatgccaaaggcaggcttaacttaagcagcagtctagaaatctatttaaagtcatctgacagagttcagctaaagcatgtgaacaaagggatggtagaccttgtcaccggcaagtataatgagtatatggagaataagattaatgacaatgctgaaaacgtcaccaatggcaccaatagcaatgttgatgaactgatgaaatatgcggatttatatgaaagaggcttgttgacccaagaagagtttgaacagaagaagaaagagttattatag

SEQ ID NO: 790 - DNA, 678 bp, Methanobrevibacter ruminantium
  source 1..678: mol_type = genomic DNA
atgaaaattaatttaaaaagagttattttgggaattattttgattttgatttgcatttcctcagcaagtatcatttcagcatatagtattgattctatggaaattcaaggaggatgcatttcaacaggaagcggattggaagataagacttatgcaaccatttatgtgggggaagaatacactggagcagatgttcttatacagatttattattcccgtgacggttcacagttaaaccctggaaataaggttccaaaaactgttgattctttaggttgcattgaagttcctagtgcaaatgcatttaaatattatccagaccttgctgagattaatctatatgattctgatggatatctgattgattcaagggatgtatccttatcaatccatagcggagaacaaacttttggagacttttatggttctagttcatcatcaagttcctattcaagttcttcatcaagcggaagttctagttcttcaggtgatggaagtacaactacctatcatagcggaacctctaatagctatgttggaaacagtaacactggaaaattccatgctcccggctgtgatagcgttgataagatgaagccttcaaataaggtttatttctcaagtcgtgatgaggcaataagtaggggttattccccttgtgggcgttgtagcccttaa

SEQ ID NO: 791 - DNA, 732 bp, Methanobrevibacter ruminantium
  source 1..732: mol_type = genomic DNA
atgagattgaaaattatattaaaatctaaaaagaataggttgaagattccttttaattataatcatattgtttctgctataatttataacaaaattgcggatataaaatatgcagaggaattgcattcttctaattcttataaatttttcactttttctcaattaaatattcataaatttaaaagaattcattcaggatttttatctcaaaacggcaaaatagattttttaatttcatcacccgatgattatctgataaaaagtttagttgaaggatttttaaatgatttgactattaatttcattggggaagatcttcttatagagaaagtagaacttctaccagttcccgattttgaagaagaaattaatgtaaaaacattatctcccataatatcaagaactaaaaaagaagtggatggtgaattgaaaatttgggatttggctcccggtgatcatttcttcaaaaatttagaaaatactcttatatacaaatatttggagtttaatggattagaatcaaatgataaaaatataaaaattttttcagaaatgagaaatgtgaaacgtaaacgaataattattgaaaaaggtgataaacaaacgtatcatagggcatatatgatggatttaattctaaaaggtgataaagaattgttaagatttgcttatgatgcgggtttaggtgaaaagtctggacttggttttggcatggttaaggtgattaattaa

SEQ ID NO: 792 - DNA, 2160 bp, Methanobrevibacter ruminantium
  source 1..2160: mol_type = genomic DNA
atgatatctgatttagttgatttcggtaaatggttagttgaaaataacgaagacggtattggatatatggttaaggaagatgattatcttctaaaaataacttataataatgaaattgatgattttgttatagatggtatatttgagaatgacaatgaaattgttttaggtttttatgaaaaatctatatttaatgatattttaccgactcctagaggatcatctgatcaaaatatcactattgcaaataatactaatttaatgggattttcaccttttttacttaatttagatagtgattttttagggcgaaaaattaaaccagagaattatgataatgaaagtgattattataaagtcggttctgagagatttttgaaaaaaaaggcagggggtaagtttaaattagaaaaaactcttgacaagtttactcgatcattagatgataataaaaataataaacaatttaataatgatataattactaaactatttgataatcccaatgagctttttttaaagaatattccttcacaatatgaagatatttttattcaggaattttttaacaatctttcaaaagaagaatatattaaaattataaataaattttataaattcttggatatgaataaaaacgacattttggatagggtcataaaatttaaattagaagaaaatgttagcagtagattttttatagtgggcgtttttggagactatagggatttaataaatgatttatgttttttatattgtaaattaattaaaaccagaaataaacatatagagaattatgatggggggatttgttctatcccaaattgtaataatcattcaataacctatccttctatccagttttatgctgccgataaaaaattttattttaattattcaaataatattgaaaattctagtttaagattatgtgatttatgtaatagatatatgctttttgcatttgaaaaacttaaagctaattttaaaggaaatatattagttatcccaaagacttatgacggagattatagtgaatttttagagattattcaggaggataatgattttgaagtaattaatgaattacttgaagagaattctaaaaaatttacttatgatttcttaatatatactccttcaaatgctcttttgaaaatagaaaaatatattgataattatcaagctttccttactaaatttgatgacatcaatctatataattatggaaatttaaattatttgtacaatgaagttctagttaatgatgaaagttccttagatgaagatagaattattattaagatttctaatctttttgattttcaaattatttttaaagaattattttatgaagttgatgatgggagattaaaatatcctaaaatgaattatttttatcaaatttataacaaggagttaactggagagaatggtatatttaatggttttagttcaaaaacagttaatatattttcaaaatataaagataatattttcagttttatttatgaagcgaattttgatgcattaaataaaaatatgattaatacaattgttttaaattcattaaccatttttcaaaaaaattctattaaaaaatctattagatttgaaattgttaaaagattaaattattggtttatgtttaaaaaagaatttttaggagatactatgttattaaatgaaaatgttttaaagttaagacaaatatttggacatcctaatattactactggtgaaaataataatgaaaaaattgaagtagtctttgacgatgttgagaaaaaacaagttttagatttaattaaagaggataatgccattaaatattatttgataggtcaattaattgcatatattgatgatttcaaatatagttctggcaaaaaaagagaggtttttactaattttattacaaatgctcataggaataatattaaaaaactttttgcaactgaaatattacaaaaaaatgttttttatattaatcaaatgaataaaaaaggaaaatttttatttactatgctagaatctgattatgggtctttatttaatgaggaagatttatcttatgaagattatattttgttgttatttactggatattacacaacaaaatttttgaaaaaaaattatgtatacaatggagatgaataa

SEQ ID NO: 793 - DNA, 960 bp, Methanobrevibacter ruminantium
  source 1..960: mol_type = genomic DNA
atgactgaaggaacacctgtaagaaactattaccaaggaatttacttaactgaaactataatgggcaatccaaatggggattttatagataattctccaagaaatgttgatggtgcggtatttactactgataagtgcattaaatataatgttaggaaatatattcatgatactttagaaaactttggtgaaaaagaaaatattgttttctttttcccacgtcttattgattcaacaaatgaagaagatatgaagtttaaaactagagatcaggttttcgaacattttaaaaattttgaagaaattttaaaagtatctcctgatgtaagaatgtttggtggaacatttagtgttgataataatgctaaacaaatctatgggcctatacaattaagttatggtttagatattaatggagcacaaatcatccgtcatcaaattggcgccccattcgctacaagtgaaggaagccaaaaaactgttggttctgaatcagttgttgatgatgcaattattgcttatgacattactatcaatccgaataattataaagatttattattagaggatgatttagaactatttaaaaaagcattatgggaaggcactaatttaagaaaaacaactagtaaaaagacagattccaaattattaattttaattaaatttaaaaatgattctgaaaatgataaagttgatgcaataaatatgggagaattgaaacagttaatttccataaaaggcggcaaatctaaaaaaatggatgaaaatactatttgtttggattgtgaaaatctagttaaaaaaattaaaaagtatgaaaagtacattgaatgtattgatatttattgtgattctgatgatgttgaattgaattcattagaaattgatggagaaaatttaaaagacactaatattaaagtcaacatctatgaacctttatcattactttctgattaa

SEQ ID NO: 794 - DNA, 864 bp, Methanobrevibacter ruminantium
  source 1..864: mol_type = genomic DNA
atgaaaattattgaagttgatatttggagtagttttggttgttttagcaaacatttctccaacactggaggtgttttgactcatttaattcctccaaaaacatcaattattggtattattggagctattttaggttatgatgtaaatgattatgaagataatgatgatgggacaaaaacttataaaattgagtctttaaacaatataaaagtatctatttatccattatttgagtttaaaactaaaagagttatatttaatctggttagtgggactaatttagacttggatattaaaaatattaatcaagatgttttaatatccccaagatataaattatttatttcattcccttcagaattagatgaagttgaagaattatttttaaatagggtaaaaaataataaaactatttataatttatatatggggagaaatgaattccctttgaatttggagtttgtaagagaaattaatgctgaaaaacatatatttagcaatgacaattcagatgagttaaaatccattaaagtttatggctcattaaacagatcttccattaaatcattaaatttatcttatgaagataatgattctaaagttgattctgatgcactcagtttaataagttcacttttaatttctaattctgctgatggtgtgagacatttaaaaagttttcatgagtttactattaaagattatcctattaaaagagaaaattttacagatttttcttattctccagtatctttttacagttcaaagaaatttggagagtgttttttctctaatttgcaacttaaagatggtgaaattgaattagttaatattggtgatgataagtggttatctctcatttaa

SEQ ID NO: 795 - DNA, 2826 bp, Methanobrevibacter ruminantium
  source 1..2826: mol_type = genomic DNA
gtggttatctctcatttaaattttaatgaaaatgagtctgtaattgagattaatagcgattattttaaagtatatgctcataaaaatgaattatttaatgagcatatctctaaaactttaaacatttttaaaacaattaaatcagagaatattttaatcaatttctatgattggtttaaagatcaggggtatattcatttaacttttgaggagtttaattttttaattgaggaatgtgtcagatttcatgatgtggggaagttatcatttaattttcagttaaaaagattaaataaaaacaaccctgctaaaaagaaggaacaaattaatgttttaaaaaaatttggattagattctattttgaatcaatttgaaggaaatcactccttgtctggtgcattatcttttttatcaaaatattatgatgttttaccaaaaaatgaattattttttcttattttagcttatgttattataggacaccatacaaatttaaaagacattgtaagtcaggatgattttttttataaggaatttgaagaaaatcaagctcttagcactactttaaaattttttgcattgttttttggtttaaatcaatccacaattaatcagaagttttttcaagaaattaatgatataggatttgattttttagagaatactataaatcattatgattcttccttttcatttttttattcatacatttattctttattaattagtgcagattcactagccactagtgaatataaaaactctacagaccaaattgattattcaaaatttaatcatagaatatcagataagttatttgcccatatgtataaatcattttataatgttaaacataatagaaatcttttaaatgagacatttaatttaaatgatatatgcccggaggatattaatgttttaaggaaagcgatgcttttagaatcatcagaaactttaaataatgctttaatggatgatgataaaaaaatatttttcttaaatatgcctactggaggaggcaaaacaaatacttctatgaaattagctttagatatggtaaaaaatactgatgctaatcgtattatttatgcaatgccttttattaacattattgagcaaaattttgatgtaatttgtaaatcctttggtttaaatgaagaagaggggaatatacgtcaaatatattccgcatctgagactatttttaataaaagtgatgaagagacattagaaataattttatctgatgatttttttaattatccggttatttgcactacttttgttagtttatttaatcctataataaaaaataataaaaaatataaatatcgtttaaatgcgttatctaattcagtaattattcttgatgaaattcaatctttacctttgaggaattgggtgagtttatattttatcattaatgagttatctgaaaaatataatatttattttttaattatgagtgcaactttacctagttttgataagttaaaattagaaaatattagggatgatgataattttttaaactataataatgtttcattaattaacaatcctgaaaagtattttaatcatgatttgttctcaagaactaatattaatggaggaattaaaaaacttggaataaatgatgattgtagtatagattactttttagaaattattagagaaaattttagtcaagattataataaaggacttatcgtcttgaatacaattaaatcatctagattgatttatgataaattaaaagacttttctcaggaatataattttgatattgacttattaaattcaagtattttgcctaataggcgaaaaaatattattcataaaatcaatcaggaagatttatcaaattatattttaattagtacccaaagtattgaagctggagtggatgtaagttttgattttgtaattagggatttttcgattttagattcaatagaacaagttcgaggtagatgcaataggagtagggaattaaatgataagtttcatgattctaatattaaaggtaatgtttatttaattaatttggaggatgataatagtaatctttataaatatatttataaagatgtggaacttaaaacaagaattaaagaaacaattaatctttttaatgaaggttttgagttaaatgatgatttaaattatcaatatagtaacatattaacttattatgataatgtttctttagatataaatgatgtgcatgattctatggatcaatcattcttgcgtaatgatagaagaaatatcgtgttttggaataaaatgaagtattctaaaattcaaaaaaagaaaggcattcatattatattaaatgatttaaagcaatattctatatttattccattagatattaaaatttatgatgattctttaaatttggataaaacaatagaggatatggatttgaatgagttaagagagatttatgacgaatttgggaaacattttattttttcattgaatgagattttatttatgaaagaaaatagtgattttttaatagaaggagattatgttataggggaggaggtattaaaccattttcaaactatggttgctagagtaaaagatgattataatcaaaaattattagttgaaaaggtattttcatctattttaagcaattttattatgaatatttcttttaataattccgatcttgaggaacaaattaaagaattagataaagaaagttatttctatattttagagaagaatatgattggtgattctgaggagcatttctattctgaagaatatggttttaattttaaacctactataacaaatatattatga

SEQ ID NO: 796 - DNA, 507 bp, Methanobrevibacter ruminantium
  source 1..507: mol_type = genomic DNA
atgagtgactatatgaaatcaatcaatggaacccaaataaactactatttcatatgtaaaaccaagctttggctattttcacacaatatccaaatggaacaggaatcagataatgtttctttaggtaaacaactccatgaaacatcatataaaaaagaaaaagagtttttaatagacaatctaataaatgtagactttattaaaaacaaagacccaattgaaattcatgaggttaaaaagacccaatctatggaaatatctcatgaatatcaattactatattatatgtactatctaaagaaagaaaaagacatcagcaatacagtgggctatttaaattatcagaacatcagaaaacaaattgaaatagaacttactgaagaaaaagaagaagaactggaaacagttcttaatgatattaaaagtattgtcgattcagatgttccaagtcctaaaaagtcacgaatttgtcgaaaatgtgcttattttgaattttgttttgcttaa

SEQ ID NO: 797 - DNA, 969 bp, Methanobrevibacter ruminantium
  source 1..969: mol_type = genomic DNA
atgtctaaaaagaattattacttattatcagaaggtattctaaaaagaaaagaaaacaccatatactttgtaaatgaaaaaggttcaaaaccacttccaataaacaagatatactctatgtatgcctatggccaaataactatttcttcacaagtgattagtctgtttgcaaaagaaggaattccaatccatttctttaactattatggctactacaatggcagcttttatccaagagaatcactgttatcaggcgatttattaatcaagcaagcagagcacaatattgatttttcaaaaagattaaaattagccaagctttttgttgaaggtgcggctaaaaacatcttaaaagtgcttgcatattataaaattgaaaacaatattaaaaacaccttaacagaattgaatgaatcttcaaaaattacagaagttatgaatgtagaaggtcgaatccgtgcagagtattatcagtattttgatgacatacttccagatgagtttaaaatggaaggtagatcaagacagccccctacaaatatgataaattcgttaattagctttggaaattctatgatgtatgctagcgtaattactgagctgtacaatactcaattaaaccctactatctcttatcttcatgagcccgctgagagaagattttcactcgctcttgatttaagtgaaatatttaagccaattattgtagatagagttattttttatttagtcaataagaaaatgataactgaaaaggactttaatcaagatcttaactgctgtcttttaaatgataagggaagagccacttttgttaaggaatataataaaagacttgagactaccatcaaacataaagatttaggcagaaaagtttcttatcaaaggttaatcagactagaagcttataaacttaaaaaacatgtttttggtatgaaagagtatgatccatttgttatttggtggtaa

SEQ ID NO: 798 - DNA, 267 bp, Methanobrevibacter ruminantium
  source 1..267: mol_type = genomic DNA
atgtatgttataatagtttatgacattaaagtagaaagagtaaataaggtaaaaagtttccttagacaacatcttttttggatacaaaattcagtatttgaaggagaattgacaaatagtgaatataaagcagtaactgatggtttattgaatattattgaagaagatgaagattctgttattatttatcaattaatgatggaagaatctttaacaagaaatgttttaggggttgaaaaggcatcagtggatgatgttattttgtaa

SEQ ID NO: 799 - DNA, 702 bp, Methanobrevibacter ruminantium
  source 1..702: mol_type = genomic DNA
atggacgaatggaaagtaggagacccttctgattggggagaccatgttggagtgccagacattccctatatgggatacataaatgatgatggatatgaagaggactattccacattccctgaggaaaatggtggcagcaagcctaaaagcctgggctctccagaggaagatcatggaaagatattgttagtaaaggcaaaggtatatctgaaatggggaaatcttgatggtgccatgagctgcataaatcaggcaatagacatattcaagaatagcagacggatcggttactatgagaattcattgcatgtaaaaggaatgatttatgaaaaaatggagcaatatgcaagagctctctttttttatcacaaggcatttaaagtcggagaatgcgtgagcaatgcttttgatgacagaaataaattgattgatggagacaagatagacatcttgaaagagcagttcaaggattatcgcactgcctatccctttggaagttctttaaagagggatgatttcataatctattgggatttggcatggcgcataaacgaggatagtagcgacactgaaaaattggaattggcattggaagtgattggttttgtcaaaagaatggcgccgagtattgaatttgtaggaagggaaaaggaactttatgaaaaccttgaaaaggagattctagagaagatcaataaataa

SEQ ID NO: 800 - DNA, 180 bp, Methanobrevibacter ruminantium
  source 1..180: mol_type = genomic DNA
atgggagaatgtccttattgtggtaaagatgtggactttacagaagtctgtcctcattgcggggctgatttaagtgaatttgatgaccgatgtcccttttgcggagtacttataagccgtgcagcattgatctgccctcgctgtgggtcagatgtatacgaattttggtatggtgattaa

SEQ ID NO: 801 - DNA, 480 bp, Methanobrevibacter ruminantium
  source 1..480: mol_type = genomic DNA
atggatagaaaggacatcataatcataatactcgttctcataatcatatcactattggcattgggccttcataatcatcaagtaactgaccaaggcactgacctatatcgcactgtaaaggtatctcctagcttttcgctggatgttccactctcaagcaaccttacaagggaaaacgtcagcgaaaacatgtatattgtaaacgactaccaaaacgacattcaaataatctcattcaatatgaagaatgcctctaagatggaccttatcgaggacggctaccaatatctcaagagagaggagtcatataagttcggtgcagaggagatcattaagatatccaatcataccgtatggcacaataaggatgatggcagctatattgcattcttttcacctaacaatacagaggacaatataatgcttgtaactcatgacaatatcactatggctcgcatattatctagcgcaaggtattga

SEQ ID NO: 802 - DNA, 1206 bp, Methanobrevibacter ruminantium
  source 1..1206: mol_type = genomic DNA
atgacatctgagattatgattttaacaccaactgcagtggttttagcggcggacagtgcagttacaataagcgatataaaaacttatgatggagcaaataaattattttaccttagcaataaacctccaatgggagcattaatatataatcttgcagattttgtagatattccaatagaaacaatcattaaggaatttagaagaaagattgatggaaaagaggatttaagccttatagaaataaaagatgaattcgaaaaatatttgcatcagataatttccaaatcaaggtctactttaagtttccaagagcaattggattattttatagaatttattcaagaagaattgtcttatgtagattttgatgaatttaaaattggtttaaaagatgaactttctgattttgatattggtcttttaggcgattttaaagatgaggttcaatcacagattgatttgtatgaagataaatttagtttagcacttccagatgattgcaatggtttggatgaagaagattttatatcggatttaaaaaaattgtttatctgtaatatgtttttaatgccttttattggcatagcaatatctggctttgagaaagatgaaatgtttccttcatttattcattttaagataaattatttgtatgatgaagaatttcttttaagggatgttgaatttggatcaataggggatgaggaagttatattaaaggcattagctcaagatgatgtaataaatacctttttaaattctattgattcaaaaaccgaaagggcattggaagatttttttatagagtttaaaaattttttatttaattatattgaatattgtattaaatctaatgaggatattagtgaggagaatgaaaatttcttattagaaaacatatctgatatggaattttctgatgaaaaagttagaaatatttttattggttttatagaatgtttgaaagcaaaacagaagaaaccaattttagactcaatttctgttttgccaaaaggagaattaagtaatttggcggattctttaataggtatcacttctttaagaaggaaaattgaagatgaagtagagacagttggaggacctatagatgttgctattattactaagggtgatggctttgtttggattaaatgtcatgatagttttgataaggacttaaaccctcagttttttgatagtaattga

SEQ ID NO: 803 - DNA, 177 bp, Methanobrevibacter ruminantium
  source 1..177: mol_type = genomic DNA
atgcattatttagaaaaatataaattaaaatcttttagaaggaaacctaaagtttttagaagaaaatacaatcccttccctgaaggatttgtagagaattttgttagaaaaagctttggagaaattttggattcaaaaatggataattcaaatcaactttcaaaagaagataaatga

SEQ ID NO: 804 - DNA, 333 bp, Methanobrevibacter ruminantium
  source 1..333: mol_type = genomic DNA
atgaatttatataaggatatattctatctggcaggctttatttgccatcagaagccagagagatcatttcacatatcccactgccaattgccattctgtgcaagatgctgtggaatcatcatatctgtcatcgcttcatttatcctcgctcagtttgtagcctttccaatgaatgccctggcttttcttctctttgtcccaatgattgtagatgggcttgtgcagaagtataccgattatgaaagcacaaatttcagaagattcataacaggcttcttatttggattcgcttatgtctatgtattttacatgtttggattgaacgctttatga

SEQ ID NO: 805 - DNA, 681 bp, Methanobrevibacter ruminantium
  source 1..681: mol_type = genomic DNA
atggaatatgaaattcaaggcggaaccttccctattgtagtctgcacattgcaagagggagaaacaatgaaaaacgaaactggcgctatggcatttatgacttctggaatgaaaatggacaccaatactggaggaggcctcctaaaaggtcttggaagagcattatctggagataccatcttcttaaactacttcactgcacaaagggacggcgagcaagtaggattctccgcatgcagtccaggcaggatcatgcctataagattggatggaaccaatacaatcataggccaaaagaatgcattcctcgctgcagaagacagcgttgacattgacatacactttagaaaaagccttggagcaggtctctttggaggagaaggtttcgtccttcaaaagttcagcggaacaggagttgcattccttgagattgacggagaaataatcaagaaggaattggctccaggtgaaaagctattgatagatccaggacatttggctgcaatggaagaaagcgttggatttgacatagaaagggtcaaaggagctaaaaacatcctattcggtgaaggactcttcttctcaagattaacaggtccaggtacagtatggctacagaccatgccaataagcagcttggctagagcattggttccatacttgccaaccactactgaatag

SEQ ID NO: 806 - DNA, 252 bp, Methanobrevibacter ruminantium
  source 1..252: mol_type = genomic DNA
atgagaagaattgatgagctgacaatagaaattgatcaaacaagccttgaacttgaacaaaccaaaaaagaactgagcatcctattcaaggagctgaggtcatttaaaaagaagattgaaaacggtatcgaaatcgacagaaaggaatatgaagactgtgtgttcaacaacaagctgcttcagatgaaaagaagacggctgattacacatctcaaattcctaaacaaggagttctatgaaatcctatattaa

SEQ ID NO: 807 - DNA, 861 bp, Methanobrevibacter ruminantium
  source 1..861: mol_type = genomic DNA
gtgaagatattgaaaacttggattgaaaaacttgatattattctatcaatactgattgtattggacatttcatttctaacagcttcatttttgttggatttgaacacaacctatatcaatttcatgcttttgttcgatacaacattatgttggatccttatagtctcattcatctttaagctgcttaattcggatgacagaaaggcatatatgagggaaaattatcttgattttttagcatcaatacctatggaccttgttttgctccctttcagttcattgcatatcagcttgataaacatagtgattctagtaaggttcctaaggctgttactgctatttaaggaatcctacaagtatgtcaagaagtttttcaaggcaacatcctttgataaagtcgtagcattattcatagttatcgtagtgggctcaacattcgcattggaatactttgatcctgcaatccctaacctatactacagcctatggttcgtatttcagacaataaccacagtaggcttcggtgatgtgattcctgaaagccctgtaggtcagctgattgcattgggccttttgatggttggggtactcatgttttcaatattcactgcaagctttgcatacctctttaacgaaaaggtattccgtgaggaaaatgaggatttccatgaaaagataaacacagtcagggaaaatcttgcagaaaacaaggaaagggtagaggaaatcaggcaaagcactttatccacaagcgaagagattgctgaagttaaggaaaagctaaacaaatccgaagaaaatattaaaaacctggaagagcgtatagattaccttatagatatgattgagaaaaaggaatag

SEQ ID NO: 808 - DNA, 579 bp, Methanobrevibacter ruminantium
  source 1..579: mol_type = genomic DNA
atggattttaattttcacagaattgcaaatgagattgcaaagataccagatgagaagataaaagacttgtcttgggaagatagagtaaaggagctcttaagctttagacaatactataatcaatatcatgaatcatatggcaaggattatttggactttttagaaaaagcgaataaggaaggggacttagagaaaaaggaggatctaatttacttctttaaaaaggagactctaacaaaggacataaatctggacggactgaactatctgtttgtaaacatattcttaaaatatggctttgaatatttggattataatgatacaataaacaatctaaaggacaaatatgatttgaattttaagcatgattggattagtctcctttcaaaggaggatttaagtctttttgagtcaataaatcttttgaattatattcagcgctctgattattgggactatgagcatatgccgttgtcatatgcaatattcgatggaacgattgataatattttaaagggcatggaaaacaatcttgatgaggacaatctagagcttttagatgttttattaaaaaaataa

SEQ ID NO: 809 - DNA, 1413 bp, Methanobrevibacter ruminantium
  source 1..1413: mol_type = genomic DNA
atggcagtttataaatgtagcgtttgcggatatgaatatgatgaagagaaagagggaaagcctttcagcgaattggaaagatgtcctgtttgcaagcaaccggcaagtgtttttgaaaaaattagtgataattcaaccgaatcagattctaattctaatgaaatatcatctaataatgaaacagccagtgaactgtcttatccaactgaaacttcaaggacagacagctctattgctcatatgtcagacatacataagatggctgtggaaggaacttccatcattgatgcgatgtccacaaggcttccaatgcctagctgggatgatattctaataatggcaaaccagcttaatccatttcctcttgaagagcatgcagatgtgagcacaactacagttatcggcaagaatgccttaaagccaatggttcttgaaagcccaatatacatctcccatatgtcctttggagcactctcctatgagacaaaggtggctcttgcaaagggttccgccatggcaaagactgcaatgtgcagcggagagggaggaatacttccagatgagatggcaaacagctataaatatatttttgaatatgttccaaaccattatagcctgactaaagagaatctgatgaactcagatgcaatagagataaagataggtcagggaacaaagcctggaatgggaggccatcttcctgccgagaagataactctagagatagcagagcttaggggaaagcctatgggggaagatgtgataagcccgtccctatatggggagataaaatcaaaggaagacttaaaagaccttgtaagtcatctaaggaaagaatcagaaggcagacctattggcgtaaagatagctgcaggaagaatcgaggaagacttggagttcatttcatatgcagagcctgatttcattacaatagacggaaggggaggcgctacaggtgcaagcccaaggcttataagggatgcgacatcagttccgaccatctatgcattggcaagggcaagaaagtatctagatgaaaataatctggatattgatttggtgataacaggaggccttagagtctccagcgactttgcaaaggccctatccttaggagcagatgcaatagcgattgcaacaggggcattgattgcagcaggatgtcagcaatatagaatctgcggaagcggcaattgtccagttggaatagcaacacaggatgaggcccttagaaaaagattggatatggataaggcttcaaagagagtatttaattatcttaatgtttcaaatgaggagttaaagacctttgcaagaatcacaggtcatgatgatgttcatgatctttctgtggacaatcttgcaaccttcaatagcgaaatatcagattacacagatattaggcatgtatga

SEQ ID NO: 810 - DNA, 3894 bp, Methanobrevibacter ruminantium
  source 1..3894: mol_type = genomic DNA
atgggctttaagagattaaaaagacttttttcatcagataatgataatgaaatggaaaagaatgaagaaaaaaataaatctggtgaagaaactttttatgaggaatctgatgaaaaggctttttatacagaatatgatgatagtggctttattttagataataattctgatgattcttttaacaatggttctgatgatgacttatctttgaatgatggtttaaaagaggatttaaatggttctgatgataatttatctttaaataatggttttgaagaggattcatttggttctgatgatgatttgaccttaaataaccaaccgtcctcaaatagaaacttcaattatttaaataatctaatacatagccaccaaaatgaaatcaatctggactcagacattgtctttgatagccaaatggacaacacctaccttgaaggaatcaatttggatatggataatcttacaattgacggcaatggacgtacaattgacgctcaaaagaaatcacgcatctttaatgttttaggagaaaacataagattcacaaacatcaccttcaaaaacgcctattctaacgaggatggaggggccataagcataggcaattattcatctgtctattttgaaaactgccacttcatatccaatgatgcaggagagaatgatggaggagccatatcaattggagaaaattccatctgcacaattaaagattctgttttcaagcaaaacaaggccgattccggaggagccatagtgaatgaggggactttaaagatcatgagttccaattttgaatataactcctctcaagtctttggaggggcaatctacactcatcattcaaaagtggaaattgcctattctgtctttaaaaacaatatctcctcttcaggagggggaatatatgtcctctttgattgtgacatgattatcgaagagtccctttttatagataatgcttcaatgtctgaagggggcgcaatggccaatgaatatggcggcaagattaggatacacgaatccctatttcgcaacaaccatagcttgattggcggcgcattatgcaataagggctccccagtggatgatggtaagaatttagtgagtgtatctgattccaagtttgaatataactcttcaatagagaataatgacacaatatatagcactggcgtattgaagcttgaaggcaataccttcaatgaaaatgaccgtattcttgcctcaaataatcctgaaatcattaactccaaatatgtggaagccactgaagacattattgacttggcaaaatcaatcgattattcgattgcaggggaatcaaatctctttgaattgctggattcagacattagaaatttcaattatcttgaaaatttaatccgatcttcaggtggagagattatattggattcagatatcatattaggtgatgatgaggattacactgatggaattcgactttcaaatgagaatttaagaatcgatggaaacggatattcgattgatgcaaaatcaaggtctagaatattctcaatttcacaatgcaatatcacttttgaaaacctaagatttaaaaacgcttattctgaaggcaatggcggagcaatctattctgtaaacagttttctcacctttaaatcttgctcttttgaaaataactccagcgataatggaggaggaatctcaactgaaaacagcacaaacgagtttaagacattgtcaacagaaaacaacagaaatgagttcaagacattgctttttgaagattgcagctttgaaaataactccagcaggagtggaggagccatttccactgagaacaatgatctaattcttaaaacttgcctctttgataggaacgaatctaacttaggtgcagccatcatctgccaaaacggcaaggtcagattggataactgcggattcaaggaaaacattgcaagcgacggagctgcaatttattattcttcacttccaataggcacttatataaatgacgattcagtcaattttttagagataaatgactccgtttttgaagcaaacagattaaccggcaccaatttgactgtaagcattatagactgtgactgttcaatcagtttcaactcactgtcctttaaggacaataagtttgattatggggatttaatcaatcaaaagtatttggaaaataaaaatagcataataaaatcctccaaattcataggaaacggtggaggaataaccgcttctaacttaaaagtcatatcttgtgaatttattgataatcgctccaatgcattctcatcacaggaatacttctatgatggatcatctgaaattgaggactgcacttttaaaaacaatcattgtgcaatctcaagccatgaatcaagcttgaagattaaagacgcaaggttctatggaaatgattcggcaataatgaataggggcaaagcgtatataaatgattcccgctttagagataactctatggcaatagagaactctgcaaattcatatatgtttgcctcaaatctgaatctcttggataatgcttccggagagtcccatgatatgataaatcaaggtcatttaagcgttatcgatagcgactttataaattgcaataagactttaaacctgatttgtcaagaggataacgaagatgcggttttggatattgaaggctgcagcttcaagacagattcaaaaaggccaatatccataaatggaggttcatctagcattctatattcccgctttgaattggaccagtcaaaaattgcaattttcaatgattcaaaattgaatattgatgcattgagcttcaaggattatgagggcaatgacttagagggaaaactgatatacaacaacgattatcttaaaagcaagacaagggatattctagataagattgactcaagcgaatcagcaattactaaatatgcctatgaaacacttccagcggattggaaaggctttgactatctgataaatctaataaaagaatcaaatggggaagtgaagttggattgcgatatccttattaatgacattgaggaagactattacggcggaggaatagagctctttgaagacggcttgacaatagacggccaaggacacacaatcgatgcagataatctctcaaggatattctatgttgtaggcaatgacatagtcttaaagaatatcaagttcataaatggatttgagccattggatcaattgttcaacagaggggccggagctatctatattgttcatggagcatccttaaaaatcgtcaattgtgaattttatcaaaacagttctaagtcatttgcaggtgtaatcgccaataagggggacttgactgtcattgattccatttttaggaataacttttcaaatagggcaggagcattccttgaatcaaggggagagtcccatttcatcggatgcaggtttgaaggaaacaatgcaaaaagcgctggaggagccatagcggtttcacaaaagggcaagacaattgttgaaaaatcatcctttaaggaaaatgagcttagcttgaaaggaagttcttcaggaggggccatttcaaattcaggagagttggatgtgattgatagtgaattcattaaaaataaaagcgcagcttcaggaggagccataaattcaagctctcatgctatcttaagtgttaggaaatcagtatttattgaaaatgcctcttttcttggaggtgcaatcaatgcagacagatatggtgatttgattgtgatggattcatgctttaaggcaaatgcggctgcttatagcagtggagccatttatgacagcactgatgagtctggagttcatggatgtgaatttttaactgaaagcgataaggtcaagtatgcattggaggattga

SEQ ID NO: 811 - DNA, 1527 bp, Methanobrevibacter ruminantium
  source 1..1527: mol_type = genomic DNA
atggaagaggaatatttaactgtaactaaactgaattaccacataaaaagattggttaactctgattcatcacttaaaaacgtttatgttcgtggtgaactctctaattttaaacgctatcccagcggacatttgtatttcactcttaaggaccaaaacagtgaaatcggcgggataatgtttaagggacctgcaagcagactaaagtttgagcctaaaaatggcatgaaagtgctcataaacggctatgtagatgtctatcctaagcaaggaaactataagatatatgctcaaaagcttacagaggatggaatcggcgatttatatatagcatatgaacagcttaagagaaagctatctgctttaggctggtttgatgatgaacataagcaggaaatacctaagtttccaaaaagggtaggtgttgttacagcttcaaccggagctgcaatcagagatatagtcataaccattaagcgaagatggccattatgcgaaatcattctatttccttcattggttcaagggaatatggctccaaaaaacattatcaagcagataatacttgcagacaatgagtttgatttggataccctgatcataggaagagggggaggaagcatagaggacctttgggccttcaatgacgagacccttgcaaaggtgatcttcttttcaaaaactccaataataagtgctgtaggccatgagatagattggacaatctctgattatgttgcagacttaagggcagccacaccaactgcagctgcagagcttgcagtgcctgacattaatgaaatagaatcaaacattaagaatctggatgataggctaaacaaggtgattgacaagcagttcaatgaaaataaggattcatttgaaaagctagtcaacagaaacctctttaaaaatcctgatttattatacaataagaagatcatgtatctggattctgcaaagtcccgtttggcagtatgttcaaagaacatgatttatgataataagattcgggtgtccaatgtaaaaagttctcttatatttaagaatccaaaaatgctctttgaatcaaagtcaaacaagtataatcaattgaaatataatttaaactccagcggaaaaatattaattggcaaaaaggaaagcaaattggataagtataggaattcatttgtcttcaagagcccaaacaggctgtttgaatccaaggcaaataggtattttaaggttaggactaaccttgaatacagttcaataaacctgctgagagataagaaagacaatctgaatgagattaaaaaatccaatccaattaagaatcctcaatccattttagagcctaatgaaatcagattggataagtatattgataagttggatgttttaaatccattgaacactttaaagagaggttatactgtatctagagttgatggaaaggttgtatccaaggcaaaggatgtaaaaaaggatgacattttggaagttgaatttgatgatggcaatgtaagcactaaagttttatga

SEQ ID NO: 812 - DNA, 252 bp, Methanobrevibacter ruminantium
  source 1..252: mol_type = genomic DNA
atggaaaatatagaatatgtggaaagcaatattgaaaatttaagttttgaagaaagtttagcagaattagaaagaattgtaaacagattggaaactggtgaagttcctttagatgatgcaattgatgaattcaataaggcaatgaagctagttaaaatatgtgatgaaaaattaaacagcgcagaagaagccattgcaaaaatagtaaatgaaaacaaggaagttgttgattttgaagtagaagaagaataa

SEQ ID NO: 813 - DNA, 735 bp, Methanobrevibacter ruminantium
  source 1..735: mol_type = genomic DNA
atggttaaatttgaaattaaaagtcatgacgggcctggaagatatggcaagcttgatggtatggaaagcccagttattttaaaggaatctgatttgaatatggctccagatgaatcatcagcctatgacattgaaagggaaatcgctgaatggagcgttaatgaaacattaaagcttgctcgggaatatgaagataaggatattgcagttattcatggaagcaaatatattgatttgagagtcaaatgcttgaaggaattggaagagatgggatattccggatttatcatagcaaatgcagatgaccttcttcttcatccaagagaccttgtggacttgattgtagagcttagaagaaatatgaaatcaagcagcatacttattttcccacatgctgaagcacagttcattcctcttcttgcttatatgggaattgatgcattctttgatgacattggagagtattacagctatttgaatgtattgatgagccctacaaagaactatgacttaaaggtctatgaattatatgatttaactagagaagagcttgaggaatataataagaatacaattgactttgttttaagggaagtcagagagcatatgaaaaatggaagccttaggaatcttgttgaagagagatccgctacaagtccgcagtatgcttctgctcttagaatacttgataaggagtatgctgattacttattagagtatagtcagttgtattag

SEQ ID NO: 814 - DNA, 447 bp, Methanobrevibacter ruminantium
  source 1..447: mol_type = genomic DNA
atggttgataaagatttagtggtgccacgatatttaaatcaattgatggatattgtaaaaagctatgaaatgtacattaggtctaacatcaaagatttagacattactatgggggaagtaccgattttactggctatttatgatgatgaaggtcttaatcagatagatcttgttaagaaattccatgtgactgaagctaatattagtaagactacaaaacatttattgcaaaaaggatttattattaaggaaatcgatagtgacaacaacactaaaaaattattatatgttacagaattcggtgaagagatctgtaaggaattgattgaattctatgaagtttggaagaatgaaattatttccgatgttccaaatgaaaatctatcaatcttttcacaggtattggatacttttacaaacaattcacagaaatattttgaaaaatag

SEQ ID NO: 815 - DNA, 1077 bp, Methanobrevibacter ruminantium
  source 1..1077: mol_type = genomic DNA
atgtctgtgttagatcgacttaaatccctaatcgatggggcaaaagaggatatcgatagtagtttaactaaagaagcagaatctattaaggaagctgctgattcaatgcagacatcttcagaagaggaaattgagaatatatctgattctgaaactaattctgatgaagaaacttcaaaagtagaagatgctgaagaggaggtaatcattcctattcatgcagaagaagctgaagatgctcctgaagaggaagctgaagaagttccagaagaagctgaagaagctcctgaggaagttgaagaagctcctgtagaagaagctgaagaagaaactgatgaagaagtttctgttgaagaaattaccgaagaggctcctgaagaagaagctattgaagaagttcctgaagaggaagtttctttagaaactgaagaaattattgaagagccttccgaagaagactcaactgaggacgaagagccttccgaagaagaagcttcagaagaaaacgaagagagcgataatatgactttattaaaagaaaatgatatatattcaatggatgatattgataaagaatttacccaaaaattcattgatgctggtattgaaactgtagaccactgtttccaatgtggtacttgtggtggaggatgtccttccggaagaagaactccttacagagtaagacaaatcgtaagaaaatgtttattaggactcagagaagaagtagtatccgatcctgcattatggatgtgtactacctgttacacttgtcaagaaagatgtcctagaagtgtcaaaattgtagatattattaaaatggcacgtaacgaagcagctaaagctggatatatggctgacgcacacaaagctactggttctttcgtaattaaattcggtcacggtgtaccaatcaacgacaaaaccaaagaattaagaaaagctattggacttgacgaattacctccaacagtacattcttacccagatgctttagaagaagtacaaaaaatctgtgcagcttgtgaatttgataaattaatcggcttcaacatggaaaccggtgaattagaatag

SEQ ID NO: 816 - DNA, 885 bp, Methanobrevibacter ruminantium
  source 1..885: mol_type = genomic DNA
atggagattgcatatttcttaggttgtattatgaacaaccgttatcctggtatcgaaaaagcaactagaattttattcgataaattagacattgaattaaaagacatggaaggagcttcctgttgtcctgctcctggtgtattcggatctttcgaccaaaccacctgggctactattgcagcacgtaaccttgctattgcagaagaaatgggcgcagacatcatgaccgaatgtaacggatgtttcggttccttacgtgaatgtgaccacttattaaaagaaaaccccgctaaaaaagatgaaattaacgctatcttagctgaaactactgacaaacaatacaaaggtgaaaccaaagtaagacactttgcagaaattttatacaacgacgtaggtcttgacaaactttctgaaatgttcaccaaagacttaggtattaatgtagctgtacactacggatgccacttcttaaaacctaccgctgaagtaggtattgaagaatccgctgaaaacccaaccatcttagatgaattagtagaaatcacaggtgctaaatctgtagactacaaaaacaagatgatgtgctgtggtgctggtggaggtttaagagctagagacattgacgtaaccttaagttacaccaaagaaaaactcgacgctatggctgaagctggtgtagacgctattgtagaagtttgcccattctgtcacttacaatttgacgtaggacaaactgaagtaaacgcaaaatacggaactgacttcgcattccctgtaatgcacttagctcaattatacggattagctatgggattaagtgctgaagaattaaccttcgacgcacaattaatcgacgcagctcctgtacttgaaaaattagcataa

SEQ ID NO: 817 - DNA, 270 bp, Methanobrevibacter ruminantium
  source 1..270: mol_type = genomic DNA
atgtttattgcaattttaggtggaatatttagattcaaagatcttccagaagaatatggttcttatgtacagtttaaagcagctattgaaggaagagatgaaatcaaggacaatgatgaaatagctattttagacattacaggcactggaagtcaccatgttctattcttagacagatataataacattaatgaaatcaagaaagaattgagagaagcggatgcaaaagttaatgtcactactttaaaaatattggaaggacatttatga

SEQ ID NO: 818 - DNA, 528 bp, Methanobrevibacter ruminantium
  source 1..528: mol_type = genomic DNA
atgagcgatttgcctatagatcaatcttggttagttattgctaacctttcaaatgatctgcataagagaggaattcaaattcccaaacagattaacagtgatttaggtttggtaaagtcccagattggattttataagaaagaccctactcatccagacatgatcaatgagatggcaagggctgaaatgtcattgaatcagattcaaggcatcttattgtcatttgctgaaaatattggggaagactattataatgaatggctggacaagctaaacagagctaatctgggagagaagatatatgagactcctagcacccaatccaaattccttattaatgcacctccaggattttcctatgcaaagatgactttaaaaaagccacttgctgaagatagggtacaggaaatcgctgaatattatggtcttattcttgaattcgattcagatgtcactatagcgctatatggtgataagcctgacattcaagcggcattaaaggagatggcacctttcttctctgaatag

SEQ ID NO: 819 - DNA, 717 bp, Methanobrevibacter ruminantium
  source 1..717: mol_type = genomic DNA
atgaaaattttagcaattagtgatatacacggtaaaagaagtgaaaatttaattaattaccttaaaaaagaagacatttctttagttttgattgcaggagacattacagactttaaattggaaggttacgatgacccattagacttcgtcaaaccattcattgacgaacttgtagaagaagcggatgtagatgtatttgcaattccaggtaactgtgaccctgctggaatatgtaatgcaatcaaggaaagcggtccggatgaaaagcctgcattctgtttgcataatcaattgattgcttatgaaaatgtggttataatgggttacggaggatctaaccctactccattcaacactccaggtgaaatagatgacgataagatctatctccacgtttatgagcttttagctgagtatgattatattggaaacgattccattcctagagtaaccatcttgcttacccacgcacctccatatgacactaaggcagacactattgaaagtggagctcacgtaggcagtcaaggtgttaaaaagcctattcatgaattccagccaaacattaacatttgcggacacgttcatgaagcttgcagcatagataaggttggcaatacaaccattgcaaatccaggtatccttgaagaaaatcatgctgtcttgatagaagtcaatgaagacgcaagctacaatgtagaaatcgttgaattataa

SEQ ID NO: 820 - DNA, 1152 bp, Methanobrevibacter ruminantium
  source 1..1152: mol_type = genomic DNA
atgtcctatcaagaaaataatgcatctgacaagtctcttcaagataaagatatgaaagcgaagcagcgccaagatagaattgttaagacaagcataataggtattgttgtaaatctaatacttgttgccttcaaggccacaatcggaattcttgtaaattccattgcaatcactttggatgcagtaaacaatctaactgatgccttatcctccataataactattattggagctaagcttgcaggcagggctccagataaggagcatccttacggatacggccgtattgaatattttgcatctgtaattattgcagctatcgttctttgggcgggaatcactgcattgatggaatcatggccaaagatctttaatcctgatgttacaagctatactacagtttcattagtcatcgttgcagtggcagttgctgtaaaattcatattggggcgctacgttaagaatgttggagaggaaatcaattcacaggcattggttgcatctggaagcgatgcgttctttgatgccatattgtcattttccactttgattgcagctttagtctccatattcttccatatttctctagaagggatcttgggagtgatcatttccattgtaatcattaaggcaagtatagatatgctaaaggaaactgttgacagcatgattggagaaagagtggattcaaagcttagtcgcgatataaaggaggcaatttgtgaatttcctcaagtctatggagcatatggcttgagcctgcataactatggtccagatagcatggagggttctgttcatattgaagtggatgacagcctaacagctttagagatacataatctaactcgcttgatttcaatgaaaatatttaatgagttttccataatattgacagtaggaatctatgctagaaatgacgattttaaggatattagaaatgacctttatgaaatcacctccaaatatgatgaggtcatagaaatacatggatttttagcctatcctgaagagaagctgataacctttgacataattgtggattttgatgctgaccgtgaggaagttaaagataagattttagatgaaatcaagtcattgcatcctgattttacttattgcatgatagatgattatgatttgagtgattaa

SEQ ID NO: 821 - DNA, 915 bp, Methanobrevibacter ruminantium
  source 1..915: mol_type = genomic DNA
atgattatcgttcgcggttctgtaaacagaaaagagtacaccagccgtttttcaaagggcattctctctcgatcacttattcgttctgaattaagcccagataaggcatatgaatttgcctctagaatcgaagaggatttgaaaaacaagggagtcactgaaataactacagatgagattgctgatattgtagttaagctccttgatgaggaggaagaaaaatcagtctctgaaagatatctcaattggagaaaggtccgtgaagctaaagatcctctaatcatattgattggaggagcatctggagttggaacatcttcaatggcttttgaaatatccaacagattgggtattaagaccatgataagcacagacatgattcgcgaagtcatgcgaaagattgtatctgaagacttgagccctgtaattcatgaatcctcatttttagcctatagatctatgaaagtagctcctccgccagagtttgactttgtattggctggttttaaagaccaggttgcaactgtaagcgtcggtgtggaggctgttatcgaaagggcattaaaggaaggaataagtattattatagagggagtgcatatagttccgggatttattcgaaaggaattgatggaaaaggataatattgtcatgtttacattgaccttaagcgatgaggagatgcataagaacagattctactctcgttgcggagacatttggaataacaggcctcttgaaaagtatatgggtaactttgaggcaatcagaaagacaaatgcctatctggaagatcaggcaagaaaggaaggcactcctataattgacaatattgatgtaataacaactgttgactttataattgaaacattgactgaaacatatggaggaatgaaacatgttagaaaagactaa

SEQ ID NO: 822 - DNA, 369 bp, Methanobrevibacter ruminantium
  source 1..369: mol_type = genomic DNA
atgagcaaggatgttcttacagtggaattggatgaagctactgtatttgcatttgagaaactgatgaagcataagataagcgcaatgcctgttgtcgatgaagacggcaagatggtaggaattgtaactgcaaccgacttaggacataacttgattttagacaagtatcaatatggtactaaggtaaaggatgttatggtaactgatgttgcatacgtttcatctgactgcacaattaaggaagccatttctgtaatgtttgaaaaggctcctggagacagcatcatcaatcaattgcctgtcttggacaatggcgagcttgttggaatcatatccgatggggacataattaaaatccttaaggaataa

SEQ ID NO: 823 - DNA, 2028 bp, Methanobrevibacter ruminantium
  source 1..2028: mol_type = genomic DNA
gtgttattaatgaggaaaaagatccttttcctaactttgatgatactaatctgttttactttaaacagcgtttgtgctcaaagtttggataatattaactacgctaatgatggatttgacagtgatgagatgattaattgtgatttacacaaagattcaagtcaaaaatccctgaaatcaaatgctttaagcaataagaaaacaaccaatactgttaagttaacagatatgaaaaaagctgaaagcaatgatgttaaacagacaggcgctgcaaaagcaagcaatactaaaagcacaagcaaaagcacaactaaaacaaatgctacaaaaagcaatactactaaaagtaccgctacaaaaacaacagcaaatagttctagcactaagaaagccactcaaaacacaactaccataaacactcagactttagcaaaaagctcaagcagttatatggcttatgttgagaaaaacgctaagctacaggaaccaattacaatcagcaaaaagaaatacaaatctccggaatatttgtatttggtttctaaggctgtaagcaatatttccaaaacaaaagtggaaattaaagataagctaatcacaaattacagcaatactgactgtaaatcagttaacggaactataaataaaactgaatatgtacaagtagctaagaaaacagttagcttcattgaaaagaatcatagagctcctaattggattgcatcatctaaaggcaatataccacgtaaccaattgattttggtatttagcaaatgcttagaccaatataacaaaagcggcaaattacctagctccattaagttaaatgacttagatttaaacaaaatgaagcaaaagattgacagcagtaaaaaggtaaacagtaccagcactaaaaaaaccaacacaagcagtactaagacaaacagtacaagtgctaagaaaaccaacacaaccagtactaaaaagaccaatcctactgcaactagcactaacaataacaaaagcttagtcgaaagcactttagattcaataaaatctattttaaacaatatagaaaataaattgaatcccactaacaaagttctgtctacaaccggcactaaaaagaacacagttaccgttaattctagcaaggtaaatgttcaaataagcagttcttcaactgtaaatgtgaaaatcagtgctaaagacaatacaaatagtggaaagaacactaattctggaagtgctaaaaaaaccaacactacaagcacaaagaaaaccaacactacaagcacaaaaaagatagatacaaacagtacaaagaaaactaacactactagcactaaaaacaacacaagcagtgcaaagaaaactaacactactagcactaaaaacaacacaagcagtgcaaagaaaactaacactactagcactaaaaacaacacaagcagtgcaaagaaggtaaatacaagcagtagcaaaaccaacacaagtgctaaaaacaacacaagcactactgcaaaaagttcttcaaatagcaaatatctgagtacttctgtattaaacgataaatatcttggagaatctctaaaaaagtatttggctgttggtaagaattgtcaagtaaccaacaaagcaattaaaactttagcaaatactcttacctctaaacttaaaagcgattataagaaaggagaaaagattttcaattgggttcgtgacaatatcggatacgaaaagtacagaaacactaaaaaaggtgcattaaaaacactgcaaaccagaggaggaaactgtgttgatcatgcacacctgattgttgcattatccagagcagcaggacttcctgcaagatatgttaatgcaaacaactgtaaattctcttcaggatatgtttcagggcatgtttgggctcaagtattggttggcaatacatgggttgtagctgatgcgacaagcaatagaaataaatttggtgttgtaaagaattggaatgtgaatagctataaattagttggaaaatacagttcaattagtttctaa

SEQ ID NO: 824 - DNA, 1674 bp, Methanobrevibacter ruminantium
  source 1..1674: mol_type = genomic DNA
atgttttatgaaaagaatttaatcaagaaaaatccattaagagtggatataaggtttggattagtctatccaaatgtatataaaactgctatgagctctttaggctatcaaatcctttataattatgtaaatcttagagaaaacacatattgtgaaagaataatctatccctcctatcgcagtttggaaaccaacagccccttaggggatttcaacatagtatcattttcccttcaatatgaacaggactatttcaatattttagaaattctccgtgatgcaaatattcctttaaggagggctgatagaactttagaagacccattaataattgcaggcggaccatgtgccactgcaaatccgcttccattgtctgactttatagacatttttgttgtcggtgaagcggaagctgtcttaaacgatctaatagataactataatgaaaataaagacaaatttacaaataaaaacgaattcctatccacttttttagacattaagggcctatatatatctgaattcaataacaaaacagatattgccttgcttgatgagatgtctgatgcctaccatataacatgtcctataattaccgaaaccgatgataaggaccttattccagtcttttcaaattcaattctattgaatgtatccagggcctgcacaagaggatgcagattctgcatgtccagctatctctataggccacttagggaaacagatcttcaacagttgtttgatatagcagaagaagcccgtcaaaacacaggattgaataagatatccctaataggtgcagcggtttcagactattccaaggtcaatgagcttactgaagggttgaaggatatgggatttcaggtctccacaccctcaatgagaatagaatcaatcacaagggaaacattggtatcgcttagagaaagcggccttaagaccttgacaatagctcctgaatccatctaccaccttagaaaaagaatcaataaggacatttcagatgatgatgtattcagagtaatcaaagacgctgtggatttaggttttaatcttaaattgtattttttaattggtttgccctatgaggatgaagacgacattaaagaacttgcatgtctgatgaagcagattgattccatgaagtatttaattgattcaaatttaaatgaatccattaaaaaggaggaagttttaactaaacataagtcaaaatcctctggaaaaaaatccaagtcaaagcaaaggaaaaaggccagggtttcaataaagttcagcgtcaatcctgttataccaaagcctcacactccccttcaatgggaaggctatgacatgaagagaatcaagtcaaagataaaatatcttaagaagaacttaaagggattggacattaagtttgacagcggaaagatgggattgattcaatatgtcctatcctgtggggatagggatattggagatcttttagaagagtcattaaatagaaagataagcattaaggagtggaaggaaaatgctccaagctatgagattggggataacttaccttgggattgtattaatgtaagtgtgagcaaggagtttttagagtctgagtatgagaagatgaaaagcggagagcagactccatggtgtgaggatggctattgttacggttgtggggcttgtaattag

SEQ ID NO: 825 - DNA, 1116 bp, Methanobrevibacter ruminantium
  source 1..1116: mol_type = genomic DNA
atgttaaatccggctaagagagttgaagcaatagaactgtctcaaattagaaagatgtttgaagtgaccaatgagaatgcaatcaatctgggaatcggcgaacctgatttcaatgttcctgaaaatattcgagaggctatgaagaagtcaatcgatgatgggttcaccaaatacacttcaaacaagggaatcatcgagcttagagaatccattgttgaaaagctatcaaaggacaataatatcaagacagattctgaaaacattatagtgactaccggtgcaagcgaggcattgtactgctgtgcacaggccctatttgaaaagggagacaatgtattggttccaaaccctggatttctctcctattactctgttgtgaatctggctgaagcaaatattgttgaagtcacaactccaatggaaaatgagtttaagatgaaggttgaggatgttcaggaaaaattggataagaataccaaggcattgattataaactctccatccaaccctaccggtgcggtaatggataaggaggatgtcaagggaattgcagatttggcaacagaccatgacttctatatcatttcagatgagatctatgaaaagataatctttggaagaaagaactattctcctgctgaatattgtgacaatgtaattactcttaacggattttcaaaatcctatgcaatgactggccttaggataggatatatggcagcaaatgaggagataactgaaaatctccttaaggttcatcaatattgcgttgccaatgcaacttcaattgctcaaatgggagctcttgaagctcttacaggtcctcaagactctgtagaaatgatggctaatgagttttcaagacgaagagacttgatagtctccagcttgaatgatatgggttatcctactgttaactgtgaaggggcattttatgtcttccctaaggtggaaaggcctatggactttgtaaagaaggcagcagaggctggagtcatttcagttccaggtgcaccattcggaagccttggagagaatcatgtgagaatgtcttatgctaattcctatgagaatattgaaaaggcaatggacatcttaagagatttggagtattag

SEQ ID NO: 826 - DNA, 915 bp, Methanobrevibacter ruminantium
  source 1..915: mol_type = genomic DNA
atgaatagagaagaacgagatagaataggaacacgtgcatctgcagttgcaattattggaaacatcctccttactgtattgaacatctcagtgggactgatgtctggaagttacgctcttatatccgaaggggctcatacaatttccgatatagcaacatctgtaattgcatatgttggattcaagatagggagcaggcctgcagataaggagcatccattaggccacggaagagcagaagcaatctctggccttatcatagttgtattcttatcaatagttgccattgaagttattcaaggagctttccataagctcttctttggaggggctttggaagtgccagatcctatagcagtggtaatggcctttgtaggtattttggttaacctcttcatgagcagctatatcattcgcttggggaaaaaggctagaagccctgcgattgtagcagatggaaagcatcagagggttgatatatttgcatcattggcaatattcattggaataatggtttcccaatatggctatcctatgctagacccaataataggtattttcattggggcattgattgctaggactgcagttattgtagcaatagacaatctaaacaatattatgggtaaattgccttcagatgagttaatcaaggaaataagggatgttgccaattcagttactgatgtatgcagtgcccatgatattaaggtgaattattttggctcttatgcaaccgttgccctccatgtggagcttccgcctgatatgagcttgagggaggctcataaaatcacccatagggttcaggataagatactggaaaatgtggatatggttcaggcagtgcatgttcatccttgccctgaaggggtgcagtatgatcatagtcaattattggatgaggattcttaa

SEQ ID NO: 827 - DNA, 2349 bp, Methanobrevibacter ruminantium
  source 1..2349: mol_type = genomic DNA
atgctatttgtcatgatagcgggggtatctgcaagtgatataatggatgcatcagataatccaaataatgatgattctattaatctagtatctcaagagtctggtaatgatcaaatatctaatgaagccatttcagtttcaaatagtcttagtgctaatgatgattcttatagtccggaatctgaaaagataagctctaaaataaagacttcaaataatttaagtgcttcaaacagcacaaaaaccactactaaggccgctgcggctaaaactactaaaactggcactagtctacaaccatctagcaccagtatatattcaggccaatatcttgtcatcacattaaaggacaagaattccaaggctttaagtggtcagaaggttttaattaacatttccaaattcaaaaacacatatacaaaaactacagattccaaaggccaggtcaaattggctgtaaatcctgttggaagctttaagttagttgtttcatatgctggaaatggaaattattcctcttcaaagtattccggaaccctaaaggtttcaaaaagtgatacaagtctaacggttgcaagcacttccgttactatgactactcccttagttgttacattaaagaataaaaagaccaatgaggccttatccggcaaaaagataaagttcgttatggatagagtaagctattcaagaactaccgatgccaagggtcaggcaaaacttaaggtcaatatgaaatatgtctttaatgtcacagttaaatttgacggaacaggcaatcttaaatcttctaaggtgaccaagaccattaagcctaccaagattccggtaagctttgtctattcagcaaactctgtgaaatatggccattccataacagtcagtttaaaaaataatttaaacaacaagactctctctggcaaaaagattgtagtcaagactagcgactctaaaaagtcaacaacaaagactacaagttcaaaaggaacaatcagcgttcctatcaattctgtcggggatgtcactgtaagcctttcatatgctggagacagctcctataaggctgcatcaagcagcaagaagatcaagggacttaaggattcaagtaaaatcactagctccactggtaccattcctgttggagacagctatacagtgactttaaaggattcttcaggtaaggccttatccaataagaagattgtcttcactttcgatggaaagtcatacacaaagacaaccaactctaaaggacaggccagcttggctatctctaaaggtcctggaacatattctgtaaatgtgagttatggaggagacagttatcatagcggaagcaagctaagcaagaatgtcaagacatccaattcaatgattagcattgccaatgtgattaaggctgcaactaccttaagggctcatgttgactatacaaacaggtttaacaagtcctatgtggtaaccatcaatggattgaagtattctcctgatgaatttgcatatatgatgtctcaggctatagtcaagattaacaatggccaaaaaagcggttatgtgaccttcaagaaccttactggagattatgattctaaaggatcttccataaacggcaatttgatgaaaaagaattacatcagcctagccaatacactcattagcagcgtaaataagaacaataagatacctgctaacatatctaccaatttaggcaagatcgaagcaaacctttatatcttcggtttggctaaggcattgcagttctatggagaggaaaaatacttgcctaagtatttgattcttaaaaacagtttcataaaaggctcatcctcaactactgtcactcaaaaggcaaagattctaaattgcaaggaggcattcaatgccactgaatttgagaaataccttaagacaggaggaaagtctgcccttaactcagcgattgtcgctaaggcaaaatccctaacaaaaggattgaccagcgataaggctaaggcaaatgcaatattcaagtatgtaagggataaggtttcctacagctactattcagacagtaagaaaggagccgctaagacatataagacaaagtctggtaactgctgtgacaaggcaaacctaattgttgcaatgtgcaggtctgttggagtatatgcaagatactcacatgctcagggctgtaccttctcaagcggattggttgcaggacatgtatgggctcaaacatatgatagggctacacagacttggtatactgctgatgctacaagctccagaaacagtttgggaaaaataaacaattggaatactaagaaatatagtcaagcaaagaattatgtgcttattccattctag

SEQ ID NO: 828 - DNA, 453 bp, Methanobrevibacter ruminantium
  source 1..453: mol_type = genomic DNA
atggcaaagtataagagagtggcagttggcggaacttttgacaagtttcattatggccatagaaaattaatttccactgcatttgaaattggggaaagcgtagagataggagtaacctcaaatctatttgcaagcaataaaggagatgtagactcctgcaacacccgtatggctaatcttaacgcttttttaagcaagagccatgacaatttccatatatcccgtttggatgatgcttacgggccaaccatttatgatgaaaactttgatgccatagttgttagtgaagagactgagccaaatgcaataaagatcaatgaaatcagggaatctaaaggcatgaagccattagatattgttgtggtgagctttgttttggcagatgatggaattcctatttcttctacacgtatccgtcaaggtaagattaatcaaaagggtgaattgatttaa

SEQ ID NO: 829 - DNA, 975 bp, Methanobrevibacter ruminantium
  source 1..975: mol_type = genomic DNA
atgatttttattcaaagagatggtgcagaatctagaaaattatcttatgataataaagtatgtttggcatgtggtatttgtgcagacacatgtccaacagattccctagccattgctgatgttttggcaattgctagaggtcaagctgagggaaataatattgtattggaccaggatacttgcgtattatgtggtttatgttcatttgcatgtccattcggtgcattggaatttgatataggcggacaagatgcaagtgaattgccaaactatcctaaatggactcatgaatcctcaatcagtcaggatgactgtgaattctgtggaagatgctacacagcatgtcctcaagatgcaatcctattcaaaagagagttgccagatagaaatgcgcttctaaagggtgaaatctccataaatgaagatgactgtatctattgtcaggtatgtgctgaaatctgccctgcaggagctataagtctcactgcatctgacggcaagatattagacacaatcgaagtggatgaggataaatgtgtatattgtggagtatgtaagagagcatgtcctcaagaggcaattaagactgtatgttcaacttgcatgtacagcgatgagattgaaaagatcgctatcaccggtgacatattcattacagaagactgcattaactgtggatggtgtaaggaaatctgtcctgttgacgctgcagaagtcactaaaccgtttgatggtgaaatctccgtcactgaagaggactgtgtcgcttgcggatcctgtatagacatttgttcatgtaatgcagtaagccttcaagacaatgttgctgtattcaatcaagactactgtgtcttatgtggagcatgtgcaagactctgtccacaagaaagaattgctattaatagaacagatatgaaattgactaatattagctctgcttcctggaaagctaatttagaaaagctacttaattag

SEQ ID NO: 830 - DNA, 204 bp, Methanobrevibacter ruminantium
  source 1..204: mol_type = genomic DNA
atgaaagaaacactgattaaggagtttaaagatttaaaagaagaaactggacaagccagcgttgaattgattttattgattggttctattttagtaattacaattatttgtggaacttatgtatttaatgttaattctaagataaacggccagtttaatcaaacaatgactaaggccaggttatttcttttaaataaggtctga

SEQ ID NO: 831 - DNA, 237 bp, Methanobrevibacter ruminantium
  source 1..237: mol_type = genomic DNA
atgaatcgacttccaagggaaactgtctttgagcaaatcaaaaggaactttgtccaattgaaggatgaaacttccggccaaggagctgcagaatatattctcctattcggaggagttattgtaattgccttagcaggtcttttaatctatagatcctacttcagcaataacaccagcggattgaatgcgactcaggacatcaactccatcagagacaatatgagcaatgtcttatag

SEQ ID NO: 832 - DNA, 2094 bp, Methanobrevibacter ruminantium
  source 1..2094: mol_type = genomic DNA
ttgtctgattcattagatttatttacaggagttttattgacagccattggtttagttcttatttatggaagtataatctaccgtctaatcgatctagttttaatattaggtgttttagtcaccctattcggtttatacaaattgcttccagcattctttatgagattgctaagttcaagaaaatcaagctcaaggaataagctttcaaaagccaatgtttctcaagattctcttttaaaggcaggaattgaagagataaacaatttccttgacggcgaagacaataaggaaaattcaaaatctgtcttaagagctccaagggaaagctctctagatgctcctaatcaaatgacctttgaagaatatatgagcaagtcaaaaacagattatgcaaccaattactcacctaaggaagtaaagcctatctttaaggatagagacgttgatgaatccaagcaggttcttagaacaaagcctgtcaaagaggaaaagtctaaattcaagcttccgtcatttaagagaaactcttccaaaaagccaaaatcaagaaatttcgctttcagaaaggataaggacacagagcgatctccagacaagctctactttactccaaattatgaaaatccaatgatggtaagccctaaacctaaaaagaaatctgaaaataaattaaggctatctgactctccaaagagatctaaagaaatctctgaggcattggcaagtgttggcactacagaaacagtctatgacaataatgcttcagatgacagctatagctatatgcctaaggaaatggatgatgaattaatcgtgcctattgatgagattgatttggatggccctcaagaggctcctatatacactctttcacagtctgagaacaccctttataataatgtaatttatgatgacgtcgattcagacttctatattactccaatccatgcagaaagcaatgaagacaactctcctgatgaagaaggggattatggtgaaggaggagacttatatttagaagtagaacctgaagacacctcttatggtaatgatctttacattgaaacagagcctgaagataattattacggcaatgatctttacattgaaacagagcctgaagataactattatgatgatgaagacatttatatagaatcatatgaagaagagcagtcatatgaagatgatgatggctatataaccgttgaagcaagtgatgatgacttgcctattccaaggccaaaggagatttcaactcctcaaagtcttccaagacctacttcaattgcttctacaaatcctatttctaaaaaggaagttggttcaaacttatccagacctcataagaaggtttccacacttccaaggccaagcgtatcttctaatctgcaaaggcctcataaaaaggcagaatctactgatgcagtttcagtgaaagatgaatctaaagctgcagaagcaagtattgctaaacctaagcctatagctaaacctaaacctgtagctaaacctaagcctaaagaggctcctaaatctgatgagcttatatctaaagaggaattggatcaaatcatccaagatccaaaggataatacaattcaaattgatccaaacaatccagaatccttgcctattccaaagctcttaaacagttatgtcgtatgtgaaaaaggaatattgacctctcaggaagcctttgaagaggttgcaagtcattccagtcaagagattttattggaagcacctacaattaaggatatgggtgaaagattcctctcaagcattgctgatattaaaacaagaattatcgttcaggaatttgatttagctgacatttcttatgttcttctattaagctctcttattaaaaaaggagttgaaataaaaacattgcctatggtaaattcatttaacttaatcggcgatgattctcatgctttaatcatttccaatagtatggatgaagatgactttgaatatggtgctgtatatactgataagccttccattgataatattaaagagttatttgaatcctcttggtcaatagcaaatgatttggatattggcaatttaaatgaaagcgaataa

SEQ ID NO: 833 - DNA, 714 bp, Methanobrevibacter ruminantium
  source 1..714: mol_type = genomic DNA
atggaaattagatggttaggtcattctgcatttgaaattataagtgatgaaggagttaaaatattaatagacccattcataagcaataatcctacttgccctattcctgtagaggattttgaggcaaatatcatctgcataacccatggtcactctgatcatttcggggacgctatggaaattgcaaacaatactaatgcaacattggtggcaaatcatgaaatctccctctttttaggggaacaaggatttgactgtgttggcatgaatactggaggaaccgtttccattttaggaatcaatataaccatgcttgatgcaaggcactcctcttcaatcgactttacagaggaagtccgtcctggaggagaccctggaagctttttaataacccttgaggatggaactaaaatcttccatgcaggagatacaggattattcggcgatttggaaactgtagtgggaaacatattcaagccagacattgctatggttcctataggggacagatttaccatgaatccattccaagcagctttagcaagcatgtggatatctcctaaggcagttattccaatgcattacaatactttcccagctattgaacaggaccctgcagtattttctaattttgtatatcagctaaatcctaatatagatgtagtgattatgaatccgttagaaacttatgctccagactttgataaagaataa

SEQ ID NO: 834 - DNA, 687 bp, Methanobrevibacter ruminantium
  source 1..687: mol_type = genomic DNA
atgagagaattgaatatggatgaaataaaaaacgctgaaaagatagaatcctttgaccaagtcagcgcaaagcttaataaaaccgagaaagaagaaatagttattgatgaaatggacatagttttccttttagataaaagcggatcaatgtttggtatcatagatgacactcttggaggatttaactctttcattaaaagggaaaaggaaaaggaagtgaaaactcgtgtaactcttgttctttttgatcataagtataaggtcttatacactagaaaaccaattgaagaagttgaagagcttacagaagaagactattacgcagacggatgcactgcacttttggatgcaattggaactaccatcaatagaatcgagaaggaagtctgcgatgaggtcctttttgtaatcactacagacggacttgaaaactattccaaggaatacagtagagaggacgttaagaagcttataagaagccataactggaatttcatattcattggagcggacatagactcttatgaagaagctgcaagccttggaattcctagcacacgttctgccaattatgaaaaaagcagaagaggagttggttctttatataggagcgtttcctatgcaaaaagactacgttccagtggagaatctttagataaagttaattggaaaagaggtttagattaa

SEQ ID NO: 835 - DNA, 663 bp, Methanobrevibacter ruminantium
  source 1..663: mol_type = genomic DNA
atgacaactgtagctgaaacagtatataaatgtccactttgtggatttgcacatacaactgactgcatgacaagcacaagtgcttttggagctccagatttagatggaagaccttcccctatggcaagactaacaatctatctattcattaaggaatgtccaaattgcggctttacaagctatggctttccagagcatacaagtgtctctagagagttcatccaaagcgataattacctaaactgtgataatattgatttcaaaacagaaagggctaaactgttttatagggtctatctaatatcaaaagaagaagggatgatgaatagggcacttacagatcttgtccattgcgcttgggtttgtgatgatgacgatgatgaggaaaattccatcaagctaagacttctcataaacgacttattcaatgagctatatgactttaaaagtgatgaagaggactacgcccatttgattaagcttgattttatgagaagaggacatctattcgatgagcttattgaagaagttcgccataagacctttagcaaatccttttataataaggttaaggactttcaaatggaaaaggcaaaaaacagagatgccggtaaatacacctttgatgatattgaaggctatgaagagtataaatatggttaa

SEQ ID NO: 836 - DNA, 2010 bp, Methanobrevibacter ruminantium
  source 1..2010: mol_type = genomic DNA
atgaaatcaatgaccaatgtagacataaacataatatgtcaggaattaaatgagttattagctggagcaagagtggacaagtccttccagcctacaaaagacacagtggtaatgagattccacaaggcaggaacaggaagaatggatcttgtcatacaggcaggtaaaagaatccacataagccaatatcctcttgcaaacccacaaagtcctccaagctttcctatgcttcttagaaaaagggttaagggtgcaaatgtagtgagcatccaacagcacaactttgaccgtgtagttgaaataaaaatgaaaaaggacattacatacaccctcatcgtcgagctctttgcaaagggaaacataatccttcttaatgaggaaaacgaaatcctccttccacttaagcgtaagcaatggagcgatagggacataagcagcaaaaaggaatatgtcttccctatcgaacacggaataaacccaatgacaatcactgaagatgagtttaaggaaattatcaagtcttcagatgatgagattgtaagaatccttgctaaaaatggacttggaagcctttatgcagaggagatcatgcttaactgtgagataaacaagaaaacactttcctcagaacttacaaaggaagacatactggagatatatggagccttgaagaaagtctttgaaggccttgagaaaaaagaattcactccaatgattgtaaacaacagaaaggaaatcgaagagcttaaaaaacaaaacccagacaagcaatacaaggtcaaggaagatgtagtggccataagacttcaccagtatgaaaacttcgaagaggaatcctttgacagcttcaatgaggcctgcgatgagttctactcctcaaaggtaaagcatgaaatcacagacatccaggaagccgtatggaacaagaaggtagggaaattctccaaaaggcttgaaaaacaggaagaaacattaagaggatttgaaaaaacaatagaagattcccaaaagaaaggagagctcctatttacaaattatgttcaggtggaaaacatattaaatgtaataaaggacgcaagggaaaaggactatggatggaaggaaataggaaagaccctaaaggatgcaaagaagtctggaatggctgaagcacagatattcgaatccatggatcccctcggaaacatcacattaaatatagatggaatttcaatagcccttgattcaaagaaatctattccggacaatgctgaagtatactatgaaaaggccaaaaaggctaagcgaaaaataaaaggggcaaaaatagctattgaaaacacaaaagcccaattgaaggacatggaagagaagaaggaaaaggcaatggcaaatatcatggttccgcaaaagagagtcaagaaaaacctcaagtggtatgagaaattgagatggttcgtctcaagcgacggaacattagtagtatgtggccgtgatgcaggtagcaatgaggcagttgtgaagaaatatttagaacaaaatgatgtttatctgcatgctgatatacatggtgctccttcagtggtagcaaaaatttcatccgataaattaaataacaatttgcttaaagaattaggcatctttgccgcttccttttcaagtgcttggtcaagaaattacggaacacaagacgtatattgggtggagccagagcaagtttctaaaaccccggtttcaggtgagtttgtgccgaagggtgcattcataataagaggaaaaagaaactatatcagaggggctaagctagagatagcaattggaattgttgattatgatggtgaaaagagaattatggcaggcccggttgatgcacttaaggcatatactgaaaagtatgttacaataaagccaggatatactaaaaaagagaagatagctaaagagatactctctagaataaatgaggacaatattattgaattggatgatgttgttagggtattgcctagcggtaaatgtgactttgtctaa

SEQ ID NO: 837 - DNA, 273 bp, Methanobrevibacter ruminantium
  source 1..273: mol_type = genomic DNA
atggatacaactgttaaaactgtatcaatccatcttgttgcagcagtagtggcagctattatctctactgcctttacattaggatggtttggttttaaaaataacgtatttgcgtttgttattggtgtagtgattctttatttcattggacaatattgtaaaaaggcatttggcgaagagataagtggattttctacatggctatgggatggaatccttccattcggatttttctggttcatattatggactatattgactaattatttataa

SEQ ID NO: 838 - DNA, 8640 bp, Methanobrevibacter ruminantium
  source 1..8640: mol_type = genomic DNA
ttgaatcgaaatagcaaaatcatattaatttcattatttacactgctattgcttgccattccagcaggatttgcagcagatattgaatcaaatagccacaataatttagatgattcaaatacagtaaattttgaaattaatgcaaattcaaaggatacaaacttagagagtaatttaaatactggcaatttagaaatgaattcaaataatactaatttggatatgaattcaaataaggcaagattagcaatgaattcaaatgccagtgatttggaaacactaggtttgacaagaggggaatttgaaaacggatcaaacaatccaagcctagaatattcaagcaattcactctcagacaattcaaataataaatatatatccccatctagtgataaaaacacatatggctccaacaaggtaggtgacggtaacgtaaacatatactactttgatgctagtgctagtgacgatacaggtaacggcagcttagaaaggccttataaaacccttaaaaataatagaattgtagaaaactccataaattatcttgcaaacggagtatacaacctagatgctacaataaataaaaataatataagctttattggtgcagactcttcaagaacaataataagctacgcttcaactgcatttatcacaaacaatatcctaaactttgaaaacatcacattgaaaggattaaacattcaaaatagaggaaacctaactgctagaaacaccattttcataggtggaaaaggatattgggatagatcttacaacaatattttcggaggggcaatatatacaccccaaaacgaaaattacactacaataatcattaactgcagcttcataaacaatacagcagattatggaggagcaatctatgcatgcggcggaaacgtgactgtagaaaactccagcttcataaacaacactgccgaaaggtttggaggagccattgcctctgaaaataccttaacaaacaatataagaaatgtcgaattcatccatgacgtttcactaaacgatgcagggggaggactattcatatcattcacccaattaaacggcactgacttgcacttttacaattgcagcgcagactttggaggtggaattaccgcactttactccaacgtttccctaaatagattcataggaaaagacaataaggcaagatacgatggaggagcaatctatcaattctactgctcattgctcattgaaaactccctatttgcaaataactctgcaaacaatggtggaggattatatgtcgacaattcaaactccctaaaggtcacaaagtccaatttcacacagaacaatgcaacagagaagggaggagcaatctattcattatggaataccttagcagaaggaaactccatatccaacacccgcttcaacaatagcttcagcaacaacaatgccaagaattattctaatttttatgaaggcaaggatgtcaatatgagaattggaagcggcaatgtcaccctataccatcgtaacgaaactgaaatcgatgagattccaagctattacagtcttatagatttaaatcaggtcacttccataaagaatcagcaaagcggtggaaactgctgggcatacgcctcaattgcagcccttgaatcagcaatcataaaggcaggaggcgaggcacttgacctttcagaggaaagcatgaaaaacctgatagtcctcttttcagattatggatacccatggctaaccaataacggaggaaatggggacttcgccaacgcttatttgacctcatggctagggcctgtctttgaagatgacaatccaggagatgacagatcatacctctctccagtcctaaacagcagaatacatgtgcaaaacatccagtatctaggcagaaacaactatacagacaatgaccgaatcaaggaagcgataatgaaatacggagcagttgcaacaagctattatatggataacagctattacaattatagaacttccgcatattattgtccttcagccactagcagcaaccatgcagttgcaatagtcggatggaatgacagctattccaaaagcaacttcaaaaccaccccacaaggagatggggcatggatagtgaaaaacagctgggatactaattggggagacaatggatacttctatgtttcatattatgacattttgatctttcctttagggtctatggactggggacatgcatatgtcttaaacgatacaatcaagcttgacaagaactaccaatacgacatttcaggactcacagactatttctataatgcatcctctacagcatggtataagaccaagcatactgcagatgaggatgaatacttagctgccgtgtccacatacttcctgacaacaactgactatacaattttcataaaagtgaatggagaagagctatataatcaaagcggaaacagcgaatatggctatcgtacaatttatctaaatgatttcattccactaaaagcaggagatgtctttgagacaatatttaagataaatgtaagtggagaaactggaattccagtatctgaaggctctgccttcaacaaggtcttatatgatcggaaccagtcattcgtaagctatgacggcattaactggctggacatttatgatatttattggacatataactccgatgtttacggatcacactattatgtatctgcagcactctgcctaaagtcattcagcttcataaatgaaatcggaacaaacctgaccttggaattcaattatagcctagataatgaaggagatagaataagtccagtgaatataatcgctcacgtcattaacgaatacggtttcaatctagacaacggacaggtaaaattcatcattaacggtacagaaacaatagcagacttaatcaatggatatgcaaacataagctggaactttacagatattgaaaatgaggtttatgcattatttgagaaaacaggatacctctcaagctccgctaatgagacagcaacactttccgaaaagtatgtcacacttgatttgaatactcttttaagtgaagacaagctcacaatcactgtagacagctcaagaaagattaatgaaactttaatactagagataaatggagaaaagcacccatttaacctttcagaaggccatgttgtatacgacttatacgatattgaagatatagactacttaattagagcctatctgaatgacactgggttctataactgcgaagagaaaagcacaatatttagattaaatacagaaattacagagataattgcttcaaattttacaacagatgattatagcaatgccatctatgagataagtttagttgattcacaaggtattggaatagccaataaggaaattttatttaatatatctggcaatttaactaataataacaacaataataacaattttaacaatataatatttaatttaactacagacaatgatggaaaagcaaggattccaatcaaccttccaggaggaaatttcacaataaatgtccaatccaaagggaattatctatattcatcagctgaagttgcccttaagctaaaagtcaaggataaagtaagactagacattgatctcaatttgaacttcaatgatttggaagtgattattgaattaaacagatcattaaacgaaacagttaacttcagctttgcaggagaaagctcaatcatcagattagaaaacggaagagcttcagttaatttcacaggattaagcaacaataattatacagcaatcgcttatttggaaaacgacattgattatctttcaaacattgctcaaaaaacaatagaaatcaatataagaaacttaataatccaagcagatacaataaacactacaaaccgttactatggcaattatacaattcttctaactgatgaggaagttaatgaagtagccaacaaaacattaaatgtaaaaataggtgaagaaagcttcaataaaactagcgataatgatggaaaagtaatcatccctcttgatttaggaattggagaatatgaagtaattattagcttcaatggagataaggatttctttaaagcaaatgcaactagaacaatcaccgttttagaaaagctatttgcaaatatcacagtttccacattagtggatgaggccacaatagacatcattatcgataagaagattaatgagacacttaatatcagcatagaccaaagcgaatatccagtattgtttgaaaatggaacaggacagttaatcctagacggattggaagaaggaaaccacatagtcaccatagatcttctcaaatacctattatttgaaagcaaagagttcgaaatagataaaagcataaatctaagctctgatgactttaactgctatgagcacacaaacagcacttataccgtgcttttaaccaacaatggcaaagccttagcaaataaaaccataagattcgtcctaaatgacacaacaaccataagaaatacagatatggaaggaaaagccagcattgacattgatttaagcccaggagtctatgagctgaacattacttattatgatgatgagagaagcgtgattaatacagtctatgtattgtccaacataaccaatagcacagatcctaaattcaatgtgacacttgatatggacacagttcttagtccagacaagctaacaatcaatgtaaactgctccaaaaagattaatgaaactttaattctcgaaataaatggagatcaacactttataaaccttacagatggattcgtaagctttgacttatatgagcttgaaaagatagaatatgtgattacagccaaactaaacaacaccgacctttacagatttgaagacaagtcagttaattttgaattaaaccaagaagcaacagacataatagcttcaaactttacaacaggtgactacagcaatgaaagatatgaaataaccttagttgactccgaaggaattggaatatccaataaagagatttcatttaacatttcaaacagtttaatgagcaatgagaattatatcatatttaatcaaactacagacaattcaggaaaagcaagcattccaattaatttggctagaggaaattacacaataaaagtccaattcaaagaagattacttatatttagcttccgaatctactgtagatttaaaagtaaaagaaaatgttaaaattgatattgaattcaaacaaatgatcaatgacttggaagtcattattgaattaaacaaaactctaaacgaaacagttaacttcagctttgcaggagaaagctctatcatcagattagacaatggcaaattctccattaattacacaggattagcaaacaataattacacagtcattgcatatattgaaaatgacaccaattatcattcaaacattgctcaaaaaacaatagaaatcaatataagagaattaataatccaagcagatacaataaacactataaaccgttactatgacaattatagaattcttttaactgatgaagagggcaatggaatagcaggtaaaaccttagatataagaatagctgaaggaaactatattgaaactagcgacaatgatggaaaaatagtcattcctcttgatttgggaattggagaatatgaagtaaatattctatttaatggagataatgagttctttaaagcaaacgtaaccaaaacaatcactgttttagaaaagctatttgcagacatctccatttcaactttagttgatgaagctacaatagacattataatagataagaagattaatgaaacacttaatgtaaatatagaccaaacttcatatcatgtaatatttgaaaatggaaccggccaattgactgtagacggattggatgaaggaaaccacatagtcaccatagatgttctcagatacctattatttgaaaacaaagagtttacaatagatagaagcataaatttaacttcagatgactttaactgttatgaacacacaaacagcacttacactgtatcattaagcaacaatggcaaagtcttagcaaataagaccataaaattcatcttaaataatcaaatcattttaaggaacactgacagcgaaggaaaaacttcaatcgacattgatctaagtccaggagtctatgacttgaatatcatatactatgatgatgaaagaagcagaaccaatacaatttatgtactgtcaaatataacccatagcacagatcctaaattcaatgtgactttggatatggacacagttctcagtccagacaagctaacaatcaatgtaaactgctccaaaaagattaatgaaacattaattctagatataaatggaaaagagcaaattttaaaccttaatgatggattcgtaagctttgacttatatgagcttgaaaagatacaatatgtcattacagccaaactaaacaacacagacctttacagatttgaagaaaaaactattctatttgaattaaaccaagaatcaacagacataatagcttcaaactttactacagacgattatagtaatgcgatatatgaaatacgcttagttgattcctacggccttgcaatagccaataaggagattttatttaatatttcaaacagtttaatgagcaatgagaattatatcatatttaatcaaattacagacaattcaggaaaagcaagcattccaatttatcttccagggggagattacacaataaaagtccaattcaatgaagatgacttatatttatcttccgaatctaacgctcacttgaaagtcaaggacaaagtaagaatcggcattgaattcaatcaaaacatgaatgatttagaagtgatgattgaattaaacaaacccctaaacgaaacagttaacttaatatttgcaggagaaagctccaatgtcaaattagaaaatggaaaagcttctcttaaattcacaggattagcaaacaataattatacagcggttgctcatcttgaaaatgatagggattatatttcaaatatcggcgaaaagacaatagaaatcaatcttagaaacttaataatcatagcagactcaataaaaactaaaaatcattactgggacgattatacaattcttttgactgatgaagaagggaagaatgtagccaataaggcattaaacattaaaatcgatgcaaacagttttataaaaactagcaataatgatggaaaagtaattatccctcttgatttaggtcttggaatgcacgaaatcaatattgcatttgatggagacaatgaattcttcaaatcaaacattacaaaaacaataaatgttatagaagaaatctctgtcaatgtcaatatttccactttagtagataatgcattaattgaccttaaattctctaaagaccttaatgaaaaaattgatgtccttatagatcaaaacttatatccagtatctttagagaaaggtgccggacaaataagggtcaatggattagaggaaggaaagcacattctaaccgttgatcttccagaatacctattattagaaagtgaagagtttgaaatagataagacaatcactcttatttcagatgactttagatgctatgagcattcaaacagcacatacactgttgttttagagaataatggcaaagctttagcaaataaaaccataaaatttgatttgaataagattgtgaccataagaactacagataataatggaaaagcatatttgaacattaatttaagccctggaacttataaattgaatattgcctactatgataatggcagaaataagattcataatatttatgttttagctaatactagtggtgataataagacaaatgaaactaattcaagtagtaatactaacccaataaacaatcaaacaaataatactaatccaactaataatacaaaaccaataaacaacgaaacaaacaacacaaacccaaccaacaatacaaatacaaccaacaatacaaatacaaccaacaatcaaacaaataacacagacccggttattgttagaaaaggaacaaatatactctgtcaaaacatgattacaactgcatttgacagcaaagtagatggcagaataggtaaatacttcgttgtaactttagttgatgcagactacaagcctatggccgataaaaccatttatattggttttaatggtaaaaaatacattagaaccactgattcatcaggtcaggcaaaactgcagataaaccttgcttatgaaggaagctacacctttgcaatagcattcttaggagacgatgactataagggcagctttgttgttgcgaatattaaagtaaataaacaaattcctcaactaaaatcatcagataggacttatagatcaattgcaaagacaaaaacattaactgcaagcattaagacagcccaaggaaatgctatcaccggcaaaaaggtcatatttacaataaatggtaaaaaatacactgcaataatcaacagcattggtattgctagcgtaaaagtaagtctttctaaaaaaggaacctatagatttacagttcaatccgaggcaagttctacttatgcaagcactaaagtcactcataaattagttataaaataa

SEQ ID NO: 839 - DNA, 1818 bp, Methanobrevibacter ruminantium
  source 1..1818: mol_type = genomic DNA
atgtccagtatgagcagtgttgcaggattatccaaatacattagaacattgcctaaagccaaaagcacttttctaatgataatcgtattgagctttatcataggcgcagttctctttttagtaaagcctatgagccttggaagcggtttggagaatttcttctacggtggtgcattcggatttgtagtttatgggcttcctgctattatcactggtgcaaccgatcagaaatgggttagcaccctaaaggggataaacctaaagatgaagcattccatgttccttgcccttgtatcaatgaccatggcaggggtaataagcatcataggaacaatcataggaaatatcctccacttcgacctgtttataaactcaattctttttggaatagtaattgcatttgcattcaatatccttgtaatatggagcgttacacggattaggctcatcaaatccgttcttgttgcaatcattcagccattgctcatgattggagtattgattatcacaagctttttaaacaacctagaaagcgtctttgagcttggaatatttacaaccttcttcaaggtaataatagcaagtgcagtcttcttgcttgcaatctattcattcatttcaattgtagaatccccaatgaaaaagaacttaggattcggagctttggaaatcctcagtttcttcatttcacatatgaacgaaggttccaagtcaattgaagagcttttcgacaatgctggagaagcaattgacacacttgttggggtctgcagcttcagaaagccagacggagatattaaggcattgttcattagcccttgcgttcacccaggacctcttggagacattggaggttcaaatatgcctacaatccttgcaaacagatttgattcatttgcaatggttgcacatggaccatccacccacgacttcaatcctgtatcaagcgatgagatcgttaaaatcgagtcatcagtgagaaccgcattggaaaatatggaatactcatcaaaggcaagcagattcgtcagatactcccataagaaagcaaacataggcacccaattcttcaataatggatgcgtcatgctatcaacattcgcaccttccggaagcgatgacatcgagtttgcagttggtcttgcaacaatgattgaaagtcagaaggagttggaaatcgacaatccgattcttgttgactgtcataactcattcaatgcagagaagggaggagtgcttccaggaaacccagagctcttccagctattggatacaatcaaattgattgaaaaaaaagacttggagcatgagataaaggtaggatgctattccacagaccttggaggctttggcaagcatgaaggaatcggtgacagcggacttaagacaatggtcattgaggtagacggccaaagaactgcttatgtgcttttcgactccaataacatggaacttggctatagggagaccatattcaatgcagttgaagatcttgagattgatgagatagaggtcatgaccacagacacacattcagtaaacaccttatcagcaggatacaacccagtgggaactgtagaaaaggaaaagatcattgaatatgtgagagaatcaatcattgaggcgattgacgacttggagacagttgaagccggaacaaggacagaaagaatagaaaaccttaagacattcggccctaacaactcaacagagcttatctctacaatcagctcaatcgtatctgtaagtaagatagctgctcctttaatatttattatggcaattatctttgtattcatttggatctacttattttaa

SEQ ID NO: 840 - DNA, 531 bp, Methanobrevibacter ruminantium
  source 1..531: mol_type = genomic DNA
atgatagaattaaaaactccaattacagatgatgacattgataagctgaaggctggagatgttattacaatctctggacagattttaaccgctcgtgaccaggctcataaaagaattctagagcaaggagctcctttagatataaaaggtgctgtactcttccacgcaggccctattattaaggaagaatcagatgacgcccagactaaatatgagatggttgctgtaggtcctaccacttcaatgaggatgaatccatatgaggcagatgtcttggatatgggtgcaaaaattattataggaaagggaggcatggatgatacagttagagaagcccttaaaagaaacaatgcagtctatgtggttgcaactggaggctgtgccgcattgtatgtggataaggtaaaagagattaaaggagtggactggttagatctgggcatgcctgaggccatctgggatttggatgttgaatcattcggtcctttgattgtagcaatggacagtgatggaaacagtctttatgactaa

SEQ ID NO: 841 - DNA, 3978 bp, Methanobrevibacter ruminantium
  source 1..3978: mol_type = genomic DNA
atgagattaagatattttgcaataattagtttaattcttttaatatttttagttccagttagttttgcaagtgaaactaatctggattcaatagaattaaatgatttagctgattcttctactgaaatagatgattctactgatttaaatcaggattatagttctaatcaagatttaagtcttaatcagaattctgattctaatttaagcaatgaacaagaattatattctaataaacttagtgaaaactctctagattcaaattcacaaagttcaaatgatttatcaaactccttatatttgtcttcaaatggagtaaggctagctgatttgaattcaagctttgcccagttcaatacaagccttaacgattcaaatacgatctatgtaaactcatcctatattggttctgatgagtttggaactcaatctaatccatataagacagtattggctggaataaatgctgcaactactgatttaaataatgtctatattgcaaatggggtttataatataaatacaacaataactgttttaaaatccataaatataataggagaaagtcttaatgttatattaaatgcttccaacgaaaacaatatcttatcagttaaaggaagctctgtagaggtctcaatattcaaccttacattcaggaatggctatgcaaataagggaggggcaatatatgtggataaatcttccctaaacattattggaagcctttttgattcaaacattgcatatgtcacaagcgataacggatatggtggggctatctacaataatgcaggctttttaaagctctataacaccacattcaaaaacaataaggtggtagcagcatacaacatagtctctgaaggttttggaggtgcaatctataatgagcttggtgaaatgactgttcttaattctaagttctataataactcaatagacataagaaacatatcaaaatcatcatatggtgctggaggagcaatattcaaccgtgcaggatttgtcacaatattcaactcaagcatcagcaataattcaatctatacaaactactcacttggaggggctatctccatctgggcaagccgcaatgtctatataatcaattccacaataaacgacaacataattagcggaagttacggcttcgcttcagtgatttcaaataagggaaccctccttcagatagaaaactccacaatctcaaacaacaatataaatgcaagctctgtggagaattcaacaatctacaatataaacggcaatttcaatctgataaactctaagatggaaaacaataagataaagacaattaagaccaatctccttatgtgtcttgaggatcagcttattgtaaacagcagcttcaatctggcaaacgagttaaaaggccttaatatgacttccttaccttcccattacgacttaagggaggaaggattggttactgcagtaaagaatcagggaagctctggagcttgctgggcatttgcattctactctgcaatggaatcatatcttttgaaggtggaaaacataagctatgacttctctgaaaacaatatgaaaaactgtatgggagacggcagcgaaaacagtaccgactgggatgacggcggagcatatgtggttgcacttgcttatcttctccgttggagcggagcgataaacgaaacagacgatccattcaatgcccgctctaaagtttcccctaccaatctaactagggtcaaatacctcactgatgcattatacataccattgcgtcttggagcattggacaatgaccaaatcaagactgctatcctaaagtatggtgctatatttgtgccagtatattcaaatatcattaaagcaaattccaaatcaggatattccgatatccaatatatctgcaatcatgcagtggcaattgtaggttgggatgacaactattcagcaagcaactttaaggacactccacctggagacggcgctttcatcataaaaaacagctggggaacaagcgggggagaacagggatactattacatttcctattatgacgcttcatttgcagcttcaatagagacatctgctgcagttgctgtgacaaatgttgtaaatacaacaggtgaatacagaaacaactattactatgacacattcggcaatacatttgaaaccataggatacaattcagatacaatatggtttgcaaatcagtttactgccataagtgacaatcctttaaatgcctttggcctttatacctatggagattccacatatacagtaaacatcactgtaaacaacaagtcagtttacacatctagcggaaagatagtgggagcaggcttccatacaataaagctaagcagatatgttccattaacaaagggagacacattcagaatcatagtaaagcttacaaccccttccactttattcccacttgccgttgagacaaactacagcggatttaccccaagggcaaagtccgactacaaccagtcattcataagcccagacggtaagacatggtatgaccttagaaatagctctaacaacagggctgtaaagttctatgaggatatgtatttctatacattaaagaatgcaagcgtttgccttaaggcatatactgcatttgccgatgaattggaattgaacttatcatcaaacagtcctatttactacacgggagatacaattaaacttaatctcactgtcactaaccgtggggatttggcaagcaattcatctatagcggttcctttagacaagtcttatagcatcgtgtcctataagatatctgaaaacaatgggaataagtcatatgatattcattacaatggttcaagctttaatatggctagtggaatttggtccattccttatttggaaaatgaggagtctgtaagcttaatcttaagtcttaagatgaattcaaataatgatgttaacattaaagtatcagcaaacagctcttcatgcagcgtaaaggacaatgtatatgcaaatatttctctaaaatataagattccaagcaagtttgcaaatattccatccataaatacaactgcaaggtcttatgggctcttaaactttacattgttggatataaacaataagcccctagcaaataagaatgtgaatcttttgctcttaaagttagatgatgaggaagatgaagacttaagcttaaatgatactaatttatattattcagattcaagcatttctaatgcttcggtaatatccaatctgaccttaaaaaccaacggcaatggaattgtacagtacaaattgaatcttacattgggagaatacctattcaagcttgcatttgatgaggacaagaattatcaagcttcagactacaattattccttaaacataacaaagagaaagtcaactaagatcctttgtaaggacatggtaacctattcagtcgttgcagaggtggatggaagaagcggagaatacttcaatgtcacattgacagactgtgacggatacgctatggcagataagtttatccaaattggattcaatggaaggatatataacagaaccactgattccgagggcaaggcaaggctccagataaaccttaagaatccaaatgcttacacatttgcaatctgtttcctaagcgatgatgactattatgcctcatttgaagtggctaagataactgtaaataagaagaaaatgtccttgaatgttccgaataaggcttataaggcctctgaaaagtcaaagattctaacagccacactgatagaaaacaataagaagacagttgcaaacaagttattgacttttacagtcgatggaaagacctattcagctaagactaattcagcaggagtcgcttcagtcaaggtaagcttgtctagcaagaagatttattcattcacagtcaaattcgctggagatgattgttatggttctgctaccaagtctgcgaaggttattataaaatag

SEQ ID NO: 842 - DNA, 6198 bp, Methanobrevibacter ruminantium
  source 1..6198: mol_type = genomic DNA
atgaaattaaaatacttaatgtttattggcttattattaataggtctattaatcatccctataagttttgctggtgatgcagacagttattctgcatattctggtgattctattagtttagaggatgataattcttatttagaatcaaatacagttttaaaggattctaaaaattcattacaatctattgatgatgattgtttgattggaaataggactttagatgatacaagttattctgattcaactaattcagaggatttaacaaatcctgattcaactaatcccgattctactaattcagaagatttaactaatctagaaagttctgcaaatacagactcatcatctgaaatcaaaacaataacaaagagtctaaatgaccaaaatacaaacataaaaagcttaaattatgatgagtacgcagactacatcaatttaaacaatcagcttataaactacgactttgcaatttcagactcaaatacaatattcgtaaatgcatcctatacaggttcaacagagaatggaagtcaagcaagtccatataagtcaatctactctgcctacaattatgcatttggattgtcctctgatacaagaacaaatgtgtatatagctaaaggggtttacacagtaacaagaagaatgaccatcaacaaaaatctaaatctcattggagaggattccttaaatacaataattgattgcaatgggaatggtgcattctttattagtcctcgacggtcttatactacagtatatagcccattgctaaacatattcaatctcacatttacaaatggacgctattccagtggaggggcaatatacattaacgaaagtacagttaactttgtaaatgttatttttaaaaataaccgagcggaagcttcctattatggttcagtagaagggggagccctatataacaataaaggatttgttcgaatctacaactgcttatttgaaaataacactgcaaacgatacttcagatgcatgtggaggcgcaatatataacgatatgggtgagatgacaataatgggctcccaatttataaacaacacagcaaaaggagagaatgctgccggaggagccatttatgatttttcaggaattcttgtaatcttcaactcaacaatctcaaagagttcacttctctccaactattcaatgggaggaggacttgcaagctggtcaagccataacatattcataatcaattccacctttgattcaaatgagggccatggaaaatacgtctttggctctgcaattgcaaataaggcaatcatgatgtatattgaaaattccacattctcaaataaccttgcaaatggaaccagcgataagaatggaacatttttccatttgaatggggtccttgactttgacaatgtgaatttcacaaataaccgtgcaataaatccaaaagaggatatcttgatttgtcttgaagatcaatttatcatatccgaggcatttagccaagaggatatagcagaaatccttagtgaaatggaacttagccagttgccttcatcctatgacctaagggactacaatcttgtcacttcagttaaggaccaaaagaattccgggtcctgctgggccttttccactcttgcagcccttgaatcctatcttttaaaatatgaaaacacatcatatgacctttccgaaaacaatatgaagaatcttattggagcctatggtttgaatggaaccgactggtatgacggtggaaaccactatatgtctcttgcatatctccttcgctggagcggacctgtaaatgagtctcaagatccattcaacgatacaagccataattcaagaacattcacaaatattgtaaagcaggttgaggatgtcttatatgtcccattgcgtttgaattatctagatatcgatcagataaaggcagctatcttaaaatatggcgcattgtatactacattatgttcagatgattcctttgataataatccggattattattgtgatgtcatttcaatttccaaccatgccataaccattgtaggttggaatgacagttattctgcagataattttgctgtaagacctccaggtgacggagcattcattatcaaaaacagttggggtcctagtgaaggctatgatggctattggtacgtctcctattatgacaagacacttgcaggctatggctatgatgcaatcgctgcaatggcatttacttcagttgcaaatgcctccacctataagaacaattatcagtatgacactttaggaaacacctttgagtcaatcggatatggctgcagcactgcatggattgcaaatcagttcactgctttaaacaacaatccattggctgcatttggattatatacctatggaagcagcagctatttagtaaacattacagtaaacggcatttcaagacttgttcaagagggaaatgtcaaaggtgcaggatatcatacaatcaagctggatgatgttgttgaactcctttcaggtgacatattcaagataattgtcaagctaagcactccagattccaattatcctgttgcaatagaatctaaaagaagcgactatagcagtcgtgctaattcaaatcctggagagtccttcataagctttgatgggcaaaactggcaggacctttatgaagtgggagatatccttaagttctatatgtatatgaataataagacttttactgaacctaatatctgcttgaaggcctatactatcggtccatctgatgtgcaccttcatgctagggcaaatgcaaccacttatacacaaggggatactgtagagattaagataaccgtatccaatgaaggagctacagtaaatgacttgaatatcagcatgaagtggaacagttcatttttcttaaagagtttcactaagcttaatggtgaatttgatagcacaaaaaagatatggcattttgacacattctccgaaggccagtcaagcacccttacccttgtatttactatgaggggaaataatgatgtggccagcttgtcatatgactataactattcaggattcaatccaggtgatgccaacactactcaagtattaaatctttattatggaagcctcaccaaatttgtagaagtccctaatgtctcaacttcagtgaaatccggagacgttgttgacattcaattgactgaccttcagtctattggaatttcagataagcaaatcgttatatccttgttagaaagcgacaacgaatatctatttgagaatgtcactttaataacaaatggcagcggtcaggcagggtttgtattggatttattggaaggaaattatgttttcttagcctcatttgcaggagatgactcttatatgtcatctaacgtgacatttaatgtttcagtatcaaaatctaacacttcaattagcttggataatctggacccttccaatataactgtattttcaaaatctggtgatgtaatcaatttcacactctctgatggaatcaataatctttctgataagaatatagttatttcactcattgaaagcgataatgactatctatttgagaatctcaccttaattacaaatggcagcggtcaggcagggtttgtattggatttattggaaggaaattatgtatttttggcttcatttgcagaggatggatattataaggcatctaacttgacattttatctaaatgttttaagaagggcttcatcaatggaatttgattcctctagcctaatttacaatggttcaaattggatcagcttgtcccagtcaaatgatctgatagaatttatcttatctaatcaaaccggtcctttagcagataaaactatcatcttaacagttgaagatttaaattcagttgatttggcagaaaatccattgatttataatctgactactggcccaaatggaattgcatcatttaatttaaatctaactaaatccaattatgaaatcattgcaagctatttgggagatgaatgttactctccttgtgagtttggatttaatttaagtgttttaaaaagaaatgctcctcatatagttgctgacgatatagcaataaactcttccaatccatatcaagctcatctattggatgatgatttcaatcctatagcaaatcagtcccttttatttgctttcgctaaaaaggacagtcaggatttattcaattattctgcaataactaatgaaagaggaattgcaattatcgatctttcagatattgaaagcggagattacaatcttttaattgcttttgaatcaaatgacttatatgatgattctattttggagattgatgtttctgtagtgaatgattctttaaatggcgataatggcactaatgatactggcaatggtactaatggaacagataacagttcaaaaatcaatacattatttaaaatagacatgtctgatttaacagtatctgcaaatgtggataagacaattgaatttgctttattggacgaatcattaaatccattggcggataaaactctcaatttgactatagttgatttggatgaagatactgaattgattacagattctgatggaattgctagttgcgttcttaatttggatgagggagtttatgaatttgtccttagtttcagtggagatgagaattactctccatctcgcttgattttcaatctttcagtttctaaagcagataacggtacaagtcctggtggagataatggtactagccctggtggtgataatgctactaatggcaccgaccctagcggaggcaatggaactgctcctataaatgataatggcactaatggaactgatcctagcggaggcaatggaactagccctggtgataacggaactgaatcatctaaaatcaataccctatttaaaatagacttgtccaatttgaacatctttgcaaatcttgaaaaggtcatcgaatttgaattattggatgaatcacttaatcctctttcaaataagacagttggcttgaccataagcaatttagatggagtcagtctgattacagactctaatggaattgcatcatgccctattaatttggatgagggagtttatgaatttgctctaaaattccttggagatgacgattactcagagtctgcaatgattttcaatctttcagtttcaaaacgcattgcccaattattatccggagagactttaatcaatctttcaagtgagaagagggaatatgatgtttatctagtggatgataaattaagtccattggcaaatgagacaatattgtttgccttaagttcaatggatggccaagtcttgtttaattatgtggtaaagaccaatgatgaaggtaaggccagcttgtcaggcttggctaaacttaatgagagcaattatattgtcaagaccgaatttgcttcaaatgacttctttgaaggcgctgaactaattaagacaataactttaatcaaggatgctccaaatggagatgatgctaatgacaccaatggcacaggaaatcaaactgataatggaacagacaccggaaataaaacagataatggaacagatacaaatggcacaaacggttctgatgttcctgtttcaaggaaagccacaaagatcatatatgaggatatggtgacccaatcagttgttcctgatgtggatggaagaataggagactatttctatgtcacattagtggatggaaacaacaatcctttggcaaacaaggaagttaaaataggatttaacggcagaatctataacagaactaccaatgccactggcggagtgaaattgcagataaaccttaaaatgccattcacttacacctttgcaatctgcttcctaggtgatgatgactataatgcatcatttgaagtggctaagataactgtaaataagaagaaaatgagtcttactgctccaagtaagacctataagtcaactgccaagacaaaagccttgacagctaccttaaaggacaataataataaggcagttgcaaataagaagatcactttcactgtaaatggaaagacatattcagctacaacaaactcaaaaggagtcgcttccgttaatgtgagcttgtccagtaaaaagacctattcatttacagccaaatttgcaggtgatgcttgttatggtgcagttacaaaatctggaaaaataactattaaataa

SEQ ID NO: 843 - DNA, 318 bp, Methanobrevibacter ruminantium
  source 1..318: mol_type = genomic DNA
atggcagatattggcgaagcagcagaaaagaaattaaaatccagaattagaaaattaaaaaaatgcaataaggatgaagaggaaaaggtaaagttcttcaatcaattaggtctttcattcactatcagtttacctactaaaaatcctgaaaagcaagaggacttcataatgctatacaccactcctgaaggacatatagtacatgctgaatacagctattccgaaggagaagagtttgcttccatggatattcctgaaaaggatttgaaggtaatcattgaatcattctctgattatgaattgaaacttttagactaa

SEQ ID NO: 844 - DNA, 1143 bp, Methanobrevibacter ruminantium
  source 1..1143: mol_type = genomic DNA
atgattgtaaacaattcattagatgagcttaagaaaagggaatcagcccttaagattataaggtcaattgtggaaaatgagggcagatcatctttatatgatgtcactggactttcaggtggcttcatatcaagtgaagaggagttggatctccttgaaacctatgtaggtcctgccatctttgaggatgagcttcaagttgttgcaaaggagcatcttggcggtgagaaggcacttgcagtaaacaggacaagttcaggcatccttgcaagtatactgtccttggtgaaggagggagagcatgtaagtcactttttagcccaataccctgcccatccgtcaattcctcgctcatgcaatattgtgggggctgactatgatgaatatatagatctaaatgaatttaaaatagaggacaatacaagtcttgttgttgttacaggctctacaatggaccatcaggtgatagatgaggatacatttaaggaagtaattgatatggctcatgataaggacattccggttttagttgatgatgcttcaggtgcaaggcttaggactgcagtattcaatcaaaagagggcatgtgacttaggggcagaccttgttgtaacaagcacagataaacttatgccaggtcctcgaggtggattgatggctggaaaagaggaattgatcgataaggtaaaggtcaaggcaaaccagtttggccttgaagcacagcctcctctcattttagccatggtaaatggaataaaaaactatagcgaagacaatcttataaatgcaatctctagaaaagacaagttctatgatatggtttcgaaggactatgaaatgtttgaaaaaacaccaactggtgttatggtaactgaagatgctcttaaaaaacaagtggacgctttagatattgaaacagagctatctgaaaaggacctttctttcctatgggctatgattttattgaaggatgaaggaattattacaatacctgctgttgggatgccaggggcatctgctacagttcgatttgacctgtccacccaagatgttattgatatgaatttaggtatcttgcatgataaggtggatgattcatttaacaagttttttagacagttgtcaagatgtggaaaagtctag

SEQ ID NO: 845 - DNA, 912 bp, Methanobrevibacter ruminantium
  source 1..912: mol_type = genomic DNA
atgaaaagagaaatgattaagctcttagttagctatgacataatttccaaagaggaagctgaaaagattgattcaatcaatgatgaagcaattgaagagtcaatcaaggaattaggatttggaaaaactgaacacattacaaaagaaaggatatctgagtttttagaaactgaagaactcggagaagagattctatgtttccgtaaggtattctctacaaacagcatttccaaattcttggcaaaccatggagcaaaggaaggaactgtattgatttccgaaatccaaacaaacgctagaggaagatccggcaagaaatgggaagctccagacggcggagtatggatgagcatgattttaaggccagatgtccctccggcaaagataggattgatcacacttgcaacaggtgttgcaatagctagagctatccgttcatttgacgttgacgctaaaatcaaatggcctaacgatatcttaatccatggaaataagatatctggagtattgactgaagtaattgctacattcaatcaaatcgaatatgttatcgtaggtgttggaatcgacagcaaccttaaattggaagacttctctgaagacataagagaaggaacaaccaccttggaagaggaaatccctgtaaaagtagatgaaaatgaactcattggaatcttcttaaatgaatttgaaaagatttatgacatctacttaaatggagatgttgaagagattcttagcgaatggagagccctttcagacaccataggaaaatatgtaagcattacccaaacagggggcaagacaactcaaggatatgttgttggaatcaataaggaaggaagcttaattattgaaaaacaagacggaaacttagagaaaattatttcaggcgaattaagaactctttaa

SEQ ID NO: 846 - DNA, 1494 bp, Methanobrevibacter ruminantium
  source 1..1494: mol_type = genomic DNA
atgtttgaaaaagtacttattgcaaacaggggagaaattgccatacgtattatgagagcatgccgcgaattggatatgaaaagcgtagcggtctactcagatgcagataaaacttccctttacactaactatgcagatgaaagcgttcctttaggaaacccatctccaagccaatcttatttaaacattgaaaagatcattaatgctgcacttgatacaggagcagatgccattcacccaggatacggattcttggctgaaaatccagagcttggaagacaatgtgagaaaaacggcatcaagctaatcggacctaaaggggagcatattgaaaagatgggagataagatcacttccaaacagcttatgaaagaggctggagtccctgtaattgaaggaacccctgaaggaatcgatgacgttgaagaggctaaggaaatagctgaagcaatcggataccctgtaatcatcaaggcttccgctggaggcggaggtatcggtatgcgtgcagtctatagtgaggaagagcttgtccgtgcacttgaagccacccagtcagttgctcttaaaaactttggagacgctacagtattcattgaaaaataccttgaaaagccaagacacatagaattccagatattggcagacgaatatggaaacaccatccatgtgggagacagggaatgttccatccaaagaagacaccaaaagcttttagaagaagccccttccccaatcatgactgaagaattaagggaaaggatgggtgaaagcgctgtaaaggctgccgaatatatcggatacaacagtgcaggtactgtggaattcctttacgacaatggagactactacttccttgaaatgaacacacgtatccaagtagaacacccaatcactgaaatagtaacaaacactgacttaatcaagcaacagattaaaatagcctgtggagaagagcttgaatacagtcaaagtgatatcacagtaacaggacatgctatcgaatgtcgtatcaatgctgaaaacccacttgcagacttcgctccaaacccaggaaaaatcacaggttacagatcacctggaggacctggagtacgtctggacagtggtgtttatatgaactataccattcctacattctatgactcaatgatttccaaactggttacaagcggaagaacaagaaacgatgcaatcaatagaatgaaaagggcattgagcgaatatattatcttaggcgtaaagaccacaattccattccataaggcaatcatgagaaatgagtcattccttgcaggtgacttgaacacccacttcgttgacgagcataagaaaggaattgaagaggaaatggaaaaggtaattttagaagatttagaaagagtaaatcgtatgaaatctacttttatgcctggtaaaaagatagctgcaatttctgcaacagttggaacttatttcaatgctgcacaagcacagcagatgaaaaagaaataa

SEQ ID NO: 847 - DNA, 120 bp, Methanobrevibacter ruminantium
  source 1..120: mol_type = genomic DNA
atgattagtattaaaatcgttataaacccttcatttgacatggtgaaaagcacattaaaggaaatgattaaattttccttagaattaatgaaaattttcatcatggtattgttcgcttaa

SEQ ID NO: 848 - DNA, 831 bp, Methanobrevibacter ruminantium
  source 1..831: mol_type = genomic DNA
atgatttttaattattcaagtgttattatgaaaattagaaaaaagaaacagcttgagatgatcctgcaaaatgttccatctcatccaaatccaaaagttgagcttgagcagtactcaacaccatcctctattgcatctgatcttatatggaatgcatatacattaggagacattagcgacttaagcgtattggaccttggatgcggcactggcatatttgcaattggctcttggcttatgggtgcaggctattcattaggccttgacattgaccctgaatcaatcgctcttggggaaaaaacaataattgatttaattggcctaaatcaaccgagtgatgtagatgtatttaatattaatttcatagttggagacatcaatcaatataattcaatatccgaactattaaatgataagagtattcaatctgatgaaaaatatgataagttaatagaatattataatagcaattctcttggtgatgattctaatcttaataattccaatgatggtttgatgaatggctcttttgatgagaaagatttcaagtttgccactttattccagaatcctcccttcggttctcaggagagaggaacaagacatgcagatagaaaattcatggaatttgctatggccagtgctgaagtgatatattcatttcatatgaaaagcacagaagagtttgtgattgattattataatgatttaggtggggatataagccataagttcgtctataatttcccccttccaaagatctatgactttcataaaactgagtcaagggatgtaaaagtagttgttttaagggttgaaaactttaaataa

SEQ ID NO: 849 - DNA, 816 bp, Methanobrevibacter ruminantium
  source 1..816: mol_type = genomic DNA
atgcaaaatagtaaagtgtctgtctttataccgaattcatttctcgctgaaaccaaggatttaaagctaaaaacctctaaagtaggtttgattggccgtgccttggctgtatttgaagtggatgaagtggtgatttataaagatctttcaattccagacagcgaacagactgatgatggagatttcattgcagaagtcctcaattatatggacactccacaataccttaggaaaaaggcaattcctatcaaggcagaattgcgtcacgttggaatattgcctcctttgagagttcctcatcatccaactggaaagcctgaattaggtgattacagacaaggattcactgtaaaaaggaataagaaaggtaccttcgtagatataggtatggataaactggcgttttgcaaagagcaacttacagtaaataagattttttcatttaaaattactaagtttgctaaagaggtaatagtcacacctgatgaaccagatgacatttactggggatttaagacattatctacaaataaaagtcttaaaaatagcttaaaattagttaatcccgatcttgttgtagaaacaacaaggtacgcagaaacaatcgattctatttttaatgaattgaaaactaaagtggaaagctctaatcatatagcgattgtctttggaggcccttactcatctataagtgagaatgtcgaaagttccaaatgggaaacagttaaaatcaatacaatcccaaatcagggaacagagactgtcaggaccgaagaggctgttatttcaactttagctattttcaatatactttaa

SEQ ID NO: 850 - DNA, 1011 bp, Methanobrevibacter ruminantium
  source 1..1011: mol_type = genomic DNA
atggtaagacatcaccaaccaagaaaaggttcagtggcatttagccctcgtaagagagttgctaaagagaccccaagaatcaaagcttggccaagtaatgaagaaccaaaacttttgggtcttgctggatataaggctggtatgactcatgctatggttgtggacaatgataaaaactctccatcccatggaatggaagttttcactcctgtaaccgttttggaagtaccaccccttgtaattttggggataagatcatacgaaaaaactgctcacggacttaaggctatcactgaagtaattgcagataatttggatgaagagctctctaggaaaatcacccttcctaaggactacgaccaatccgaagctattgcaaaaatacaagatgctttagaaaagactgaagaggtaagagtcttagtacacactaatcctaaaatggctagcgttcctaagaagaaacctgaaatctttgaatgtgcattaggcggaagctctgcagaagaaaaattaaactacgctcttggaattttaggtcaagaaatcagagccagtgatatctttagcgaaggacagtatgtagacgcaattgcaaccaccaaaggaaaaggagtccaaggggttgtaaagagatggaacatcagaattcaatatggtaaggcaatgagaagtggaaaaggtagacacgtaggttctatcggtccatggtctccggaaagaaccatgtggactgttgcacaagcaggtcagatgggataccataagagaactgaattcaataagaaagtcattaagattggagacgtatctgaagttgatgctgttaaccctgctggaggattcattagatatggtttagtcaaaaacgactatgtccttgtaaaaggctccgtaccaggtccaaccaaaaggttagttattctcagacaagctatcagacctaagaaagctgacgatgcagctcctcaagtgaactacataagcactgcttcaaaacaaggtgtatag

SEQ ID NO: 851 - DNA, 765 bp, Methanobrevibacter ruminantium
  source 1..765: mol_type = genomic DNA
atgaaagttaatgtttattcaattcaaggggaagtaaaagaggaaatcgaacttcctgctatttttaatgaagaatacagacctgaccttatcaaaagggctgtcctttctgctcaatctgcaagaatccaaccatggggtaatgaccctatggcaggtaaaagaacctcagcagaatcctggggttccggtagaggcgcagctatggtgcctaggataaaaaccggcgctagagcagcattcgtacctcaagctatcggcggaagaaaggcacaccctgtaagagctgctaagaatcatcatgaaaaaatcaacaataaggaaagaagatttgcaatcagatctgctgttgcagctaccgtaaatgaagaattggttgctggaagaggtcacagaatcgaaaatctcgaacaagtacctgtaattgttgaagatgatttggaaactgtcaagaaaacaagcgaaacccgtgaaatcttcaaggctttaggggtttacgatgatgtaatcaaggctaaagacagcaaaaagataagagcaggcagaggaaagacaagaggacgtaaatacaaatccggtaaaggacctttagttgttgtatctgaagacaaaggcattggattaggtgcaagaaaccacgctggtgtcgatgttgttgctgtagacaacttaaatgctgaattattagctccaggtactcatgcgggtaggttaaccatttacactaagtccgctgttgaaaaattaggaggattattccaataa

SEQ ID NO: 852 - DNA, 261 bp, Methanobrevibacter ruminantium
  source 1..261: mol_type = genomic DNA
atggatccttatacaattattgttaaacctcatgtaactgagaagactatgaacttaatcgatcaaaacaacgagctaaccttcgttgtaagaagaaccgctacaaaatctcaaatcaaaagggcattcgaattcctttacgatgaaaaggttgtaagagtaaacactcacataacctctaaaggattgaagttagcctatgtcaagcttgctgaagaaggcgaagctgaagatgtagcagttaaaatgggagtattctaa

SEQ ID NO: 853 - DNA, 726 bp, Methanobrevibacter ruminantium
  source 1..726: mol_type = genomic DNA
atgggaaaacgattaatacaccaacgtagaggaagaggaactcctgctcatcgtgtagcatctcacagattcaaggataaaatccaatacagggcttacgatgacttagagaaggaaggaagcttaaaaggaaaagtcgttaaaatcattcacgaccctgcaaggaccgcccctattgctcttgtcaaattcgaaaacggtgaaaagagacatattttagctcctgaatcaattcaaattgatgatgaaatcgaatgcggtatctcagctccaatcagctttggaaacactttgccacttgctgaaatccctgaaggtactcctatctacaatattgaaaacagaccaggagacggaggacgtttcgtaagatcctctggaacttacgcttctttaattactcatgatgcaagtcaagctgttgtggaattaccatctggtgaactcaaatccttcaacccaagatgccgtgcaagtatcggtgttgtagctggtggaggaagaaaagagaaacctttcctcaaggcaggtgtcagatggcatgcttataaggctaaaggtaagaagtttatgactgttagaggagtagcaatgaacgctgtagaccaccctcacggtggaggtaacagacaacacccaggtcgtccgaccactatctcaagacacgcaccacctggaagaaaagttggttcaattgcagctaaacgtactggaaagagaagataa

SEQ ID NO: 854 - DNA, 411 bp, Methanobrevibacter ruminantium
  source 1..411: mol_type = genomic DNA
ttggctagaaaaatatttaaatacagaggatatactattgaagaattaaaagaaatgtccttagacgaatttattgaacttttaccagcaagacaaagaagatccttaaaaagaggattcttacctagacaacagtctgtgttggataaaatgagaaagatgcaaaagatggataagaaaggtggaaaaccgctagtagttagaactcactgcagagacatgatcgtaattcctgaaatggtaggaaccactttcggaatctacaacggcagagactttgtggaagtaaccttcacccctgaaatgctaggctgcttctttggtgaattcgcaccaaccagagctagagttcaacacggtgacccaggtatgggtgctaccagatcatctatgtttgtgccacttaaataa

SEQ ID NO: 855 - DNA, 468 bp, Methanobrevibacter ruminantium
  source 1..468: mol_type = genomic DNA
atggcaaaaaacaaatacgcttataacaatcctgatgctgacgaatctaagacagcacgtgctatggcaaaatccattaaggtttctccaaagcattgcgttgaaatctgcagtgcaataagaggcatggatgttgcaaaggcaaaagcatacttaaatgatgttattgatatgaaaaaggctgttcctttcaaaagacacaacagagatgtaggtcacagaaaaggaatgaaaggctgggctgctggaagataccctgtaaaggcttccaaagcaatcttaactgttatagaaaacgcagaagcaaatgctgaatacaaaggtatggatgtagaaaacctcaagattgagcatatctcttcccacagaggaatggtaataagaggagctagaccaagagcattcggtagagtcactccattcaacactccaaccacccatattcaagtagttttagtggaggcttaa

SEQ ID NO: 856 - DNA, 756 bp, Methanobrevibacter ruminantium
  source 1..756: mol_type = genomic DNA
atgatagaaaaagatttcgttacagaaggtctcagaagaaccagaatagatgaatatttagaaaaagaacttgaaagagcaggttacggtggaatggaaatccaagtaactcctttaggaaccatggtaattgtctatgcagaaagacctggtatggtaatcggtagaggtggaaagaccgtaagggcaatcacccaaagccttaagaccaagtttgaccttgacaacccacaggttgaagttaaggaagttgctgttcctgaactcaacgcaagaatcatggcttccaagattgccaacatgctccaaagaggaatgcactttagaagagtggcttattccacaatccgtaaaatcatgggcgctggagctcaaggagtggaagtaaccatttccggtaagatcagaggatcaagatctgctgttgcaaaattcaccgagggatacatcaagaaatgtggtgaacctgcaaccagattcgtaactgaaggttttgctaccgcacctttaaaacctggtgttttaggtattgtagttagaatcatgcctcctgaagcaaccttacctgataaggtggatatcattgctcctgttgaagtagaggaacctgttgtagaagcagctgaagaagatgtcgaagagatcgaagaggaagtcactgaagagattgaagaagtcgaagaggacttagaagagcttgaagaagagcttgaagatctcgaagagcttgaagctgctgaagaagatgtcgaataa

SEQ ID NO: 857 - DNA, 207 bp, Methanobrevibacter ruminantium
  source 1..207: mol_type = genomic DNA
atggcaattttaagaagtaaagaaatttgggaaatggaaattgaggacatcgaagaaaaattggtggaactcaaagcggaactcgctaaaaacgtttctaaaagtgctgctgcaggtgttaatgaaaaccctggtaaaattagagaactcaaaaggactattgctcgtgttcttacaattatgaaccaaaaacagaaggagaattaa

SEQ ID NO: 858 - DNA, 345 bp, Methanobrevibacter ruminantium
  source 1..345: mol_type = genomic DNA
atgtcaaaaatctgtgatgtatgtggacttcctgaagagctttgcgtatgcgaagaaatcgcaagggaagtacaatctgtaaaagtttttacagtaagaagaagattcggtaaacttatgactattgtcgaaggaatagatgaacatgatatagatattaaggagcttactaaaactcttaaagccaaatgtgcctgcggaggcactgccaagaagggtcaaattgaacttcaaggagatcataaggcaagagttaaggaagtcttatctgaaatgggattctcttctgacactattgaaatcagagactctgataagaaatacaataagaggagaagacactag

SEQ ID NO: 859 - DNA, 336 bp, Methanobrevibacter ruminantium
  source 1..336: mol_type = genomic DNA
atgataagctcaaataatatattctatcatgaattaattgggttagagcttaaagttgttgacagttccaatccctctttgatagggctttgcggaactgttattgatgagactaaaaagactctcttgattgaggttgaagaaaaagtcttaagtgatgacttaggttctaatcaacaaaatcattttaatttaatttataaggaaaaattaattcagaaagatgtttctgtatttcaattcaaggttccagatggaaccatagttgaaattgatggtaaaatattattgaatcgtcctgaagataggataaagaaaagatataaaaaaatttaa

SEQ ID NO: 860 - DNA, 321 bp, Methanobrevibacter ruminantium
  source 1..321: mol_type = genomic DNA
atggttggtcttaatgttaaggaaccagaaactaaatgtgatgatcctaactgccctttccatggtaatttatctgttagaggacaagtccttgaaggtgttgttactactaataaagcagaaaggactattactgtagaacgtagtttctacaagttcattagaaaatatgaaagatacgaaaaaaggaaatcaagaattaacgttcacaaacctgattgtattgatgttgaagttggcgacgctgtaaaaatcgcagaatgtaggcctttaagcaagactaaacactttgtattagttgaagtaaagggtgatgattag

SEQ ID NO: 861 - DNA, 399 bp, Methanobrevibacter ruminantium
  source 1..399: mol_type = genomic DNA
atgaaacctactacctcaagcgtaactaaggctttgccaataggcgcaagacttcaatgtgttgataacaccggtgcccgtgaaatcgaaattatttccgtaaagggattcaaaggtgttagaaggagacttgacgtagctggagtaggcgacatggttgttgcttcagttaagaaaggaaccgctgacatgagaagagaagtcgtcaacgccgttgttgtaagacagaaaaaagaatacagacgtgctgatggtcttcgtgtaaaattcgaagacaatgctgcagttatcattactcctgaaggagtattgaaaggttctgaaatcagaggacctgttgctaaagaggcagctgacaaatggcctagcgtaggcagtgcagcaagcatattgatttaa

SEQ ID NO: 862 - DNA, 342 bp, Methanobrevibacter ruminantium
  source 1..342: mol_type = genomic DNA
atgtcaattcaaccaagaaaacaaagaaaagctctctacactgctcctttacacattcgccgtaaaatcatgagcgctaacttaagtaaagaattaagagcagatattggcaaaagatcattgccaatcaaagtaggagacaaagttcaagttgttcgcggagactttaaaggtcacgaaggaaaagttgaatctatcgacgctaaaagatacaaagttaccgttgaaggcgttacattaaacaagcctgatggaaacgctgtatttcttccaatccatccgtccaacttgatgattattgaagctgatttaaaagacgaaagaagaattaaggaggaataa

SEQ ID NO: 863 - DNA, 735 bp, Methanobrevibacter ruminantium
  source 1..735: mol_type = genomic DNA
atggcaaaaatgggatctagaaagcatcttaaaagatacaacgcacctaaaacctggcctatccatccaaaagaagatacttggacagtaaaacctgctcccggtactcacgcaatcaatgactcattgcctttgcttgtaatcatccgtgatatcttaggtattgcagataactcaagggaagctaaaaggctcatcaacactggtaatgtattgattgacggaagagctaaaaaagattacaaattcccagtaggattcatggacatattatccattcctaagactggtgaaaattacagaatacttttagatactaaaggaagattaactttacaccctatctctgctgaagacgcagagttcaaattagctaaaatcgtaaacaaatctaccatcaaaggcggaaaaactcaattaaaccttcacgacggtagaaatgtaattgtggaagaagacaactactctgcatacgatgttgtatgtctcaacattccagaacaagagattaaggaaaacttcgaatttggcgaagacgtagttgtacttgttaccggtggtaaacacactggagagcttggtaaaatccaagaggtcattgtagaccaatcctctaaagcaaataccgtaattatcgaaaaggctaataaggacactttcttaactttaaaagattatgcatttgtaattggtaaggatgaacctgccattgacttattggaggttaatcaatga

SEQ ID NO: 864 - DNA, 522 bp, Methanobrevibacter ruminantium
  source 1..522: mol_type = genomic DNA
atgaacccaatgaacgaagtcgtcatagcaaaggcaaccatcaatatcggtgttggagaagctggtgaaaaattatccagagctatgacccttattgaaaacatgactggtcaaacccctgtaaagacctattccaaagtcactaaccctgaatggggtataagaaaaagacagcctattgcatgtaaggtcaccctccgtggggaaaaggctgaagatgcaatcaaaatggtattggatggtatcaacaacagattaagaccaagtcaatttgatgcacaaggtaacgtttctttcggtattagagaacatatcgacattcctggaatgagatatgaccctgatattggtatttttggtatgaacctttcaatcacttttgaaaaacctggttacagaatcaaaagaagaaaaatccaaaagaaatccattccaaaaagacacagaatcactcctgaagaaactatgaaatttatggaagagaactttaatgtaactatcgctgaggaagaagaatactaa

SEQ ID NO: 865 - DNA, 153 bp, Methanobrevibacter ruminantium
  source 1..153: mol_type = genomic DNA
gtgattgttttgccaagaaaatacggaaaagcatccaaaaaatgtagccgttgtggagaccactctgctatcgtaagcagatacggactcaacttatgcaggcaatgttttagagaaattgctcctaaaataggatttaaaaaatacaattag

SEQ ID NO: 866 - DNA, 393 bp, Methanobrevibacter ruminantium
  source 1..393: mol_type = genomic DNA
atgactcttatggatcctcttgcagatgccttaacaaacatcagaaataacgaacgtcaagtaaatgaccactgtactatttctccagcgtccaaattgatcggacgtgtgttaagcacaatgcaaaaagagaattatattggcgaatttgaatttatcgatgataacaaggctggaaaattcgaagtggaattggaaggtaacattaatcagtgcggtgtaatcaaacctcgtcatgctgtaaagaaagatgaatttgagaaattcgaaaaaagatatttaccagcaaagaacttcggtatcttaatcgtaaccactcctgaaggtatcatgacccacagggaagctaaggaaagaggtatcggcggacgtttgttggcttacatgtattag

SEQ ID NO: 867 - DNA, 534 bp, Methanobrevibacter ruminantium
  source 1..534: mol_type = genomic DNA
atggtattagctgcagctataagggaagaaattgaaatccctgaaggcgttgaagttataattgatgatgaaatttctatgaaaggcccaaacggcgaaatttctagaaaattcacttaccctaatgtgactattaagaaagaagacgatatccttgttcttgaaaccgctttcccaaaaaagaaagacaaatcaatgatcggaactaccagagcacatttaaacaatatgattaaaggagtaaccgaaggtttcacctatcatatgaaaatcgtatacgctcactttccaatgaccgtaaaggtcgaaggagataaggtaaccattgacaacttcattggggaaagacatcctagatcttcaaagattgtaggaggagcaaatgttcaagtaaaaggtgatgaagtaatcattaccggtgtaaacaaagaagacgtcggtcaaactatggctaatttagaacaagccactaaaatcagaggcaaagaccctagagtattccaagacggtatctacttaaccagcagggaataa

SEQ ID NO: 868 - DNA, 345 bp, Methanobrevibacter ruminantium
  source 1..345: mol_type = genomic DNA
atggtgattttgatgagtaaagattttaaaagacaggaatatgctcgttataaaaaattaggaaccaaatggagacgtcctagaggtaaaactagtaaaatgagaagatacgaagcaggtaaacctgcaatgccatcaattggttatcgtactcctagagctactagaggattacatccttctggttacaaagatgttcttgtttataacatgaaagatttagaagctcttgacgcagaaactgaagctgctagaatcagcgcttctattggtaaacgtaaaaaagcattgatgttagaaaaagcatcagaattaggtataaaagtattaaacagacaattataa

SEQ ID NO: 869 - DNA, 447 bp, Methanobrevibacter ruminantium
  source 1..447: mol_type = genomic DNA
atgaatcttactacacaaagaagattagctgctagtatacttaaagttggagtaaaccgtgtatggatagatccagaagaagtagaagaagtttctagagctattacaagagacggtgtcaaacaacttatagatcaaggtattatcaaagctagaccaaaaactggtattagtagctacagatctaaaaaacttaaagagcaaaagaagaaaggaaaacgaaaaggaagaggtagtgtaaaaggagcaaagaacgctcgtacacctaaaaaacaagtttggatgaaaaccatccgtgctttaagaagcgatcttaaagaaatgagagacactggtgaaatcgatcctactacctaccgcaaattatacaagatggctaaaggtggagctttcagaagtaaatcttacatgaaaacttacgctagagaccatgacttaatcaaatag

SEQ ID NO: 870 - DNA, 582 bp, Methanobrevibacter ruminantium
  source 1..582: mol_type = genomic DNA
atggcaagcggatcaaattataaagtggctttcagaagaagaagagaaggaaaaactgactttgctgctagagctaaattagtggatgtagacaaggcaagattagttgtaagaatttccaatgctaattgtattgttcaagtaatcaatgtaggcctaaccggcgatgagactgtcgtatctgcacacagtaaggaattaaacaagttaggctggaaaggcggaaacaaaaacaccagcgctgtatacttaaccgcatacttatgtggtaagaaggctcttgcagctggagttgaatacgctattgcagacattggtttaaaatcccctattaaaggagctaaagtatttgcagctgtaaaaggtgctgctgatgcaggattagatgttccttatggcgaatctatcattcctagtgaagatagaatcaatggtgagcacattgcagcatatgcagaaagcttagatgaagatgaacttaataaaaaattctctcaatatttagcaagaggtcttcaacctactgatttacctcaacactttgaagagattaaaaataaaattgatgaggctgaagtatga

SEQ ID NO: 871 - DNA, 642 bp, Methanobrevibacter ruminantium
  source 1..642: mol_type = genomic DNA
atgagctttaatatggatgattgggaacctaaaaccaatttaggtaaggaagtaaaagcaggtaacattaccgatattgatgaaatctttgaaaaaggtctccctataatggaacttgaaatcattgacgcattgctccctgacttggaagaggaagtaatggacgtaaacttagttcaaagaatgcacaaatctggtagaaaagtaaactttagagtaatcgttgctgtcggtaacagaaacggttacgtaggtttaggacaaggtaaagctagagaagtaggtccagctatcagaaaagcagtggataacgctaaatacaatgtaatcaaagtaagaagaggctgtggagactggggttgtgtctgcggaagacaacacacagttccattcaaggtaaccggtaaggcaagcagtgtaaaggtaaccttaagacctgctcctgcaggtgtaggacttgctatcggtgatgtaggtaaaaccattctcagccttgcaggatataaggacgtatggtcccaagcaagcggccaaacccaaaccactgtaaactttgctaacgctgtattcaatgctttaaaagaatcctgtaagatgaaagcttcagaacaagaccttaaaaatatgggagtaatccaataa

SEQ ID NO: 872 - DNA, 459 bp, Methanobrevibacter ruminantium
  source 1..459: mol_type = genomic DNA
atgtatttagttattagagtaagaggtactactggtgttattcaaggcattgcaagtaccttagaaatgttaagacttaacagaatcaatcacgctgtattagttgaggaaaacccaagctacaaaggtatgcttcaaaaggcaaaggactatatcacttggggagaaatcgatgctgaaactctcactgaaatcattgaaaagagaggaagattagttggcggtgctcgtatcagcgaagaatacttagctgaaaacaccgattattccagcttcgaagaattggctaatgcattacttaacggtgaacttaaagctcaagatattaatatgaaacctgtattccgtttacatcctccaagaaaaggatatgaaggaatcagacattctatcaaagaaggcggatccttaggttacagaggagaagatattaatagtcttgcaaagagaatggcttaa

SEQ ID NO: 873 - DNA, 444 bp, Methanobrevibacter ruminantium
  source 1..444: mol_type = genomic DNA
atgattagaaaaggcaaaaaaatcaacaagatgagaggttccagatctaacggtggaggctctgtcaaaagaagaagaggagcaggtaacaaaggtggtaaaggtaaggctggagctggaaagcaccactggtccaccactgtaatcgaaaacagatattactttggtaaacacggtttcaaaagacctcaaaagaccatccacagatcctatcctgtaaacttaaacttcttgaatgataaggctgaagagttcttggaaaaaggaatagcaactaaagacgaagacgatgtaattgtcattgatgtaaccgacttaggctacaacaaagttttagctactggctctcttgacattcctttagttgtaaagtctcctgcattctccgaagcagctatcgaaaaaatcgaagaagctggtggagaagcagttgaattattctag

SEQ ID NO: 874 - DNA, 1371 bp, Methanobrevibacter ruminantium
  source 1..1371: mol_type = genomic DNA
atgtttttagaaaattttaaaccaatatttcagttgcttcctgaggtaaagactcctattcataggcaggactttagggaaaagcttaaatggacagctatagttttagttttatattattttttaactcttattccattatatgggttgagtccagctgcagttgaccaatttgcacaattaagagctgttatggcaggtagtttcgggtcaattcttacattagggattggtcctattgtaacagcgtcaattgtattgcaattattagtcggtgcaaagatattggatttggacttgaccttacacgaacataaggctatgtttcaaagtactcaaaaattattagctattattttcactatatttgaagcaggagttcttgtattcacaggaagtctggttgctatcgacccatctttctatccaatcatgctcttgcagcttgttattggagctattatgatcttatatttggatgaagtagtatccaaatggggattcggtagtggtgtaggtttattcattgctgctggtgtagcagaaacaattattgtaggtacatttaacttcttgccagcttccgctgcctcaacaactgcttcaggtattcttcctgcatttattcaatcaataattggtggagcacctaatttccaaatcttgattccattgattgctaccattgtagtgttcttgatagcagtatatggtgaaagtatgagaatcgagattcctatttcccacggcagagtaaaaggacacggtagaatcagaggggctgtaggtaaatatcctttgaaattcatctatgcaagtaacatgccggttattttaaccagtgcgcttcttgtaaacgtatcccttattgcaagtctcttccagaaattaggattccctatatttggagaagtttcaggtggaagggctatcagcggacttgctttatggcttaccacccctaacagcataagcgtattgtttaccaatcctttaagggttttattctacgcaattgtatttttaggctgttgtgtactcttctcatggctatgggttgaaatcagtggttccttaagtgctaaggaagttgcaaagcaactctataactctggtatacagattccaggttttagaagtagtaaaagacaactttatacaatcatgaaaaaatatattccagctcttacaatccttggtggtttattcgtaggtattttggcatttattgcagaccttaccggagctttaggcggaggtacaggtgtattgcttactgtaggtattgtatacaagctctacgaagagatcgctcaagaacaacttatggaaatgcatccaatgttaagaaaattcttaggaaacgattag

SEQ ID NO: 875 - DNA, 558 bp, Methanobrevibacter ruminantium
  source 1..558: mol_type = genomic DNA
atgaaattagtagttttaacaggtattccaggttctggaagtactactgtacttaaaaaagctttagaagaagtagattatcttcatttaaactatggagatataatgactgaaattgctgttgaaaaaggtcttgttgagactagagacgagttaagaaaattgcctgcagacactcaaaaagagattcaaaaggcagcaggaattagaattaaagaaaagtctgaaagtgaaaatgtaattgtagacactcactgtaccataagcactccatctggtttcttacctggacttcctaaatgggtattggaaggtttaaatccagatcattttgttttaatcgaagcatatcctgatgaaatcagggttagaagaacaaatgatgacactagacaaagagatgctgaatcagctgaagctattcaattgcatcaagaaatgaacagagcagcttcaatggcttatgccactttaactggagcaactgtgaaaatagtttataatcatgacaatgagctagatgacactgtcgctggcttagttgaatttttaaaataa

SEQ ID NO: 876 - DNA, 609 bp, Methanobrevibacter ruminantium
  source 1..609: mol_type = genomic DNA
atggcgtatcaaggtagttttcttttaggtatttcctggcttcagccagtattcgatgcaatgaatgctgtccttaatcctttagttcaattggatccaactccaaataatcctgtacttactgtatttgtgatatctgctttaatatcccttttgacagttactgcacagaaattattagtggaccaagacaagatgaatgagatgcaagcaaattcaaaggctttgcagaaagaattaagagaagctcaaaaaagtggagatgctaaacaaatagcaaaagttcaagcaaaacaaacggatatgatgcaagaccagagcgaagttatgaaaatgtcattcagaccaatgattgtaactatggttcctatcttattaatattcgattggatgtggcaatccgctatacgttcacttattgttgtattccctccagctgtttattattgtactttaactccaattttccactctctaggacaaatgctttacggcggtaacataactaccattccatttggtgtaggttggttatggtggtatttcatttgtacttttggaatgagtcaaatcattaggaaatttatgggattcaagaacggtttctag

SEQ ID NO: 877 - DNA, 267 bp, Methanobrevibacter ruminantium
  source 1..267: mol_type = genomic DNA
atgcctgcaaatagatttagatcaagatcatataaaagaacaaatacaaagactcctggtggagttaatgttttaagatataaaaagaaaaaaccatctaagcatgtatgtgctgaatgtggtgctgtattacatggtgtaccaagaggacgtccttttgaggtcaacaaattagcaaaatctaaaaagagacctaaccgtccatttggtggaaacttatgtcctgaatgtactcgtaaacatttcaaacaagaggcaagaaaataa

SEQ ID NO: 878 - DNA, 519 bp, Methanobrevibacter ruminantium
  source 1..519: mol_type = genomic DNA
atgataattacaatcggtggcgtagctggcagtggaaccacaacagctgcaaaggtattatctgagaaattaggggttccgtatatttcagctggagctatctttagagagatggctgaagagcatgggatgactcctgtggaatttggcaaatttgctgaaaataatactgacatcgataaagagattgataatagacaagctaaacttgcagaggaagctgatgatcttattattgaaggaagattgtctgcatactttattgatgcggatttaaaggtttgcttcaccgctccattagacgttagagctaaaagagtatgtgaaagggaaaacaagtcagttgagactgctcgtttggaaataatcgctcgggaagaaagcgaagctataagatatagggatattcataatattgacataaagaacatggatatttatgatttgataatcaataccaatagcttcgatccggagagcatttcagaaattattataacaacattaaaggtgatatga

SEQ ID NO: 879 - DNA, 168 bp, Methanobrevibacter ruminantium
  source 1..168: mol_type = genomic DNA
atggcagctatagaagttggtagaaaatgtattaagactgctggtagagaagcaggtaaagaatgtgaaattgttgcaattattgatgaaaacttcgtagaagtaaaaggagacgaagttaaaaacagacgttgtaacattaaccacttagaacctattatggaataa

SEQ ID NO: 880 - DNA, 2514 bp, Methanobrevibacter ruminantium
  source 1..2514: mol_type = genomic DNA
atgattttggtgtttaagatgggcatatttgataaggtcaagtcagcttttgaatctagtaaaaactttaaatatttagatgatttaattcatagcgggctgaatgagattgttttggatgatgatatcagcttaagtaaaaatgaaaaaaacaagtattctaacggcattgaaatagaaattgataatctggttattgatggaaatggccatgcaatagatgcccaaggaaatggttctatctttttatgcactggtaaaaatatcgtagtaaagaatattcattttaaaaatggaatccattccaatggaggtgcaatagaaaatcgtggggaattaactataatggattccacatttgatggaaataatgcatcccttggaggggcagtttttaacgacggccctaaactaatgatagctaaatccacaatcactggaaacatagccaaagagggcggcggagcaatatataataatgatggcgaggtttatatttcagaatccatgattaacgaaaatgtctctagttttcatcagtattctggcggagcaatttataataagggcgagttgactattgaaaaatcaacactcattagaaaccatgcaagttttggcggagcaataggaaatattggtcagttaaacataatcgattccacaattagcaataatgaatccagtggtgatggcggtgcaatttttaatgataatgctagcttatcaatatccaattcaatgattgaagctaatgtctcagatggattggaaggcggaggggcgatatataataaggaaggcgagcttaacattactggatctgtccttaaacaaaacgaattggtcggccaaataggaaaagggggagctatatataataatggaggcaatctcaatattgcaggttcatcactttgcaatcattccataaacttttttgggggagcgatatataatgatggaggcaagattaatattgcagaatccaaattcaatgaaaattcctctaacaggaatggcggggcaatatataatgaaggtgaagtcaatattagaaagtcatccattaagaaaaacaagtctgatggcggagtaatagagaatataaatggagattttaagatatttaattgcgaatttttctcaaacgaatctcaaggaaatataatattcaatcaagattcattagaaattaattacactgattttaaggataatcgatcaaaatctatgctgcttaatgatggagtcaaatccaaaatgagccttgttaaaggagagattaatggtaatgatgttaaagatacattaatcctcaatgaaggaaattctttaaccatatctgaaactgtttttgaaaataatttgattcctaatggggatgccatagttaattcaagtaatttgatattgacaaatccaaagataaatgatgataatcaggaaataagaaatcaagggaatcttcttttaaaaaggtcatctctagatattaaaggcaaaatcaatggggaaggaaaaattgaaacagatgaccattccaatgaagataaatttgattttggatatcttgacagcctaattcatggaagtcccgataaggaaattgtgctggataaagatataaaacttgaaaattatgaagttgatttttatgaagggggcatagaactggatttcgatgatttgattataaatggaaatggcaaaactattgatgctagaggaaaatcccgtattttcacaataagtggaaaaaacatcactctaaagcacattacttttaaaaatggacactcttataaaaattacgacaaccctttaaataataatggaggggcaataagaattaatgccaatgcaaatctcacaataaccgattgtaaatttttagataatctctcagaggattatggtggagttatatattataatggctctggagacttagttctcactgcatcaacaatgaaaggcaatactgcagaaaatgatggcggtgccatattcagtagcggagaggtgaaaataaataaatctaaatttatcaacaatagcggaaataatggcggtgctattgcaattgtaaatagtaatgataaagcatctgtcactgaatctatttttaatgaaaacgccgcagattcgaaaggaggagcaatctggttccataattcaaatattgcattggcagattgcactttcaatgataactatgctacttgtggagcggcaatttaccaagaaataagcaagggaagcataagcaattccacttttaagaggaatttatcatcttatgcatattggcatgatggaaaattagttactaataaaaatcatgctatcttcattgatacaggttctggattaaatgacttcaatcaagatagagacaatatcatcaactgtgattttatagataataataataatctttatgctcagaaacatgatttaattaaatctagacttgatgagcacttggctctatggaaacgcaatttataa

SEQ ID NO: 881 - DNA, 834 bp, Methanobrevibacter ruminantium
  source 1..834: mol_type = genomic DNA
atgttagaagttagaaacattaaatattcatataataaggattatcaagcacttaagggagttagcctaaaggtcgaagaaggacaaatggttgctcttttaggaaaaaacggtgcgggaaagtctaccttgttccttcatttaaacggcatatacgaacctgatgagggacaggtcttcatcaaaggggaagagctaaagtatgacaagaaatcattgcttaaattcagacagaaggtaggaatcgtattccaaaaccctgatgaccaaatctttgcaccgactgtagaagaggacgttgcattcggaccgctaaaccttaagcttcctatggaagaggttcaaaaaagagtgacagaggcattggcaagggttggaatgagcggatatgaaaagacagctcctcaccacctaagcggaggtcagaagaaaagggttgcaattgcaggaatccttgcaatgaaaccagagataatggttctggatgagcctacagcagggctagaccctcaaggggttacagcattaagcaatctattgaaggaacttaatgatgaaggaatcactgtaataatctcaactcacgaggtaaaccttgtacctacctatgcagaaaaggtctttgtattggttgatggggaattagttgcagaaggaactccaaaagaaatatttgcacagcctgaaattcttgaacaggcaaatcttgaagttccgattgttacagagctattccaagaactagaaaaagaaggatatgatatgaatgatgactatcctttaaccattgacgaggcaaaggaaaagttcttagaattattaaataaaaattaa

SEQ ID NO: 882 - DNA, 693 bp, Methanobrevibacter ruminantium
  source 1..693: mol_type = genomic DNA
atgaaatttgatatggattatattgctcatcacaatgaacttagcgaagcaaatccttattataaattatttataaccataattctactgattgttacattggcattggacaacctgtactttgacattttcatgttcatactattctccatcataattcttggagttgcaaagataaacatccgctcttacataaaattcctgaccattccgatggcattccttataataacatgtctatttctgatattcttcttcggaagcggaaaggtcatctaccaaacaggattctttggaatcgtagtcaccgacgactcatggcattacggtctctacacattcttcagagtgttagggtgttttcctatcctaggattcctagcccttacaacacctattgcaaagatcttccactgtttggaaacacttaaggttcctaaaatagtgattgagatagggcttttgatgtacaatacaatcttcatattcctaaatgagattgatgtgatgcagaaggcacagaagacaagattagggtataattcctattggaattcattgcagtgcttaggatcgcttgtaagcaatatatttttaagatcattggaaaaaagcgaaacattgcaaaacagtttagattcaagaggctacgacggagagcttccggtttatataccgccaaaggaggaataa

SEQ ID NO: 883 - DNA, 288 bp, Methanobrevibacter ruminantium
  source 1..288: mol_type = genomic DNA
atggaaagaacaacattaattattttagcagtcatttgtgctataatcttcatagcaccattagttatgtacagcggtcttggtgaagatgatggatacttcggcggagcagacgatgcagctggcgaagctattgaagaatctggttttaaaccatggttctcatcaatatgggaaccacctagtggtgaaatagaaagtttattattcgctcttcaagcagctataggtgcaatcattattggttacttcttcggctactggagaggacaaggtaaagaagaatag

SEQ ID NO: 884 - DNA, 666 bp, Methanobrevibacter ruminantium
  source 1..666: mol_type = genomic DNA
atgcacattatggaaggatatttacctttgacatggtgtatcatatggttcgtcgtatcattcatcgttgtcgcttacggtatctatcaaataaaacaaattgtagatgaaacacctgactccaaggcattactcgctgtcagtggagcattcatgttcatcttatcatctttaaaactcccttccgttactggaagctgttctcacccttgtggtaacggattaggtgcagcattattcggccctgctgtaactgctgtacttgcaactatcgtactcttgttccaagcaatcttacttgctcacggcggattaaccactttaggtgcaaacattttctcaatgggtattataggcccattcgttgcttggctcgtatacaaagcttgcatcaaagctaatatttcatcaaccattgcaattttctttgcagcattcttaggtgacttattaacttatgtggctacttcattccaattagctttcgcattccctgctccttcttttggcagcgcattaacaaaattcttagttatctttgcagtaactcaagtaccattagctattggtgaaggtatcttaaccgtaatcatatgggacagattaaaagcttacaaaccaaaattattagacaaattaggtgtattagctcctaatgaagcataa

SEQ ID NO: 885 - DNA, 687 bp, Methanobrevibacter ruminantium
  source 1..687: mol_type = genomic DNA
atggagaaaggaaaattatatggtgtaagcattggcccgggagatcctgagctaataactgtaaaggcaatgaatataatatcaaaatccaagtatattgcaactcctcatactggaacaggggaatccttggcattgtcaatagtgtcccaggcgatagacttgtccaataaggagataatgcttttggagtttcctatgacaaaggataaagatatattgactaaaagccataatgaggctgcagaagcaattattaaggttcttgacagtggagaggatgttgcaatgttgaatctaggtgatgttactatctattcaacttttgactatactaaggataaattagtggaaagaggctatgatgttcaggttattccaggtgtcacaagcttttgtgcatctgcatctgagcttaagataggcctgacaactatgaatgagcctttgcatatcattccagcaagcggaatagacattaaagaagctcttaagatgccgggatccaaggtcttcatgaagattggaaggtcaatgcctaagctgattgaagcgattgaggaacttggtcttcaagacaatgtttatgcagttgaaaactgtggtttggaaaatgagaaggtttataaaggtctaaaagagtttgatgaaaaaatgggctattttactatagtcgttgttaaataa

SEQ ID NO: 886 - DNA, 1140 bp, Methanobrevibacter ruminantium
  source 1..1140: mol_type = genomic DNA
atgcaagataaacgattagtaaaccagcagttattgcgttgcggatatacaacaggaacatgtgcagcggcagcttcaaaggctgcaactaccatgctatttgaaaaggagagggtagattcagtctctatcacaactccaaatcagacaagccttaatatagatgttctaaatccacaattaactgataagaaggcatgctgctgtattcaaaaggatagcggagatgatccagacattacaaatggaatattggtctctgcagaagtgtccttaacagaatctaagggtatcaatatcgatggaggaaagggagttggcagagttaccaagcctggtctggaccagccggtgggaaatgctgcaataaactcagttcctcgcaagatgattgaagattccttaaatgaattggcaaggcattatgattacgatggaggattcaatgtcatcatttcagtccctgaaggtgaggagataggcaagaaaacattcaatccggaacttggaatcgttggaggaatttccatattgggcacaacagggatagttgagcctatgagcgctaaggctcttgcagattcaatcaaagtggaaataagcgtaattgcagcagagagcaatgagtcaattctaatatttttaggcaatttcggaaagaaattcaccgaagaagagttaaaattgtctacaagccctggaataatgtgcagtaactttatagatgttgctttggacagttctgttgagtatggatttaagaatattcttctgattggacatataggcaaattcgttaagctaggcattgggctcttcaatacacactcccataatggggacggcagaatagaagcattattgtcatgtgctttagaggcgggagctgatttagagaccctaaaggcaataaatgcttgtgtaaccaccaatgcagtattggatatcttgtatgaaaaggagctattggataagaccatggaaatattaaatgataggattcagcatagaattgataaaagggtgcctccagaggcgaatattggctttatttgctttgcaaatagtggagagtatgagggcatcctatttgaaagcgataatgcgaaagaactaatgacaatttggaaaactgattaa

SEQ ID NO: 887 - DNA, 756 bp, Methanobrevibacter ruminantium
  source 1..756: mol_type = genomic DNA
atgattcattttgtaggtgcaggaagcggtgctgttgatttaataactgtaaggggagctaatctcttaaaagaagcagatgtaataatctatgcaggttcattagtcaatccggacttattgaattacgctaaagactcctgtgaaatttatgacagtgctaaaatgactttagatgaagtattagatgttatgtttgaggccgaaaaggaaaataagatgacagttcgtttacacactggcgactccagtatttatggagctatccgtgagcagatggaccgtttggatgaggtggaaattgattatgatgtttgtcctggagtctcaagcttttgcggtgctgcagcatctttaaaggcagaatataccctgcctgatgtaagccaaagtgtgataatcactcgtatggcaggaaggactccggttcccgaaaaggaaagcattgcatcatttgcagagcatggagcaaccatggttattttcttaagcacagggcttcttaaggatctctctaaagaacttgtcaagggaagatacactgaagacacccctgcagctattgtctataaggcaacctggcctgatgagaagattatgcactgtactgttggaactttgtatgaaaccgctaaggagaataatgttacaaaaacagctttaataatcgttggagatgttttagacagtgagtattccctttcacgcctttatgccgatgacttttcaacagagttcagacaggctaaaaaataa

SEQ ID NO: 888 - DNA, 1023 bp, Methanobrevibacter ruminantium
  source 1..1023: mol_type = genomic DNA
atgaagatatcaatcattggatttacagataatggcatggaaatagcctataaattatcaaattccctatcagaggataataatataagtttcactagatgtggaaaaggagagttatctatttggacagaagaacatttttcagatagtgatgctcttatatttataggtgcgataggaatagccttaagggcaattgctccttacattaagaccaaaacaaaggatcctgccgttgttgtagtggatgaattgggacaattctccatacctattctatcagggcatattggtggagccaatgaattggcacttcagatagcagatatattaaatgcaattccagtcattacaactgcaactgatataaataatctatttgcaatagatacttgggcaaaaagccaaggattgaagattttaaatccagaatgcattaaactggtttcatccaaattgctgaagggggaaacaattcatataaaatctgattatcctattcagggaaacttgcccaagaaggtccaaatcaatgatttagaagattctaatagtgattatgatgtcataatcagccataatgattatagttatatggagaataaggatatattgttattaataccttcaataattacaataggtattggctgtagaaaggatataagttttgataacattgaaagatccgttttaaatatattggataaggagaattatcatatactgtctttaaatgcaattgcaagcattgataagaaggctaatgaaaagggaatattggaatttgcaaggaaatacaatctgccattcaatacttatagtgctgaagagctgaacagtcttgaaggagatttcacaaagtcagaatttgtaaaaagcgttgtggaagtggataatgtctgtgaacgttccgcagtcatagaaagcaatggaaacttgattagaagaaaggacacttgtgatggtgcgggagtgactgttgctttggcaatgattaatcctattctttcatgggattga

SEQ ID NO: 889 - DNA, 732 bp, Methanobrevibacter ruminantium
  source 1..732: mol_type = genomic DNA
atgaaatgtgtgtctgttgtaggtattggtcctggaaatgagttgtatcttagcattgcagctaaggaaactcttgaagattcagacttaattgtaggctataagaaatatgtggagctagtagaagaatatttgcctgaaaaggagtatctctacactggaatgacaaaggaagtagatagatgtaaaatggctttggaaaaagcatctgaaggcaattgcgtatctgtggtctgcagtggggatgctggagtatatggtatggcaggattggtttatgaattgtctgtagattatcctgatgttgaaattgacattgttccaggcataagtgctgtcttaagtggttctgcagttttaggagctccaataggacatgattttgcagtaatcagtttatcagatctcttaactccatgggaattgattgaaaagcgcttggccttggctggagaaggagatttctgcatttgcctttacaatccttcaagccataagagaaaggattatcttaaaaaggcctgtgaaatattattaaaacataaaaaggaagacactgtatgtggttatgtcagaaacattggaagagaaggtgaagaatatcatatattaagtcttaaagaacttaaagacactgaagttgacatgttcactacagtcttcatcggaaatgcaaatacaaaggtaattgacaataagatggtaactccaaggggatacaagggagtatag

SEQ ID NO: 890 - DNA, 759 bp, Methanobrevibacter ruminantium
  source 1..759: mol_type = genomic DNA
atgcacaagattgttttgtttggaggaactacagaaggacgtttattgactgaattcctatctcaaaataaggttccatccattgtctgtgttgccactgaatatggggagaaagtcttggattatgagcccccagtcatagttcagcctaaaagattaaagcctggccctatgagaaagctatttcaagaggagcagaccgagtttgtctttgatgctacacatccttatgcaactgaaataagcaagcacatcaaggaagcctgtgatgaaatgggcattgaatacatccgagtattgcgagaatccattgagattgaaggtaccactaaagtttccagcatggatgatttgattgattatttaaaccaaactgaaggtttgatattttcatctatgggagctaaggaggctgaagctttaaccgctctagagaatttccctgaaagggtctatttgcgaatgttgccttctcccgaagggattggccattgcctagatttgggatatcctatgaaaaacctttgcggaatgcagggtccattttcaaaggaatttaatatggctcaatttaaggaaattggtgcagacatactagttactaaggaatcaggcaatgttggaggatttttggaaaaaaccgatgcagctaaggaatgtggtatggaagtagttgttttaagcagattgcttaatgaagaaggcattagcgttgaagaggctaaagatgccataatgagtaaatgcttaaggcgttag

SEQ ID NO: 891 - DNA, 1188 bp, Methanobrevibacter ruminantium
  source 1..1188: mol_type = genomic DNA
atgaaggaaatcaatattattggaatgggaatgagtgaaaagacactcactcatgaagctttggaactcattcaccatgcagatatcttaattggtgcaaaaagattaatcaatgagttttctaaacttaataaacctagttttaatgcttatttatctgatgacatattgaaaataatagaagaaaccgatgcagaaaaaatagcaattcttgtttcaggagatgttggcttttacagtgctgcggaaaaactgacagatgtcctaaaggactataatcctaatttaattaccggaatctcttcagtttcctacttttttgcaaaatgcagtcttccttggaaggatgcaaatctgataagctgtcatgggatagatacaaatatagtttcatcagttcgaagaaacaggtatacctttgcattaacaggcaaaaacattccagaattgcaaaatgaattggttaaatatggctttggcgatttgaaggtttgggttggagagaacttaggttcagaagacgaattcatcaatgattgcaggattgatgatttatgcagtagggaatatggctcattaactgttttgattattgacaaccctgattttgattctaaatcaagaacaggcattccagatgaggaattcattaggggaaaagtcccaatgacaaaatcagaggtccgtgcagtatgcgcatctaaactctcaataggtcctgacgacatagcttatgacattggatgcggaacaggctctgtaacaatagaaatggctttatcagcatacaatggaaaggtctatgcctttgataagaaggaagaggcaattagtctcctaaatgaaaactgcattaaattccatattgataatgttgaagcaatttgcggattggcgccagactgcttaaagggtcttcctacacctgatgtggcctttattggaggtagttctggaaacatggatgaaatagttaattatctctatcaattaaacccaaatatgagatttgtcataactgcaataagcattgaaaatgcaatggctgcattggattcattaaaagatattggaatagaagctgaaatagttcaggtggctgtctctaaaggcaagaaaattgcagatttgcatatgctgattgctcaaaacccaatatttatcataagtggtgatgccaatgaatag

SEQ ID NO: 892 - DNA, 1362 bp, Methanobrevibacter ruminantium
  source 1..1362: mol_type = genomic DNA
atgaataggttcttaatatctggaacaagcagtaattgcggcaagacaacaatcacaatggccttgcttgcagcatttaaaaacagaggtcttgatattgcttcattcaagtcaggtcctgattatattgacccaatgtttcatagaaaggtctttaatgtaaagacacataaccttgatccctatttctgcactgaagagatgctttgtgagcagtttattagaaacaaaggaaatgatttaagcataatagagggggctatgggtttttatgatggaattggagttgaaggaagagcaagcgcttgggaagttgccaaatccatcaaggctccagcggtgctcattcttgatgcaaagggaatgagcaattctgcagctgcaatcataaagggctttaaggaattcaaagaagacagtatggttgaaggagtcattttcaataatatttctccaatgttatatcctcttttaagagacattgttgaaagcattggcataaaggcttatggtttcttgcctaggagggaagaatactcaataggaagccgtaacttaggattaatcactgcagatgagattcaggacataaaagataaaataaatggattaagtcaattggctgaagagtacattgatttagatggcttgtatgaattggctaagtctgctcctgaattaaaaactaatgattttataggagaagttttaactgattcccaaaatgaagaaagtgcagattcaagtaataaaccacgcatagcagtctctcgagataaggcattctgctttatgtatgaagaaaacatagaaatactagaggatttaggatgtgaagtggtctatttcagtcctttagaggataaaaaacttccagataatatttctggtttatatctatgcggaggctatcctgaattatataaggaggaactatccaataataaggacttatgctcttcattaaaagaaataatctctaatggaatccctacaatagcggaatgcggaggatttatgtatctgcatgattccattgagaatgtccctatggttggatttataaagggaaactgcattaaaacagataaattgcagcgctttggctatattgaaattaaggcattaaaggataatctattatgcagtgaaaacgatagtatcagagtccatgaattccattattatgacagtgagaactgtggagaggatttcatggcaaagaaagcatctaatggcttggaatatctttgctgtcatggttcggatagtctttatgctggttttcctcatatttatctacctgcaaaccctgattttgcaagatcttttgttaggaatgctagaaattggaaacattaa

SEQ ID NO: 893 - DNA, 639 bp, Methanobrevibacter ruminantium
  source 1..639: mol_type = genomic DNA
atgaaaattgaattggaacaggtcgagcctgctgaaattgaaaataggagtatggaaataatagaatctgaattgcctcatgaaattgaccctaaattggcacctatcattaaaagggcagttcatactgctgctgattttgattatgtggataacttatgcttttcagaggatgttgttgataaggcattggaagcgattaaaaatggagcttgcattgtcactgatactcaaatggcaaaggcaggaatcaataaggcagagcttaaaaagcatggcggtgatgtcttctgctttatgagtgatgatgatgttagggatatggctaaaaagaatcattcaactagagctagagcatctatggataaggcatcacagctggacaggccattgatatttgctattggaaatgctccaacagctttgataaggttgtatgaattgattcaggaaggcaagctcaaaccagaacttatcattggagttccagtgggttttgttaatgtggttcagtcaaaagagcttattatgcaatgtgatgttccttatatcgttgctcgcggacgcaaaggtggaagcaatgtagcagcagctatttctaatgcattgctttatatcttaagagatcaaatgaagtaa

SEQ ID NO: 894 - DNA, 789 bp, Methanobrevibacter ruminantium
  source 1..789: mol_type = genomic DNA
atggttgataaaattattttagtggttagttttggtacatcttataacaataaccgtgctcttaccattggagctattgaaaaggatattgatgaggcatttccagattatgaaatgagaagggcatttactagtcaaatggtaataaacaagcttaaaagacgtgatgacttggatattgacaatgttcaagatgctcttgaaagggcagtgaatgatggtgtcaagacagtcattgtacagccaactcatgtaatggacggaactgaatatcatttcaaaatcaaggacactgtagataagtacattgataaatttgataatattacaatcgcagatcctttattaatcactgatgaagactttgaagacttaatcagcagcataactaaagatgatgaatcaagtgatgaaacagctattgtttatatgggtcatggctctcctgctgagtctaatatggtttataccaaattgcaatccatgttaggagaaaagggattcgatcattattatataggcactgtagaggctaagcctgattatgatgatgtcttggctatggttaaggaaggagactataagaaaatcatcctaaagcctctgatggttgttgctggagatcatgctcaaaacgatatggctggagatgaagatgattcttggaaatccatgttccaagatgaaggatacgatgtggattgtctaattgaaggtctggcacagtctaaagacatcagggatgtctatatcaagcatgttcaaaaggcaattgatgatttgagttaa

SEQ ID NO: 895 - DNA, 393 bp, Methanobrevibacter ruminantium
  source 1..393: mol_type = genomic DNA
atggaacgagaaagttattattttttattattgctaattggacttgtcatctgtgcaggtgtcttttatttccaatttaactatgcaactcccacatatctgatattcaatgcaactgaagtcaatgagggaggctcatttacaggggtattgaatgatgcttatggatttccggtggtaaataagacaataacctatcataagccaggatatgaaatggggacattggtggatgttcaaacggatgacacgggagagtttgttatagaaaatgcccaatacctgccggatgccggtgaagacaattattatggtgcattcacctttgcaggggatggcaaatatcaaggatgttcctttgatggaaatataactgtaattccaaagaaataa

SEQ ID NO: 896 - DNA, 669 bp, Methanobrevibacter ruminantium
  source 1..669: mol_type = genomic DNA
atgtctaatcaagatgaagaaaactatatggatgatgaattattgcttaatgctcgaaagcctaaaggagaattaggggagaaactaattgagaacatgaatataaaccacgaatcccttgcacagtggagcctaaatcatttagagattgataaggatgattttattttagatattggctgcggcggaggagttaatgtggaaagattccttaaaatgacagacaataaggtctttggtcttgattattcagagctttcagttgagaaatccattgaattgaatagggaatcaattgatgatggaagatgtgaaataattcaaggttcagtttccgatatgccctttgaagaagggatttttaatattgctacagcctttgaaacagtttacttctggcctgattttgtaaatgacctaaaggaagtccatagaattttaaaaaaagatggaatattctttattgctaacgaagctcttccaaatgagtatgacaagcgtcaacagcgcatcattgaattgttagagatgcatatttattcaaaagaagaattagaggattctttagaaaaagctggtttttctgatgttaaatgttttataaaggaagccaaagactcttttactggcgatgatgcatattggatttgtgtgattgctaaaaagtaa

SEQ ID NO: 897 - DNA, 963 bp, Methanobrevibacter ruminantium
  source 1..963: mol_type = genomic DNA
atggatgattatttaattaaatcaaaatctgaaactaatcctgaatatggatgcaatccatatgaaagacctattgaagaacatatagctaaaggaataatcaatttagacaagccttcaggccctacctcccacgaagtggactcctgggttaaaaggatcctcggatgcaataagacaggccatgggggaacacttgatcctaaggtgactggggtgcttcctattggcatagacaacgccacaagagtgagccaacttctccttccagcaggtaaggaatatgtatgtcttatgcatttgcatagggaaataccagaagatcaagtaaaagggatattcaatgaatttacaggcaagatttaccagacaccccctgttaaatcagctgtaaaacgtgaattaagggtaagaaatatttattactctaccatctatgaaatagaaggacaggatgtcctctttaggataggatgcgaagccggaacatatgtcagaacctattgtcatgatatcggtgaggcattgggctgcggagctcatatggctgagcttagaagaactagggtaggtccattcgatgagcgaaacaatgaccttgtaaacttgcatgaccttacagatgcatatcatttctatttggaagacggagatgaagagcatattagaaaggccatccaaccaatggaagtggctagctcacaccttcctcagatattcattaaagactctgcagttgaagcgatctgccatggggcaaagcttggtgcaggtggaatttgcaaattgtccaaggacattcaaaagggcaatcttgttgcaataaagtctttaaaaggagaactggtagctgcaggaacttctcttttatcctctcaagagataatgaatgcagattccggtttggtggttgatacaaataaggtctttatggatacaggaatctatccgaaaggatggtaa

SEQ ID NO: 898 - DNA, 183 bp, Methanobrevibacter ruminantium
  source 1..183: mol_type = genomic DNA
atggatgataaagaaaaagtaattgaagcatttaaaaactctgaagaacctttaaacgctaaaaaagtcagtgaactttctggtgttgaaaagaaagaagtcgataaaatcatgaaagaattaaaaaaggatgaaactattgtttctccaaaaagatgttattggactcttgcagaaaaataa

SEQ ID NO: 899 - DNA, 552 bp, Methanobrevibacter ruminantium
  source 1..552: mol_type = genomic DNA
atggtaaaaaacaataatgaaagatttgaacttgatttaagtaaaaatgaaactcctgaattcagcaatgaagaaatattaagcaaaatgagaagaggattcaataatcaatatgtatgctttgaatatccatttttatggcagaatatgccaattgacgaagaggatgaatttacagacataatgcttttcaataaagctaacaatgcaattgtaaaaatatcaacacagccatgtctcattgataatatagacgatttaaaggaagagattgaaaaggacttaaaatccaatggatgcaccattcaacagtccgctatggaaaagatggaaacccaagacatttgggatgtcttttataccactaaagaagggctagaagtagagcagttctctattttaaaggataataacctatacaatctggaattatataccaaaaacaacagagatcaggcaactgtcaaatcctttgttgatgttattcaaacatttacaatcttaaaaccaacttataaggtagatggagacagttatgaaaagatagagtaa

SEQ ID NO: 900 - DNA, 339 bp, Methanobrevibacter ruminantium
  source 1..339: mol_type = genomic DNA
atgagcgtatttgattatatttgccatagaagacctgaaagaagcttcttttataagggacggcaatttccagtatgtgcaagatgtacaggattttatataagtggaatagctagcataatcctatttaaatactttccattacctaacactctaacaacattagctattggaatcttgcttcttattccatgtgcaattgatggaacaagccaattgtttgagatgagagaaagcaataatgttctacgtttgattacaggccttttaggaggagtagggcttattatgatatatgaagtggttttaaactttgtctttttaaattttatttattaa

SEQ ID NO: 901 - DNA, 144 bp, Methanobrevibacter ruminantium
  source 1..144: mol_type = genomic DNA
atggatggaatggatcctgaagactatttgatttataattattattttgaagaggaagagaataatggcttaagcaagaatgaaagctgttgtggtgttttaatggttttaatgattcttacaatccttttaactgttgcatag

SEQ ID NO: 902 - DNA, 504 bp, Methanobrevibacter ruminantium
  source 1..504: mol_type = genomic DNA
atggcaagaagggaagagaatacatttgattttttaggactttttacagaagaaataggcggaaagaagaataagtcaaatggagctataaaatttcaaaaggataaacttttcattgaaaaaagaagcagattgaatggaaagcttaaggacagctatgaaatcagttatgatgaattggatagtgaaagcatcgatcgcccagctatcaatagggtggagattaaattaaaggataagacaatttcattgaagaccttagaccatgagatgttagataattttgaagataagcttttagatattgttgaaggtcctaaacttgctgttgaagattctccagttgcaaacgctccatacaatgctgcagagattaaatcagattctaagattggtgagatagatattccagaccagattagaaagtatcatgagctctataaagagggaatcatttcagaggaagagtttgagaataagaagaaggagcttttggatctatag

SEQ ID NO: 903 - DNA, 867 bp, Methanobrevibacter ruminantium
  source 1..867: mol_type = genomic DNA
atggaaattaaatcaatccctcaagtaattaaggaaattcaagagcttgtagataaagaggattacgaatcagcctacaatatagcaaaagacaatgttgatttgaataaggaatacacagaaggagaatatgtatttaaaaacctgcttgaagagcttttgtttcaggtattaattcaaaaggagataaaaaagaaaatccctatgattttggattattcaagcttatattccaattatggagaagttctgattcaattggataagattgacgatgctaaaaagagctttgaattatcaagaaactataatccaataaacattaaagcaaacttcggattaggtgacttatataaaatggaaaacaaactaaatgaattttataaattagccatagaatcatttaaaatagcctattatccaaaagaccttgcaaaatcatttagaaacttatcatactattttttaaagatagccaaagaggaaaatgctgatgaaaacttaaaaatagcaatccatttaaaaaagatcagcaaagattatgatgatgaatcagagcttgccaaaacagaattagatgaaataaatggaatcattagtaattttgataaagaaacagtagaagcacttgaaagcacagatttaaaggaatgtagaaatgaattaaaatcaaaagggcttccttatgaagcaggaattgaaataatcaccatctgcaaaaacctaggattccagttagatgaggctaaaaaagtagttccagcattatattactttaatatagcatatgacctaactaaagacccagacattaaactagtgattgatgacttaaatgaaaaagtagaaagaagattggatgaataa

SEQ ID NO: 904 - DNA, 450 bp, Methanobrevibacter ruminantium
  source 1..450: mol_type = genomic DNA
atggaagacgactttaagcacttagtgcgtatatccagaaaggacgtagatggaaacaaaactatcgaacaagctttaactcaaattaaaggtgttggattatccttatctagatctatctgtcttactttaggtttaaatactaccgataagattggttacatctctgaagatgatgttaccaaaattgaagaccttttagaaaatcctcaaaactacagcatccctgattggatgttaaacagacgtaaggattacgctactggagacgaccttcatttgattgaatctgaccttgacatgactttaagggacgatttaaacagaatgaaaaagaccagaagttacaaaggaagaagacatgaagttggtttaccagttagaggacaaagaactaaatctactttcagacacagttctactgtcggtgtaagtcgttccagaagataa

SEQ ID NO: 905 - DNA, 537 bp, Methanobrevibacter ruminantium
  source 1..537: mol_type = genomic DNA
atgggacatccaagaaaagcaaggaaaaagtatgatactccacctcatccttggaatgcagaaagaattaaaactgaaaataaattaatgtctaaatacggcttaaaaaacaagaaagaaatttggaaagctgatactttagttagaaaatacagtagggaagcaagatacttattagggttctctcaagatcaagtacaagttgaaaccgaagaattactcggacacttgaaaagaaccggtatcctcgatgaagctgctcacttagaaaacattttagacttaactgtagaagatattttaagaagaagattacagactatagttttccaaaaaggtttagctcgcacagctaaggaagcaagaatgtttgtagtacacggacacattgctttaaacggcaaaaagattaactctccaagttatgtagtaaaaagaggagaagaagaagcagttggtttctaccactcttccccagtagctaaacagattgaagaatacaataaggcagctagtcaagctggagaaaatcaataa

SEQ ID NO: 906 - DNA, 393 bp, Methanobrevibacter ruminantium
  source 1..393: mol_type = genomic DNA
atggcaaaagacgaaaaatggggaatagctaatatttattcatcctttaacaatactatcttgactgtaactgatattacaggagcagaaaccatttgtcaatggtctggtggtagagtagtacgtgcagacagacagcaatcatcaccttttgcagctatggaagcagcaaacagagcagctgaagatgcaaaggaaaaaggatttgtcggattgcacataagagtaagagctcctggtggaaatggtcctagaagtccaggtcctggtgcacaagcaaccattcgtgcattagcaagagctggaattaaaattggtaaaattgaagatataactcctatacctcatgatggtactggaagaccaggcggtaaaagaggaagaagagtataa

SEQ ID NO: 907 - DNA, 849 bp, Methanobrevibacter ruminantium
  source 1..849: mol_type = genomic DNA
atggaaattgatgtcaaaaaacaagatgaaaattctatggttttcatagtccgtgatgcagaagtgccttttatcaatgcaatcagaagaatcgcaatgatgagagtaccaaaattagctatcgaagatgtatttattgtaaaaaacgattctgctatgtttgatgaagtgttagctcacagattaggattgactcctttggtttctgatttggaatcaattgaaggattagtcatgagagaagattgtgactgcaaccatgatgaaaatggaaactatgtggataagggtgaatactgccctagatgtagcgtatccttttcattaaatgaaaccggaccaaaagtagtttattcaagggatttaaaatcttgtggtgactcaaggattaaaccagtatacgataccatacctcttttgaagttaaaagaggatcaagatgttgaattggaagctgtagcaaagttaggaatcggaaaggaacatgcaaaatgggttcctacaacagtttgcgcatataagcaatatccggaaatcactttcaatgaaggtgaagatgtggtctatcaagttgctgatgcatgcccaaggaatgtgttggatgcaaacagggacgatggagtcattgaagtcattgatattgaaaactgttcattatgtaagacttgcgtaaggacagctaaggcagcaggttctaaattcatcaatgttggatatcgtgaaaatgattttatttttaaaattgaaactgatggatcaatgcctcctaaagaggttttattaaaagcttgtgatgttttggatgctaaaacagacgagtttatcacatttagtgaaggaggaagctaa

SEQ ID NO: 908 - DNA, 366 bp, Methanobrevibacter ruminantium
  source 1..366: mol_type = genomic DNA
atggctagagaaattaagaaaactaatcctaaccttattgcacttatttacaatcttagaaaacagtcttatgaagaaggagtagctatctggaaagatgtagctatcaaacttgagaaacctgctagaaaccaagcggaagtaagcctttctcacattaataaaaatactgttgaaggagaaactgtggttgtaccaggtaaagtcttatctgacggcaaattggaccacaaggtaactatcgcagcattaggatttactaaaaacgctgaagcaaaaatagaaaagttcggttgtgaagctttatctattgcagagcttgcagaagcaaatcctaaaggtagcaatgttaagattatgttataa

SEQ ID NO: 909 - DNA, 429 bp, Methanobrevibacter ruminantium
  source 1..429: mol_type = genomic DNA
atgatgattattaacggtgaaggacatattttaggaagacttgctagcgttgtcagcaagcagcttcttgaaggcgaagagattgtagttctcaacgctgaaaaaataatgttaactggtaataaggattgggcttacgctaagtacaagcaaagagtggacagagcaagcatctctaaccctcgtgacttaggtcctaaatatccaagaagaccagaagatatattcagaagaaccgtaagaggtatgttacctatgaaaaaagcaaaaggtagaaatgcttttaaaggattcaaggcatttgtaggcgtacctgaagagtatgctgatgctgaacttttaaccatgcctgaagctgaatataacgacattaaaaaaggaatggaattaggagaaatctctaaacttttaggtgctaaattcgattag

SEQ ID NO: 910 - DNA, 399 bp, Methanobrevibacter ruminantium
  source 1..399: mol_type = genomic DNA
atgaaagttgttcatgcaagcggtaagcgtaaaacagctattgcaagaggtaccatcagagaaggtaccggtaaggtaagaatcaataaggttcctttagaactttattctccagaacttgcacgtttaaaattaaccgaaccattagaattagcaggagaagttgcagacaatgtggacatctccattagagttaatggtggaggagttatgggccaagctgaagctgcacgtatggtaattgcaaaaggtttagttcaatggactcaagacatggacttgaaagaggtttatacccaatatgacagaaccatgttagtaggagacccaagacgttccgaacctaagaaatacggtggtcctggagctagagctcgtaaacaaaaaagttacagataa

SEQ ID NO: 911 - DNA, 171 bp, Methanobrevibacter ruminantium
  source 1..171: mol_type = genomic DNA
atgatacctatacgatgtataagttgtggaaaacccgtttctgcatattttgatgaatataacagcagattagctgatggtgaaaagtcaaaagatattttggatgatatgggtattacaagatattgttgtagaagaatgttaatttctcatgttgaaacttgggaataa

SEQ ID NO: 912 - DNA, 219 bp, Methanobrevibacter ruminantium
  source 1..219: mol_type = genomic DNA
atggctgcaaaaaaaagcactgcaaaaaaattaacaagatttgaaaaggctagggttttaggtgcaagagctattcagctttctatgggcgcaaagcctatggagcataaggaaattgaaaagttcattaaaaactcaaaatctcttgatcctatagacatagctactttagaacttgaattaggtattttacctttagatgttagaccaaaagaataa

SEQ ID NO: 913 - DNA, 1248 bp, Methanobrevibacter ruminantium
  source 1..1248: mol_type = genomic DNA
ttggatagtgtaatcgaagatgttcgtgttagaaaaattttagatagcagaggaaatcctactgttgaagtagatataattacttggaacggatttggaagagctgcagctccaagcggagcaagcacaggttccagagaagttgtatccttccctgaaggaggggttgatcaggtaatcagtgaagttgaagacttgatttcttccgaacttatcggaatggctgctgaagacattgaagacattgatgaggtcttaagagaaatcgacggaactgacaatatgtctgcaattggcggaaatacaagtgtggctgtttccatggctgcagctaaggcagctgccatgtcctttggaatgcctctctatagctttttaggaggcaatttcgtcagtgaaatgccttatcctttaggcaatatgatgaatggcggagctcatgcaggtccaaatgcaccggacattcaggaatttctagtagttcctataggtgctaaggatgtggaagaggctgtatttgccaatgtggctgtccataagaaactaaaagagctcctctctaaaaaagaccctgatttcactggtggaaaaggagatgaaggtggttggattcctaatattactaatactcaagctttagaaatccaggcacaggcatgtgaagagacaagagacgaattaggcattctaattaggcctggtttggatatggcatcctctgagttttgggacagtgaaaaggaaaaatacgtatactcccaagacaatattgaaagggatgttggcgagcaagtggaatatgtcaaggacttgattgaaacatataacctgttctatgttgaagatccttttgatgagaatgatttcgaaggattccgtgagctcacttccaaggtaggaaacaaatgtcgcatttgcggtgatgacctctttgtcacaaactcaagactccttaagaagggaatcgatgaaaaggcagcaaatgcaattatcataaagcctaatcaaatcggctcacttactgaaacctatgctactgtaaaattagctaaagaaaacaatgtaatgcctgttgtatcccataggtctggagagacttgtgatgagaccattgctcacttggcagtggcctttggcgctcctatgattaaaaccggtgcaataggtggagagagaatagcaaaattaaatgagcttattagaatcgaagctgaattgtctaatccgaaaatggccagattgttctaa

SEQ ID NO: 914 - DNA, 192 bp, Methanobrevibacter ruminantium
  source 1..192: mol_type = genomic DNA
atgtcaactgtaattattgatgcaagcaaatgtgaaaacgcagactgtggtgaatgtgtagacatgtgtcctatggaaatcttttccttagacggagacaaaatcgtaactgatcatgaagacgaatgtactttatgtgaagtttgtgtcgacatgtgcccaaatgattgtattacaattaaagacgaatag

SEQ ID NO: 915 - DNA, 597 bp, Methanobrevibacter ruminantium
  source 1..597: mol_type = genomic DNA
gtgtcagatttattaatcccattagataactacttagctgctgggttacacattggtacccaacaaaaaactcacgatatggaaaaatatattttccgtgtaagatcagacggtttatatgttttagacgtacgtaaaaccgacgaaagattaagagcagtcgctaaattcttagcaaaatacgaccctgatgacattttagtagtggctacccgtcaatacggtcaagctcctgttaagaaattcggtgaaatcaccggttgtaagaccattcctggcagattcatcccaggtaccttaaccaacccaggatatgctaaattcatcgaacctaaagtaatcgtcgtaactgacccaagatcagactctcaagctatcttagaatccaaacaaaacggaattcctgtagttggtctttgtgatacagaaaacttacttgctaatgtagatatctgtgtaccttccaacaacaaaggtagaaaagctatcgctttaatctactggttgcttgcaagacaaatcttaagagaaagaggaattcttggcgaagacgaagacttagacttagagccttctgactttgagcttaagttctaa

SEQ ID NO: 916 - DNA, 897 bp, Methanobrevibacter ruminantium
  source 1..897: mol_type = genomic DNA
atggataatataaaagataagaagatcaatgataaaattcaaaagcaattggctaatgagtcagtcaatgagcttttaagcattacaggtatcaaatcaaatgttatccaacctttaacagtagaatatgtagatgttgcagacacaagaatagcagattatgtaggattagaagaaaatgacagtatccgtcttttagagtttcataccggcgcacctaatgaaaacttggattttaaaatgtttgattattcttccatgatttataaaaaatataggaagcctgtaaatgcggtagcgatttgtacagaacgaataaacgagccagaaggcaaactggaatggggtgataggaacaaatattattatgatattgttacatacaaagatatcgatggggaattagaattaaatattattaggaacaaaaataaattcaatcaaaagttatcttcactggagatttttactttaaaaatgattttatacacttcctttgataaaaaacctcatgagataatgttagatgcctgtaaattaactaatgaagctaacttaaatcaatacctgttggatgaaataaaaaagtttcaggaattaacttgcagaaaaataattgatgaacaatatcatagggggattgccgacgtgatagcgatgaaaaatactttgttttatgaagacttgaagaagagtgaagaaagaggtatacgtattggtgagaaaagaggtataagtattggtgaggataaaaaggaatttcatatgagaatccatataattaaaaatctgttaggcaagatttctaattctgatttagcaaaatctttggatatttcagaggaagaacttgaagagtttattaaagaaaataatttaactccttcaaaggattga

SEQ ID NO: 917 - DNA, 246 bp, Methanobrevibacter ruminantium
  source 1..246: mol_type = genomic DNA
atgatcaattgggctgctgaaatgaaaactatgaaaaatactttgttttatgaagactttaagaaaagtgaggagagaagcatccttattggtgaggataaaaaggaatttcatctgagaattcatataattaaaaatctgttaggcaagatttctaattctgatttagcaaaatctttgaatttttcagaggaagaacttgaagagtttattaaagaaaataatttaactcattcttccatttaa

SEQ ID NO: 918 - DNA, 849 bp, Methanobrevibacter ruminantium
  source 1..849: mol_type = genomic DNA
atgattagagaagctgtcgttgcaggtacattttatgaaaataatgtcaaatatttgagagaaagcattgaagactgttttacacacagattaggcccaggagaaattccaaagctttccagagtaaataaggaaaaagaagtaaatgcaatcatggttcctcatgcaggatatgtctattcaggtccgacagcagctcacgcatattcaaagcttgttcaagacggatatcctgaaacctttgtcataatagcccctaatcacactggctttggagaacatgtttccatcttcaatgaaggatcttggatagttccaaatggggttgcagatgtggatgatgagcttgcaaacgcaattataaatcaatccaactatgcaaaggcagatttcctggctcataggaacgaacacagtattgaagttcagatacccttactaaaatactttgatagcaatttcaagatagttccaatctgtatgatggatcaatctcctcaagcatcaatcgaccttgccaattctatattcgaagcggccaatgatttgaaccgaaaaatcaccttgattgacagcactgatttaagtcattttaagtcacaggaaaagaccattgaacatgataacttagtgtttaatgaagtgataaatggaaatactgaaggcctttatcaagttgttaaaaaagagcagattactatgtgtggatacggtccaactatggtaagtatggaatattgcaagaaattaaatcagaagaactttgaattgctccagcattctactagcggtgatataactttggattatgcttctgttgttggatatggatctggggtttggttctag

SEQ ID NO: 919 - DNA, 984 bp, Methanobrevibacter ruminantium
  source 1..984: mol_type = genomic DNA
atgagaaagatgtctgtggcttccgcacctggaaaaaccatattgtttggagaacactctgttgtttatgatgagcctgctattgcaggagcagtaaataaaagggcttctgtaaagatacaagagtctctaaataattattctaccttaaagtcttatgacctgggctttgaagtcatattgaatacaagaagagggacctataagctagtaaagggcaagccaggaatcattcgctatatattaaatgcaatgggcaagttccatgaccacagcaatattgacatgacattgggacttaatctgccgataggttcaggattaggctcttcagcagctgtaactgtagctacaattgcagcattgcatgactatcatggggttcctataaccaaggaaaagttggcagaggaggctcatggggttgagcaagacgttcaaggaattgcaagtccattggataccttggtaagcactaatggagggcttgtttatctctctcgcgaaaagcgcatcgtccgctttgacaagcctttggatgctccttttgtaataggctttaccaataagtatggaaatacaggaaagatggttaagcatgtaaggcatctgaaggacaattatccggagcttataaatcctgtaatcagcactatgggcaagattgcaaatgaggcaagaattgcgattctaaagaatgatattgataggatagcggatttgatgaacttgaatcaggggctacttgatggattgggagtcaatacatatgagttatctagaatgatttatacagctcgtgaaaatggtgctttagcttctaaaatcaccggttccggtggagggggaagcataatttcattatgtaaaaatagcactgtggataatgttgcaaatgcgataaataaggaagacagtacgataaaggttaaattctctggagagggtgttttggtaaataggcgttctcctccatttaattaa

SEQ ID NO: 920 - DNA, 816 bp, Methanobrevibacter ruminantium
  source 1..816: mol_type = genomic DNA
atgattattttaaaaattggcggtagcatattaactgaaaaggattctgcagagcctaaagtggattatgctaacttaaacagaattgcagaagagatcagacaatctttatactcagatgaaatgagcaatgaccttattgacgggcttgtaattgttcatggtgcaggctctttcggccatccacctgctaagaagtacagaatcggagagccttttgatatggaagactatctttctaaaaagataggattctctgaggttcaaaacgaggtaaagaagctgaactcaatcatttgccagtcccttatagagcatgggattccagctgttgcgattccgccatctgcattcatcacaagccataataagagaatctatgattgcaatttggaattgatcaagacctatattggagagggatttgttcctgttctctttggagatgttgtcttggatgatgaggtgaagatagcagtcatctctggagaccagattcttcaatacattgccaaattcctaaagtcagataggatagttcttggaacagatgttgatggggtttatacaaagaatcctaagacacatgatgatgcggttcatattgataaggtaagctctatagaggacattaagtttttagagtccactacaaatgttgatgttaccggagggatggttggcaaggtcaaggagcttctagacttggcagagtatggcataagctctgagataattgatgcaaacgagaagggagccatttcaaaggcacttcagggtatggaagttagaggaactaaaatttccaaggaataa

SEQ ID NO: 921 - DNA, 1053 bp, Methanobrevibacter ruminantium
  source 1..1053: mol_type = genomic DNA
atgatatctgatagaaaattggaacatcttttgatttgcaagaattatgatgttagctataatgataagactaccggatttgaggatattgaactcatccatagggccttgcctgaaatcaataatgatgatatagatttatctactgaagtatttggaaagaaactggattctccattattcattacagcaatcactggaggacataaggctgcaaaggatattaataaggaattggctattattgcagaaagcagaaatatcggtttaggtttaggaagtcaaagagcagctatagtaaatccagagctaagggatacctatgatgttgtaagggaaaatgctcccgatgcattgattttaggaaatattggagctccacaaagcgacttggcaattgatgctgtagagattctagacagcgatatcttggcaattcacttgaatcctcttcaggaatccattcagcctgaaggagatgttgatgcaaggggatatgtagattcaataaaggagatctgtaagacagtggatgttcctgttatggctaaagagacaggcacaggcataagagctgaagatgcaatagaacttgaaaaggcaggagtcagtttcattgatgttgaaggagctggaggaaccagttgggctgctgtagagacatatagagctgaagatagatatcttggagagctattctgggattggggaattccaactgctgtaagcactgttgaagtggtaaattcagttgagatccctgttgtatcctctggaggaatttcgttcaggactcgatgcaagctaagggcaattgcccttggagcagatgctgttggaatggctttgcctgcattgaaaggagcctatgaaggtcaagaagctttaaaccagatggtaaacagattcaatgaatctttaaggattgcaatgttccttttaggggcaagcaatttagaagagttaaaacgatctgatttgattattaaaggcgaaactaagcagtggcttgaagcaaggggctttgacacaaagcattatgcacgaagatag

SEQ ID NO: 922 - DNA, 1350 bp, Methanobrevibacter ruminantium
  source 1..1350: mol_type = genomic DNA
atgacagtagaagtaatagcaattggtggatacgaagaagtaggaaagaatatgactgccgtaaaggtaggggaagatgtaatcatatttgatatgggtatccacttagacagaataagtatccacgaggatacagatatagacagaatgcacagtttggacttgatagagcgtggagtcattccagatgacacattgatgaaggatgtagacggtaaggttaagggaatagtcttctcccacggtcacttggaccatattggagctgtagcaaagcttgctcacagatacgatgctccaatcataggaactccatatacaacagccctcattgaaaagcaaatcaagggagagcgcaagttcaaggtaaacaatcctataagaccactcaatcctggaagcaagatcaaactgtcaaaggacataaccttggagtttgttcagtccactcacagtattccacaagcggttttccctgtattgcacacttcagagggaataattgtctatgcattggactttaagtttgacaatcatcagaaggtctctccaccacctgactataacaggcttagggaattaggaagaaaaggagtattggctcttattgtagagaccaccaatgcaatcaactatacagaaacaaggacatactctgaaaaggttgcaagaataatccttgaagacttgatgaagagagcctttaaaggccaaaaggaaggaatgattgtaaccacattctcttcacatatcgaaaggattcaaacaattgcagacattgcaaaggacagcaatagggaaatattattccttggccgttccatggaaaggttctgcggaatcgctcaaaaccttggaatattgaaattgccacagaatgcatatgtatatggctctccaaaggctgtaaacaaggctcttatgaaagcagaggacgatagggatcaatacctccttgtaaccacaggtcaccaaggggaaccggatgctctccttccaagaatagcaagcgcaagaactccattcaatgtaaagaaaggagataatgttatattttcagctcctatcattccaaatccgaccaatgcagctaacagacatattttggaaagcaaattaaaggcaaacggtgcaagaatctatgcaaacgctcacgtttcaggtcacgcaggaagggaagaccatagggacttcttaagaatgctaaggcctaaacacatcattccagctcacggagagttagagatgcttgtggcttatggagagcttgcagaggaagaaggctataggatcggaaacaatgttcatatattaaggaatgctcaagctcaggtttttaatggtgattag

SEQ ID NO: 923 - DNA, 996 bp, Methanobrevibacter ruminantium
  source 1..996: mol_type = genomic DNA
atgtctgatgtaactgatgttttaaaggaatattctgcagatgtcattaaaacaattgaagagaatttagctcctgttcaacctcaaaacttacaggatgcttgtatttatttaactaaggcaggaggcaaaatgcttaggcctgctcttactttaatatcctgcgaagcggtaggtggaaataaggaggatgctcttaagaccgcagcagcaatcgaactcattcacacattttcacttattcatgatgatattatggatgatgacgatatgagaagaggcatgccttcagttcataaggtatgggacgagccattggctatattagctggagataccctattttcaaaggcatttgaaatgattatctcatctaaggaagagaacgctcatccggaacatgttgcaaatgcccttgcaactgtagctgatgcatgtgttaaaatctgtgaaggacaggcttcagatatgagctttgaaggggactttgatgtcaaagaggccgaatactctgaaatgatttataaaaagactggcgcattgattgcagcagcaactaaggctggagcgattatgggtggcgctgatgaaaaggaagtcactgcattatatgaatacggcagaatgattggtattgcattccagattcaggatgactatttggatgtaatcagtgacgaaaaggaccttggaaaacctgttggcagtgatattgcaaaaggaaaaatgacccttatggttgtaaaggctttagctgaatcagatggtgaagatcacgaaagacttcttgaaatcttaaaggacaatgactgttcacaggatatggttaatgaggcaatagatttattcaataagtatggctcaattgattatgcttataatttagctttagaaaatgtaaatggggctaaagaggctattgcatttttaccagactctgatgcaaaatcaatgcttattgcattggctgactttgtaatagccagatcttcataa

SEQ ID NO: 924 - DNA, 873 bp, Methanobrevibacter ruminantium
  source 1..873: mol_type = genomic DNA
atgggttttaaagacaaggttttatcctctagcaatcaattcaattattataaggacaattatgaaaaattgcttaatgagaataagcaattgaagcaaaagcaaaatcagcttatcgaagagaatgagcaattgattaaggaatttgaattaaataagcaaatcataatcaataaagagaatttatctaccgaaagcaactattgcccatattgtgggaggatttctaattttgaaccttatggtgttgtcaaaagggaaaaggcaatgtgcccatattgcaagtctttagaaagacacagattaatttatcttttctttgaaagaaactatagttctatttttaaaaataaggacattaagttattgcactttgctccagagagaattttctataattatttcacccaattcgaccatgtggattattatcctgtagacatagaccctgaaacatatgcaaaaagaggccttaagcttaagatgaaggtcaatatggaagaggttccatatggcgatgaggaatttgacttcatctataacagtcatgttttggaacacgttccaaatgattttaaagctatgggtgagttatatcgtgtacttaagcaggatggagtctgcataactgtggttcccctatctggaaatgaagagactctagaaaaggaagagtataacactcctgaattaagagaaaagcattatggaaacaaggatcatctaaggttttatggtctggatgttaagcaaaggcttgaatctgttggatttaaggtaaaagtatctaaattagaggatttgaatttaactgaaaaagagattgaactctttaatgtaaaggaatctttaatttttgtatgcactaaataa

SEQ ID NO: 925 - DNA, 660 bp, Methanobrevibacter ruminantium
  source 1..660: mol_type = genomic DNA
atggatttgccatctggagacaattatgaaaataccactgttaatgaagcaattcgtcaaatcaatgatacaaaccgtgatttaactgttttattctataatagtgaagacaatagtactgtagcccgggtagaattcgaatttaccataaatgattttaaagccactgctactgaacagactgttgcaaacagaactgtctggtataacgaggaaaatggtacttatatggcatttttaggtaattcagttacccatgacaatataatcatcatcacaaatgatgttgagatattggaacatctcatatcaagcgtgaaatttattttcctaaatgaagacggcactgtaaattccacatctgatatggtcaataatcaaagcataaatgtcactggcggtacggcttcaaatggaactgatgcaagtgcatctacagctacttccaatgtttcaagctctaattcccaatctacaggcaatgatggatattattggtctggacaagatcaggattatattaaggagtataccgacagcaatggcatacagcatatagaccgtaggaacggacctaatgaggcttatgatccaaacacccaaaggcattatactgatggtgtagaggatacagcagcttataatcaagactttaattaa

SEQ ID NO: 926 - DNA, 573 bp, Methanobrevibacter ruminantium
  source 1..573: mol_type = genomic DNA
atgatagaaaaggtacgattcgatcagattgcagatatctttacgggagtaagggtaaaaaggtatcagaaaggtaaaggaactacagttgaaaggcccattctaaagaaaacatattccgaaaacagttcaaaattggatttggaatatgaagaggtatcagaggagatccatgaaagattctactcacaggaaaatgatattgtaattctccttgcaggatctaaagtgagcaaaatagaagaggctggaattatcattccaatgtattatgctgttgttagagtaaaagaaggttatgatgttgattttatctaccatctgcttaaaagcgatatcttcccaagggaattgcataaaattgaagagggaactacattaaagattataaagacaactcaccttaaatctatttatttgcctgttccagatttagaaactcaaataaactatggaaaattgtttaatttaatggataagcgcatcaaattaaatatggaattggcagaacttgaaaaacagattgaaaagtcaattatcaatgagatgctcctggaggaaaaaactttttaa

SEQ ID NO: 927 - DNA, 1905 bp, Methanobrevibacter ruminantium
  source 1..1905: mol_type = genomic DNA
atgtcaagcagattaggacgccaactatgggataaatatgaggaattaagaacaaacagcatggttggttttttaacagatgaagatttccagaagtactttttaggtttcataacctacaagtatctctctgaaaatttggaattgtatcttgataaggaattggaaaaggacgatttgaagtttgaagaggcatataactttgaaaattatggcaaggttttagcgaaaaaggcaatctataacttaggctattttattacacctaaccatctatttagaaatgtcatagcctcctataatcagggtgcagatatttcaagagaattgaaatgggcttttgctgaaataaatagttcctgtaagaaaaccgaaagtcaggaagattttgaaaacctatttgaaagcgttaatctccaagccactccattaggtaaaaagcaggaggatagaaatagggtaatctataatatattgaacgctttggatagtgttgactttggcttggatgagttcaattcttcactctctttaattaaccattattctgagcctgctcgagagcttggtgtgaatctggatgctttggaaaaggaattgctttcagatcctaataagaatatctttttagatgattctcccctaaatgaaagttcttcaattccattaaatgaggctccatttgaagagtatgcatctatggaacttttcttagacgatattgctcctgttgaagagtttgattctatggaactttcaaataaagagaatattgtcacaggtttagaaaatccaaatcatcccaatagcttagtcaatgagggatggaatgacaggtcctatgacagctataggattcaaaagcaatattccataggtgacgcatttgaatatctccttgataagttttccctaaatgcctcaaaatctgctgatttttacactccaaatgatgtttcagttttggtttcaaagcttgtggccacaaacaaaagggctattgattcagtttacgatccttgctgcggctcttcctcaatgcttctggaattaaacaaacatgtttccttaaatcttatctgcggccaggaagtgaatgcatattactataatatttcaaggcagaacatgatcttgcataacattcactttaaggactttgacataaagcagggagattcattggatagccctcatcatatagggtatgataaatttgatgttgtagtctctcagattccattcaatgtaagttggaccgccaagaaaagcttcttaaatgatcaaagatttaaggagtacaatgcattggctccaagggtaaaggcggaatatgcatttattcagcacatgctttatcatttggatgatgatgggattatggttgtaatagctcctcatggggtattattcagatccgcttctgaagaatcaataagaaagataatagtctctaagatgaattatctggatgcagtcatcggtcttccgtcaaatatgttctatagcacaaatagccctgcatgtgtactgatattcaagaaaaacagaagatatgatgatgacgtattattcattgacgcttccaagaacttcaataagataaagcttagaaacaatcttagaaaagaggatatcaataagattgtaggcacttatgtctcaagggctgaagttgacaaatactctcgaagagtcagcttaagggaaattgatgaaaacaattgtaacttgaatatccctagatatgtggatacatatgaggaagaggaaataaacatccaggaaatttataaaagacgggaagaagcctctcgtgaacttaaggaagttacttatgaaatagatgagctttgtaaggaattaggtattgagaatcccttaataaataatatctttgaataa

SEQ ID NO: 928 - DNA, 921 bp, Methanobrevibacter ruminantium
  source 1..921: mol_type = genomic DNA
atgagcaaaacttatatttttggacataaaagtcctgatactgattcaattacttcaagtcttgtaatgtgtgacttagaaaacaaattaggaaatgctgatgtagtgtcatgcagattaggaaatcttaataaggaaactgaatttgttttagattacttcgatattgaagcccctcaattgattgaaagcatcgaagatgatgccgaggttattttagtagatcataacagtccaagcgaatctgttgacaatattgaaaatgcaaagattttaaagcttgttgaccatcacaagattgcttttgaaacttcctatccattattcattagaacagagcctgtaggctgtactgaaacaatcttatttaaattatataaggaaaatggcctcactccagataagaccattgcatccttaatgttatcagcaatcatatcagacacattgcttttaaaatctcctacaacaactgaagatgataagcaagcggtaaaggaacttgctgaaattgcccaaattgattatgaggaatacggtttggaaatgctaaaggcaggaactgacttatcaagtttctcaattgaagagatcttaagcttagacgctaagcaaattgactttaaagatgtcagatccattgtaaatcaggtaaacactgcagatattgatgatgtgatgacaatgaaagatgatttggaagctggaatgaataaaatcatagaagatgaaaatctagacttgttcatgcttttaatcactgacattgtaaacagcaattctcaagtaattgctcttggaaaagatgtgtgccttgttgaaaaggcatatggagttaaattggaagacaatactgttcttttagagggtgtagtctcccgtaagaaacaggttgttccaataatgactgaaaatgcttaa

SEQ ID NO: 929 - DNA, 354 bp, Methanobrevibacter ruminantium
  source 1..354: mol_type = genomic DNA
atgtcaaagttttgtccgaaatgcggttgtgaaaatctagatgaagcttctttctgcttggaatgtggcgcttctcttcctagcattgaagaggttaaggaaaggtcttctcatggagctggaactagccatcaaagcacttttagttcaaatttaaatgaggaaaatggctttaatcaggaaaccagtagtttttcacagtccaactcaaattctaatgaagcaagcaattcaagcaagtttaaaaatgtaataaatgaggcaaatcccgccaataatgacaatcaagactatgctatctgttgcctggtcatatttgttcttttattgattgcattcctatgtaatttttaa

SEQ ID NO: 930 - DNA, 396 bp, Methanobrevibacter ruminantium
  source 1..396: mol_type = genomic DNA
atggaaataaatgattttggccatgatttagatgaatctgctcagtttttagttcaaaagctattgattctccatccttgggatgaagaatgggacttaagcgtaactgccaatttggttcccttttataaggaaaagatagatatacaaatatctaagcaaggaaaatgcgatgaggagttttttgataagcttatccgattttcctctattttagatacaaatcaggttagacttctttttatggaacaattagttggtatgcctttaatccttgatggcaaatatctaaataatgatgagcgcattgatttattgatagaatctttaaatggaaggttaaaaagagttgataatggtttatatttatttttcaatcacgaagaggaattttaa

SEQ ID NO: 931 - DNA, 1170 bp, Methanobrevibacter ruminantium
  source 1..1170: mol_type = genomic DNA
atgatatataggaaactaggaaagactgatttggaagtgtcaaatataggctttggatgtatgcgtttgccccataaagagcatttttaccaaatagatgaggcagaagctagcaaaatgtttgattatgcaatagatcatggaataaactactttgaccttgcctattcatttcatagcaaaaacaaaaatcttggaggaaatgcagagccctttgtaggtaaatacctggctgaacgtggaaaccgtgaagatatggttattcaaacaaaactccctggatggctggtaaataaaagggaagatatggacaagttccttgatttgcaactcgaaagacttcaaactgattatattgatgtatatatgctccattcccttaagatagacttttggaacaagttatatggcatggatgtattggaatttttagacagcatccttgaagatggcagagtcaaatatgtcggtttttcctttcacgatgatttggatgttttctttagcattatggattcatatgataagtgggatgttatcctaactcaagtaaattatcttgatgaggattataaaagtggccttggcggtttggaatttgttggaatggcaggacttggtaatgtaattatggaacctttaaggggcggaagcctaataacaaacattcccgatgaagttcaagctctttgggatactgctgataagaaaagaactcctgtggaatgggcattggaatatctttgggataagcctcttgtaacatctgtattcagtggaatgagcaatatggaacaggtaaaggagaatattgccatagctgaaaactgccagccggattgtatgagcgaacatgataggcaaatattaaaggatgttgctcaagtctataagtctagggaagagattccatgtacaggatgcagatattgcatgccttgccataatagagtggatattccccactgttttaagcagtataatattgctaaaagcttgaattatattgataagactgcagcaccttatttctggttggtaaataaggatgaaagagctgacagctgtacattttgtggtgagtgtaatattcaatgtccgcagggcatagatattcctgcagagatggaaaaggtctttgacttcttccatgaggaaagtcagtattag

SEQ ID NO: 932 - DNA, 828 bp, Methanobrevibacter ruminantium
  source 1..828: mol_type = genomic DNA
atgaatcatgacgagctaataaaccttgatgcaatagattgggaagaagtttggcaaaagtcccttaaaaagagttttaaaaaggaaaagaactgggatgatatagcaaaagattttggacaatggcttgaaaatgacgactatcctgatgtattgcttgaagagatgagaattgatgaagaggacaccatactggatataggctgtgctgagggaaccataagcagaaagctagcgaaaaaagccaaatcacttactggtatcgataaatccaaattgatgttagaggaattaaataaaaaagcagaaaaagagagaatagataatattaccaccattcaaatggatataaatgaacttaattatgaggaaattggagactatgacatcattcttgcttccagatgcctaaatggaatatataatataaaaaatacacttacaacccttaatgaaatagcaaataaatatgtttacattacagtatttggttcaaaaagccataaatacaaaaaagagaaatgtgaaattgcaggaaaaccatttaaagcaggaactgactatatggttttagtgcttcttttaaaaagtcttggaattgaagccaatgttgttcagttagagtgtaaaaatctaaaggaatatcgtgactttgatgaagcaatcaatagatctgtttggagatttggagagttggaagaagatagagaaattgcacttagacaatatttcaaagagacccttgtaaaaaatgaaagaggaaattgggttaatccaaaggacaaaacagatttagttttaatttggtggaaaaaagaagaagaatag

SEQ ID NO: 933 - DNA, 825 bp, Methanobrevibacter ruminantium
  source 1..825: mol_type = genomic DNA
atgactaagaaaataatcattgaagatgagaatgaaattgattgggaccaattatggactgctaagatggataagaagggagaccgtggaaaagactggtctaaagcagcagaaaagtatagtgagagagccagcaaagataactataccgaacaattgatttcaaaaatgatcatatctaaagaggataccgttttggatgtgggctgtggagaaggaagcgtaaccattcctttatctaaagaagtaaaatccattacagccatcgatgcaacagacaagatgcttgaaatactagatgaaaaaattaaatctgaaggaattgaaaatataaagacaattaaagaggatattaatgatgtaaatcttgaaaaatatggcaaatttgatattgtgcttgcatctcgcgtagtaaacggcataaaaagccctaaaaaggttttttctaactttaatgaaatggccaataaatatgtattcattacattgtttggaccaaacaattggaaattggaaaaagatttccatgaatatttatctaaagagtataatggagctccctcttataccatacttctaaatctccttgcagagatgggaatttatgcgaatattataaatttagatgttgggccagtgcgcacttataagacaattgaagaagccatagataatggaaaatggaatttagctaaatttagtgaagaagaacaagagaaactgcctaaatttttaaatgaagtattaattagagataatgaaaccggtttgctatctaattctgaagacaaaccagattgggtgcttctttggtggaaaaaataa

SEQ ID NO: 934 - DNA, 816 bp, Methanobrevibacter ruminantium
  source 1..816: mol_type = genomic DNA
atgagttttcaaatagatgaccctgaagatatcgattgggcttacttctgggctaaaaaactggaatctaaaaaggacagggctaaagactggaataaggcagctcccaactttggaaagtctgcaaaaaaggacgattaccatacaaagattatagaaagaatcaatgtcagcaaagaggacacaatccttgacttaggctgtggcgacggaagcataacaattcccctagctaaaaaggcaaaatccgtcactggagtggattctgcatataagatgcttgagatactgaatgaaaatgccaaaaaggaaggaattgaaaacataagaacccttgaagaggacttatcaaatattagagtcaatgatgtgggaaatcatgacattgtagttgcatcaagatccttgaatggaataataaacattagggaaacaatctccaatataaatgaaatagctgacaaatacgtttatattaccctatttgggccaaacaattggaaaatagaaaaagagttctttgaaagcattgataaggaatatgtagagtttccatcccatagatacttcttcaatatacttgttgatatgggaatctatcctaatgttgaaaaccttaacatcggccataaaagggaatatgaaaacattgaagaggccttggaaagtggaaaatggagattggaacttttagacgatgaagaaaaggcacagctttataaatatttagaggatatattagaagaggatgataatggaaagctctccaatcctaatgataaagcagattgggttttatattggtggaagaaatag

SEQ ID NO: 935 - DNA, 495 bp, Methanobrevibacter ruminantium
  source 1..495: mol_type = genomic DNA
atggatggaagattagatatagattcttttgaaaaggcaatcaacggtttaaataaaaacttatacgatgttggagcactctttcaagcaaatatgcctcttttagcaagtgaagcaagccaagctgctaaagaaaactgcgttaacaagatggcagacagggttgatgaaagattagactcctttagagaaaactatggatattacaacgacttttatgagaaattaaaagaaaacgttaaaaatgacaccatagaaaacccagaggagtatgatgtgttcctagaacatgcaagcaacacttttccaaagtatattgatgaattgggacagaccattgatagtttatctggaattcctataaggactgaaaagtttgattcaacaatgagagaattaggatccattattgaaaacttcagatttgactttaaaaggaccttaacagtagctgatgtttataaagttcaaaaagaaatgaaaagccaagaataa

SEQ ID NO: 936 - DNA, 264 bp, Methanobrevibacter ruminantium
  source 1..264: mol_type = genomic DNA
atgaaagcggtctcttatatcaagagatccaataacagatatgtattagtaatgaatatgaatggaaaattcaagatgcccagtgaaatagcaagtgaaatggatctaagaataaatcagataagtgcagtcttatcggatttaaaaaaagaagatattgtaacttgcataaatgaagaagaaaaggtaggcagactttataagttaaccgacaaaggtttagaagcttataaagtcattaagactaacgaagagatacaatag

SEQ ID NO: 937 - DNA, 1671 bp, Methanobrevibacter ruminantium
  source 1..1671: mol_type = genomic DNA
atggacgaattagaagaaattgtatttaagcatgcattattgaatgcagcaaagcataagggaagcgcaaaccctggagcggttatgggctctataatgagcaatgaacctgaacttaggcctagagcaaaggagatcggaccgatttccggtaagattgtagctcaagtaaatgccatgtctcctgaagaacaaaagactaagatggaagagctaggagtggaagtggaagagaaaaagaaaaagaaagaggaaggattgcctaagcttccaggcagcaataagaatgttgtcatgcgttttgcacctaacccaagtggaccattgcacattggacatgcaagagcagctgttcctaatggtgaatatgttaaaaaatgtggcggaaaattcattttaagaattgaggacacagatcctaagcgtatttacgaacctgcatatcaattgattcaggatgatttgaaatggcttggtatagagcctgatgaagtctattaccaaagtgaccgttttgaaatctattatcaatatgctgaagagcttataaagcgtggagcagcatatatgtgtacctgtgacgggggagagtttaagaagcttaaggacaactgccagccttgcccatgcagagacaatagcgtagaggagaatatggagctttggaaaaggttccctgaaatggaagctggagaggctgtacttaggattaagactgatataaatcataagaatcctgccattcgtgattgggtggctatgagaatagttgaagaggagcatcctaggcttggaactaagtatagggtctatcctatgatgaacttttcagtatctgtagatgaccatttgcttggaatgacccatgtattgagaggaaaggaccatcttgcaaacagcgaaaagcaaaaatacctttacaaccatatgggctgggagattcctgaatttatacattatggtcgattgaagatggaagacattgcattaagcacctccaaggctatggctggaattgaagagggcacctacagcggatgggacgacccaaggcttggaaccttaagggctatagctagacgtggaatccagcctgagacaatcacccaattgatggttgagattggaatcaagatgtctgattcagcaatcagctggaaaaagatatatggattgaatagaaatctcattgaagagaaggtaaacaggtatttctttgtaccgggccctgtaaaaatagacattgcagatgttccagaggacattttaggatgggaggtcattaggccgctacatccagactttgaggaaaggggcaatagaactctaatctttgataaggaactatatattcctaaagcagactgcaaagatggaattatccgtctgatggatgctgttaatgttgaaatcagtggagaggatgtcaagttccatagcgaatcctttgaagatgctagagaggtcaaggcaagaatcattcaatgggttcctcttgatgcgataaaggctaaaatagttatggatgatgcttctatagtggaagggctttgtgaaaaggactgtggtgatttgaaagttggcgatatagtccaattggaaaggtttggatttgcaaggcttgatgagattaaagatgatgaattaatcttctattttgcacataaatag

SEQ ID NO: 938 - DNA, 447 bp, Methanobrevibacter ruminantium
  source 1..447: mol_type = genomic DNA
atggataaaaaattagcagttatttttatagggattcaaggaagcggaaaaacaagcttctataaaagatacttcccagattttgcccatgtcaatctggacacatttaaaaaaagaagcaaggaaagaaaattctttaacatgtgtatagaagaaggaaaatcatttgttgtagacaatacaaacccaactaaattcgatcgccaacgttatattccaactgcccgtgaaaatggatatgagatttggggatacttcttcaattcacctttggaagagtctatggaaagaaacaatcaaagagaaggcttggctaggattccaagagtgggagtcctatcaacctataaaaaattggaagttcctgaatatgatgagggatttgataaactgttctatgttaaaataaaagatgggcaatttgtggttggagaattagaagaataa

SEQ ID NO: 939 - DNA, 2289 bp, Methanobrevibacter ruminantium
  source 1..2289: mol_type = genomic DNA
atgaaagaggttacagcaattttactagttattattgccctaattgggataatatcaataataatagtgaaactatattacagagaaaaagaaaaagatcatgataaagaaagattagaggaattccttaactcaagcgattacaattccagcattgaatcacatgagaagattagctcaaggcaaaaagctgaaggctctaaaaagcctcagaaagtccaaagacgcagaagagttagaaaagtccctaaggaatctcaaaacagaaatgaaaacctaagcgaagcacaaatttatgctaacacactacaaaacgcatccaataatgatttatttgtagattatgatggtgataataggggagctcaaagaaccagaaaggttagaagagttgctaaagctgaaacagcagaaactactcaagctaacggcactgccgcattgttaagacaaagggcagaggctgcaaaagcccgcgaacaagctcctaggaccaaggtcagaaaggttagaaaagtaaaatcccaagaggatacagttcaaaaagttcaaagaactccagatagagtcaaagaacaaatgaacaaggaagagaaagtaaaacctatccaagaacctattacaaaagagcacaaggaaaccatcaatagcgtaagacaaggtgaaagtgaagtcaaacctcgtcaagtccctatgactaaagaacagaaagagttcatttcatctgaaaccgctaaaaaacttattgttgaagatgatgacggtgctgttaaagtagttaaatcaattaaaccagctgaagacattgaagaaatcaaggaaagcgctttaattgaaaaggctgaaactactgaagaagctaaagtaaaagttactgaagaaactcctaaagtagaagaaaaagctgaaactgctgaagaagaagctcctaaagtagaagaagaagttcaaactgaggaagctccaaaagtagaagcagaaccagtccaagaaactactgaagaagtaaaaactgaagaagctccaaaagtagaagcagaaccagtccaagaaactactgaagaagttaaagctgaagaaactaaagtagcagaaaaacctgcagaagaagttgctgaaaaagtagaagctccaaaagcaggaaaacctgcagaagaagttgctgaaaaagtagaagctccaaaagcagaagaaatcaaagaagaagtaaccaaacctgctgaagagcctaaagcagaagaagtaaaagctgaaactactggagaaataaaatcagacgcaccaaaagtagaagcagaacctacagaagaacctacagaagaaatagaagtagcagaacctacagaagaacctactgaagaacctactgaagaaatagaagtagcagaacctacagaagaacctactgaagaaatagaagtagaagctgttgacgattacatagaagctctagaaacagaaggcgtttatcaagatgacctccacattctcctaggagaagagaaaatcgaagatgaaggccctgaaaacgaatttgtcacaatcaattccgatagacaatcaagctctggaggaaacgacatattcagagatgctataaactccattagaaaattcagaggagcaaacacccaacagcataaggttgaagaaatcaaagaggaagtagttccagatgactacatccacaactttggaaacggtatagaagaaatcggagacacaatcacaatcactcctatccgtgaagacgaaatcgatgatttggcttataatcaacctaatgaagatgtagatgaaatctataaggaagtcaatgaagaagaatacaataaaaccattgattccgaattggatgaagcatacgaggatgttacagatgaaacttccgaagaagaagctaacacctacactgtagaggattataagcaaatcgaaaaagaggaagaggagaaaaaggcaagagaagaaaatacccaaaagattttagatcttaagggaattgaatccaaaaagcctcgctcttctaaaaaagaatctgtatctacagaacagccagaagatcctgctcaaaagcaattggtctttaccgaacaaagaagcaatgttgaagaggtttatatcaatggcaaattgattgaactcaaacttggccagactgtaatgtttaatcacaacaatgaaacttactctagccaaatattaaagttaaaaccaggatttgttggcgtcaaatacagaggcaaaaaagtctggattaaagcaaccgatgttaaaagagtgctttaa

SEQ ID NO: 940 - DNA, 1233 bp, Methanobrevibacter ruminantium
  source 1..1233: mol_type = genomic DNA
atggttaaaattaatgaaaattatcttttattgcaaaacagttatctttttgttgaagtaaacagacgtgcagagaaatatatggaagaaaacccagataaggatgtcatcaaaatgggaattggggatgtaaccaaacctttaacccctacagtaattaaggcattcaaggatgctgttgatgaaatggcagatggagaaacatttatgggttatggtccagagcaaggatatgactttttagctgaagcaatcattaaaaacgacttcaacagatggggagtcgatttagaccttgatgaggtcttcatttcagacggtgccaaatgtgataccggtaacatacaagagatttttgaccttgacaatgtaattgctgttactgaccctgtatatcctgtttatgtggacacaaatgttatggctggcaggtctggcctaataaaggatgatggaatgtatgcgaatatcgtatatctcccatgcactgaagagaacgactttgtaccagctcttccagaggaagatgtagacttgatctatctctgtttccctaacaaccctaccggaaccaccttgacaaaagatcaattggctaaatttgtcgaatatgcaaaggaaaatgacgctctcattcttttcgatgcagcttatgaagtattcataacagaagatgacgttcctcacaccatctatgagattgaaggtgctaaggaagtggctattgaatttagaagcttttcaaaaactgcaggattcactggtacacgttgcgcttacactgtagttcctaaggaaatcaagataaagacatctactggagatgagcaatctgtaaatgctttatggaacagaaggcagaccacaaaattcaatggagtatcctatcctgtccaaaaggctgcagaggcagtttacagtgaagaaggacaaaaggaaattatggaaaacattgaatattatttagaaaatgccagaatcattcgcgaaagcctatctgatattggattgaatgtttatggtggagttaactctccttacatttgggtaaagacccctaatgacatggaatcctgggacttctttgaccttcttttagaagatgcaaatattgttggaactcctggatccggatttggtccaagcggtgaaggttatttaagattaactgcattcaatactttagaaaatactaaagaggcaatgaacaggatttctaaattgtctttctaa

SEQ ID NO: 941 - DNA, 681 bp, Methanobrevibacter ruminantium
  source 1..681: mol_type = genomic DNA
atggaagctgattttagccttgttaatgaaaatgatgatttgcaggatttattctccaaatacggagctcttgctttggaaaaacaggaaaacctctccaagcttgttggcgatagcgagcctgaattggatattgaaaatggaatagtcaagtttggtgataaggagtttcctattcaacttctagggtttttagatcctgatgaggacacttggtcatgggcatgggacaatgaggaaataggattccctgaagagctcattgaggaagccaaggaagttaaggaatttggagaagatcagaatatagttcagtttaagcaaagcatgtttgctgcaagctttgaggaagcccatattttatccatgactgtatcttcaatttttggagacgacgcatactgtggagttaattatggaaactttgtattctttgtaaccataaaatctgatgagattccatcatctgagggtcctgaagaattctccaacattttcaatgaattccatcgcagatttgaagtaaatcatttaaaggctttggaatcctatgcaatgcttaagggttatgaatacaaatacagagatgactttgctcttgttaagattggagacaatagggtagttgtaggattaaccgaaagaaaaaatgttcaaagcattaagtttattctagcttaa

SEQ ID NO: 942 - DNA, 627 bp, Methanobrevibacter ruminantium
  source 1..627: mol_type = genomic DNA
atggatagtgaattaattgaagaaataagctttgaaattcaattattgcttaagatgggcttctataatgatgaagagattttagaaataattgatgatgaatttattgaagaggacattccaaaggaaaagcttttagaaatattctcaaatgttaaagagaacttcgattgtccaaaaagcgattcagaagactttttgaatctgaaagaggcttttttaaacttgtctaaaaatcataatatattaactattcataatgccggatacgatattgaagagggaatccaagactcatttgaactattcacccatcttagaaacaataaatatgaagtggaaggattctgcttctatagctttgaggatattgaaattgcaattgaagaaaacagccttttaatagcctttggcgattttgaatttgatgaagataaaggcctaaagatagctaagacagttaaagatgagctagtttccaagggattcaatataaattgggatgaaagcattgatgagagaattgaaatagtggatttcaattggcaaaaggcttatgaagatagggattattccatggatggagctttaagtgattatattgaattaaataacttagaagattaa

SEQ ID NO: 943 - DNA, 669 bp, Methanobrevibacter ruminantium
  source 1..669: mol_type = genomic DNA
atgaacgctcgttcttttgaaatcattgaagaggccatttcaaatggagtttggacatggcttgagttggattgctattcaaattcactctatttagagtttgaaaggcttcaattattgtctaaatccattgtaaatccatttaagcctgttcaagaatctacttataacgattataggggagaattggctattcgatttggcacaaacatttatttggctattctttatgatgatgaggattcttttgactttttagaccttgaagaggatattttaaattccttcttaaattcagatgccaaattaagcgataatgattcctatttctataggcagtttaaaaaggaaataagaggattcaagtttcaggatgaggattattcaagtaatctcactaaaaaatataaaaaagagatagttttagcccagcttcccaataaaaaagatagttatgactttttattgtcatttgaattagacaactttgcaataatcgttaagggagacattatttcatgctttaatgatttcgaatccttaagtgatggcgatataaagagagcttccaacgattggatcttgtattatttggattattggataaaaaaaggaactgaagaggagtatgatgaagatttcctttgtgaaaatatttcatttgactga

SEQ ID NO: 944 - DNA, 543 bp, Methanobrevibacter ruminantium
  source 1..543: mol_type = genomic DNA
atgaatcaattaagaccaggatataactttttagccactcatgaactgttttttgatgagattcctcatcaaagggccattcatttggcaaactatgaattcttttggaacatcctagatgagcttgggccatttggaacagaagagtcatatcttgccttttgcgaactatgcgattggctaatagataatcccaatacgcccataatagaatgttttagatggatattgtcctcttgggacattgaacttgaggattttgacgataaggttattgaaaacgagaatatcctaaagataatctatgacttggatttctatgaggatttgatgatgctggactttaccatcataagcacagggttcggtcagcttattcttcaaggaaaaatcgatgctgatgtaaagaacattattcaattgtcccttctgcgtcagatgaactctcatgtactggatgagtatttgggaagtaatatgcagtataaatacgaaagatatttgtatcttcaaaagcttttggacattttggaagaggcttag

SEQ ID NO: 945 - DNA, 1020 bp, Methanobrevibacter ruminantium
  source 1..1020: mol_type = genomic DNA
atgacttgtagtatattagttggaggagcttggggagatgaaggcaaaggaaaatgcattacttacctttgcgatacagacaaaccggatatagttgctcgtgcaggtgtaggtcctaatgctggacattcagtggaattcaatggagaaaaatatggattaagacttgttccatctggttttgttcaaactgaagcccaattgcttattggcgctggagtattagttgaccctgaagtgcttttccatgaatttgactatttaagcaaatacaatgtgagggagagaactttagtggaccctagatgttcaatcatcgaacctgaacacaaagagagggatcaagcttcagagcacttggctaaaaagataggaagcacaggatccggttgcggacctgccaattcagatagggttttaagaactgctaaaatggctaaggagattccagagcttgcagactatttgactgacgtttctttagcagtcaatgacgctttaaatgatggtcaagacgtattcatagaaggctctcaaggatttgccctttcattatactatggaacctatccttttgttacaagtaaggacaccacagcaagcagctttgcagctgatgttggggtaggccctactaaggtggatgaggtcatcaatgtattcaagtcctatatttcccgtgttggagaaggtcctttcccaactgaaatgagtcaagaggaagctgaaagcaaaggccttgaagagtatggtgtagtaactggaaggagaagaagaatcggttactttgatatggagcttgcaaaagagtcatgcagaataaatggggctactcaaattgctttaacctgtgttgacaagttatatgactgtgcacgtgttagggactatgctgaattgtctcaagaaactaaagacttcatttcagaaatcgagcaagagactggcgttcctgtaactattatttctactggaccagacttgcaagacactattgatttaagaaaagaattattataa

SEQ ID NO: 946 - DNA, 1185 bp, Methanobrevibacter ruminantium
  source 1..1185: mol_type = genomic DNA
atgagatgtgttggtacagttgtacgcggaataagaacacctattattaaagaaaacgacgatttagcaactatcgttgtagattcattgatggcagcaaaagaaagtgaaggatttgaatttagagacaaggacatcgttgcaataacagaagctgttgtagcaatttccgaaggaaactatgtgactgtggatgacgttgcagaggatgttgcaaagaaattcccatctaaagaaatcggagtgaccaatcctatcctaagcagaaacagattctcaataatcctaaaaggtattgcaagaggaatggataagattacccttttaagctctttccctgcagatgaagtgggaaacggcattttagacgaacgtgctttagatgaaagcgaattcaatttaggaagcgtcatcactgaagaggactacgaaaagaacttcagttcctggattcatccatttaccggaatcaacatggttgatttctatagggaattgattgaaagcgaagactgtgaagttgaatttgtcttttcaaatgacgtaaagaccattcttgactataccaatgacgtcttgacctgtgacatccatacaagaaagaaaaccacaaaaatgcttaaggaaaaaggagcaaatgtatatggattgcatgagattctagttgaacctattggagattcaggttgcaacccagaatacggattgctcggttccaataaggcaacagaagaaagattaaaactattcccaaaaacaggagataaattagtcaatgaagttcaaaagagacttattgaacttaccggcaaacagattgaagttatggtctatggtgacggagcattcaaggatcctgtcggaaagatttgggaattggctgaccctgtggtttcacctgcacatacagcagggcttgtaggctatcctaatgaaatcaaattgaaatatgtttcagacaatcaattcgctgacttgcatggagacgaattgaaggaagcgattaaggaagagataagacaaaaggctgaaaacctaaccggacagatgattaccgaaggaaccactccaagagtattaactgacttgattggttccctttgtgacttaaccagcggttctggagacaaaggtactcctgtcatattcattcaaggatacttcgacaatttagcaaatgactaa

SEQ ID NO: 947 - DNA, 384 bp, Methanobrevibacter ruminantium
  source 1..384: mol_type = genomic DNA
atgaaagatattattaatccgaatgtagaaattcctgatgaacaggtagctatggcattttttagaagtgtccgttgggttaatggggtctattgtcctaaatgcaagtcatataatgtcaataacagaggaaaccaaggcagaactcgtcgatatgtatgcaaagattgcggatctaatttcaatgacttttcaggcacaatcttccataaaagcaagataccgcttaatgtaatgctttatattttattcaatttggatgaaaaaaccaccactcaattgtctgaagagttaggctacagcaggcaatgcatctcaagaatatctaaattatttagggataagctattgagcaatcctgagttttttgacattgaagaatga

SEQ ID NO: 948 - DNA, 948 bp, Methanobrevibacter ruminantium
  source 1..948: mol_type = genomic DNA
atggataaaaaaactctagcaattattgctattatcgttatagctcttgtagctgttggtgcttactttgcaaccagcggtggatcaagtgacaatgtagtaagaatcggtcacttgccatcagaccatgacaccgcacttttcgttgcaaaagagaagaagttgtttgaagatcaaggtctcactgttgaactaactcaatttaacaatggtggagacttaatgactgctatggcaagtggagatattgatattggttatgcaggtatcacccctgtaatgtcttccatttcccaaggagttcctgtaaaagttgtatccggtgctcaaattgaaggaagcgctatcgttgccaataagaacagcggcatcactaccgttgcagacttaaaaggcaagactgtagcaacccctggtgaagcaacaattcaaaacatgcttttaacctctgctttaacacaagcaggcgtatccactgattcagttgaattcacaaccatgaaagctgctcaaatgactgacgctttaaaggcaggtcaagttgacgcaatgatcatttgggagccatattcctcaattgcagttaagaatggtgacggcgtattgattgaaaacagttctgaaatcattccaggacacccatgctgttgtgttgtagctagggaagacttcatcaaggaccaccgtgactcattagacaaggtattgaaagctcatgaagaagctactaaattcactaatgaaaaccctgcagaagcggctaagatgttacctgaagacatcgtaccagatcaagagttacaagctaaagtaatcgcagataccgttttcatttctggtttagatgctgagtacaaacaaaaggtcatggacttcatggctcttgaagtgcaattaggtcttttaaaacaacctttaactgaagaacaaatctttgcagacttatag

SEQ ID NO: 949 - DNA, 744 bp, Methanobrevibacter ruminantium
  source 1..744: mol_type = genomic DNA
gtggaaattaagaaaaaatttttaccatttatcctaccggcaatacttcttataatctggtaccttattacagatggtttgcatttgattccttattatatcctgccaagtcctttaaatgtatttaatgcggcatggactttaataactaatggaaaactcttcatgcatacctctagcacacttataaaggtattctcaggtatcattttagcatctgtagttgccattccacttggaataatccttggatggtatgagaccttagacagattaagctccttaatcataagtatcctaaggcctattcctcctatctcatggattccattctccattctttggtttggtataggattatcctctgcagtattcgttatctttatcggttgtgttttctcagtacttgtatacacaattgacggtgttaaaagaaccgataatgtattaatcgaagcagctcagactttaggtgcaaacaattgggatatcttgcttaagattgtccttccatccactttgccttatatagtctctggacttaaggtaggtgtgagcatagctttaatgtgtaccgtatctgctgagatgattgcttcaagcagaggtttaggttatatgattctaactgcaagtcaattgttccagcctggaactgtggtagttggtatgatagttattggtataatcggtattttatttgattatggatttagaaaagcgcaagagagaatattctggtaa

SEQ ID NO: 950 - DNA, 762 bp, Methanobrevibacter ruminantium
  source 1..762: mol_type = genomic DNA
gtgtttatattggcaattgatataaaaaatgtttctaaatcatttgttacaaaagataaagatttcatggcattgaaaaatattaatctccatgtggatgatggagaattgatctgtctattgggaccttccggctgtggaaagaccaccttgcttcgtatggtgggtggtttggaaaaacctgatgaaggagagatatatgataggggagagcttgtaacaggtccttccaaagacagaggattcattttccagcaatattctttattcccttggctaaatgttttagataatgttatgtttggattgaatttaaataaagatacaagcaaggaagaaaatttggctgctgctgaaagatatcttgaaagggtaggattggctgaatttaaatacagctatccccatgaattgtctggtggtatgaagcaaagggtggctatcattcgttctttattaaatcacactcctgttcttcttatggatgagccattctcagcagttgacatgcttaataggcatagtcttcaagagcaacttataggagtttggaaaagatttaataccacaattctttttgtaacccacgacgttgacgaggcagtctatttggctgataagattgtgattatggataagaatccgggcagaattcaagatgttgttgaagttcctcttgaaaggcctagacaaagggaatcaagagaatttttagacttccaggatgaaatagaaaagctgttaggtgtttgggaaccttag

SEQ ID NO: 951 - DNA, 801 bp, Methanobrevibacter ruminantium
  source 1..801: mol_type = genomic DNA
atgataggactttcaatagctggatttgacccttcaggaggagctggaataagcacagatatgaaaacaatggctgcacatggagttcacccctgttcagtaatcaccgcactaactgcgcaaaatcctaaaaaagtgttttctgtgcaagctatagaaacctcatatattaggcagcagatagattccatatttgatgagtatcctatcaaatactcaaagacaggcctattatactcaaaagaaatcatccaacttgtaagtaaaaaggtcgaagaattaaatttacgcatagttgttgacccagtgatggtggcaagttcaggtgggcaacttgcaaagaaggaaatggcaaattcattaaagaaatatctcttgaaaaatgcacttcttgttactccaaatgttaaagaggctgaagagctttcaggaatcagcataaaatcaatagaagatgcaaaggaagctgcatataagattggagaatgttgcaatgtaatgattacaggtggccatcttgatggaaacaatgtcatttacaataaacaaaaggatgagctaagcattttaaagcagaatctaatcaaaacagataatcttcatggcacaggatgcagtctctctgctgcaatatgtgcaaatcttattatattaaatgaaaaggacaaagacagcaaggatgaaaacaatctagagattgcaatagaaagatctaccaaattcatttatgaagcggttaagaagggtaggtatggcacattaaatcctaattttaacagcaatcttgactttttaaaatag

SEQ ID NO: 952 - DNA, 705 bp, Methanobrevibacter ruminantium
  source 1..705: mol_type = genomic DNA
atggataagatttatgcaataattcctgtaaatcaatttgcaaatgctaaaacaagattatctccttttctaacacctgaagaaaggagggatcttttaaaagccatgctaaaagacattacagatacattaaagcctattgtagataaggtcgttatcatcagcagagatgaggaagttttagcatatgcagaagaattggagcttactacaattgttgaagaggaatataaaaaatccaaagctgttaactcctctgatgacaaccctttaaataaggccttaaaacaggcaatgaaatggtcaagaaagaaaacccgaaaagtgataatcctgccatctgacattccacttattggaaagaccaatgtaaagctcctaattgaccaggcaaagaattttgattttatcatcgttccttcaaagggaggaggaaccaatactcttatcataaagccattggcaattgacatgaaatttgaaggatttagcttcaataaacatatcgaagaggccaaaagaaaaaaactagttcctattgtacatgattcattctatatggccttggatgtaaacaccacagaggatcttggagaaatcatgcttcatggaaatggaaccgaaaccaaaaaatacttagaatcccttggaatcaaggtagaatcctcccatgaccatgaaaggcttaaagtgactagagattag

SEQ ID NO: 953 - DNA, 1407 bp, Methanobrevibacter ruminantium
  source 1..1407: mol_type = genomic DNA
gtggaaaattttagtgaatggttccatgagatattagaaaaggcagaaattacagactcaagatatcctattaaaggaatgagcgtatggctcccttatggatttcaaataagaagagcatgcttaaacatctacagagacctgcttgacagcgaacatgatgaagtattgttcccactacttattccagaagaggaacttgcaaaagagggaattcatgtaaagggatttgaagatgaggtctattgggtaacccatggaggtcaaaaggaattgaatgaaaagcttgcaataagacctacaagcgaaactgcaatgtatcctatgttttccctatgggtaagatcacacattgaccttccaatcaagcaataccaagtggtaaacacattcagatatgaaaccaagcatacaaggcctcttataagagtaagggaaattaccacctttgcagaagcccacactgttcactcaagcccagaagaagcggcagaacaggttgaaactggaattgaaatatataaagagctctttgatgaaatgggaattgcatatctcatcagcaagaggcctgtctgggacaagttcccaggtgcagaatacactatggcatttgatacaatcatgcctgatggaaagaccttgcagattggaacagtccacaatttaggccagacctttgcaaagacctttgagataacctttgaaaacaaggaaggaaaccatgaatacgcctaccagacctgctatggaatctcagatagggtaattgcagcagcaattgcagctcacggagatgaaaaagggcttatcctacctccaagaatcgctccaaagcaaataacaatcattccaatcatatttaaggatggaggagaggaagtaatggctaaatgccttgaaatcaagaaatccttagaatcaaaaggaatcagagtccaaatggacacaagagacataaggccaggtaagaaattctttgattgggaattgaaaggaactcctcttagattcgaattaggtccaagagacttaaagaacaatgtagctatccttggcagacgtgacactggtgaaaagatagaaataagcctagaagatgatcttccatcaaaagtagaagacttattaatggaaattgaagaaaatctaaaagcaaaatcctggaaagcacaggaagataaactaatcactttagaaagtcttgacaatgttggagaaattgtagatgaagaaaaagtggttaaattctactggtgcggagaagaggaatgtggtaaggaaatagaagaggaaacagaagttgacattcttggaatcaatgaggaaaacataaaaacagacaagatatgtcctcattgcggaaagcctgcaaagcatgttgcgcttatggctaaaacttactag

SEQ ID NO: 954 - DNA, 1044 bp, Methanobrevibacter ruminantium
  source 1..1044: mol_type = genomic DNA
atggattctaaaaagattcaaatgccaagagaagtacatataggccctaatgttttagatgaagttggggaaatatgtaaggatttacgtttatttgatgaagctcttgttgtatccggatttcatacatttgatgttgccggtcagcagacagttgacgctttagaaagttctgattttggtgtggatgtcgtaaaggttaaggatgcatctgtagaatcagtggagaaggttagagagaagattgccaatgcatctgttgtattgggagtcggaggaggtaagataattgatgttgcaaagcttgcttccacttatgagcattcctacttcatttcagttccaaccactgcatctcacgacggaatagcctcccctatggcctccattaagaatgacaagggatccatctctaaaaatgcaaattctccaatggctgttgttgcagacactggcataatcaacacttctccttttagattaatcgcttcaggctgtgcagatatcgtttccaattacactgcaatcaaggattggagattggcttataggttgagaaatgaaaagttcagcgaatctgcagctgccctttctgaaatgactgcaaagctcattatcaattcctctgacagcattaaggaaggattggaagaaagcgctagaatagttgtaaagtcattgttcagcagtggaatggcaataagcattgcaggttcaagcagacctgcaagcggttctgaacatctcttcagccatgcattggatagaatcgctaaaaagccagcattgcatggtgagcaatgcggtgtgggaactatcatgatgatgcacttgcatggcggtgattggagagctattcaatctattttaaagacaattggggcacctacaaatgcctccgaattaggattggatgatgatgagataattgatgcattaacaattgcacatacattaaggcctgaaaggtataccattttaggtgataatggattaactagggatgctgccattaagttagctagaaaaactgaggttatttaa

SEQ ID NO: 955 - DNA, 441 bp, Methanobrevibacter ruminantium
  source 1..441: mol_type = genomic DNA
atgataactttaattggtaagaaattagcaaaggaaggagaaagctttatattttatgagcccgcagaggaatgttcgacttgtaggtttaaggcttcttgtatagattcccttgaagagggacataagtatacaatcacggaagtccgtgatgtggaacagaagtgtcctattcatgaggatgaaaaggttcaggtggttgttgtggaaaagggagagaccactattttaaccgattccaaaggagtctttgaaggatccagctttgaatttaatagacaaggatgttcaaataaggattgtgactttagggacatgtgtttccctgaagagattggaaaaggagaaaaatgcgtttatattaaggaccttggaaagttcaatgactgtcctcgcggaaactctttgattaaatgtgttgtaaagatatatgacaaataa

SEQ ID NO: 956 - DNA, 669 bp, Methanobrevibacter ruminantium
  source 1..669: mol_type = genomic DNA
atgagtcaaatgaaaaaagattgtggttatgctgctgcagaattggtaaaagacggtcaagtattagggcttggaactggttcaacaaccctttattttattgaaaaggtagggatgagagttagagatgaaggaattgaagttatgggaattccaacttcctttcagtcttccttgcttgctcgcaagtggaacattccaataacaagccttgatgagcatgagattgatttggctgttgacggtgcagatgagatagatccggactttaacttaatcaaaggtggaggagctgcacatactatagaaaagatagttgactattctgctaaggaattggtaatcattgcagatgattccaagctcgttaatgttttaggtgccttcccacttcctatagaaattattccagtttccttaaaccctgtaacaaaggctttagaggatatgggaggggaagtaaacattagaatgggccaagctaaggatggtcctgtcataaccgacaacggaaacttcattttggatgtttcttttggagagatagacaatcctatttctatggaaaaagagttaaacacccttcctggagttgttgaaaacggattgtttactgaaatggtagataaggttattattggttctaaagatggtgtaaaatacttataa

SEQ ID NO: 957 - DNA, 1335 bp, Methanobrevibacter ruminantium
  source 1..1335: mol_type = genomic DNA
atgaaagtagttatagtaggtggaggagctggaggtatatccacagcttccaatcttagaaaattagacgaagaagtagagattgttgtattgactagagataatcaagtgtcttactctccttgtgcaattccttatgtactttccgataggatccattcatttgatgacattgtaatgaggactgttgatgattataaggcaaaaaacattgatgttatgcttgagactgaagtgactggagtcgattcagctaaaaagcaaatcacctattctaaaaatggtgttgttcaaaccatgaactatgataagcttgttcttgcaactggaggaagtccatttgtccctcctatgaaaggggttgatttagatggcgtatttaagataagaactcttgatgacggaaaacaagtaaaggaatgggctgaaaactgtaaaagcgctttagtaactggcgcaggtcttattggtattgagatagcatatgcatttaaaaagatgggcttgaaggtaaccttatgtgaaatgttgccacagatcgttccacgttcacttgatcctgatatggctaaaatccttactgactatttgattgaagagggaattgatgtggttcttggccagcctattacagagcttaaaggggaagatggcaaagtcaaaaaggctgtctttgaagacggaactgaagcagatgcagatatggttattttggctacaggtgttagagcagagcttaatttagcaaaaatggctggatgtgactgtggaagatgggccatacttgtaaatgataggatggctaccaccgtacctgatgtctatgcagttggagactgtgtagagtcttacagtgcaattctcagatcaaacactgtttctcagttaggaaccactgcagttcgtcaagctaagaccttggctcagactcttgccggcaaacgttcaagattcaatcctgtgctcaattccatggtatctaaagtaggcaaattggagttcggtgcagtaggccttaccagaagctttgcacagcagaacagcataaaggcagttgtaggaaaggttgaggcattgacaagggcaaggtattatccaaatgcaaagcctatgaatgtaaaggtcatctgtgatgcagatggtacaataataggttgccagataattgcagaggaaagggtagctgagagaattgataccatgacattggcaatcactcaagagcttacctgctttgaactcagtaatatggagtttgcttatgcacctcctgtttccatggtaactgatccattggtaattgctgtagaggaagtcagtaaaaagtttaattaa

SEQ ID NO: 958 - DNA, 2076 bp, Methanobrevibacter ruminantium
  source 1..2076: mol_type = genomic DNA
ttgacaaaaatatttatttcatgtgcccttccatatgcaaacggtccatgtcatttaggtcacttacgttcaacatatattccagcggatatctatgcaagatataaccgtatggctggaaatgatgtcttgatggtatgtgcaaccgacgagcatggaactccaattgcagttaaagcagatgctgaaggcaagaaacctattgaagttgcaaaacgctatcatgacatgatagcccgtgacattgaaagctgtgacatcagccttgacaattttgcaagaacaagcgacgagttgcattataagatctcacaagacttcttcctatacctttatgaaaagggattgatctatgaggaagccattcaacagctttattgtgaaaactgtgaaaagttcttgccagataggtatgttgaaggaatctgtcctgtctgtggggctgaagcaagaggagaccactgcgaatcctgcggaagagctttggaaccgactgagcttcttgagccacactgccttacctgtggaaatactccagtaataagggacagcacacaatatttctttaagttaagccatttccagaatcaattggaagagtatattacaaccaacgagtatcttcctccaaatgtcagaaactatgctcagaactggcttaaggaaggccttgaagattggataatgacccgtgatatgaaatggggtattccagttcctcttgaaggcgctaaaggaaaggtcatctatgtatggggagaggctttcatcggatatatttcctctgcagctgcatggagcagaagaactggaattccttgggaagactattgggatggacatgttgttcatttcattggaaaggacattatctatcaccattcactcttttggcctgctatgcttatgggacatgactgcaagttacctgatgacatttttgcaggtgaattcttatcccttgaaggcagaaagatgtctaccagtaagaattgggttgtctgggtatctgattttgtaaaagacttcgaatcagacttgcttagattctatctaactattagcgctcctttaaataaagacactgatttctcatgggatgactttggaagaagggtaaatgatgaattggcagatataattggaaacttcttgcataggacttttacattcactcataagttctttgacggtaaggtccctgaatatgcaaatccaagtgaagaggacttggaatttgaagctgagattaaggaattacctgctaaagtgggagagcttatctcaagcatgaagtttagggaaggtttggttgagattctcaagactgccaaatctgccaataagtactttaatgatcaagagccatggaaagctgtaaaagaaaacccacaaaaggcttctaactgtttatatttatccaatcagttctgtaaatccttggcaattcttttaaaaccttatattccaaataaggcagatgcaatctgtgatataattaatatttctaaggaaaacgtttgggatgatgcaagcatattcctagagaatggtcatgagataaataaggcaaagccactctttaagaagattgaagataaggttattgaagctcaaaaggaaaagttatatgctaacctagaggattcagaagaaactaaagatgataaagacaataaaaaagataaaaaagataaatctaataagaataaatcaaataaagacaaaaaagataaatctaaatcaaatgatggtgaaaaaatggatttaattagcattgatgaatttgcaaaagtggaaattagaataggaaagattgtagagattgaaaaaatagaaaaatcaaataaattattaaagacccaaattgacattggagataagaccattcaagttattgcaggtcttggaaaaagatatgctcctgaagacttattaggcaaaaaggtacctgtagtaaccaatcttaaaccagctaaattgatgggtgaattatctgaaggaatgattatggctactgaaagtgcagctattttaactcctgacgattgtgaaattggcgaattacttatgtaa

SEQ ID NO: 959 - DNA, 1578 bp, Methanobrevibacter ruminantium
  source 1..1578: mol_type = genomic DNA
atggatgaatcattaatgataacagagtctgagaaatttttaaatcaaatagagagggagaagttagatctaaccaatcttaagtctgactttagtgacttggagtcatatttagaggtttacgaacttctaaaaagcaactttgacaagctccaggacatgaaggaaagtatggatgagagaggttatactgctccattcagatctctcaatcgttatggttctcgtgtaagtgaggatgttgattatgaggaactaggtgaattgaaccgccataacactatttttagaaacaatgcctctgctaaaaagaacagctttgatagggtaaaatatgccatagcagctcataggattgccttaggcaatcttgaggaatatgccaaaatcagatgcaaggactgtcaaaagtcatataaggttagcacattccttgaaaactctaagacctgcaaatgcggaagcactgattttgagcttaaggtaaaccactctggaatccatagattggaaatcattccttatcttccattatccggcaattatatggttcttctctccagcttatccggttggggaagggattcattcagaagaatcctaaacatattgcagcagaaaagaaaaggtgttgtaaagactgtaactcctataatccgcataaaggaaaatggcagaaccattactaaaagggtaaaccttgatagtgaatttgcagattgctatgaagaggaacttagaagaatatatggtaagggagttagaatagaaaggcttgaattccatagtacaaagccaacaatagttaatgataagtatacccgtaccaatctggccttggcttatgtcaagcatgctgaagacattgtttcaagacatgaggaagagatttttgaggaaaacatcaaggacttgaataatcttaagacctatgatgagcttatctattcagtcaatcttgaaaagcctgaatatatggatgaggatgacttagactcttggagagagcaaaagattcaggacaatcttttggaattaggccttatggacaaatatgggcacttagataagcaattaaagaaagacctaaaggaaagggagagaataaagtctaagatttttgcagacattgcaccaacccttattctttgggacatttccaaatattatctctgcacatcctatgaccgccgtaaaaggtatggatctccattccctttcattagaaacgatttagacagacagcagcgtaaggtatttgcaaatccccatgcaaatgtagtaggtctccttagggaaaaggagaaaaagcatatgatagcaatagatgagatggatttattgctgtataaaaagtttaaattggaaaagagaattaagaacactaattttaagctgaattatgcagcactaggacccgctattgtatttgcaaattctgattacaacattaaggaagtttctagagcatataaagttggagagaaaagcgtaaaaagagagattatgaatattaagagctttagaaagccaaacagtaaaaaatcaagagagtttttaggtaagattaaggggtag

SEQ ID NO: 960 - DNA, 708 bp, Methanobrevibacter ruminantium
  source 1..708: mol_type = genomic DNA
atgagttatgattttgatgactttgatgaggatttcgatgatgatgagtttgatgaatctgaggattatgatgactttgatgaagatttcgaagatgattttgaggacgattttgaagatgactttgatgactttgacttcgatgatgactttgacaatctagactcaaaatcaaaggaagatattgatatatttgatgaaaaaccacttgaaactgattcaggttatgaaagaaccgctgtagaggttcatgtttcaagtcctttaagttcaagaaagcttgttgaacttatggacacttatccttccttaaagagaattacttgtcctaaaagcatttatgatagaatgtcttcaaaatatattaaaattttaaaggaagatttgaacatcactgttgaaatcaaatataattggggaaagaaaaaatacacaaaaaaggaagtcgattctgtaattgaattgttcaatgagggaaaacgttcaggtgaaattgcttcacaattggatatgcctatttccaatgttaattatatcaaatccaaatactctgataggatcaatgtaaagcattataaaaagaaatatgatgatgaatgcagattaaggataaaatccatgaaggaagatggcttaaagccaaaagagatttctcaaaatctgggcattccagttagatctgtttattatattttgaataagaaatga

SEQ ID NO: 961 - DNA, 14790 bp, Methanobrevibacter ruminantium
  source 1..14790: mol_type = genomic DNA
atgaataataagacattatttatcattggtttattcatatgtcttttatttaccatacctatggtatcagctgcagatgctgattccaatttaattgataattcagtaattggaacaaatatcaattcacaagcaattacaacatctgatgcaagtattgatcacagttcaaatgcaaatgcaatcaatactaatattaattctgatgatattgtttctaataacaataacaataattccataattgatattaatgattccgatattgaatctcaaaaggatggttcaagtaagaatattatcaagtctaccaataaaaatacaaatgattccaataatgaaactgaagataatattctagtaactgatatcaatttaggtaaaaataataaaaattcaaatgataaaaatattttaagtgcaaatgcactaactgctgatggaactggtacaactttcggtgacttgcaatatatcattgaccaagatacaaccggtaccattactttagataaaaattataaattcgaatctggcactgatgatgcttatctcgatggtataactataaataaggccattactataaatggtggaaatcatactatcgatggagaccacttggctagaatatttaatattaatactggatctgcttccgatattgttgttttaaatagcatccatttcattaatggtatggcagatggcagtggcgataatgccaatggtggtgctatttatattggttctccaactaccttaaattatattactgcaatcaattgtacagctactggtaatggtggtgccatatatgcacatgcagatggtaccaatattgcagctaattacctatacctatataacaacactgcagtgaatggtggtgcattatatgtttatggtaatgattatacagtcacagtagtggatgcccgatacaattctgcaagtggaaatggtggtgcaatgtatgcatacggaaacagtttccaccttaacaaggttaacttcattaacaatacggcatacggtgaagattcagaaggtggtgcaatattctttgcccataattctgatgatagtattgttaacaattcctactttgcaaacaactctgcaaatagagatggtggtgcaatagtttgggatcaaggtgcacacttcggtgaactttataattccaagttctacaacaatactgctaaccatagttcaggtgctgttcgttggagtggtgaaaatggtaccattgacaattgtagttttattgacaacaaggcttatggaaccaatttagaacctggtgattttgatcaaggcggtgaccagattcttggtggtaatggtggtgctattacttggttaggttctgtgggtattattaggaattcaaacttcactgataactatgcagaggcaaatggtggaggtatgttccttatagctttcgatattaatgaccctaattccatatgtaacgatacccatattatcaactgtaacttcattagtaatgatgctggacttaatggtggtgcattagattgggacggtaaggcttacaatggttctgtatctggttccaaattttataacaataccgctgcacgtagtggaggtgctatcttctggaaaggtaatggaggtatcataacacaatctgactttaagtataactctgcaaatggtactcatttagttcagcctgaaggattccttacccctggtggtaatggtggtgcggtaatcatcacaggtagtgatgttaatattacatattccaatttcactaacaatagtgctagagctcgtggtggagcggtttacttgcagctcaataacaataccatggttttgaattcctcatttgaaaataatagtgcaggtactaatggtggagcacttgacttttatactggtgctgaaaatggtaaggtaattaactccacatttttgaataatactgctaatcgtagtggtggtggtatatactggaatggtgaaaaaggtgtaattaatggtagtattttctatgataataaggctttaaatcaaggtacatacgtaaatggaagccaaattaccgatggtggtgacggtggtgctatcatttggacaggttcacatggtactttagaaaattcaacctttaaaaacaacaatgctactaaccgtggtggagctattttccttgagaaacataatctggaggaccctaatgattattgtaaaaatattacagttttgaattgtacatttgaaaagaattctgcaggtaccaatggtggtgctattgattggtttgaaggtgcagaaaatggaagaattattaattcaacattcactgaaaactatgcacgtagatctggtggtgctgtattctggaatggtgttaatggtactatatccaattcaacatttacattaaacgaagtaggtcttgaaggtgcagatactggaactggtgagacaattccaactggagatgatgatggtggagctatcaaatggacaggtgcaaatggtttaattgaaaattccatatttagagaaaataaggctttagaaggtcgtggtggagcaatttatcttgaaaacaatgagaatggtactgttaacaattgtactttcgaattgaatagtgcatttacaaatggtggtgctatagactggcacgaaggtgcaaagaatggtcagcttatcaattccaccttaacaaacaacactgctggacgtagtggtggtgcagtatattggaatggacacaatggtacaatcaatggaactaattttacagataacaaggcattaggaactcatcacactgaaggtcagactgaaggtggagatggtggtgcaatcatttggacaggttcctatggtactattgagctttctaacttccataataacagtgcacgttggagaggtggagcaatcttccttcagaaaaacgtgcatgaaggggaagagcattgttataatacaaccgttaagaattcctactttgaagagaactttgcaggcagtaacggtggtgctatcgattggtctgcaggtgctatgtatggtaaattgattaattcaacattcataaacaacactgcggaacgtagtgcaggtgctgtttactggaatggtctatatggtgaaatattaaattccacatttgaaaacaatactgctataggtaacttcactcatgacgttcgtcctgaagtggatgaaacctatactgttattggaggtaacggtggtgctgttgtaattactggaagccatgcaaaaatcgatggatccaactttacattcaacactgcaacaagacttggtggtgcaatcttcttccacgacaatacaaacggtactataaacaattccatctttactaataacactgcaggtctcaatggtggagcccttgacttctatgaaggtgcgagagatggtcaggtacttaattccacctttatcaataacactgcaaaggatggaaaaggtggtgcaatcaactggataggtacaaatggtactgtagatggctgtgactttataaacaacactgcaaatggatctgatgatgagtctggtgcaggtggtgcaataaatgtagatggtattaacacctatattgcaaattcaacatttacaaacaacagctgttgggacgatggtggtgctatctgttggaatggtgacttaggtaaaatctataatattacctgttttaacaatagcgctataggaaaagaccacaaatcttcaggcggtaccataagtatttatggttcaaacctcacaatggacaaggttaacataacattaggtacagtgtcctcagtaaatgatgacaaggtatccaaaggtggaggtatatttgttacaggtaattatgtaaacattaccaatgccgaatttacaaactgttctgcattggctcctattgacgattcctctgcaggagcattgtacattatcggtaacaataccaatgtagtgaatgcaacattcaaaaacaacactgcttatgaagacggtggtgcagtatatattttaggtgaaaattgtaccttgaacaatacattattcctcaataacgttgcccacaacgatggtggagcaatccaatgggatggtaacaatggtagaatctacaatctcactgctgatggaaactatgcagacagtgcaagtggttcctctaaaggaggtaccctcactattgaaggtaataatacagttatacaaaaaatcaatatttccaattcctatgttgatagcgaccatgatttaggagcaggtaagtctacccaaggtggagctatattcctaactggtaatgactgtaacattacagatgctgtatttgacaattgttctgtaaaatatgttgcagatgaatcatctggtggagcaatgtacattatcggtaacaataccaatgtagtcaatgctaacttcacaaataactctgctgttgaagacggtggtgcaatatatattgatggtgactattgtaccttgaacaatactgttttcatcaataacactgctcataatgacggtggtgctgttgactgggaaggtaattatggtcatgtttacaatttaactgctattgataaccatgcagatagtgcacatggtagttctaaaggtggtactatcctgcttgaaggtggtcattgtacatttgaccagcttaacatttcaaacagttatgtaagcggtgaaacctacacaggtacaaaacctgttcaaggtggaggtatagctatctccggtaatgactgtaacatttccaattccgtatttgacaattgttctgtaagatatgaaggaaccaattcctctggtggtgcattatacatttggggtaacgatactcatatagcgaactgtaatttcacaaacaactctgttccttccgatggtggtgcaatctatgttggaggttctgacgtaactgtagtcgattcaaatttcatcgataacaatgcttcccaatctggtggtgcaatcttcttgactgacaataagaattcacaaattaatggttcaaccttcaagaacaattctgcgaaagtgaatggtggagctattgacttctatgcaggtgcagaagacggtctagtatctgcttgtgaatttgttaacaacactgctggtgcttccggtggttccatttactgggaaggtaccagaggtgtaatcgaatactctagctttgatggaagcagagctttaggtaatcaaacaagtgatgcaaacaatggtagaggaggatctatcatttggctcggagaccacggtacaattcgtggttgtgactttaatgacagtcaatccgctaaagaaggtgctacattatatgttgtaggtgaccttattaaggttcaacaatctaactttaccaattctcaaaccaatactagtggtggtatttacatccaaggttcagaaggtactataagtaattgtcatatggaaaacactactgctaaggaaagtggtggagcactttatgtaaaaggtaattatatctatttattagattctgatataaataatgctacttccgttaataatggttctgcaatttatattactggtaacactacccatatagagaattcaaatgtaaccaattgtagttcaagttctggaaatggaaccataatgattgcaggttataagacagtaatggatggtgtaaatgtagataacaacaaagctgtttctgctggtgcagttctaattagtggaagtcaaaccaaaatatctaactctaacttcacccataacaatgcatccaaggatgcagggggtataatgattaatggtactgacaataccattacaacttcaaatatctctgataactatgctaaagaaaatggtggaggtatttactatacaggtgatagaaatacagtaagttattctaatattgaccataacagtgctaataatggtgcaaatgtatatatggctataaaagctaaagattgtaagcttataggttccaatattacaaatgccaaggctagaaactttggtggtggagtagaatggtgtgaaaattctgaaaatggattgattcaagattgttacttctataactgtacttcaactgcccacggaggtgctattcactggtacccaggtaaatatggtgttatagataattgtacttttgttgaatgtcatgtagctggtaccaaaaacggtggtgcaatatatgcaggtgcaaacactaatgttaaaccagttggaacagttttatcaaacagtacattcattaactgtacaacaggtaccagaggtgctgtaaactggaattcacaaggtggtttgatttataataacacctttattaattgtggtgtagctaacacatctgttactacatcttggggtggtgcccaagctttacaaattgaaaaaggtaacaacactcaaattattgcttgtgaattttataactgttccggtatcggtggaggaggagcattaagagtacaaggtgatggccatagtggttataatattacaattgcgaactgtacatttgacaattgtaataataccggtttagctggtggtgtatatttaagtgatatggctagaaatataacttttgaaaacaatacctttaccaataacagtgctcctaatgtaggtgcattctttatggaccctaaaactgtcattgtttcatttgtaaataacacatttattaataactctgctactggcagttctggttatgcgggtgccgctcaattaactggaaatcttgaagtaatcaattctacattcatagaaaattcagctgttagtaaagcaggtgctattaatgctgttgaagattatgatggaaataacaatttagctattattggatccactttccaatacaataaagctaaagaaggttctgccatcaatgctattaatttggatatgactgacacagttttacttgaaaaccaagcagcatttgataaatggacaaaccaaagaaattcaagagctaatggtcatgtatctataaatggtacttttgtaggtaaagataactacttgaatggtattaaggctaatggagctactttcgataatgtaacatattgtggtgtaaatggtggaggtttatatgaagatactgtcaccaataccgatgatgtaacttcagctaaatccacaaatgaggttcatcagttaatagtcttagagatttatgattataataataatttagtggatactaaaaccacatttactgatgaaaatggtaaattcaatttcgaatttgacatggaaaatcctcaagattactcatacaaggttattcaccctgaagataattattacactggtgcagaatattctattggaaaagctatatctaatataacaatcaaatctcagaatattactcacccagaagatgagaatataacatttaaggtaactggaggaagtggaacacctactggtaatattactgtatttatcaatgatactgaaggtaatgtgatatttaatgatacaattattcttaacagtaccggtgaagcaaaattattcttcccaagattaaatgcaagcgaatattacatagaagccaagtataatggtgataacaactacttgcctgacaatgacacttccatattccatgtaaatatggcagaatcattcatcaaaattggaattgaaaactacacttataatgaaactagaaatatcacaatcacagtgccatatatagaatcaggtaggatatccgttatcgtaactaatgaaaacttcactcaattatacacagtctatgttaatgaaggaactgaagaagtgcaaattcaacttcctatattggatgcaggtgtttatgatattgaagcaatattccatggaaacaacaattactatccaagccaaaatacaactaatttcactgtatttaaagctgcttcaataattaacattacagcagacaatgtaagtggtggagtgagagaaactgttgatattcatatcgatcctgaagttgcaactcaaaatataaatcttacagtttatgatgctcaaggtaatattgttgatcaatattatgaccttggtttacacgattccagaattactcaaattcttacattgttacctaaaggtaaatacaatgttactgtaacttatcctggagataagaatcataatgcatcttcaaattcaacaatcttctatgtaactaatgatttattcccaattgaaatcaatgcaactaatatgacctatggtgatgatcaaatcatcaacattacagttcctgccaatgcagacccagataaattatacattaacataaattgtagtgattggcctggaaataaaactgtaactgaattaggattgactattgatgaaaatggtttaatacaaatagatactactaacactaatttatttgcaaataaaatagatgcaggtaattacactattaatgtttattatcctggtgatgatgacttcttatccaacagtagtagtgttgactttgaagtagcaaaagctattcctgaaatgaatgttactccaactaacattacatatggaaatcttgaggatattttagtcgaaattgcccaaaatggtaacgttaccctatatgtaactagtgaaaatgacccaactttaaacattactaagattgaagttgaaattattgaaggtaaagtctactggaatgtaaatgatacatacttgccagcaggcgaatatatggttgaggcaatattcaatggaaacagaaattatgaatctgtaaacaaaacagaaaaattcaatgttaccaaagccattcctaacattgtcattgatgtcgatgatatacatgttggtgacagtgaatacattaatgttactgtcgaaggtgtcgaacatggtaccaccccacaaggtaacattaagatcattgtcagaacaatcgatcaaattgttgaacttaatgccactggccaatacaacttaacattagatgatgaagttcaaggcaatggcataagtgtaaccgtaatttattatggtgatgataattataattacacagaaaaatctgtatactatgatgtaactaaaaaagaaacttccattaatgtaacaggagctactcctatttcatatggaactatagaaaatcttctagctgaagtaaatgaaactggcgttacaggaaccattaccatttatgtaaacagtactgtagatggatttatcaatcaaactcatgtagctacaatcactgttgatgatgcaggtaaagctacttgggatatagatcaaatcatattacctgtcggttcatatgatgttactgcagtttactctggtgatgacaaatttgaaggtagtgtatctactgtcaaagtaatcgttgtagaaaaggctactgattatgacatcagtgtagaagccaataacactgtttatggaactgatcaagtcatcattgtaactgttcctgataatgcaaatggtactgtaaccataaccatagaaggtactgaaatcagcttaacctcacaagtggaaaacggtaaagcagtatttactattccaaatgacctagttgacttcttagaagtacatgataattataatgtaactgcaacctataatggagatgataaatacgcagcaggagtcaaagcaagtgacttattcaatgtaaccaaagctgaatctcacattaaagttgttgcagaagatattgattacactcaaattgaaaacattactgtaatccttccagatttcaatgctaccggtaaaatagtgattacaattgttaataaatctgacaccactcaaatagtcagaactttagaagttgaccccttcactaatactactggtgttatctatccatttgaaggattattagtaggtaattacacagttaaagtcgaatacagtggagaccataactataataacagtgaaaacactactgactttgaagtacgtaaggtagatcctaccctaactgaaaactcaccggatatcatttacggtgcagatgaaaacataactgttaccatcaccggtgctacaggaggtgtggatcctaccggaaccatacaagttattgttgatggtgtaaccattgataccattactattggtgataaagacttagaattcattgtaaccaaacctggagttgatccacaacacaatataactgttatttacagtggagacagcaactataacccagtaaccattaccggtgaatttgctgtaactcaaaataacactattgaaatggaagaagtcagtcctaacattgtttatggtaataatgaaataattacaatcactcttcctaatgatgcaacaggtactgtctatcttgtagtcaatggaacttattacactcctattggtattgatgaaaaccatcaagctgtatttaccattgtagctccaatcgtaggagaatacaacttcacagcttactacagtggagatgaaaactacacagctaataatataagtggtgcattcaatgtaaccaaagcggatgtaagtttatcagaatctcacactgccacaattacttatggtgctaatgatacaattactgtaacaattactggtgttgaaggtcctgaaggagtattagctccaactggaaccattaaggtattggttgatggagaagaaattggcaatgtcaccattggtgatgatttagtatttaactccattaggccatttgtagacccacaacacaacataacaattatttacagtggagataataactataattccaaagtcatagacaataccgtattggatacccttgtattcgaagttattaaaaacaatactcttgaaatcagtgaagattctccagatattttctatactgaaaatgaaaccataactgtaaccattgctggtgatgcaacaggtaccattactgtaacagttggtggagaacaagtaggagaagtagtcactattactgaaataacagaagatgacaaagtattcaccttcaacattacaaaacctgaaggtggagtatatgatgacttaaccgttgtatacagtggagattccaattatgattccgctaccatcaatggtgaattcactgtaagtcctattgatcctaatatcactgaagacagtcctgatattgtttacacaaataatgaagttattacaataactgttcctgaaggtgctaccggtaatctaactgttactgtcaaaaacagcaaaggtgatacagtagagaccaaaaaattggttataggtactgatgatttggttgtaactattgaaaaacctgctgtagataactacactttcactgttgattacactggctgtactaattatactgaaaaaaccattacaggtgaatttaaagtaacaaaagcatcaaatgagattacagtcgtatctaccaatataacctatggacaaactgaaacaataaccgtaacagttccagaaggtgcaacaggtaatgtaacaattaccgttggtacatacactgatatgttagaaattccagaaggcagcactgaagtagtattcactattccaaaaacagctgcagatgaattgttaagtgtaagtgataactatattgtattcgctaactactccggtgacagcaattatgaatccgtggttgcaaatgctcctttccatgtagatcctgctaacactacactcactatagaagttgctgatattacttatggtgaagatgaaataatcaatgtaaccgttaatggagtaactggtggagatattccaactggatttgtaacaatcaaactcaatggtacagacattgaattaaccaaacctgtagatagtgaaggaaaagtacaattcaacgtatcaggattagttgtaggagaatacactgtaaatgctacatttgtatcaagttcaatcaattataatgatagcaataacactgctaagttcaatgtaactaaagcagatgttaaagaagctaatatgaacattacagctattaacatcacttacggtgatgatgaaaccataactgtaatccttaatgaaactaacataaccggaaacgttaccattacaatcaatggtactgaaatcgaaaccaaagaattagtggatggtaaggttgtattcaccgttcctgatttagaggtaaacggatacaatgtagtggctaactactccggtgatcataattataatgcaatacctattggagctaatttcaacacagactttaaagttgataaggctaatgtaactgttgttgttactccagtagatataatttacaaagaaacagaagaaattaacgttactgttactggtgttttcattaacgataatgttaacgacaatttaaccggtaaagtaaccatatacatagatggtgttgaaaatcaaactaaggatattagtgctgttgatgaatacggtatcttacacttcagtgtagaaggattggctgtaggtactcataatgttactgcagtttatcatgatgatagaaactacaatgataacaatgcaactgaagactttgaagtaatcaatgctcttccagaagatatgaaagtaattccacaaaacatcacttaccatatccaaacagaaaccattactgttgatttaggagaagtattaaacggaactgtccaattgtacataaacgacacattagtcgctacatttgaggtaatagaccaaagaacagtaagctacaccaataatagtttagctgtaggaaactacaccgctaaggcagttttcactgcaaatggtgatttcgttaacgctagtgcaaacttcactgtatctaaagcccctgtaactgttgatgtagtggcagaggacagtgtttatggtgaaactcaaaccattaccgtaaatgttgataatactgttccagataaatacaacctaacaggtaatgtaagcattacaattaatggtgtggattatggcaataagactgttgatgctaacggacaagcagtatttgaaataactggattggaagctaatgataactatcaagtaatcgctacatattacaacgatcctaactatctagacaatactggtcaagatacctttaaagtaagcaaagctgatgtaaaagatgtaaataaaaacattacagctattaacattacttatggtgaagatgagaccattacagtaaccttaaatgaagataacattactggaaagattaccattacaatcaatggcactgaaattgaaactaaggaattagaagatggtaaagttgtctttacagtaaaagacttagaagtgaatggatacaatgttgtagctaattactctggtgatactaactataatgctttcacaatagctgataacctaaatactgactttactgtaggaaaagctaattcaactgttgaagttgaagctattccaagcattgtttatggcaacaatgaaaccattactgtaagtgttccaattagaaaccacacaggtacaattacccttacaataaatggcagtgactatgtatttgtaaaacatctaactgctgaagatggagatacaattgtactaactaatgtaagcggtcttgctgttggaaattacaatgtaactgtaaaatatagtgatgatagaaactacaacgatagtgaagcttctgcattattcgaagtaactaaagcaactccaagtcaaattactgttgaagctcaaaatatcacttacactgaagatgaaataattctagttaccgttgctgatgaaaacgctacaggcagtgtgaccattacaattgatttaggagattccacttacacaaacactaccaatctggatgaaaatggacaagctaaattcaatgtaactggtcttgtagtaaaccactacacagttgtagccaattactctggagatgcaaattacactggtcaaactgcatctgctccatttagagtggataaggctgcttcaaatgtaaccatagatgtggctaacattacttatggtgaaatagaatatgcaaatataactatacctaactataacgcttcaggtagagtaattatcaaagtggatgataaagcttatgatattttaccaatcaacaacaatactcctgtaaaacttgaattagatggtttagctgttggaactcacactattgatgtagaatacttcgatgatgataattacaataaatctgtagcacatgtagaatttaatgtaactaaagccattatcccagttgatcctgctaatgcctcttcattaatagttctaccaactaatattacttatcttaacaatgaaaccattgttgtaagcgttggagcaaacaatgctacaggtaaggtaactataactatcaaagataaggatggcaatcctgttgatatcgatccatctgttgtaacaagcaaaaacatcacagaagaaggttcacaatctgtaactttcactgttccaggtcttgcagtaggaaattacactgtagaagttgattatacagatgatgcaaactatgaaaacgctcaaaccagcgctaaatttattgttgacccagctaattcaactgtaactgttgaagcggttaatatcacttatcttgataatgagactatcactgtcactgttcctatcactaatgctagcggtacagttgtaattaagataaatggcactcaaaaagacgaaagaactgtaagctga

SEQ ID NO: 962 - DNA, 8160 bp, Methanobrevibacter ruminantium
  source 1..8160: mol_type = genomic DNA
gtggaaggattagctgttggcgaatataatgtgactgtagaatacagcaatgaccctaactacaacaacagcaatgcatctaccttattccatgtggataaggctaatattcctgatgttccaaatactgaaggtcttgttgtaattccaacaaatatcacatatcttgaagatgaatccattacagttactttagatgttcctaatgcaactggcaaagtcactatcaacattaatggaaccgacattgaaactaaggagattggcggtggcactgtaacattcactgtttcaggccttgcagttggcgagtataatgtaactgccaaatacactgatgatccaaattacaatgatgtcaatgcttctgcattgtttaatgttagtccagctgcttccaatgtgactgtagttcctacaaatatcacatatcttgaaaatgagaccattacaattagcgttaacgtaactaatgctacaggtactcttgtagtcaagataaacggcacagaagtgaacacaactacatttacaggtgaagataagccaactattgtagtaactgttccagaccttgcagtaggcgaatacaatgtaactgtggaatacatagatgatccaaattacaacaatagcgatgcatctgccttattccatgtagataaggctaatattcctgatgtcaacccagatacaggcatcgttgttgttcctacaaatataacatacaatgatgatgaaactattaccgtaactgttaatgtaagcaatgctaccggtaaggttaccattaagattaacgacactgatatcgtattaagcaagaacattactgaagacggctcacagactgtaacattcaatgttccaggccttgttgtaggcgactataacgtaactgcagaatacacagatgacgctaactataatgatgtcaatgcttctgcattgttcaaggttgaaccagctgcttccaatgtgactgttgtgccagtaaacattacttatggtgaaaatgagactatcacagtcagcgttgatatcaataacgctacaggtaatgtaaccattaagattaacggcactgctgttgaattgactaagaacattactgaagaaggttcacagactgttactttcaatgttccaggtcttgcagtgggcgaatataatgtaactgctgtttaccatgatgatgttaactataatgaaagcaatgctagtgcattgttcaatgtaaagaaatcagctccagtcaatctgactgtaactgctactaatgtgacttatggcgaaaacgtaaccgttaccgtcactgttccagatgacgctactggcaatgtaaccattactatcggagattacacagacaagaaggaaatcactcctggatcaaacactgtcgaattcacagtaccaaatcttgaagtgaataactatgttgtctatgctaactactctggtgacagcaactatgaaagcggcatcgtaaatgctccattccatgttgataaagctaattcaaccgtaatagttgaagcaactaacataacctatggagaagatgagacaatcactgtaactgtccctaacaataatgctactggatgggtaactgtcagcgtaaacggtagtgaaatcggctctaaaaagattggcacagatggaaaagcaacattcacagtcaaagacttagaagcaggcgaatatgaagtaaccgtaacatatgatggagatagaaactacaatggaaacaacaaccttacaagattcacagtagataaggctaacattactgaagataatataactgtagttccaacaaatatcacatatcttgataatgaaacaatcgctgtaactatcggcgtaaacaacgctacaggcatagtaaccatcaagataaacggaactaatatcgaattaagcaagaatattactgaagatggttcacagactgtaacattcaatgttccaggccttgttgtaggcgactataatgtaactgcagaatacacagctgatcataactataatgacgtcaacgcttctgcattgttcaaggttgaaccagcctcatcaaatgtgactgtcgaagcggtaaatatcacttatcttgataatgagactatcactgtcactgttccaatcactaatgcaagcggtacagttgtaattaagataaatggaactcaaaaagacgaaagaaccgtaagcggagacaatccaacctacaatattacagtagggggattagctgttggcgaatataatgtgactgtagaatacagcaacgaccctaactacaacagcagcaatgcaagtaccttattccatgtagataaggctaatattcctgatgtcaacccagatacaggcatagttgttgttccaacaaatatcacatataatgatgatgaaactatcactgtaaccgttgatgttcctaatgctactggaaatgtaactatcagaatcaacggaactgatgttgaattgactaagaacattactgaagatggctcacaatctgtaacattcaatgttcctggccttgttgtaggtgactataatgttactgtagagtacacagatgatgctaactataatgacgtcaatgcttctgcattgttcaaggttgaaccagctgcttccaatgtgactgtagttcctacaaatatcacatatcttgataatgagaccattacaattagcgttaacgtaactaatgctacaggtactgttgtagtcaagataaatggcacagaagtgaacacaactacatttacaggtgaagacaagccaactattgtagtaactgttccagaccttgcagtaggcgaatataatgtaactgtggaatacactgatgatcctaattacaacaatagcgatgcatctgccttattccatgtggataaggctaatattcctgatgtcaacccagatacaggcatcgttgttgttccaacaaatatcacatacaatgaagatgaaactatcactgtaaccgttgatgttcctaatgctacaggtaatgtaaccattaagattaacggaactgatgttgaattgactaagaacattactgaagatggctcacaatctgtaacattcaatgttccaggccttgttgtaggtgactataatgttactgtagagtacacagatgacgctaactataatgacgtcaacgcttctgcattgttcaaggttgaaccagctgcttccaatgtggctgtagttcctacaaatatcacatatcttgataatgaaactatcactgtaaccgttgatgttcctaatgctactggtatggttaccattaagattaacggcactggcgttgaattgactaagaacattactgaagatggctcacagactgtcactttcaatgttccaggccttacagccggcgaatataatgtaactgcggtttaccatgatgatgttaactataatgaaagcaatgccagcgcattgttcaatgtaaagaaatcagctccagtcaatctgactgtaactgctactaatgtgacttatggagataacgtaaccgttaccgccactgttccaaatgacgctacaggcaatgtaacaattacaatcggagattacacagagaagaaggaaatcactcctggatcaaacactgtcgaattcacagtacctgaccttgaagtgaataactatgttgtctatgctaactattctagtgacagcaactatgaaagcggcattgtaaatgctccattccatgtagataaagcaccttcacatgttgaggtagatggaatagacattaattacactgatttggaaaccattacagttactgtaagcgataataatgccactggatttgtaaccattacaatcaacggcactgatattgaattaactaaagaagtttctgcaggtcaagctgtatttgatgtaaaagacttggttgttggagaatacaatgtaactgctgtatatcacagcgatagaaactacttgaacagcactgcttccgatacattcaaagtagataagtcagatgtcaagaacatgaccataagtcctgtaaacattacttatggtgaaaacgaaacaattactgtaagaatcactgataataatatcacaggcaatataaccatttctgtaaatggcactgaatatggtcctgttgaacttgacaatggtgttgcagtctttaatgttcctggattgattgtaggtgattatgaagtaactgctagctatagcggcgattccaactataatcctgcaagctcaaccgagacatttactgtggataaggagaaaccaaatgttcatgtggtctctgaaaacattgactatggaaagaatgagacaattactgttattgtagatggatttaatgtaaccggcaatgttaccattaagattaatggcacagagatagcaactaaagaaattaatgataaaggccgtgcagtatttgttgtacctggccttcaagccggtgaatatgaagtagttgccatatataacggtgatgataatcatgaatcttccgaaggcagtgatacatttacagtagctaccgtcactccaaacatggatgtggaaactgaggacatcgattatggcgacaatgagactataacagtaacccttcctaaagatgcgaaaggtagtgtaaacataaccattaccgatgagaatggcactgttgtttatgaaggtgaagctcagcttgaagatggcaaggctactgttgacgttccaggcatcacaccgggtccatacaatgtaactgtcaagtatcctggagacagaaactataatccaaccaataagacagtcagattcaatgtagataaggtagttcctgatgtcgatgtcgatactgttaatattgattatggcgacaatgagactgtaactgttacagttaaccctgttgatggtggcgtcactcctacaggtagtgtaaatgtcactgtcagagattctgatggtaaagttgtttatgaaggcaatgtagatcttgttgcaggcaaggctacccttgatgttcctgatttaggtgcaggagattacactgttgatgtacgctatggcggtgattccaactacgatgattcaactggaggctcaagcttcaatgtagctaaagtctctcctgatatggatgtgcaaactgaagacattgattatggcgacaatgagactgttactgtaacccttcctaaagatgcgacaggcactgtaaatgtaaccattaaggataatgacggcaatgtcttttatgaaggtgaagctgagcttaaagagggcaaggttactgttgatgttcctggtttgcctgctggcgattacactgttgatgtagcctatggcggtgatgataattacaacccagtcaatagttccgatagcttcagcatagataaggtaagtcctgaagtcgatgttggtactgaaaacattgattatggtgacaatgagactgtaactgtcacagttaaccctgttgaaggaggatctgctcctacaggcactgtaaatctaaccgttaaggatagtgacggcaaagttgtttatgaatgccaagcagaccttgttgaaggcaaggctactgttgatgttcctggtttgcctgctggcgattacactgttgaagttgcttatggcggtgatgagaattacactgctacaaactccaacggaaactttgctgtaggtaaagttaaccctgatatggaagttgatggtgaagacattgactatggtgacaatgagactgttactgtaacccttcctaaagatgcgacaggcactgtaaatgtaaccgttaaggatagtgacggcaatgttgtttatgaaggtgaagctaagcttgatgatggcaaggctactgttgatgttcctggtttgcctgctggcgattacactgttgaagttgcttatggcggtgatgataattacaacccagtcaatagttccgatagcttcagcatagataaggtagctcctgaagtcgatgctgacactgaagacattgattatggtgaggatgagcctataaccgtaaccattgaccctgttgaaggaggttccactcctactggcactgtaaacgtaaccgttaaggataaggatggcaatgtcgtttatgaagaccaagtagatcttgttgatggcaaagtcaccctagacattccagatttagatgccggcgactacactgttgatgtggcatacagcggtgatgagaattacactgctagaaactccagcggaagctttactgtaaacaaggcaaaaccagaattgaatgtagattcagaagacattgattatggtgatgatgaaaccattactgtaagccttccagaggatgcaacaggcactgtaaacataaccattacagataaggacggtaaaaccaaggtattcaatgatgttcctattgaaaacggcaaggctacaattagcgttcctgatttggatgctggagactataatgtaacagtagactatccgggagatgataattaccttggctctaaagctacttcaagctttaaagttgtcagatcaaacagcaatatcactcttgagactgagaacatcacatatggtgacgaagagcctataactgttgatgtaaatccagtggaaggaggagtcactcctaccggtactgtaaacataactattacagataaggatggaaatactaaagtattcaatgatgttcctcttgaaaacggcaaggctactgtagatgttcctgacttggccgctggaaactacatagttgatgtaaaatactccggtgatggcaattacgatccagatagcactgaaggagcatttgaagttgcaaaagcagttcctcacattgaaattcatgtatatgacatttactatggcgatgtagaagtgctcactgtcacatgcgatgctccaggcactgtggacatcactgtaaatggagtcactgtaacagtacctcttgatgacggatatgataagcgtgtattcagttcaattgttagagcatacagcggcaaggcaactcttgaccttgtaaacttggctgttggcacataccctgctaaggcagtctataacggaaatgaaaactacacttccgtcagcgacaatgacactttccatgtatacaaggagaataccactaccaagatatctgtagatgatatcaagctaggtgaagatgcagtgattgatattgaagttacccatgaagacggctctgaaaagatcaatactaacataactgtaactgtcgatggaaaagattatactgttgagctcattgatggaaaaggcactttaaccattcctgatttggatcttggaaaacatactgtcaaagcggtatatcctggaagccacaactacacaaacagttcaaacgctaccagctttaaagtgacaaaagttactccaagcttcgatatttcaactgaaaacatccaagtcggagatgatgaaaccgttactgtaactcttccagatgatgcaacaggaaccgtaacccttaccattgacggcaaagaatatactgctacagttgaaaacggcaaagctacatttgttattcctggcattaaggcaggcgaacataaggtcaatgttgcatatagcggtgatgacaagtacgcccctgctaaaagaagcgacagctttacagtaagcaaggttaaacctgatatgggcatggacgctcctgaaatcaaagtaggccaagacggcgttataaccgtaactgttccagaagatgcaacaggtacaataagcattaccgtagatggcaagacttacactgcaagcattaaggatggcaaagcggtattccatatctctggattaggtccaggcacacatattgtcaaagcctactactctggtgacggcaagtacttggctggctctgttgatggaaccattgttgtagagcctaagaacggtacaagcccacaagataagggcaaagctcatggtggtattgatttagaaagcaaaaagaccggtaatccaatattagtattgttcatggtattgttcagcttaattttaatacctataaaaagaagaagagatgatgatgaagaagaggaaaatgaagatcaaattaatcgtatagattaa

SEQ ID NO: 963 - DNA, 1026 bp, Methanobrevibacter ruminantium
  source 1..1026: mol_type = genomic DNA
atgtcaagtttaatttcaattcctactttgcctttaattgttatcgcattgatatgtgggattctttcatttataagtactcgtttggttatgccttggcttattggtaagcttgagcaggcggaaattattggaaaggacattcataagtcctcccgtcccattgtagctgaaatgggtggtattggtataatattcggattcatcatagggatctttgccggaataattctctttccagtattgaccttccagcttgtggttgtccttctggttgttcttcttgttggaatcatcggcatggttgatgaccttattgtattgtcctcaaaggagaagctattccttctctttttggcaggcataccattatggtgggttgcccctcctaatgtaggccttctatatatgatcatgattccgatagcagtatcaatcacctcaaaccttaccaacatgcttgcaggattgaatggaatagaatcaggccttggggttatttcaatgacctcacttacaataagctgtatcattcttggaaagtatgacgttgcgattataagcatgacaatgcttggaacccttcttgcattcctttattataacaagtatccggccaaggtttttccaggggataccggtacccttatcattggggcgacaatcgctgcaattgcgtttattggaagggtaaagctcatagcattcattgtccttctaccgaacattatagatgcagcgttaaagttctacagtgctggagttatggaaaggcagcagcacaatccgactcagcttaatgaggacggcaagcttgtaaggccggagcagggattcaaatcccttatcaggcttgtattgagaaagccggtggatgaaaagactgctgtgatgatgatatggggaataggcattatttttggtattcttggtataattgttgcactgctgatgcctggggtaactcatgatcagacatttgcacagtttatacacttgaaagattatttctattatttgggctaa

SEQ ID NO: 964 - DNA, 141 bp, Methanobrevibacter ruminantium
  source 1..141: mol_type = genomic DNA
atggctagaccaattagcccaactcctactttgtatggtgaagatgctaggaggtttttaaagaaaatgaatgaacctccaacagaaaaagaaaagaaattttggaaagaagtagaatcacaaaggtttgttcctttttaa

SEQ ID NO: 965 - DNA, 225 bp, Methanobrevibacter ruminantium
  source 1..225: mol_type = genomic DNA
atggatagtcagtacattaaagataattattattttgaaactttaaacgaaagccacaatttaaataatttttattgtgaagatgaagaattgaatgaatttttaaaggaagacgcattaaaacaacaaaaacagaaactaaatttaacaaaattgattatatgtgatgacgaaataattggttttgtaagtttactcagatggaataagaataaaagatattaa

SEQ ID NO: 966 - DNA, 507 bp, Methanobrevibacter ruminantium
  source 1..507: mol_type = genomic DNA
atgataaaaacagacaataaaggacagataacagtcgaactgctccttcttttaagctttacattcataagcatcatagcccttacaaacatcataagcgatgcaaatgaggtaaacatagccatggctgcagcaagaaacggagcattcgaaggagcttcctcaaacggactggcaatctatccaaaggacacctttgacaactattcaaaggacaagagaaaggaaggcctattcaatatgaaaaacattaagataataaagattgcacagacctttaagggaaaggacaacttcaataaaacgaggatacagctaaaggtctatgcctcatcaaagatcataaaaacaaaggaagagaaggagtctgcaggagatcgtataaattacaatatgagaagagcaatcaccaattcatttaagacggaaaatataagcaatagactatttaatcctgccttttcagacagctatagttttacaactgcaaatgtggaatgggtttga

SEQ ID NO: 967 - DNA, 465 bp, Methanobrevibacter ruminantium
  source 1..465: mol_type = genomic DNA
atggattcaaaaggattaatcaacatagaacttttattttgcacaatcatcatagtcatgattctgatagtgaactttcctatcctagagcatagcatagattctgcaaatgatatggatgaaaactcccaaggccgatttttacttaattcgatatcaactagcatagatcaagtaaatagcaataatgaaggattttcaaagaaaataaaacttccccaatctgttgacggaaactattatacaatacttgtaagcagcaatgaaataatattggaattcaacaacaagaagggaaaagctaaaatccagcccataaatctagttgattcaaagaaccgaacattaagcaaggcgcaattatacaatggaggaagctacataattaaaaagaccctaacaaacaataatgagagccacatctataatcaaagttctataataatcatgcaagtagaaggataa

SEQ ID NO: 968 - DNA, 1344 bp, Methanobrevibacter ruminantium
  source 1..1344: mol_type = genomic DNA
atggtgattgtttcttatttaaatccactgtcttcagagggccaaaacatagtcagaggactctctagtcttgacgacatattcgcccctaatgatgaccttattgacatagtcattcatagccctcgtcagaccatttcaaatcaggaatatgtgccagagactcttgccgacttggccatcaacagaatcaaatggtatatcgacaaaaagaacaataaggatttcaatccaagcaattacgcctatttttttaatgaagagattgctgaatatgacactatcgcattccacatacttgcccaggctgttgcaagccaatttagggcggggtctcgtgagataaagctttttgtcgaatcctatggacttcttgttgaggacagattgataagattacttgaaacagaaaaaagagagcttgttgaagagatattaggggactttcttgttcaggacggcatagaatgggccttcctgaaggacttagttgcaagcaaaagaatctcccttacagaccttgtattggataatggtaagatagtccttgacagggaagagtttgtctatacattcggcgatgagttcactgaccgctctccagagagaatctatgacatcctaattggagacggccttaaggaaatgatcgtatccaagcttctcattcaaaagtcagaggaatatgttgcacatattcaggatatgcttagaacaattgagccacaccctgccattgtaaggcttggtgagatgcttggcgagacaattacagagcttatgacaaagtacagcagcttctatgcagctggaggagcctatggtaatatggaaataggcaagctagtgagggaagcattccctccatgcattgcaaacaccgtcgaaggggtctcttcagggggaagaaacgatgctatagtccttcttcttacttcatttgtttcatatgcaaggctttatcctggaatattcggtgcagatgccagcgtaaaggtttcagacattgactcaaaccttaacatcacaatgaatgagatacttcctttgatatatgaggcagcggataactgtactcctcccttgtttgaggaccagccacaggagaagataaacattacttcaaaattaggctttgggatgcatgagactccagagctggagcatgaaggtgagacaaagtggtacactcctatgagctgtgaaaagattaagatgcatcttcctcagctgtgcaaggagaataaggattgcgctaagataaacaatccattaagctattattctaggatgaggtggattctaagcaagaaaggtggagaatctaaatctgaggaagaatag

SEQ ID NO: 969 - DNA, 2484 bp, Methanobrevibacter ruminantium
  source 1..2484: mol_type = genomic DNA
atgttaaatagaaaggctttgattttttcattgattgttttatttatgctatccatttctgctgtttcagcttcagataatacctttaatgagggcactggtttaaatgaagatattgctgatttaaatgatttcagtgatttaaatagcaattttaataatggacttagttctaatgctgttcatggtctagatgatgattctaataataatttatcatctgaaaatatgatttcttcatctgatgatgaaaaacaagatgatttagagggttctgattcagattcaattaaagacaatctcaattcaaattctatcaaagaccaaaacaattctaattctagtactgcagacaagtccaatacaaaaatccaaactaagatctctgcaaaggacatcaatacatactataaggaaaaatcaagcctagtattatatttaaaggataataaaaatcaggccctttcaaacaagacaatcaaactaagcctcaacggtaaaacatatgctcaattgacagataaactgggaaaggcctcattctctctttatggccttaaacctaattcatatgatgcgaagatagaattttatggggatgatgattataagaagtctgttaggactgttaaagtcaatgtaaagaaggtagatatatcaatcaatacaaaggacttctccacatatctcaattcaaacatcttcttttctgtaaaggtcttaaacaagcttactaaaagtcctgttgaaggcatacggattcagttcaatgtttattcatcacagaaaaactataagaactactatgccctaagcgataaggatggaatcgccaccttaaagaagaacctaaaactaggctcatatgatgtttacacatatgtaaaggatgatggccaaaaggactatataaattatagaaacacaaaaaataaggtctcaattaagatatccgctcctggagagatgggatgctcatcaatctatatccatgtaaatgagaatgaaagcgctgtcgcctttagaagggattccacatatgcagctgacttgtatatagtcgctcaaaagtggcatggaagaaatgcagtgaagcagtataagcttactggaacctactttttccatgctatcgtcacttcagacggatggctggtaggaactggaggtgcagacaatcctacaatcaataagaagatagaaagccttgcaggtcagatggtctcatccaataacattcaaaattccaagcttaatacaattagaaaatatgaaaggtcattaggcataggacactttgcaatagtggatcctaaaggaaactatgccattgtttggaaaagcggatatgtgaagggaaagctgaagaatggccaatatattgatgttcctaattcaagaggcatgtttagaaagggaagctataagagcttttcaaaggacactgcaactgcagcattaaggattgcagctacagacagatttggagtaaacagaagggacatcactgttttccattataagagaagcactaagaactaccagacaagcgcacaggtgaaagcctatgctgcaaacgataagggaaaccttgcaggaagacgcactggaggaaaaagcgataacattcattataagaaaacctatatcagcaggtccaagcttccgggaactcctaataaaaagctccttggaacccacagctttggaaagatcgacacccttataaagacccaaactaaggtttcagctcctgccctaactgcaaatcagaatcagaccaaatactttaaggtgactgtaaggaataagaagacaaataagaccttaagaggagttaaaattagtcttaaggtttatacaggcagtaagtttaagagctatgctgtgactaccaataagagtggagttgctaatttcaatacaaaggctttaagtgcaggaactcataatgtgaccataagccaggccaatcataagtacatagtttctggaagttctaagatagttattaagacggttaaaaagaataatactgttaattctactaattctagtgttgttaatggttctggagtaaatggtagttccagttctaatgctagtgttaacaatgcttctgagcctattaataattccacaacagacaattctagtgagaataatggttctgcaggtaatagttctagttctgatagttctgtaggtaatggtactgcttcagatggttatgtaggtaatggttctagttctgatagttctgtaggtaatggtactgcttcagatggttctatgggtaatagttctacttcagatggttctgcaggtaatggttctaattttgcttctgttttagatgtttctgcagctatcaattctgattctaatgttggaaatgacagtcaaagcaattctaaaactgaaacaaaacttagttcaatgaaaacagatattttaacaagttttataaaattaattaactaa

SEQ ID NO: 970 - DNA, 294 bp, Methanobrevibacter ruminantium
  source 1..294: mol_type = genomic DNA
atgaacatgtcatttgaggaatatgcagtaatggcaataaatcaccacattgaagagagaaataaatatttgaaaaaagagatcaaagcaaaagaggaagaaatacaagcaatagacgaaaaaatacaagcaaaagaggaagaaatacaagcaatagacgaaaaaatacaaacaaaagaggaagaaatacaagcaaaagaggaaaaaatcaataaaataagaaaattatttaaagacttctgtgaaaatgaagacgaagaagcaatgaataccattaaaagcatattattataa

SEQ ID NO: 971 - DNA, 1107 bp, Methanobrevibacter ruminantium
  source 1..1107: mol_type = genomic DNA
atggtgaatttaaaaaagttaaatcaaatctcaaccgaaaataacaatacagtatcatactacgaaacagaagaaggcaaagtatataaagtattagtagatgaaaatggagaattaaaaaagattgcctgtgaagaatttccttttgagcctgcaaagcaatttaaaaaggagaaaattaataaagtacatgacagaatcttcaagttcattgcagagaacaatatacaggcatttttgaatgtctttggattaaagcatataatattcaagcaattcttaaatgttgaaatcttagatcagacattgaaccaaagctattgcgacttggtaatagaagctgaagacggaaaaatctacattatcgaatttcaaagctcaggccctgcaaaaaaggataagataagatttggagactatcagacgaccctgcacagaaaaaagaaggggcagaaagtcatagttataatgataaccataaatgatgatcccgataatgatgaaccatatggatatgataaggagtatcgctacaggataaacaagagaagcacaacctgctttaacacagagaaggtgattaaggagttggagtttaaggctgagaacgattgctttgatgatgaggcatatgtcaaactgcagctactatattatatggaaagcaatggtgatgaacgaaaaaaactattgaaaaaaggagttgaaataaaaaacaagataaaaaacctatcaacagacagaaaagttggattgacactgatatacatggctttagcagtccataattttgaagaagaagaactagaaagattcaaggaggaacttaaaatgaacatgtcaatagaggaatatgcagtaatgggaataaaccaccacattgaagagagaaataaacatttgaaaaaagaactcgaagaaaaagacaaagagcataaaaaagaactcgaagaaaaagacgaagagatccaagcaaaagacaaagagcataaaaaagagatccaagcaaaagatgaagaaatcaataaaataagaaaattatttaaagatttctctgaaagcggagacaaaaaagcaatgaatacccttaaaaccatattattatag

SEQ ID NO: 972 - DNA, 492 bp, Methanobrevibacter ruminantium
  source 1..492: mol_type = genomic DNA
atgctaagtgaagaagagctcaggcgacttatagaaagccttacaataagggagattatagagcctgcattggacaattggaccaggtacgaatcaaccggaaagaccgtcattgaccttaaaagcggaagggtctatggaatttcactaaaatcaaatgagctgttggagctggaccatgacaacaatcacatagagctctataagatagaaagccatgaggacctatttgatgaggaggaccttctaagcgaggacgaatacaataggtttcaagagttcaaggatagaaaggagcttgaggatgaggactttgatgactatgatccagagcttttaagcgaattctgcatgatggaatcaatagatgagaaggaaagaatcatttccatcctgattgaagactaccaggagtatcatttcaataactatcaggactttgagcattccattatcctaaactattatgatgaggatgactatacctattaa

SEQ ID NO: 973 - DNA, 993 bp, Methanobrevibacter ruminantium
  source 1..993: mol_type = genomic DNA
atgtatggtccgtcaagcttggcagaaagaagaatatattacagagaggaatggtcggataaggaccttccagacttcatagcccaaggaatcaccaaaagggaattcggtttcgaccatcttggaaacggtcctaacgacagatataaggtcttcaagggaacagacaccctaagaagattcttaagatacaagacaccatttgcagcatacatttcagtggccttctatcagaaccctagaaagaggggaggctgggaaaaggcagaatacatctttgacatagacgccaaggaccttccaatcagatcatgcaactgcgacggagtatgcgagatatgtcttggagaggccttggaaagggtcaacataatgcttgacacattgaagggagacctgggattgaagaacatacatctcatctattcaggcaggggatttcatataaggatattggatcccgatatgatggaggccgacagcgacctgagggctgaggtattgaagtatgttgctggagctgaggttccaagggcacagtatcctaacatagtccctggagccaagccattgaacttcgagcacttctccatccctatagcatatcctgcagtctttacaaacaaggttaaatataatatattccaccttaggggagatgagacaatagatggaataaacaataggctccttaaggacataataaaaaacagggaatttcttattgacgacaagtggggactctttaaggaaaggataggtccaaggagatataaggatatggtgaatgcgatggcaagggtgaaccttgccactatagatgcaaaggttacaatagaccttaagagaattttgaggctgccgtcatccctccactcaaaggtaagcatgaagtgtgtggaggtaaagaatcctgagaccttcgatccattcaagcatgcagttcctaagtttgtatatgagagaaaggatgaggagattgctcaaaactag

SEQ ID NO: 974 - DNA, 399 bp, Methanobrevibacter ruminantium
  source 1..399: mol_type = genomic DNA
atggataataaagcgataattggaattgtaattgcattgattgtaattgtccttgcatgctttgcttatgtgacatttaacggaaatgctccaatttcattgaatgtaactgaaaatataacaaacaatacagatacaagcgtagacactacagacaatgccaccctcgtatcacaagacccaaataatgattctgaagttaaggacattgctaagaatgtctctgaaagtatatcagagcaaaataaggcagttgccgattctggagacaccttgcataaacagactttcacagtttcagaaaacgaaaccggtcaaaatgagggcatggaacctggaacctatgtgatgtattatactgaaaatgatggtcctataaaagttcaaaagatagattag

SEQ ID NO: 975 - DNA, 303 bp, Methanobrevibacter ruminantium
  source 1..303: mol_type = genomic DNA
atgtctaaaagagttctagtcagttttgcattaattttcatttgcttattttctataagcgcagcctgggctttagatatggattcgagcgatttaaataagaatataggcactaatttagaaaataactttaacacagattcaaacaacaatttagacagtaatttaaactctaattttaacagcaatttaaacagcaatatagataattccacccaagaattagacttaagcactaaaaatttcaaagccctaagctctaattcatcaattgggggggggcaaatagctctgttaatttaa

SEQ ID NO: 976 - DNA, 4473 bp, Methanobrevibacter ruminantium
  source 1..4473: mol_type = genomic DNA
atggatggatcttattccaatctaacaaatctaaacttttatacaaatgcaacaagtgagaattccaattatcttacaccaatctacatcaacgaggcatcagatttggtcattgaaaacaacccaatttatatagactattctgatggatgtaactacaatctagcgggaatctatgcatttggtgcatccaataataatataataggaaataacagaatatccatctattcaaggtctctaagcaatacatcaaaacattacatttatgggatagacttctcttcatattcctcaaatgcctattctaaagataatgcgaagggaaatgacatatcatcaaatacaatagatatcatttctgactattatgcaaatgcaattacattgtcctgtgcagttgacaccactcttgaatcaaacagcctccatttaaaatcagattcatttgtttatggtatggttgcagagtattttgactttggaaatggtttgaatccatcaaataactttaattttacaaaaaacactattgaagctagctcaaatatggtatatgccattcaattctttaatgtatttgatgttaatattaaggaaaatacaatcaaaaccaattccaacggtagttatgggataagtgcatatgagtcttataatcatgatataggatataacaatctttttgtaaatggaaatgacgtttcaatgattggaactaattttgatgccataggaactggccatagtggaatatactatatgagggattcacatgatttaagcattcatgacaataatgttttatccaattactctcttgggggagattatgcaatcaggttcgatgcaagctccagcgagaatataaatgtttttaaaaataatttaagttctaataatggaaagtatctaggaaatgatgcagttaacggtaatgtgactgtttctgaaaacaatcattattatggagataatgatcttggcactaatgatttacgtatttttgacatctatgttgatttgaatggaaatgacaataagggagacggctctataggaaagccattcaaatccattagcaaagctttgtcctatttaaagaatttaactaacatttatggttctagtgcttcatctagttccaccactaaagtaaaaggcataattcatctaggtgaaggtaaatataatggctatggaactaatttgagaatatatataacaggtttggatgtggaaatatttggatctggctataataagaccattattgatggagtgtcttcacactggttctttgatatttcagaagattcttcagtttctataaaaaatttaagtcttgcaaatggagtttatcgttataatgatggaggattgattcacaataaaggtaatctatatcttgagaattgtatttttgataatgcaaagatgtctcctagttctgcaatcatttataatgatggcattttaaatttaaagaacaatttgatgaatatgactgcaaatggctatcatatatataacaatggatttattgatggtttgtatttgaattttattggagacagccttagtgaagatgaaagattattgaatacagattcccttagcttcatattaaccgcatatgttcatgatgacaatggaaaccctataactggaggctatataagattctttatcgaaggcaaggaaatattggtaaattctagcctcattgaaggtttggctaaattatacacattctcttccttaaatggaatcatcaagatatcaggatactattcaaatgcatataccaatctttttgtcaatattgggaaagtaaacagtagcatcatcagcgatacaataaaagtttatgttaattacagtgctaatgaatcaaaatcagacggttcctttgaaaagccgttcaagagtataaatgatgcattggatgctctcaacacatgtatagaaccggttactatcactgttcttgatgatgaaactacagaacagattgacgattcaagattgaataggaataatgtcattacaatagaatccattaataagacaaacatttcaactaattggacatttaaatcagatgcaaatatccgattgaaaggtcttatttttgatggctatggattagttaaggacaacacttatttgacaatagataattgtttgtttaataatactcctgcaagtgctatagtgtctacaaatggtagtttgactcttttaaattctaattttacaaataacaatgtaaaggacaatcacacattctacacaggctttagcacccctgtaataactacttctctttgggacattcagtatgattatgataagggaggggctgtggataattccttttccaatctaactattttaaattgtaatttcgcttttaatgaggcttataatggaggagcaatctttaacaatcaaagcgatcttcatatttcaaattcaagtttcacatctaatcttgcattcagcggattttatgaaaatcctcgtgcaatagacttttcaaatgcaatggataaggatcaggaccgtaatgtcgcaagcaagggtggagcaatcttccagtatcttggcgaagaagttgtagtaaccgacactggctttttaaataatactgcggggggctatgggggagcattttattcttctggcatctatccttataggaatgacagttccagcatcattgaaggaattccattcattgtttatgaaacagaagatggattgatggataattttggaaattatgctgataatcttttatctccacaagacatatactttataaactgtaattttgattctaatgtggctccaataaggggaggggcagtttactgcattaataattcccaaacccaatatatttcctgtaattttggcaataatcttgtttatacttataatatgtcccaactgtttggaggattaaataagaattcccataggaaatggatttttgaagatgaattggaccaagtctacagcatcttcttcaccgccgtaaacaatggtggagcgattcatgatgaaaatttaaaaattattgacagcacattcactgcaaacacattgcaatctggaggttcaattcttctcccttcagtaatccgctattccgctgatgtctatactttgcctaaaaacactgcaggcgcaatcatcactaattcaggcaaagggggagaatcagtctatgtggcagactcttcattgctcacatctgaagattcaaaatatattggaataaatggatggacaggcactagcacaggaggttcaatcagaagaatcatccatgaaaacggccaagaaactggcactggcggaaacggtagcggaacaggaggttctggaaatggttcaggaacaggaaagggggcttatggaaattcattgtcttggagcgatatattgtctgcattgggcggtgacgctcgaggcattgcaattaatggcgaaggatccagcttttctgatttcattagtggtttgataaatggaaaatcctcttcaaattcaagttctgatagtcaggataatggttctggctcttccaattcttcttctcaaaatcctgttaatggaacaatcccttctaattcaagttctgatagtcaggataatggttctggctcttccaattcttcttctcaaaatcctgttaatggaacaatcccttctaattcaagttctgatagtcaggataatgtttccagctcttctaattccagttcaacaaaacctatggatgattcaaacaagactaattccacttctgatgttccggctaatgatacagtaaatgccactgacggtagttctgactcttcaatttctgaaaatcctgtaaatgggactgcttctaatgataataattcctctgatgtcaatggcggagcttctgatatggatgatgataatatttctaatttaacaaatagcagttctgagattccagttgatactaatattaatgatactaacaattcatcttcagaaaattctaattcaacaactgacttggatgattctgaagataaatctgatgtggataaggatgataagagcgaatctgatgatgtcggacttagcgataatcctttaaatggagatgtttcagaaagttctgatagtccagatagtccagatagtcctgatagttcagaaagttctgacagtccttcaagtccagatagtagttcaagtgattatcaatcaagttcttcagcggcatctcctggagatagttcaaatagtccttcatcatcatcttcttcaagtgcatataagatttatgaagaggagattgatgataatattttggaaaagaatgttgaccttgaaaatcttttaataattattgtcctgtttttaggattgataattttaggatattataaaaaatcaaaagaagatgaggataattaa

SEQ ID NO: 977 - DNA, 6606 bp, Methanobrevibacter ruminantium
  source 1..6606: mol_type = genomic DNA
atgagttattttaataaaggacatatatggaatattttattaatttgtcttctcatcggaactttggctatgatgggttcagcaagtgccagttctgctaatttagatgattttagcaatcttgcatgtgactctaattcatataatgatttaagtgttggctttgaatctgatgctaattcatataatgatttaagtgttggctttgaatctgatgctaattcatataatgatttaagtgttggctttgaatctgatgctaattcatataatgatttcagcacctattttgaatctgattctaattcatatgatatttctgatagtttggttaattctaattctgatcgtttggttaattctaatggcttaattgagttcaatatttctgctcctaatgacattcaattaaatgacaaagcacctataaaaaactctttaaaagaatatgatgaaagggtattttatgtttctttagatggtaatgatttcaataatggattaagtcaagaaaattcatttaaatccctaaataaggctttagaaaatcttcatgatgctaataaaacaacaatatatgtttttgaaggaacttttctaagtgaaaatagctacgatctattctttgaaggggttggaaatagtcagatgatttccattataggttctggggtaaataagacaatattggatggtgaaggtttgcataggctatttaatgtggataattctatcaatttgacattaagggatttgacctttgtcaatggttttgacttttcatctggcggagccatttataataagggcaatctgactttagtcaacacttgcttttataataataatgtctattctgaagatgcatatcagcatgtgtctctgcttagcggcggagctatagaaaatgagggattcctgacaattgaaaactcttcattcattaaaaatagtgtgggttctgtttttaatcaatatgcctatggaggagccatttgcaatcatggaaacttaactataaacaattccattttcaataacaacagccttgagacatatattgatttgaatgagaattcctatttccgtaagtggaacgctcttcaaactgggggagcgatagcaagtttttcagatggtgctcttatctcaaatacagagttttctaatcattcaatttccatattgaacaagtatcctttcgttcaaaagacattcatgacattctcagctgggggagctgtttatattgaaggcaataatcataatttcatcaattgttcattcttaagcaatgatgcagataatggtggggctgtttactttaagggtaacaatacatgctttgactattgtgattttgacaataactccgcttttatgggtggagcaattatgacaatcgattataatttaaatgaggcttggatgcctactttaaagaatctgacttccaacaaatattctaatctgaacatttcaaattccaatttcagtaataatcattttatatgcactgattttggtataggataccgtatttctcctggtggagctgcaggatactttaaaatagataatattactatcgacaattctagtttcacaaacaatggggtgctggaaaattgcaccatattcgtttcatctaggtgtgggggagcagtattcctttatggtcaagattcaaaagtaaacaattctagttttgttcacaataatgttgaagtaggcggagccataatgaattatggatttgatacaaatgtatcaaactctaaatttatcaataattctgcttgttattctgatggaggagccattttccattctattggtgatcttttgattgataattgtgattttgactacaatagggctgtaaagaatgggggaagcattcaagcaagttatgattatacaaataactatctctttgagcaaaaatcactctataacaattccagatttaaaaattctgctgcagaatatggcggtgcaatatttgacatgggaaatgcggttttatacaatgatttggaattcattaacaattcagcatcctatggtggagctatctataatcaaggattctccaataccttcagaaactccactttcgtcaataattctgcatttagcgaggattattccaatggaggagccatctataattatggttcaaatgcattatatgagtcatcaatcttcataaacaacagcgcagatatggaaggtggagccatttccaattttggtgaaagctgtgttgttcaaaacaataccttcaatctgaataaggcatttaaaggaggatctgtttatttgagtggacaagggggcagattccaagacaataatgtcttttcatcatttgcaatatatggaggtggattatataactcaaacataaatctcatttgcctaagcaactctttcaacaattgcagtgccaatgtttcagggggagctatctataaccttgtttccacacttgaattatattctaattcaatgaatgactgtaaagctaaactttctggacttggcagtggaaattatgtattcacctgtgccaatatctcttatttggtcatttcatttgcaaataatggaagctttaatattgttgacaataagggtgttttgctagttgctaacataagcgacaatatgggcaatcctattactggaggtaattttacttttatcttgtttaatcaaaccaatcaggatattgatctaataggtagttctggttcttccagttctaattcttcaaatccaagcaatctagaatcaagcatcataggtgtatgtgatgtggtagaaggacaagcattcttaagatatgatacttatttggaattaggctccagatatacaatttcaggaacctattcatatgcagccgaacctgtcttgacacaagtggctaatttaaattcagttctatccacaaggatgtacttctcatcaaacattacagatgatatggttaattttggagagggcttcaattatgaaatcattcttttggattctaatgacaattatattcctaatgctgaaatcttattgtatgttgatgcagtctattccaagtctgtatttaccaatgaatttggctatttgaagggtagtgtcaataatttaacttcaagcggaaagcatttctatagcttcatttatagcggagatattttccataatagggcaagctatgatttaaactttactgtattctacaataactcctactattatgatgatgtttccatcagctttagagatttgatctattcatttgtctatacaagtcctaacagtgaaattccttttgaatttttgatttctcataatgatggcgttccattgggaaatgtatcaacgcctcgttattttgtcgcttatgaaaatggcattccacttgccagtttctcttgcacagattatttgggtgtttgtaaaggtcaggaagtcttatattcaattatagagcttaacggaaaattagctaaaatctttagaacttcacctgaaggtattttccaaatgttaataaagcactcagaaagaggactctatgagtataggattgcatttcttggagatttggtaaagcactacgattctagcacccataatggcataagcaatgaagacactttttacaatccttgcaatatttcatttttaatgcttgttgatgatgagcaatccactattccaactagtttgaattataatggtcctaataagattacagaagtggattttgcttattataactttagcttaagtgaaaacagtaagaatccattggccaataaagaaatcagagtttatgatgatggaaattacttaggttcaagttatacaaacagcaaaggctttgcagaattcaatttcccgcagatgcttgataagggcaagcacataatcagttttgtctatgtcgcagatggggattataaaagtgcatactccatctttgaattgaatgtattggaaaacccttctaaagacaatgtatcatttttcaataaaagttctttaaacattactggagctaataataattttacagctcagattaaggattcacataataataatctatctgaaatggtaataaggctatctattctgtttaatggttctgacaataagccatatattaagaattacactgcagtaagcgataaaaatggtgtgttttctattcctcttgaattaggggcaggtagctatctgattaaatgttcatttgctggaaacaagcattattggaaatccagcaagacattcaatcttactcttaataaggttcctacattattatttggccagtccagtgttgaagtattgaaaaatgacacttatctaactgttatattatctacaaatgatttgaaaagtttatccgattcaaaaatcaagtatttggtatttgattcaaatatcactggcttgaacttatcctataatgattcaagtgaattaataagggacatttcaaactatgcatacacattctatgcatttacaaatgagtcaggcatctccaagcttaagataaatcttccagtgggcagttattatctggtaagtttatttgaaggggataaatggtatgatgaatctagccttatcaccaatcttacaatctatggaagttcatcaagattgattgcaaatgaaaatgtcatagttaaaaaatcaggatattacactgttaagctcgtagatggcaatggcaatcctatccagggtcagacaatagagattacagtttgcaataagacatacactagattctctgattccaatggggaggctcgattggccattaatctaaattatggaaattattccatccaatctaagtttaatggaactcttaattattcatcttccattgttgcctcaaggctatatgtggttgatgaggattataagtatccttccatattgactgtcaattcatctgatatctatagggcctttggctattatgatgtggtattgtctgatgtaaatggaaatcctttgccagagaagagcattattgttgaagtgaatggcacaggatttaatattaagacagataataatggattggctcatttggattataatttcactgtaggcagatacaatatagtttcccactttgtgggagatggggattatcaatatagcaatgtcggttccatcttgaatgtcgttaatgaaaatgcggctaacactctgctaaattcatcaatttattgggtattgaaaggaaaaggcaataattatactgtcactttgactgataagattcaaaatccgattgaaggccagataattgtattttccattaatggcagggaatattcaagaactacagataagtatggaaacgcaaatctggccataaacctcaatccaggatcttatgacatttatgcattctacaggggcactgatgtatattattcaagtgaaacctatagtaagttggttgttttagctttggaaaatgaaaatgaagggtctaattcaagttcagccattggctcttccaattccagttccaataatgattctgatgtagattctactaatacttctaattcaggtaattctgagactaatttaactaatggttcaagttctggagattctggaattgataatattaatggttcaagttctggagattctggaattgataatattaatggttcaaacgccagtacaaatatttctaattctactggcgcaggtaatgattcttccagttctgggcttgataatattaatggctccagttcaaatatttctaattccactggatctgataataactcatctagttcgggtattggtggcaatttgactaatgctactgttaatgatggaacttctatttcaggtaattcctctgttactaatggttcttctaatctttcaaataatgacactataaataaaagcgacaaaccggtgattattcctaaaagaactgtaacaaagattatttgccataatatgaccaccactgcagtttctaaagcagatgggagggtaggaaaatactttgaagtaagtcttatagatgcaaatggcaaaccattagccaataaaagaatcctaattggattcaatggaagaaaatataaccgtacaacaaatgctacaggaggtgcaaggcttcaaatcaacctagcatacgaaggaaaatacacctttgcaatcgcgttccttggagatgattattatagcggttcttttgaagtggctctcattacagtaaacaagcacagtccaaagctcgatgcatcttcaagagcatataagtatagtgataagactaaatcattaactgctaaattgctatctgccaatggaaatccaatcagtggcaaaaatataatctttaccgtcaatggcaagaattatgctgcaaaaacagactcaaaaggacttgcaagggtaaatgtttccttaaataaaaaaggaacttatacagtaaaaattaaatttatgggggacagttcatataaatccgcttccaagaaaataagccttagaataatctcccctagcgaaagataa

SEQ ID NO: 978 - DNA, 8754 bp, Methanobrevibacter ruminantium
  source 1..8754: mol_type = genomic DNA
atgaaaaacaaggcaatgtttttaatatctgcattattgatagcagttattctatctctcagtgctgtaagtgctgcagatgatgctattgctgcagatattgatgacattgacgattcaatcgaagtatcttctgtagatctctctgcagacacagaggatataagctatacggacgtctcttttaatacaagcaaggataagaatacattatcctcaaatattgtagaggagggagatggttcatggtatgtagacagtaaggttgaaaccactggtgatggtagtcaatcaagcccatataagaccataaaagaagcatttgatgcgtctggtggtaatggtactatctatttggcaagcggtgtatataacaccaccaatgataggagtttttcattggctttggattcaggtaataatctgtccattattggtgctggcagcgatgagacattaattgatttattatctctttcaaataattttataaacgttagaaatggaaataacttctatttgtctaatgtgaagcttatacgttctggaactactgcaattagtggagccaacataactatagaggactccgtatttgccaattcttattattacggcggagcaccgattttgtctttaggtggcggtgacaacactataagaaattgtgtgtttgttaacaattccgctggaagctggtatgggtcaggtgttgcaattttaaatggaaatgcaaatgtattatttgacaattgtctatttaagaataataccaacactaacggaggttcagtattctataccacttcatctaatatcaagttgactttaaacaattgtaatgttacagaatgtcctgtagctttctatgcttcctattttggaaatgtggtatttaacaattcatatttctataataatgatgtgacacgtttaaacaataggtattgtgccgttttctattcaaccgatccaggtaatctaactatagattactgtaaatttgaaaacaatacaggagtcgatagtgcttctatcattagcgcttatagcagtaaccgacctttaaatttaaccgtcactaattctgagttcattgacaataagatgggtaagaatagttatggctattatactgtcttcaataatatctatatgggttcttggggaggtaatttatatttaaaaaacaacactggttcatttggaaatttatcatttgtttcaattagctctgcaaacattaattcagagattaatttgattgttctagataatacaacatatgacattaatgcaattgaaataaatgttatcggaactttaactgatgatatgggaaaccctattaatatgagcggtttcgatttatactttaacgacactttagttggttctcaattaacttttgactctggtgtgaataattacacattcaaggaagcattaagcggttcctatcttgtgaaatatgtctataactccacagctaatttcactaacttcaatcaaaagacttcagttatgaacatatctccattggaaaacattgatgtatatgttgcaactgacggatctgatgaaacaggtgatggaacagaggcaaatccatatgcgacagttgaaaaggcattggatgttgcttcaactgcattgaatgcaaatgtctatattaaagctggaacatacaaatactatagatacagagcaatagacactgcaaatggtattttaaacattattggctatgacggtgacgtgactattgatatgaataatgaaaccgcattttgtaatgtttcaaacaggtctaatgtatttatttccaatgtagactttgtaaatggatattcccaatatcttgtagataattatggaattatcaactcctttggtaatttaattcttagtgaatgtaaatttagtgataataatggttattattatataatttctggtcaatcaacaattgattcatgtacatttgaaaataataagttccaacaacaaaattctgctaggattttattcaatccagcatatgttaacaatgtaactttctataacatcactgccatcggattcagtgccaatagcttgaatcaaaaatatgacttgactatagaaaattgtaagttctatgataatgccaggatattaatttcaaacggtaatgtgactataagatcttctgaatttgcaaatctttctaatcagagagcattggaaactcaaggtgtagttgtcttgtcaatagatgattgtacctttaaagattcagatcaatcagtaatttacttatatgattatgcctccactactattgcaaacataagcaattccaaatttatcaatatcactcacgaaaatcctgtttatgtgggcaatggtcaggaaatatatttagagaataatgaggtttcagatttggctgctccttatgtttatataagaagcggttatgttgcaagccctataaccattttggttttaaataatgaaaccattgaacaggaaagctatggtgctactttaaaggcaaaagtattggatgatagcgaaaatgcaatttcattaaatagtttcgtatttgatttcaatgacgaacaaatcaacggaaaattggtatatgatgaaatggtagctaaatccatgggcatttatgatggcacttatttggttagtgcaagttccacaaatcttttaaacccaattcttaaaacaggtgttttaatcatcactccattaatgaataaagagttatatgtttcaactggaggatcagatgaaacaggtgatggaaccgaggtaaatccatatgctacacttaaaaaagcaatggatgaagctgtcgcatttaataacactatccatgtagcagaaggagtatatgctattgacactgcattggaaatcgacaccaacactgcaattgtaaatattgtgggaagtggtgaaaatacagtatttgacatgaataatgaaattaactttataaataccatttctgcaaattccatcattgaattaaaagatttaacacttgcaaacgctaagtcccctgcaaatgcaaaaggaggatttataaccaacttaggtaatttaactgtaaacaacgttaatttcatcaattccactgctaataatggtgctgccattagaagcagcggtaatttatctgtaactgattcatacttcgaaaatactgttgcatcaagtaatggtggtgccatttggagtaatggcggaaataattatgtattgaattctatttttaataagacaagcgcatcaaattatggaggtgccctttatagcagaaattatctttacattaaagataacactttcatagatacaagtgcaagtgcagcgaaaaatatatatgttcaatctaaagttgagggaggagttgttttaacagttatggataattctacttggactataagtaccagttcagtaactttcaatgcaactttaactgatgaaaataatgaccctatttatgcatcaaacattccagtatcattctatttggatggaattaaagtcgcttcctccagtattaatggcgaaaaggttactgcaaacgccaatttaaagatgaatggtgaacatattgcatctgctagcttaggaactgcagaagacataactgtaaaaacagcaacagtgagctttgtaaatgatgcagtcgcacatgacgtatatgtctccgcaaacggggatgatgaaaccggtaacggtactcaagagaacccatatgcacatatctccaaagctttaactgtagttgagtccttaaatggtgtaattcatataatgaccaatctcactaatgtaccggtcaattccattgacggtttctacaatttaaccattatgggtgaaaataatgagatattcattaagaacagtacatcaggatttgttatgcttaattcaggttccttaaacttgcttaacttgagattcactgaagcaaattatcctacttactttattttcaccagagcaggatccagcttgtctttagaaaactgtagctatgaaaatgtatattatccaaaagacggatattatccagtattcattgacagctcaagcgatttcttaagcttgaaaaattgtaaagtaattaataatgtatttaatctttcagatttatcaagtggtgtcatacgttcaaaatcaaacaccacctttgaagactgtgttttcgcaaataactcttacacaaataggaatggtgctttaggcggaaacttcctcttattctctaataatcagaaggtcttcttgaaaaactgtatttttgataacaacactgcaagattattgaatttccaatcaacatctgtagtggataattgttcattcactgaaaacaatggaactttgattactgcaagttatccaattaatataactaataataactttacttcaaatgatttggtaagtagtttgattggtgtttcaggcaatgcagaaattacaaacaacatagttaaagaaaacactgcaagtgcatttgtatttgcatctggaagtgctatagtcaatattcatgacaatactctcaatttgggagacatgccatatgtaaacttaactggtaacactaaaatcacaggttccacatttacattgactgtaaacgataatgacacttatgagattgaaggtcttaaccttgcgttcaatgcaagcttggtggatgctgatggcaatataatttacggaccattggtatacttcaccttaaacggcagtgacataatctctgctaatttagtccctattgcaattgcaaacactaaatttggtggagaaggcgaattcattgcatctgcacgtactgatgcaatgtatgactcaagcgaatggactataaagacttcagtattcaacatcaagcaaatcgctgagaaaatcatatatgtggacattttaggaagcgatgaaaccggtgacggttctgaagaaaacccatatgcaagcttggaaagagcagttcaagatgcaggtggtcttaataatatcatatacatccaacctggcgaatatgataatatgactttaggcagccaatatgtattaatcgacgatcagacattatccatcattggtctatccaacgaagttgataaggtcattattaaaaaccttgataatacatttgcagacattgcttatgaatatggaaaatattctaatgaccaattcacattggcaaacattgaatttgttgactcaagcttaagcactgatttaatcagaaccaattatgtaaatgctgttttagttgaaaatgttgtctttgacaatataactgtctctaatttaataagaggggattcaactaatcttgtattaatcaattcaaccattaatgcaatatccagcagttgcgtactcaatacagaaaacatcactgttttggattcagtaattagcaatgcatacggatacagaattttcactataggtgctcgtcatgctgcagatttaacaatttataactctgcattaatcaataactcttacataggtgccttgatctatgagcaatggacttccaccaaaactcttgaaaacaactggtggggctataacaccactgaagatgatttaatggctttcaccaatgtggaaattactaactggatcgtagcagaagtaactccaagcagtgacagcatcaacatcggagacaatgtccaattcgacatcctattaaaactcaatgatggctctgaattaacagatgttctcccaacccgtattgtaactgctattgcagaaaataccgagtttgatgaggatgaagtagaaataatagacaaccaagctactatcactggaaccgtaaccggaactggtgacattacaataaccatagacgaacaggactttgtattccctgtcaacggatatgttgcataccttactgtagacaatcttgcagtaaatgtgggagatcctataaacgtatgtgtcctattgcaggatgagttcggacctcttgcaggtgagcttgtaacaatatgggtcaatgaagttgagtataacgataccaccaatgatgacggtatggctatctttgaaatcgatggacttgaaaaaggaaactacattgttaccgcttcctttgcaggagatgagctctatgacggaacaagcgctgtcggattgatcatggtatcagatgcaatcctatccatagacattccagctgttgactatggcagccctatcactatctatgcaactgtggaagacagcgaaggaaacccattatccggtttggtcattgccacccttgacggtgtcgactgcaacatctatgtggatgctggagaaggatccatcacaatccctaacgagctctttgctggcgaatacttggtaaccgctaagctcttaggtgaaaacaatgctatggacactgcattgcttgttgtaaacccaattgaagctgaacttattgtaagcatagacaacattacctacaataatcctgttgaagtagaattgtcctctgaatatgcacttgacggaattgtcatcctcacaatcgatggcgtagactatgcaatcgaaatcgaagatggcgaagccatcgctctattgcctatcctgcttgactcaaaggattatgaagtgactgcaaaattcattggcgaaaactttgacgttgaagacgctaccacaagctttacagttgaagcgatcgaaactgcattgactcttgaacttgaaaacagcacaatcacctatggcgactttgccatagtcaaggtctcacttgttgatgagttaggaaatcctatggacggtattgtcaccctcactgtaggagatcaaacaggctcccttgctgtagttaatggagaaggcactgtttctgttccatatcttgctgcaggcaactacactgtaacagccaaattcgaaggctctgcaaacttcatttatgatgaagacagcgcaagccttgaagtcactgcagacgacaatgtccaatttgatatggacgtaatcggaaacagccttgtaataagcctcgttgatggcaacgacaacccaatggatgcaaccgtaaccgtcacaatcgacggcgaaagccaagatgtcactgttgaaaacggaataggatttgtctatgaccttgaagctggagaccacacagtaagcctagactatgatggagatgcagaccacgcctctgcaagcatggaagatgaagttacaatacttccagaccctgtagttcctgtatctgcaaacgcaaccatcgaattggctgttgtgggagactatgttgaagtcaccttaaaggaccttgacggcaatccaattgctggcgctgatcttgaagctgacttaaataacttcttactatccacagtcacaacagacgatgacggtaaggctcttgtagacttgtatggagaacctaacttcaacttcacagttactgtagtctacacagatgacttaggctccagcgtaagcgcaagcctcaacaacatctatgttgaaaacgaaacaacagtcatcatctatgagaatgtcacagttcctgtaaccgctaacggatcaatgtctgtagaagcaagcgaagatgcaataaccgcaacactcactgacagcgacggaaaaccattagcaaacgctacagtcaccgctgtaatagacggagtcgaaaccaacttcacaaccgatgaaagcggcaaattgactgtacctatagatgaaaactccactgtagagctaagctacaccgacgacaacggcgcatcagtgacctatacaaccaaagtggtcaccaacgaagtgccagtcccagtccctgtacctgtccctgtaaccgttaacggaaccatcgcacttgcaaccgaagatggcaagtcaatcgttgcaacactcacagacagcgacggaaaagcaatagcagacgcagaactaaccatcagcgtaaacggacaagaatccacagtaaaaaccgacgcaaacggtaaggcaacagtagacgtagaaggcaacacaacagttgtagccacctacaaggatgcaaacaacctcaccgcaaccggatacatgaacctagtggtcatagtaaacgaaacaataatcaacgaaaccataatagtaatccctaacagaacagaaactgtaatcgattaccaaaacatgaccacaaccgtagtcgcaagcgctgacggaagaataggcgaatacttcacagtagtcttaagagacgacaaaggaaacgcattagcagacaagccaatcaagataggattcaacggaagagtatacgaccgtgtaacagatgaaaacggtagcgcaaaactccaaatcaacctaggatacaaaggaacatacacctttgcaataggattcctcggagacgacaactacaccggagcattcgaagtggcaaagatcacagtcaatctacagactccaaaactaagcacttcatctaaaacctataaggcaagcgctaagacaaaagccttaactgcaacccttaagacagtaaacggaaacggaataagcaacaagaaaataagcttcaccgtaaacggaaaaacctacagcggaacaaccaacgacaagggagtcgctactgtaaaggtaagcctttccacaaaaggaacctacagcttcacagccaaattcgcaggcgacgaccaattcgctaaagtgactgcaaacggaaaattaacaataaaatag

SEQ ID NO: 979 - DNA, 843 bp, Methanobrevibacter ruminantium
  source 1..843: mol_type = genomic DNA
atgtctaaaggatatcccaatttttatgataggatgatgaagaatatagcatcctatgatttgaaatcattctttttattctttggactggattgcattccatatttttcaatagccaatgaggtagttgacggaggtttgaatctaagcttattggatttgcctgtttgcacttcaaaaggaattgtaaattttgaatttcaatttgatagggatgaggcggatgataggagatttataagatatggcgttcaattatatgagaaatatggatttccagttatgtctgtagtgatagactttaaagcccaagaggatgagccttttccaattgaaataagcaagggatgcgtgtttactatatatgtcaaatcgttaaacgaaagaaatccggacatagttttaaataatataaatgataaactcgcaattaatgaaaaacctttaggtaaagatctcacaggtctaaaattgcttccttttttggatttggatagaaaaatagaattgttggataaggctactgaagtcttattttccttagataagaatttagttggcttacgtgagataaaacatcttatgagggttataatgttttattcccatcaatggaattatgaggagaatttggatagattagggagatggtcaataatggttgatgatttaagtcaggatgctgttgttcattttggtaaagttaatagaaagaaaggtagagaagaaaggtcttatgaagttgcaagatatatgattgatgatggcttttcagcagaggatgtttctaaatatagtcgtttggatctatcaattgtaaaccagctaatgctaatgaaataa

SEQ ID NO: 980 - DNA, 3375 bp, Methanobrevibacter ruminantium
  source 1..3375: mol_type = genomic DNA
atgtcaagaaaaagcaaagagaaatatgagtgggactacagcacctactcaaaggtggatcctaaggtaagaagctactttccgtttgccaaggctaggcctcagcagcttgagacaatctcagaaatccatgaggccatagagaaaggatacaagtacatagtacttgaggctggaacaggtaccggaaagtctgcaattgcagccacccttgccatgtgctacggcgatgcctacatactcaccatgaccaagcagcttcagaggcaatatacaaaggactttgaggattatgactttgcccttgtgaagggcagaagcaacttcgattgcctgaagtatatggaagaggcaatagaggaaagctgtgacatgggaagatgcgtccttgaggggcataagtgcagctataaggtgaatcagttcaatctctataagaaagaccctggggaatgctgcccatacttccatcaaagggcgatagccctgaattcagacatagtcatcacaaactattcctatctctttgccgagcttaacttcaacaacgacttcaaggccaagaggcttctcatatgcgacgaggcacataaccttgaaagcaagataatggatctgatttcccttgagttcacaagacgccagctaaaggatgaggttggaataaatctctctaaggagactctgaaggaccttgatgagaagggctacacatcctggctgcagtttataaagagggtctgtgaaaggtatggggataagagcaaggaaacaaagaaggcattaggcaagcgaaaaagcctaacccttcacagaaggtctgaaaacctaaaaagaagacttgaggactttaagaggttttcaaattacattgcaatagacccggacaattggattatggattatgacccccacagccaaaagctttcattcaagccgataaggattgacaagtatgcaagcgaggtcctccttaagcatgcagatgtctgcatcttcatgagcggaaccatccttaaccatcaccagtttgcaaaatggcttggaatcgaggaggatgaaatctatcccatacgtagaaagtctccatttgatattagaagaaacccaatcagaacatactcaggctttgacatgacctataggaaccttggatcatctgcaaaaaggtcagttcctgtgataagggagatattggaaaggcataatggggagaagggaataatccataccgtcagctatcagtgcaaggagtttctaaagaaggaactcaacaatcccagacttttggaccatgagacaaaagacagggaaaaggttttggaaaagtttaaaaagtcagatgagcctttggtattaataagcccatccatgaacgagggagttgacctgccgggagacctgtgcaggttccagataatctataagataccatatcctaacatttcagacaagcagactaatataagaagaaagaaggaaaagatttggtatgactatcagactgcaatcaatcttgtgcagacctatggcaggggaatgaggtcagaggatgactattgtactacatacttcattgacagcaggataaagagttatttgaagagggacagcattaggaataatctgattccagacttctttaaggaggctgttgatgtggaggcagctgagattgagaaaaatccaattagaaaggcttctgatgcctctgctattgctaaatatgaggggtcagaattttctgatggttctgataatgataaaaatttaaaaatagatgattccacttctaaatctcaaaaggacagtaaaaacactttcaaaaagtctgatgtgagaacaaaatatgctttaatgaaaaagggaaaagacctggcaagaacaaacaagaaggaagcaatcgcattttacaaatccctattaatgcataaatgctttaagaatgattattatccatatagaaagcttgttgtcctttatgacaagacaaaggactataaaaacgaattgggactaatcaaattcttcttcaataggggaatccactgtccaagactctactatttctggtttttaaacaagcttttaaagctatctgaaagaggattgattactaaagaggaaattaaagagcttgaaaaagagtatatgtcaaagggatttaagaacaaatccgtccaaagcagctctatgataattgcagatagaatcgaacattactatggagatacatatgtgctctcagagcataagttcaacaataagttaaagtctaaggagattatagaagagggaaaatactttgagagaaccggaaactaccaaaaggcaattgacttatattcagaggcaatattcgacaggcatttcaataattactcattctatcaaaggatatgcttctctttggaagagctggaggattatgaaagggaattggaatacattaattcttattttgacaatgatagtatcaaaaagtctgaaaccagtgaaaagtggtttaataagagattggataaggtcaatgggcttttggaacttaagaataatgagaaaaacatatcttctgaggttaaatcttccgatgaagattcaattttaaacccatccaatattgatttaatggaatacgatgattcattaagtctggaagacaatatccaaagaaagatggaacttaaagagcatgcaatggaacttaggagaaataagaattattcagaattaatctcttttttaaatgcactgactaaaaactcctattttgaaaacgactattatccattcaggcatctatgttcaatatatgagcaaatcaagcattactcttcaatgaaggattcaattaaggacatgctttatgcagatgtttatttaactgactatcagctagtatggctaaagagcaaaagggaaatagttgatgctcagataggccttgatgatgtcctattcaatcaatggatagaccactacaagagccatggggcaagaaacaagtcaaaggccaactctccagtgcctcttgcagacagactaatcaaaaaagatgaaaattacaatgtttcaacttctgaggaattcgatttcacccagaagaaatatgaattgactgaaaagggaagatctttagagagaaagggaagatatgaagaggctgctgagttttatatggatataattaaagagaagaagtatcaccattatgacttttataaaaggctttgcttctccttggatgagatacctgattatgaaagggaattgaaggcaatcaagttgtattatacctgccctccaatctttacagatgataccagtgacagatggtttgaaaagaggttggaaaaggtcaattctaaaatctag

SEQ ID NO: 981 - DNA, 498 bp, Methanobrevibacter ruminantium
  source 1..498: mol_type = genomic DNA
atgggaaagataacaaatagaaaagaggcattaagcaagagagaccagatagaaaagcttcaaggggaatcttttgaaggtgacgacaacattgactggtttggcagaatcgaggagatagtgattgatgacgattactgcatctatcaaatcggcaaatattcaaaattatctaattattactatgatgactttgaggaatattctaaagagtatggccaagagaatccattgaatctttgctttgaggaaataatttcctatttgtctaagatcgttctcggcgactttggagacaacgtcaaagccgaatgcattggcaagggagggatagttgaagtgaatggattgaacttccatcctgtttcccggatagacattgctgatttgaatggagaaagctttgtatatctttatgatgacaatgatctcattgcaagaattccattctttgacataaccagctataagataactgctcctgaagagagcgtttaa

SEQ ID NO: 982 - DNA, 165 bp, Methanobrevibacter ruminantium
  source 1..165: mol_type = genomic DNA
ttgggggttaattgcattagagttgtaatagacaatgcagaagaaagtataacaaaggtggctaaggcccatggaaatggggctttggtgttggttccaaaacgatggatcggcaggaaggtacagataaccttgctggaggaagaggacaaactgatgttttaa

SEQ ID NO: 983 - DNA, 603 bp, Methanobrevibacter ruminantium
  source 1..603: mol_type = genomic DNA
atgaacagttgtgctgttgatgtaaaagaaaatagtattgaatccgcaatgggcatcaatacaagtgaaagcgatagctttcaattaaacactatcagttccgttgatattggagataaattcaaatcaagcggagcaacaaactatcttgaaagcattaaagcttggaaaaacattgaaaagattatcgattgcttagtcccatctgatttggaggaagtgttttcaatctcttcaaataataatttcaagatcaattgggatgaaaaggcattatatgatgtattatacacaaatgaatcttccatatttgtcccattaggctgtatggaacaagtaggcaatggatattatatcatgaaccataaggatatggtctattctaatccagatgacttcatccatgaaaatggtgtttatggattgattatcagattcgacaataatatgattcaatccgaatatgcatattgcgaatataattccggactttccttagacggagaaaattgtgacttcgttaaaatggactttatatcaggggaagacaccgtagaaaattatattttcgattctttgaatggatttaatctttttaattaa

SEQ ID NO: 984 - DNA, 417 bp, Methanobrevibacter ruminantium
  source 1..417: mol_type = genomic DNA
atgtattattataaattagagtcttttgactatgatgagcattggacggcattctatgtttcaaataaaaagtattccgacgatgaattcaaaaagatagttaaggatgcttatattgaaacttgcaagcatatttcagaaaatcaaaagccagtatcaaaatttaactatatgattgattctgtcatttttgatatcttgcaggaaagcgataaagataagagtcagccatgccactatttcaataggatattaaaagacaggcacgatttaattaatttggacgattgtttagattctaaattggaatttgttgaacaaaatggcggtaatgataatttgagggagttttatgacaaaagaagtgagtatattcttgtgggtatatcagatgatgataataagggatacatataa

SEQ ID NO: 985 - DNA, 1257 bp, Methanobrevibacter ruminantium
  source 1..1257: mol_type = genomic DNA
atgaacaaatatattaaaaaatggacagaatcaagtctgattttaaagatcatcggtggtttgattatcggatccgtattaggaatccttgtacctcaatataagttaattggacttccaggagagctatttgtaactgctttaaaggctattgctcctattcttgtatttattttagtggcttcagctctatctagggcaagcgaaggaataggcagtcgttttaaaacagtaattgttttatatttattttcaactttcctatctgctatggtagctgtaactggaagctatctcttcccagttggcatgcatttgacagacgctagtgatgtggcagcacctggcggattgggggaagtcataagttccatgcttcttaagatctttgcaaatcctttgcaatccttatctcaaggggattatttgggaattctcttttgggctattgtaataggactatgcttaaagaaaattgctagcgacagcacattggatgttttctccgacttggcagatgcaaccagcttggctgttaggggaattattcaatttgcccctataggtattatggggcttgtatttagtgctgtatccgaaagtggattaagcattttcatccaatacggtcaattggtcttattgcttgttggatgtattgcaacggttgcatttgtaacagaccctatcattgcagcatttgccttaaggcgcaatccttatcctcttgttttgacttgtcttaaggaaagcggaataactgcattctttacaagaagctcagcagcaaacattcctgtaaatatgaggctttgtgaaagattaggccttgacaaggacttctattcaataagtattcctctaggttccacaatcaatatggaaggtgctgctgttacaatcacagttatgaccttggcagtatgccatactttaggaatcagcgttgacttgcctacaacaattgttctatgtatcatttccactttggcggcttgcggttcctctggtgtagcaggaggttctttgctccttattccaatggcatgttccctatttggaataccttcagacatttcaatgcaggccatagcagtgggattcatcattggagttgttcaggactcatgtgaaactgcccttaactcaagcggagatgcattattctctgcaacagcagaatatcatgacagagtcaaaagaggggaagatatgaacttcctaggtgaatttgctaaagataaggcaaaacaataa

SEQ ID NO: 986 - DNA, 1473 bp, Methanobrevibacter ruminantium
  source 1..1473: mol_type = genomic DNA
atgaactatgaatttatactaaatgatttaaggccatctcaagaggagattgatgcagtaaacaagacaacagaaaaagtgataagctttttaaataagacctgcaaagaggaaaatattccagcacaggcttttgcagtaggttcagttgctaaaaacacttggttgagtggcaaatcagatatagacatattcatacgttttcctttaaaaactgatgaggcagtgcttaaggaaaagggcctatatcttggatataaaacaaatgatgcattaaaaggaaaggcatcagagcattatgcctcacatccttatctgacctgtttaatagatggaatcgaagtggatatagttccttgctattggattgaagatggtagccaacttaaatcagcagtggatagaaccatcctccacaccagatatatacagaaacacttaaagaagtcccaagaggatgaagtattgcttttaaagaaattcatggatgccgttggcacatatggctctgaattcaagacaggtggttttgcaggctatctatgcgaattgctcattctaaaatacagcacctttgaagagacccttagacaggctcaggattggaagttccataccaaaatcgatttggaaaactatggaacctcagacaataagctctttaaaaatgaccctcttgttttcattgacccaacagacaaaaaccgtaatgtagctgcagctttaagaatagagagaatgcttgattttataatagcctctagaaactacatcaatctaattgacagcttagaggatgccgatgagaacataataaaagaaaaagtcttaaaatacttcagcccacttcttaaggagagattccaggacaaatcagttaaagaaatatcagatgacatattggatgagtttaaagaccgagaaactcaaactttagtcatcagtttcccaattccagaaatgaatgcagatgctcttcatcctcagcttttaaagacagttgaatcaatatcccataagctggaatctgaagacttttcagtttatagctatgactattggactgatgaaaaaaatctcgtcatcttcataattgagctaaatgtattcaagcaaagcaaatattacgttcatgaaggtcctaaggtttggaataagcttgcatttaataacttttcagccaaatggtcccaagagtctctatatcataaaggggaattcattgtctttgacagggagcgtcaattcgttacagctaaggaattggttaaacacttgcttgaaaaggataatattcatgagattaaggttggaaagaatttaagaaaagctattagcagcacccataccctttgtgagattgatgagtttttagaaaatattgatcaattcatttgtgatgaagcagatcaaagggagtttttaaatactttagatgatttattaaggccaggccagtatcttaaaaggtaa

SEQ ID NO: 987 - DNA, 465 bp, Methanobrevibacter ruminantium
  source 1..465: mol_type = genomic DNA
atgaatactgaaaaagaatttaatacgactgtttataattatgaccgtttaggagaccttttgtttatttttcaaaagaaccataagacctatcttaataatctcttggcagagtatgacttaaatttgatacaggtattgtgcattttaaaaatagatagtgaagagaatcttaatcaaaaggacttatcagatagtttatatctaacaaaaggagccataaccaaagccataaagaaattagaatctaatggcatagtcataagggagaaatcccctatcgataaaaggcataatgtgcttgctttatcaaagaaaggagaggatcttattccaatcataaatgacataaatcaagattgggaaaagagaatgggtttggatgagctttctcctgagtttttaaagacttttaaggccttggcttttaaatcagctgagttgaataatgaaaaattagtttaa

SEQ ID NO: 988 - DNA, 414 bp, Methanobrevibacter ruminantium
  source 1..414: mol_type = genomic DNA
atgaaatttaacaagagtttaattgcaatttttgtaattttgattgttgctttcagttccatatctgtcattgcagcggaagatgcagaagatgacaatccttatcataatggtgctgtaatgaatgaacaggaacctggatctggtgaagatgatgacaatccttatcataatggtgctgtaatgaatccacaggaacctgaatctgaggatgatgacaatccttatcaccacggtgctcttatgaatccacaggaacctggttcaacagatgattctcaagcagcaggttcatctcaagcagatagttcaaataaagtagctcttagcaaatatcctactggaaatccattagtagttttattaatgtccctttccatcattggacttggtactttaagagttagaaaatag

SEQ ID NO: 989 - DNA, 939 bp, Methanobrevibacter ruminantium
  source 1..939: mol_type = genomic DNA
atgagcataaaaaaagtagttgtagctggtggaggagtattaggcagtcaaattgcttatcaatctgcattctgtggatttgatgtaacagtttggcttagaagcgaaggttcaatcgaaagggcaaaacctaagtttgaaaggctcttgaacatctatttaagtacacttgaagcaatgaagactgataagtctgcatattgcagaggtttaagcaaaacagcagacctaagtgatgaggaaattgacagcttaaaggagcaggctcaaaaggcttttgatagcttgacacttactacaagctatgaagaagcagctgatgatgcagaccttgtcattgaagcaattgcagaagaccctaatcaaaagatagccttctatgaggaattgagaaaataccttccagaaaagacaattctggtaacaaactcatctaccttgcttccaagcatgtttgctgaacacacaggacgtcctgaaaagtatcttgcattccactttgcaaataacatctgggctcaaaacactgctgaagtgatgcctcatcctggaaccaaacaggaatacttcgatgcaattgttgaatttgcagaggacatcaatatggttccgattaaggtattgaaggaacagccaggctatgtattgaactctttgctggttccattcctatctgcaggtcaggcattatgggcaaatgaggttgcagatcctgaaacaatcgacttgacttggaggcttgctacaggtgcacctaacggtcctttccaaatattggatgtcgttgggcttgtaacagcatataatattgtaattatggatcctaggtcaaatgaccctgagacaacccagggaaaaatagctgcaaagcttaaagagaaaatagatgctggtgaaacaggtatcaatgcaggaaaaggtttctacgagtatggatag

SEQ ID NO: 990 - DNA, 684 bp, Methanobrevibacter ruminantium
  source 1..684: mol_type = genomic DNA
atgatagttagtgtaattggtggaactggtccacaaggtttaggaattgctcttagattagcaattgaaggtgtagaagttattgttggttctcgtaaagaagaaaaagcattagatgttgttgcagaagcaaaagaaaaatatgcagactatgacttaaacataaaaggtttagctaacgaagatgcagctaaagaaggtgacatcttaatccttacagtacctcttgcagcacaaaagccaactgttgaaggaattaaggaattttgtactgacaagattgtattagatgctactgtacctttagaaactgcaatcggaggtaaaccattcagattcatagacctaatggaaggttccgcagcagaacgtactgcaagcattcttgatggaaccggagcaaaagttatctgcgcattctgtaacataagtaactctcacttatccaacattccagaagacattgactgtgactgtttgattgccggagatgacaaggaagctaaggaaattgcagcagagctcatcaacaagattccaggtgtcagaacaatcgacacaggaattttagaaaaatccagaatcattgaaaagatcactccacttttaattggattaaacataaaatacaaatcccattacggtggtcttagaattactggaattcctaaattggatgaataa

SEQ ID NO: 991 - DNA, 1497 bp, Methanobrevibacter ruminantium; identical to SEQ ID NO: 119
  source 1..1497: mol_type = genomic DNA

SEQ ID NO: 992 - DNA, 903 bp, Methanobrevibacter ruminantium
  source 1..903: mol_type = genomic DNA
atgaatattataaaaaatctgcctttggcaataaccggattgatattggccattctttcacttggaaagatattcgctgatttcagcgccatattcttcataatcggctctattttaatatttatggtattgctaaagcttgtttttcatttcaatgactttttcaatgagctgaacaatctgattccattaagcacattcggtacattctcaatggctcttatgctttggagcacatatctaaagcccttattcctgccattgtcacaagatattgcctttgtgatatggattttaggaataataattcacctatccattattttgttctttacaaacaactatgtgcttaacaatttcaatattgaagatgtctatgcaacttggtggatcgtctatattggaattaccatggctgcaattacagctccagcccatggcctctcaaaatatggattcattttctttggaataggatttatattgatgataccaacattggttctggtctcctacagatacattaattttaaacaaatagacgatcaaaataagccattcatttgcatttatgctgcaattttatcaatccttattgtaggatacgtgaatgctatgacaataaacggcacttttctaagcattatctacataggggcagttattttttatatttttgcaataattcaagcattcaagtttataataattgaaagattgaagtttatgccaagcttttcagcctttacatttccatttgtaataagcgcaatagctacaggggaggcctataagttctttggacttgatattttgaattatctcttttatattcaagcgtttatagctttgattttagtaatatttgtattgtataattatttgaagtttttaatgaactag

SEQ ID NO: 993 - DNA, 510 bp, Methanobrevibacter ruminantium
  source 1..510: mol_type = genomic DNA
atgaatgcaatatttaaaagaaaaagcataagaaagtttttagataagccaatagaagatgaaaagatagaaaggcttctaagggcaggaatgcaggctccatctgccatcaattcacagccatgggaatttattgtggtccgggataaggattccataaagacaatagagaatatgagcctctattcaaagcctgccaaaacatcaacctgctgcataatcacattattcaacaaaaaatacactgataagtttgatgattactgttgggttgagcaggatatgggagcatgcactgagaatatactattgcaggcagttgaagaaggccttggggctgtatggcttggaacatatcctaatgaggaaagggtgaattatcttaaagagcattttgatattccagataatgtttatccttactctgtcattgttttaggatatcctacagaggattatcatggagaaagtcgttttgatgaaagcagaatacattatgagacttattga

SEQ ID NO: 994 - DNA, 522 bp, Methanobrevibacter ruminantium
  source 1..522: mol_type = genomic DNA
atggatttattagatgtgatgcttaaaagaagaagtgtaagaagatatacagatgaagagattccggaagaaaagctaaataaaatattgcaggcaggtatgcttgctccaacaagcagaaacagaaagccttgcagttttcttcttataaatgataaggattccttggtggaattggcaaattctaaagagcatggtgcagagctcttaaagggtgcaaagcaagctatagcagtaattgccaatccaaatgtatcagacacttggattgaggactcctccattgcacttgcattcatgcatctaatggctgcagagcaggatgtcggaagctgctgggttcagatgcatcttagaaagtctaaggatggccagtggtctgaggaacttgcaagagagattcttgggcttgacgactactttagaatagttggcatattggctcttggaatggctgatggccagcctaagccacatagccttgatgaaattgacttaaatgatgtgcatatcttgcattaa

SEQ ID NO: 995 - DNA, 576 bp, Methanobrevibacter ruminantium
  source 1..576: mol_type = genomic DNA
atgaaagcaaatgaaaaagagacaatcagaagctttttagcaattgaacttgacgaaagcctagtgccaccaatattagacgttcaaggggattttaaaaagacagacaccaagatcaagtatgttcccgctgaaaacatgcattttacattaaagttctttggaaacatcgatgaggatatagtagaggacataagtggtgcagttgaaaagataataaagaactattcttcatttgaacttaagatagaaaactgcggatgctttccaaatcagaaggtaataaaggttctctggcttggaatagataaggattccaagataacagaccttcaaaaggagcttgataaagagtttaaaaagcttggattcaaaaaggagagaaactacatttcacatcttacaataggaagggtaaaaagccctaaaaacaagaatgagataagggatgtgattgaaaagaataagaatataaaaataggatccatgacagtgaatagggtatgtcttaaaaagagcacattgacacctcaaggacctatttatgagaatataagagtgtttgacttggaataa

SEQ ID NO: 996 - DNA, 801 bp, Methanobrevibacter ruminantium
  source 1..801: mol_type = genomic DNA
atgacaacaaatataggtaaaagaattcgtttagaaagaattttcaatagaaaaaccggaagaaccgtaattgctcctatggaccatggagtgtccagcggaccaatcaaaggtatcataaatatggataagaccattgaagaaatctcccaaggtggagccaatgcagtattgatgcataagggtattgtagagcaaggacacagaggatacggaaaggacataggacttattgtccacttgtcagcaagtacctccctcagccctgatccaaacaataaggtaactgtaacaactgttgaaaaggcaattcagcttggagcagatgcagtgagcgtacacgttaacataggctctgaaaacgaacctgaaatgctaatggaacttggagaaatctctgaaacctgcagctactggggaattcctcttcttgcaatgatgtacccaaggggacagaaggtagagaacgaacacgatgttgaaatggtaaagcatgctgcacgtgtaggctctgaacttggcgtagacattgtcaagaccaattacaccggtgacccagactcatttagggaagttgtggaaggagcattggttcctgtagtaattgctgggggtcctaagatagacactgatagggaacttttagaaatggtaagagattctcttgaagtgggaggagcaggtgtagcattcggaagaaaccttttccaagctcaagaacctggaaagatcactaaagcaatttctgaagtagttcacaatgatatggatgtagaagaagctttaaaaatcctcaaataa

SEQ ID NO: 997 - DNA, 1107 bp, Methanobrevibacter ruminantium
  source 1..1107: mol_type = genomic DNA
atgtccccgaaaacatcatgggacgataagaaagaattaatcacaactgcacttgaatcaggaatagaccatgttcttgaccttgaagacagtgaaaacattagaaaggtaggtaactttaacatcatttccacagaggaagacgctgatgtatatttagttggaatagacggtgaaggagacggcacccttgagcttaaagacaatctaaatgagtcatcagacttagcaaaagcaaaggaagctaaaaacagtggaaagacagtatgtgcctatataatcattacagacaagctccatgagcaattggctgtagtcttaggtaaggttgttgattatataatccttgttggaacagactggactgtaattcctcttgaaaatatcatagcagatcttcagaaggaagacgtcaagcttcttgctgctgttagcaatgcagatgacgctcaagttgcaatggaaacattggaagtgggcactgacggtgtcatatttgaagcacgtgactttgcacagataaaggacattgcaggtctgatagacgagctttcaactgaaagctatgaattaaaggacttgacaataaccaatgttgagcctgtaggctctggcgatagggtctgcatcgatacaacaaccatgatgagacctggagagggaatgcttatcggctcatattcaaaggctatgttcttcatccatagcgaaagccttgaaagcgaatatgtggcatcaaggcctttcagagtgaatgcaggtcctgtgcaagcttatgttatggttccaggtaacaagacacgttatctctctgagcttgtaactggcgatgaagtcttaatcgttgataaggatggaaagaccaagacatcaattgtcggcagatccaagatagaaaaaagacctttgctccttttggaagcggaatatgatggcatgaagataaagtcattagttcagaatgctgaaaccataagattagtcgatgagaatggagagcctatttctgtttctaatttggagaagggaatgaaagtcaaaggatttattgacgacagcgccagacattttggtatggcgattgatgagcagattattgagcaataa

SEQ ID NO: 998 - DNA, 1266 bp, Methanobrevibacter ruminantium
  source 1..1266: mol_type = genomic DNA
atgaatcctaaagaattatttgctgaatctaaaactattattccaggaggggttaactctccagtgcgtgcatttgaaccttatccattttttgtaaaagaagctaaaggctctcatatcatcgatacagaaggaaacgactatgtagaccactgtttggcatatgggcctattctattgggccatagcgacgatgatgtgatggcagacgtatataatcagatgaagatgggaaccgcttacggagctccaactgaaaatgaggtcaaattggctaaggaagttatcgacagggttccatgtgccgagatggttcgttttgtaaactcagggactgaagccacaatggcagccattcgccttgcaagaggatttacaggcagaaataagattgtcaagttcgaagggtcatatcatggtgctcatgactatgtccttgtaaagtctggttcaggcgctgcatgtcttcctgattcagcaggaattccagaggacaccactaaaaacaccctttcagttccattcaatgatgttgaggcattaacaaagcttattgatgaagaaggggaaaacatagcttgtattattgtagagcctgtaatgggaaatatcggctgtgtagagcctaatgttaaatatttaaagttcctaagggaaatcactgaagaaaacgacatccttttaatatttgatgaggtcatcacaggattcagggtctcccgcggaggggctcaagagtattatggagtaaagccagacctcgttacctttgctaaggttcttggcggaggattccctatcggcgcatatgcaggtaaaaaggaaatcatgagcttgattgcacctgcagggccagtctatcaggcaggaaccttcagtggaaaccctatatccattcaagcaggtctttccacccttaataaactggattatgagttctatggaaaccttgctcgaaagggagattatttaagaacaaacatatcagatattgttgaagacttgaatcttgaccttcaggtagtggggcttgcttcaatgttccagatctatttcaatccagagcctgtagtcaattatgagatagctaaaaagtcagatgcaaagagatttctggtttacttcagagaacttttaaagaatggcgtatttatcccacctagtcagtttgagtgcaatttcatatcaggtgctcacacagaggaggatttggataagactgctcaagggatagaaaatgcgttgaaggttgcttggcaactataa

SEQ ID NO: 999 - DNA, 714 bp, Methanobrevibacter ruminantium
  source 1..714: mol_type = genomic DNA
atgaatcgaagatcaaagttaataattgcgattttaatagttatcataataggtattgccgttattcttttcggcagtatgtttggtggtgaaaaattatcatcaggtgataaagacattttagtttgtgcaattgacgaaagtgagcctcgaccaggaatgggggcagttgatatggcctttttagtacatatgaatgatggaggaattactaattatactccgatttatccgcatggaatggtccatccgtctatagccgaaccggaagagtatcaggctatgggtgcaggggaaaaactgctcttgcacgattgcttctattgggaagacaaacagcagtgcatgcaatatgcaaaggagattcttgaatataatacaaattattcctgtgatgcagttattgcagttaacagtcaggccattgataacatcatctcagctgcaggtaccttaaagtataacggtgaggaagtcaatgcatccggtattgatttcatcagggaagagcagaataccatgggaatgaccagaggagactctgtaatggttattgtaaatgcattgatgcaagcggctaaagaccctgataaaagggataagatgattaatgctgctgtaagcgaatatacagccggaaatattgcaatgtatcctgaagggtcttttatggaattgctcgcttctaaaggcttgcaagccatgtttgggtaa

SEQ ID NO: 1000 - DNA, 639 bp, Methanobrevibacter ruminantium
  source 1..639: mol_type = genomic DNA
atgaaccaaaaggactattggaacagcatagcagataaaaaggaatttacaactccatttcatcctgaaatattggaaaattatctaaataaagatgattttattgtggatataggctgcggctatggcagaaccttaagggagctaaaggataacggatatagaaatcttagaggctatgacatttcagaaaagatgatagaaaggggaaagaatgaaaatcctgatttggatttgagaataaaagatcccgacacaatcgatcttgatgatgacagcgtagatggaatcattctatttgcagttctaactgcaattatagatgatgaagagcaaaaggctctcattgatgaaatatatagggtattgaagcctggaggcatattatatctgaatgatttcctattgaatgatgatgaaaggaatctgaagagatatgatgaatataaagatgaattgggagtttatggtgctttcaagcttccagaaggagctactttacgccatttcgatgaatcttatatctttaagctatttgactcatttgaaaaaagggaatatgagcgtcagatatatcctacaatgaatggacatacttccaatggcttttattatattggagaaaagaatataggttaa

SEQ ID NO: 1001 - DNA, 1239 bp, Methanobrevibacter ruminantium
  source 1..1239: mol_type = genomic DNA
atgttaatgaatgaacagacaaagctttctaaggatcattatatgatttttggcttaagttgggccggttgggtctttgatttctatgaccttgtcctatttacctttttgatttcacagcttcaatccagcttacatataaatgccgaaatgcttgcattatgcttaggattgtccctatttgctacaggattagggggaatcatttttggagcattaggtgataagtatggtcgtaagaaggtattggaatggacaattcttgtctattcgatagggacactgctatgtgcattctcatggtcattctattctctggttctattcagattcatcactggattgggagtcggaggagaatgggctacaggccaaatctatataagcgagacattccctgataatctaagggccaagtttggagctttcatgcaatcaggagctcctgttggagtcatattggcttcaatagtaggtggaatgataagccctattattggctggagaatgacatttttggtttccatcattccggcaatcaccattatccttattcgaagatatcttaaggaatccgatgtctggattaaaaataaggatgattttgtaaacaagaacatatttcaggagttcaagcaacttgtttcaaaggaatacagaaagatattccttatatccttggtattgtgcatattcggtatgtctgcatattggtttacctattcctggcttccaacctatctggcagaggagaggggccttgcaatggttacaacctcccttggaatcatactgattcagtgcggtgactttacaggatacacaacatttggttttgtagctgaaagaataggaaggcgtcctgcattcactatctacagtttcatcatgggaataagcattgcaatgataacaatatgctggaatcagatagataaggtcccagaccttataatggtattcatgttccttacaggattcggaacaggattctttggaggattcggttctctattctcagagctattccctacaaagataagaaatactggagttggaactgtgtttaaccttgcaaggggagttcaattcatcactcctatgataatcactttcgttggggcctactatgacttaagttatggaatcgcaatagcggcaatattcgcgttccttgttggaatttggatatgggtattccctgaaaccaagggaacagccatcaatgatttggattag

SEQ ID NO: 1002 - DNA, 543 bp, Methanobrevibacter ruminantium
  source 1..543: mol_type = genomic DNA
atgaaaattatagcattattggcaagtccacgtaaaggtggaaactgtgacgtccttatggatgaaatgattagaggagcagaggaaaacggtcatgaagtagttaaatacttccttgaaaaatgtgacatcgctccatgtaaggcatgcatgttctgtgctgaaaaccctgactgcgtacgtgaagacgacggaaatgaaataatcaacgcattggtagatgcagatggcgtaatctttgcaacccctatctactatggtcaaatgtccgctcaaggaaaactcattatcgatcgtttctatgcaatcggacaaaaccctgataagagtcttggaggcaaagcagcacttatcttcactgaaaaccaacctgaaggcacttacaaagactatattgaattaaccaaattctccccattcacctttatgggatatgatgtcatcggtcatgtagatgctggaagcgctggccctgcaggtatagtcgctgaagagcaaaaagacaaattagaagaagcttatgagttaggtaagctcttctag

SEQ ID NO: 1003 - DNA, 789 bp, Methanobrevibacter ruminantium
  source 1..789: mol_type = genomic DNA
atgattaatatagtagcaggcttaggtgaaaatgaaaacatcatattggcctcaaggcaactggaatcaatagatgacttaaatatccaacttgtagacaatgaggatgacttatttgatgcatttaaagattctaatgttggtgcggtggtaagaggctctctaaaggcttcaaaagtaatcaaattaataaagcaatataagtctgactgtgaagtaaacagagccacttatgtaaacacatccaatgaccctaactttaatgactcctatgagtttttgctttctcctgttggaatagatgaaggcaaaaacatagatgagaagatcactttagccatccagtctgccaattttattcaatctcttggaaagactccaaagatagctgttcttgctgaagggagaaaggatgactatggaagaagcgagagaatagataaaagcctgaaggagtctgaagagctcactcgacttttagaggaaagattcaattcccttgacaattttgacaacagcagcgaggatgtttctaaaaactaccagataaaaaactattatattctccttgagcaggcaatcaatgataagttcaacatactcctagcaggtgatgggatttttggaaatataatgttcagggctcttgttcttcttgataaatggcctagctatggcgctgtaacacttggaatagatgagatatttattgatacaagtcgtgatcagactgttgaaggctataaaaggagtttggagttggcatataatcttgctaaattaaaatag

SEQ ID NO: 1004 - DNA, 765 bp, Methanobrevibacter ruminantium
  source 1..765: mol_type = genomic DNA
gtgccaccacaatttttatataagatttatgaaaagcgcctaatgaatgagctggatccagatagaatgcctaggcatgtagctatcattatggatggaaacagaagatattccagaatgaaaggtgatatggaagttatcaaaggccatgaattaggagcagacactttagagaaggttttggactggagcatagatttgggaatagagatagtcactgcatatgccttttcaactgaaaactttaacaggccagagcatgaagtggaaggccttatgaggctttttgttgaaaacttcaaaaagatcgtagaccatgaaaagattcacaagcataaggtccgcgtcaaggttgtaggcagaattgagctattgccagatgatgttcgagaagcgattaaggaagctgaagattccactaagcagtataatgaaagactgttcaacttggcaatcggctatgacggccgtctggagatagttgatgcaatcaagaagatctataagaaagtggaggatggagagatttccattgacgatatagatgagaatcttgtcagcgaaaacctatacactgcaggtcttgaagaccctagccttatcataaggacaagcggagaggaaaggcttagcggtttcctcttatggcaatcatcttattcagagctttatttctgtgatagcctatggcctgagcttaggaaggtagattatcttagggccatcagggactatcaggaaagggataggaggtttggtgtatag

SEQ ID NO: 1005 - DNA, 762 bp, Methanobrevibacter ruminantium
  source 1..762: mol_type = genomic DNA
atgatagatacccattgtcatatagattttgaagaattcgacgaagatagggaagagctaatcaaaagggctcaagacaagcttaatgcagtaatcaactcaggatacagtgtggaaagcaacaataaggttctagaactttcaaaggaatataaggatttcatctatcctacatttggctttcatccggtttcctctcaaaattctcctgaagaggagataagtgcagcccataatcagatcgtcacccatctggatgatattcttgctgttggagaggttggaatggacttctattactgtacagacaaggcccttagggctcgccagcaagagatattcatgggatttgtagagattgcaaatgaatataatgttcctctattaatccatggacgggactgtgagagaaaaatcttcaatctcctaaatgactatgatgacattcctaaagtaatttttcactgttatggaggcagtctgaaggtagcaaagagaatattggataaggatgactattatatgagctgttcaaccatggtatgctatagcaagcatcatcaggagctttttaaaaacattcctctagagaggattcttacagagacagacagcccttaccttgcaatgacaaaggaggagagaaacgagcctgccaatgttgtctatgcagttgagaaattagcagaacttcatgaaactgatgtaagtgaggtagatgaacagactgaaaagaatgcaagatatgtgtttgatatataa

SEQ ID NO: 1006 - DNA, 681 bp, Methanobrevibacter ruminantium
  source 1..681: mol_type = genomic DNA
atgaaaccttatgtgattttaaatgcggctatgacattggatggaaagatagccacaaagacaggcagctctgagatttcaggcaaagaggaccttgagagagttcacgagataagaaagaaagttgatggaataatggtagggataggaactgtccttgcagatgacccaaggcttacagtccataagattaatgcaagaaaggaagataatccaatcaggatagttgtggacaataaggcaaggactccattgaacttcagaatcttgaatgatgatgcagagactatcattgcagtgtcttccatttgtgatgagagaaatgaaaattgtgatgaagaggctgtaaaaagagctaaagagcttgaaaaaagagtgaatgtattttattctacaggggaaactgttgatttggtagaatttatggaatatctctatgattatggaatcaagtcaataatgctggagggaggatccacccttaacttttcaatgattcgtgatggtttgatagatgaagttaagatatgcattgctcctatgattgttggaggaaaggattctaaaactttctttgatggagatggctttgattatatgaaagacgctgtacaattggaattgattaacagctttccattaggcaaggactttattatggagtataaggttttaaaataa

SEQ ID NO: 1007 - DNA, 147 bp, Methanobrevibacter ruminantium
  source 1..147: mol_type = genomic DNA
atgggaaatatggctgaagcaagaagaaagatgcatgaaagagatgagagaataaaaaaagaaaataagtctgatgtcaagaagattagaaatttcttcttcggatgttgtgataataaagaaaaaaagaaagtaaaagagcattaa

SEQ ID NO: 1008 - DNA, 645 bp, Methanobrevibacter ruminantium
  source 1..645: mol_type = genomic DNA
atgcacagtttattcagtgatggagagctattgccatctgaacttgctagaagagctttagtacttggacatgaagcaattgcaataacagatcatgttgactattcaaacattaacacaatccctgaaatcagcgctgcaattgatgacataaattcaaattgggatattaccgttgttttaggagctgaaataacccatgcacctaccgaatcaatccctgcacttgctgagaaggctcgtgagcttggtgcaaagatagttgtagtccacggtgagacattgaatgagcctgttgttgaagggaccaactttgcagcagtaaactgtaaggaaattgatattttaggccatccaggactcataacaaaagaagaagcagagttagccaagaaaaacgatgtggctttagagataagtgcaagaaaaggccactgccttggaaacggtcatgttgcaaacattgcaagggaagttggaaatgaccttgtcatagatacagacacacattctccagatgacattattacctttgagagatcaattgaaataggattaggagctggaatgaccaaagaggaaattctaaaagcaactattgacaatccaagaaaaatattaaagagaaatggcattgaaatttaa

SEQ ID NO: 1009 - DNA, 1059 bp, Methanobrevibacter ruminantium
  source 1..1059: mol_type = genomic DNA
atgatttccgtatttgttccgtcacatatcactggcttttttagtattcatgacaatccagatcctttattgaagggttccttaggtgcaggtgtcctattggataagggggtaattacagagattgattttaaagagaattttgatttaggcggtgtaaatgataatgatttgaatcttgactctttgaattcagatgagttattaattataatcaatggcaaaagggacgaatataatgaagtaatcattctaaaaaccatacatctaatgaaaaaagcattggataaagaagatatttccttgtccggtgtggtcataaaccaaataatccaggttcctataggatgcggatttggaacttcagcggcttcagcacttggtgtggcgatttcaatcaatgaactatttgatttggggctttctcttgaagagtgcggccaatttgcccatttggctgaagttgaacttggaactggccttggggatgtcattgcagagctgtcaaagggaattgtccttagaacaacgccaggggctccaggatatggggaggcaaaatccatagttcctcatgagaagactggctttggagtctttgaatcattaaatgctgatttttatataatcacaaagtctttaggtgaaatttcaacagcctctatcataagtgatcctaagcataagaagctcattactcaagtgggtgagaaaactgctgaagagtttaataaaaaggatgatggaattgtcataggttccaaatttaaaaataagttcaatgtagctgttgacagcgaattcaatgaagaagaaaccattaaaaagtttatgaaatcttctcttttctttgctcgaaagacaggtttaatcagtgatgagctattggaattggttcacaatctccatggaaaggtcataggaagttctatggcaatgttagggaatacattatttgcaattgctacagaagagcagaaattaaagcttgaagcggaatattatggggaatttgatttctataaattagaaaccgaaggaattcgtataatcaaataa

SEQ ID NO: 1010 - DNA, 534 bp, Methanobrevibacter ruminantium
  source 1..534: mol_type = genomic DNA
atgataagattaagttatgatatgcaggtctatagaaaagacttaagagaagtcctaaaaagaacagacaatgtagttgaattgggatgtcatgtaggcaagaccagtgagcttattttatacaaattaaccactggctctcttattggaatagacaatagtcctgaagctgttcagcctttggaaaggctttcattccatcatgaaaactttactcacattataggggatgttcgccgtcatgaggtcttaaaggaagttaccgaactcataggccaatgtgatgtattgtccattgatttaggtggaggatatcatccagacactgtctttaaagtctattatatttgggcgtctaccttaaagccaagggatgtcttgattagaaatcagggattgattgactttgtcaattcagcaataactacagaagatatgatttcagagcatggctggcttgaatcatgtggagatcaaggaattcctcctcaaattaaggagttcagcttatggacagataagttggatgactga

SEQ ID NO: 1011 - DNA, 717 bp, Methanobrevibacter ruminantium
  source 1..717: mol_type = genomic DNA
atgaaaagatcaaaaaaattaattatagcaattcttgttgtaatccttttgggattactattggcaattgcaggatacttcgttggtggtcctgacttgtcacaagaaaataaaaccattttagtcttagctgctgataaatacgagcaacctaatggtggttgtgatatggcatacctagttcgtttagaaaatggtagtttagctaattacactcctgtttatcctggtggaatgtatcacccttcacaatcagctcctggaaaccttcagggcaatatgctgcttcacgattgtctgtggaacggagttgaagacggtatgcaatatgctaaggagattgtggcattccataccggcgttgaagctgatgctgttgtagtcctttatgacgagggagtggacaatgtattggattccatcagacctattgagattgatggagagccaaccaacctaagcgcaactgacatcattcgtgaaaacgataattatgcaggttataagggtaacgaaggtgtaaccggaaccatgtctagggcagatgctgttatggtattggttaaagcggtttccaaacaagctaaagatcctgctaaaaagagcgccatgttgcatgcagctttagatgagtacactaaaggaaatattgtaatgactcctaaaggttctttcactcgtttgcttgctacaaaaggattggaaagctttgcatag

SEQ ID NO: 1012 - DNA, 1329 bp, Methanobrevibacter ruminantium
  source 1..1329: mol_type = genomic DNA
atgaaagaatacaagatagcaattataggaggagggccagcaggaatgatagctgcaataagagccgcagaaatattaggcccaaatgcagtatgcattctagagaagaatgaaagcttaggaaaaaagcttcttttaacaggaggaggccgttgcaacataacaaacaacactccaatccacgatcagcttaactattacaataaaaacaaaaacttcctaaagcactcattatacacacttccacaagacaagctacttgccatctttgaagagaaagaccttgaatttcaccaagaggacaataaaagggtcttcccagacagcgaagatgcccatgacatactggacattttagaggaatatcttgaagagttaggggtagatgtgtataacaatactccaataaatgctcaagacatagagcatgaattaaatgaaaggatggaaccggtatttgaaatagaaaatgaaaagatatcattaaatgcatcaaagattatagtatctacaggaggcatcacctatccaaatacaggttccgatggagatggatataaaatagcatctcacatgaatcatacaattacagacatcaagccgggacttgtctcattcaatattgatgactttctgcttaagaccttatccggactcactttagagaatgttgaagtctcatttaaggataagaagaaaaagatatctgtaaaaggggatatcttgattagccactttggccttacaggccctgcaattattgatttgtccaacagattgcttgaaaaatccgatttaactgtccttgacgacaagttaaacctaaagagcagagatgaaatagaggaattggaactctttacaaacaggattacaatcgactttactccagatctaacagaggaagatataaagaaccagataacaaaggacagcccgaagaatggaaagatggcaataaagaactatatgaagaaataccttccaaataactttattgattatttcctaatgaagatagacatcaatccgaagaagactatggcaaacattactaaaaaggataagaacaaattggctgaaaaccttaaaaggcatgtctttgagatagaatcccttgagatggacctggcaaaggttaccattggaggagtcaaatcaaaggagatagatgcaaagacacttgaatccaagtatgtggaaggattatactttgcaggagaagttcttgaagtagctggacctactggaggatataacctacagatagcattttcaactggatacttagcaggtcaagaggctgctaatagcttaaaaaacgaataa

SEQ ID NO: 1013 - DNA, 1323 bp, Methanobrevibacter ruminantium
  source 1..1323: mol_type = genomic DNA
gtggattacttattacgcgatttaagaagaactcattattccaaagacgtaaacccagacatcagcggtgaagaagttattataatgggttgggtacatgaaatcagagacttaggcggaatcatctttgtaatcatcagagacagagacggattggtacagattaccgcaccaagcaagaaagtagatgcagaaatccttgaagagctaagggcacttagaaaagagtctgtagttgcaatcaaaggaactgttcaagaggcaggaaaagcaccaaacggcgtggaaatcattccaatcaagacaactatcctaaaccctgcaaaacagccattgccaatggatccaaccgaaaaggtcaaggctgaaatcgataccagactaaactcaagattccttgacttaagaaaagcaaacgtaagctcaatcttcaagataaaggcaaacatgtttaaggcagttcgccaatacttcgacgaacagggcatgattgaaatcaacacccctaagcttgtagcttctgcaaccgaaggaggaacagagcttttcccaatcacatactttgaaaaggaagctttcttaggccaatcccctcaattatacaagcaaatgatgatgggagctggattcgacaaggtatttgaaatcggacaaatatttagggcagaagagcacgacacccttagacacttgaatgaagcagtctcaatcgactgtgaaatctcctttgcagatgatgtggatgtcatgaacgtattggacggcatgattaccagagttctccaatccactaaggaaaactgtgcaaaagagcttgaaaccttagaatacgacttaagcgctatccctgaaggaccattcccagaagtcaaatatgacgatgctgtagacatcatcaactctaaaggaatcgatatggaatggggagaagacttatccagagaagctgaaaaagctttaggagacactcaagaaggtttctacttcttaaccgattggccatcagcaatcaagccattctatgcaatgccttatgaagacagacctgaaatcagccatgctttcgacttgatgtataagaacctagagatctcctcaggttcaatcagggttcaccaatatgaccttttagtaaagcagatgattgaaagggacttaaacccagatggattcggaagctatctcaaggcatttgaatatggtatggcccctcacgcaggttggggtgtaggtgcagacagattggctatggttttaaccggtgttgaaaacattagagaaactgttctcttcccaagagacagacacagattaactccttag

SEQ ID NO: 1014 - DNA, 1281 bp, Methanobrevibacter ruminantium
  source 1..1281: mol_type = genomic DNA
atggaaattttaagatatgagagagaaactgcagatgagctaatcaaaaggtcacaggcagacatcaatgaaatattaaacatcgttcaagacatcctatccgacgtaaaggaaaacaaggatgaagcggttaaaagatacactgcaaagtttgacagatgcgaattagatgatttgcaagtttccgacgaagaaatcaagaatgcttatgataatctagatactgatcttatagatgcccttaaaagggcttcccaaaacattgaaaagttccataaggcccaaattccagaggaatggtctatggaagtggcaaaaggtatcacagcagggcagataatcagaccgatcaatagcgtcggctgctatattccaggaggaagagctgcctatccatcatccatattaatggaagtgattccggctaagattgcaggagtggaaagaatcatatgctgcacccctccaggagccgacggaagaatattggatgcaatacttgtagcggcagacttggcgggagcagatgaaatctacaagtgcggaggcgcacaggcaatcgctgcaatggcatttggaacagaatcaatccaaaaggttgaaaagattgtaggtccagggaatgtctttgttacaggagctaaaaagcttgtctatggtgatgtggacattgagtttccagcaggcccttcagaggtattgattcttgcagataagactgcaattccagaatatcttgcccatgacttcctatcacaggcagagcatgaccctgaagcatcatgctttttagtgactgatgatgaaaaaatagcagaagaatccaacgaccttatagaaagattcactaaggaagctgtaagaaaagagataattcaagagtccttggaaaagcacggacatataattctctgcaaagatatggaagaggccattgaatttacaaatacctatgctccagagcatttgatcatatcaactgaagatgacaatgcaatccttgataaaatcaaaaatgcaggatccatattcttaggaaaatactctccagtggcagcaggtgactatggctctggaacaaaccatgttcttcccacaagcggtggagctaagatgtattcaggcctttcaaccgaatcattcatcaaaaagcctaccgttcagaccataacaaaagagggtattgaagagctatccaagacagtcattccaattgcagaatatgaaggcttttatgctcatgcaaattcagtgaaagtaagattagataaaaacgaatag

SEQ ID NO: 1015 - DNA, 306 bp, Methanobrevibacter ruminantium
  source 1..306: mol_type = genomic DNA
atgtataaagatgaaatgattcaattacatcaatttttagtatatgttttaaaatatttagacacagataataatgctcatgaatatattgaggagtatcttgcgcttaacataagccctcatcatattcacagaacaaaagcggagcataaacaggcaatcttcgttctttcaaacactatttcagaagtgatcttgcataaggaagaaggttccataccaccaaatgtatcaaatgcattaagggatcttgttagaagatctaaaaaggaattaaaggctgctgaagcagctcaatcaaaataa

SEQ ID NO: 1016 - DNA, 1389 bp, Methanobrevibacter ruminantium
  source 1..1389: mol_type = genomic DNA
atgtctactcgtaaagttgtttgtttagtggatggagagcattaccttccggtgacccgttctgctgtaaattccattaatagcattgaccatattgaagttgtggctcttgtttttataggcggaactgaaaagcttaaattaggtgatgaggaagagtatagcgaacttttagacactcccgtttactttggaaaggataaaaaccagattccatataaattgattgaagatgtcatcaaaaagcataatgcaaatattgtgatggacttaagcgatgagcctgttcttgattatgacaagcgctttaagatagcttctgttgtactgtcctgtggagtaatttacaagggggctgattttgaatttgagcctttgactcaatatgaaataatgaaaaagccttccctaaagattttaggaactggaaagcgcataggaaagactgcagtttcaggctatgctgctcgattgattgacaagaataactataatccatgcattgttgctatgggtcgcggaggtcctgaagaacctgaagtagttcatggaaatgagattgaaattaatccggagtatttgcttgagcaatccaataagggaattcatgcagcaagcgatcactgggaagatgcccttatgagccgtgtattgacaatcggctccagacgctgtggaggcggaatggccggcgatgtctttgtcacaaatatggataaggcagctaaaaaggcaaataagcaggatgctaaatttgttatctttgaaggaagcggtgcagccattcctccgattaagacagacaaatccattgttctggtaggtgcaaaccagccaataggaaatattctcggatactttggtccttatcgcataatgttaggggatttggttatcctgacaatgtgtgaggaaccgatggcaagcaaggaaaagataaaggaaatcgaagacttcatccataagatcaaacctgatgttgatgtgatatctacagtctttaggcctaagccattgtcagatattaatggcaaaaaagttttatttgttaccacagctcctgaagcggttagggatgttttatcaagctatcttgaagagacttattcctgtgagatagttggattaagctctcatctttcaaacaggcctcttcttcaggaggatattgaaaaatacaaggatgatgtcgattgcatagtgactgagcttaaggcagctgcagttgatattgtcactaaggaggcaatagaatctggaatagagcttgtatactgtgataatattccggttcctataagcgatgactatcctgacctttcagagtctattctaaaggtggttgatggggcaattgaagagttctcctttaatatgcttttagattaa

SEQ ID NO: 1017 - DNA, 1062 bp, Methanobrevibacter ruminantium
  source 1..1062: mol_type = genomic DNA
atgatgtctcaagattcaaacaaaaatgatataaattcatacgattttccatcaagggtggaaaaggctttaaaattgattcatacagattctttcaaagcattggattattttaatgaaattctggatgattttttcaagttcacacctgatgaaatcaaggaaaataacttatcttcccttataataaattcattgaatggaaagggttccattttaaatgcatttgataaaatcgatgaggctgaagaatgttttgatatggttttaaatgattttgacagccaagatttcacttccctaattaataaggcattgattttaagaaaaaagggacatttggaagaatctttggattattacgatgagatagccaaatactatcctgataagaaagagcttattttagctatgaaaagtgaagtttatggtgaattgaaaattaagctctctgataccgatttggatgattatagcattgaagcaaaggacttaattgggaggggtcttgcatcccatgagaataagattgttttagaagccttggattattatcaaaaagcgattaaagcagattcaagctgtaaatatttggtcttaagccttatggatgatgttaaaagggaattttttaagctctttctctatgaggatatagacattgaaaaggacgagatttcaaagaaaaaaggagctgttttgcattaccttttcattcaaaacaatctattctatgcttatatgctaaatgaagagatccttgaagaaaataagaatgacttgtttgcattgaatgcaatgggaatgatattcttctatttggatgactgtgacttgtctattaggtatttcgacagatgtaacactattgatgagaaatatctttacccatatcttaataaggccattgcattggctagggctaaaagatttgatgaagctaaagagtcctttggaaaaattaagggattgcctaatctgattcgggatccaaatgaggaagagttggacatttttaaaagaacaatcatttcaaacagcatctattccttaggattttag

SEQ ID NO: 1018 - DNA, 441 bp, Methanobrevibacter ruminantium
  source 1..441: mol_type = genomic DNA
atgtcacatgttgaaaagtcattagaattatttgaagctaaatttaattgtgcccaatcagttttttgcagtttttcaaaagaatttggccttgatgagaaacaagcattaaaaatagccgcttgttttggtagcggtatgcgtaaaggcgaagtctgcggagcttgtagtggagcattgatggttttaggtttaaaatatggtcagagcgaacttggagatagagatagcaaactgaaatctgataagaagtgcactgactttttagaggaatttgaaagagcaaatggttcttatatttgcaatgaattattagggtgtgatataagaactgaaaaaggagttaattatgctaaagagaataatctttttatcgaattttgtccaaaattcgtagaatctgcaacattgatagttgaaaaaatattaaaagaagaatag

SEQ ID NO: 1019 - DNA, 1080 bp, Methanobrevibacter ruminantium
  source 1..1080: mol_type = genomic DNA
atgggtgatagtttgaaagttattatagatgcagctaatgtggctcattatcaaaaaggggaaaattcaaaggctaaattaaagaacattaccttggctgttaaggcattggaacaggggcatcatgattttttaattatagcagatgcatcattgcgtcataatattgatgataaggacacttttgtaaggcttgttgaagatggaatcatcgatgaggttcctatcggaaatgtggcagatcactatatccttgacttggcttatgatgaaaatgcaaagattctatccaacgataagtttagggacttcatgtctgaatttccagatatcaacagcatgaggattcctttttcaataaaggacaatgagttaatattaggtaagacaaagaaacctaagaaggttaaaaatctcttgcagaacatctgtgatgaaatcttaaatgagcttgagcgcaagcgttgggttgtttataagggaaaggagacaactaagttcacacctttgaatgttgcaaaacaagccattttgattttagaccaatctgaaagggatgatatgtcctctaaaatcgaaggaatattttcaaagcttcctatgtttgacaaggtcatggaaatggttgatgacgtagagacctctgtcccttatgttatttttgttcttgtccatcctaaggattataaggctgcagtaaaggatgcaggtaatatttcagtcactgtggcagataggttaagattggttcataagcctttgattgcagttagaaatgacctctttattaagccaggatatttcggattgaatattgtccttacagatgaggtggaagatattcctccattcaatattgagattcagacaaacacctatgatgaggtatttatcaagaagaattccagaaatatagcaagtacaattgctggcagattaggttcctggaagtttccatttgtttcagttaagcctaatatgattttggaaaaacctggtgagtttgaaatctatttagagaagaattctaaaaagaaaaagaaagataaatctaaagataaggataagaagaaaaaatag

SEQ ID NO: 1020 - DNA, 1203 bp, Methanobrevibacter ruminantium
  source 1..1203: mol_type = genomic DNA
atggctaataatagtgtattaagacgtattgtttctctaattaccaagcataacatacttagtataggaactaagtattttcctactacagagcttgaaacagagtatgtagatatgttcaattatactcaaacaatgcttatggaaatcgataaagcgaatattactacagaaagtatcttcactaatctagttagagatgttggccgtgaaaatattccagaaaatcatagcttttatgaattgcttcccgctcaaaacaagatagatgaatatgccttagtaagcaagatcatcatgggaagtgacagatacatgtatgttgagctttcagagccttcctatatcatagattacttcacagacattatcttaagggaaaatggggagattattgaaagaagcgaaacagagattgtttcaagattgatgtctaaaaacgatgcaataagaatagccatcaagcttgtagggattggattggataataacattcgtgtaagggcagcagcaggaatgactggcgctgcagccattgaaagatcaatcaagttcaataaggaagttggagatgttccaggtgtggcattcaccaaattaggaggggaatatgcccttgttttagacactccatttaaattgggacaatctgaacatgcagaatatcagcattatctattcattgacatagtggattccactaatttcatatcaaagcatggtaaaaacaagcttgtagagcttatgaccagcgtcaaggagtttatggaaaactgtgaaggtcatattgaaggctaccgtgaaggtggagatgaccttattgctcgtttcccaagtaagggagtggcaattcgtgcaggccttgactgtgcatggttcattctaaataatggcgcaaaggtcaagataggtattggaagaagcagaagagaggcaggagaacgtgcaaacattgcagagggtattaaaggatttggggcattgactctaatcgtatttgatttggcaaacggattgtatgcatattatgttccatcagacttttcaagaaccttgtgtgagcttttcactaccaagaaaggcaagttggtaactgcattcctgttggtatttattttatgctatttattggctgttttaggctttggcctttatggaattttggtatttattattgtagtggcttattatactttaaagtag

SEQ ID NO: 1021 - DNA, 306 bp, Methanobrevibacter ruminantium
  source 1..306: mol_type = genomic DNA
atggcaaatgaaggtggaggacatttaaagactattttgatgattataatcttaatagcttttatttgtggtcttgcattaggagtttcagttataatgggaggggatgataactctcaaactgaatctgaaggtgtgcactatgttaatgtgacaaaaaacattactgaatataatgaaagcgggaatcttattgaaaccgaagatggcacacatatagaattttcttcttacagcgacaatgtaactgaaggagaaaacgttacagcctataattcttcaacagatgcagggaatttgttttaa

SEQ ID NO: 1022 - DNA, 1194 bp, Methanobrevibacter ruminantium
  source 1..1194: mol_type = genomic DNA
atgtgcctggttaatggagttagggctgcaggtagccgccaaggcaaatacggcctagcagttatagaatctaaagacagcaatgcctctgccgtatttacatcaaataaggtagtggcagctccagttattcatacaaaggaaatgattaaaggcggtaaaatatctttagtcgttgcaaacagtggaaatgcaaactgctttactggtgaggatggaatagttgactgtgataagacaattgattttgcgtcaggtatcactggaatctcaagatctgagattgcaacagcatctaccggtgttattggtcgtaagatgcctatggatattatattgccattggtggaagagtccatttctaaattagagcattcaaatgaagcatctacagatgctgcaaaatcattaatgacaactgacacctatcataagcaatttgctgtagagacaagtattgatgggaaaaaggtcacaattggtggtgtaaccaaaggagtgggcatgattgcacctaatatgggaaccatgctttgtttcttggctactgacgcttcaatatctgctgaatatatcaataaggccttaaaaacagcagttaataaaagctttaacatgattgtagttgatggtgatgaaagtaccaacgacacagctatcctgatggcaaacggcaaatcaggtgttgaagttgtaaatgatggcgagattaaccctgatttccaggaagcattagacttcatctgcattagcttagctaaaatgatggctcgtgacggcgaaggagccaccaagtttatcgaatgtaaggtgaatggggctaaggatgaaaatgatgccattttagcttctaaatcagtcataagttcttctcttgttaagtcagctatttttggcggagaccctaattggggaaggatagttgcagcagtgggatattccggctgtgaaatggaccagaatatgataactgtgattataagtgatgacaatggaaaagaagccattttggtagataaaggtaaaatccttgcatttgaaggtacccctaaccttgacttggcagaaaaaatcatgcaggagaaaaatataaacatacttgttgatttatatcaaggggacgcatctgcaaccgcttggggctgtgatcttacctatgattatgttaaaataaatgcagagtacactacttaa

SEQ ID NO: 1023 - DNA, 642 bp, Methanobrevibacter ruminantium
  source 1..642: mol_type = genomic DNA
gtgaatgattacttaaacaattccgatactaatgacgctcttgtaaaattgcctgcaaagcaaataggaaagaatgagattggaactgtgtcaatagaaggtccttatggaaatacaagctctcctgttaaagtggcatatattctagggcagcatccaagggaattcagcgctcatgatgcaatttattacgctttacaaaacaactcaaatgaacttaattattcatattatgtttatagaatcaatgtaaccaatgaaacagccgactttgagcagagcaggatgaatggtcaattgttggctcaggagtttgtagtaaacgattcaattaacaagagctatgacctggttattgacattcactcttcaaatggaggatatatacaggacccttatatattcgctcctgtctctagcgatcttttagcatatgatgctgcaaataacattacaaaggcattgccttatgttacttattatgagcctgctagctatacaagtccacagtattctacaattcctcttgaagagggtggaattgcctctatcatatttgaaatgagaggaaatccggacaatagtttagagcatcaggctgatgactttgttaaggcagtggataaattggttttaaattag

SEQ ID NO: 1024 - DNA, 1185 bp, Methanobrevibacter ruminantium
  source 1..1185: mol_type = genomic DNA
atgattatcaatggaaaacgttccttagcacatgtagagaaagtagcttggattaagccaattgaaggagcagacaatattgggcttatcggagtccttggatggacatgcattgcaaagattggtgaatttaaggaaggtgaccattgcgtatacattgaaatcgattcaaaggtacctgaaaaggaatggtccgagttccttagagctaaaaaattcaaaatcaagacaatgagacttggaaagttcaaggttatctctcaaggtcttgcattacctcttgacaagtttgatgtggaaatccctaaaaaagtgggaacagatgtaacagagcttcttgagattacctactccaaccccaaggacatcaagcgtaaaagcgatggtccaaacaaatacgaagagatggctagacgcagaaaggcattattcagaaagccttgggccaaatggcttatgaaaagagaatggggtaagagactaatgtttttcatcttcggtaatgagaaggacggttccaaaagcttccctaagaagtttgaatacgttcacaaaaccgaccaagaacgttgcgaaaacatgcctgatgtcctaaaggacaagactccattcatccgtacacaaaaatgtgaaggatcatctggaacattcattcttgagcttacaaacagcagacttggaaaaagggaatacgagttttacgtatgctcacgtaacttaagagtctttgaggatgaaaacactgacttttgggatgttgcagttaaatacgacattgaaaacaagcttaaggattatcttgaaaagcataaggactgctcttatgtagcatggcaaggagaagtctgcggaccaagtattcaaaacaaccctcataagctaagcgaaaaccatttattctgtttccatatgattgacagcgaaaagggcatgtttgacatccgtgaagctaaagagctatgggacgaatacgaaatagaatcagttcctattgatgaggaagaatacatccttccagatgactttgaagaattcaagctaactgcagatgggttctacgaccctgaggtttgtgaaggacagaagaaatgcagaagagaaggattcgtttactacaagacaactgatcctaacttcagtttcaagaacgtgtctagaaagtacttattaaagattggtgaataa

SEQ ID NO: 1025 - DNA, 612 bp, Methanobrevibacter ruminantium
  source 1..612: mol_type = genomic DNA
atgggaaataaaactggacttttacctgctaatggacatcgcattcagggtaggtcaagcgagtcatttttagacgctcgtgaaattattatggaacttggacttgaaggaaatgaagtttttatggatgcaggatgtggagacggacatgctgcaatagaagctgtagatattttggatgatgatgcaacaatctatgcagttgacatttatgaaccgtctattgaagaccttcagaaatttgcagttgaaaagggttatgataatctaattcctatatgtgcagatattcctgattatattgatattgatgatgatactgtggatatgatattgcttattaatgtatggcatggattcaaggcaaccaggagaatggatgaggctattgaagagcttaagagaatcttaaagcctggaggcaagattgcaatcatggactataagaagcaggaagctaaacatggtcctcctataactgtaagaagcagtccagaagatcttgaagaggtctttaaagaacatggcatgtgtttgttctctttaaatccagatactggagaggacattcctcaaggcaagtcacattatttgattatatttcaaaaatag

SEQ ID NO: 1026 - DNA, 390 bp, Methanobrevibacter ruminantium
  source 1..390: mol_type = genomic DNA
atggataataaaatcaaagcaggcattgcacttgcaataatcgttttagtggctgtcattggcttttcattcattaatgaaagcaataatgttgtaaatcaactgtctccgcttactgaaagttttgactattccatggaacctatgacaacttgggatgattctaaaaaggaatattcctttaatcagaacatcagcagtgcaaacggtaaagactataaggacatcaccatcgatatattgatgtataacgatggaaaatccttagataagcataccagcactataaatagcactaaagacggttcattcaatttaaaattcactcaaaggctcgaaggagaacctgatgaattttattataatgtgacaaaggctactgaaatataa

SEQ ID NO: 1027 - DNA, 1029 bp, Methanobrevibacter ruminantium
  source 1..1029: mol_type = genomic DNA
atgtttaaagtaagcaaaagcatattaatcgtttgtttagtatcccttttcctattagtttcacaagctagcgctgcagactctaatggcttaagcataagagatattaattcagttgatgaaaactacaatcttgatgccagttatcttgactccctccaagattcaaatggcatgcattcagattcctctctaaactctaatggcttagatgataagtcaaactatgacaagacttcaataagtcagaatcaaacctcctctaacttaaaagacaatgatttagataataatgatggagaaagcgagattattgaagaggaagctaaagacaccgaaggtgtagtgatggctggagacagctacagctgcggacccgcatcccttgcaactgcattaaacaggcttggcttaaaccttagcctatctgaagtatcccagcataccaacaccagcaaggatggaaccaatatgcaatccttaatcgatgctgcaggatactacaatttctctgcagttggagttgaaatccaatctaaagacttagctgaaaactccatagtccatttggatattgatggagcagaacactggactgtagtaagcaaagtaactgaagaaagtgtctttttagctgactcaacaaggggaaacatcaatatgagcattgatgaattcaactccctctttagcggaaaggcaatcctattatctgaattgaacaaaaccaatgtttcaaatgtgatatccaacaaaaacattaaggttttagatcaatcccaatgcttaaacgttaaaggaaaaggatgggttagagtgcttgtaggttataagaccgaatggagatacggcttaatcaacacctattcatgggtgctaagaccaaaagtcatcaatggacatgtatcctattctgcatgggaatatgtaaaggtaaaacatcttagttggggaaaatataaggtcaaagtacctatctacaaatacaagtacatcaaaaaccaatatgaggtaaaaggaaagaaataa

SEQ ID NO: 1028 - DNA, 879 bp, Methanobrevibacter ruminantium
  source 1..879: mol_type = genomic DNA
atggaaagcattaatcttttggtagaagcgctaccttacattaagaaattttacaataaaaaagttatgattaagtatggaggccatgcaatggtagatgctgatgcaatggcttctacagctcgtgatactgtgctcttaaaatatgtaggcatgcagcctattgttgttcatggaggcggtcctgaaattacccgttccatggaaaaattaggaaaagagcctaaattcatcaaaggccttcgtgtaactgatgaagagacaatagacattgtaaagatggttcttgtaggtagcatcaatacagatatcgtatctcagatatgtcatcatgacggaaaaggagcaggattgtccggtaaagacaataagcttattcaggcctctaagaccatgcatgagattaaggatgacgataccggtgaaatcgagcagattgatttgggattagtcggtaaggtggataagattaaccctgaaatccttgagatgtatactgaaaatgattatattcctgttattgtccctattggaattgcagaaaattctaaaactttgaatctcaatgcagatactgttgcaggtgcaattgctagtgaagttgatgcagaaaaacttataattttaacagatgttccaggtgtcttaagggaccctaatgacccatcaactctcattcaaaagatccatattgatgaggttcctcagcttattgaagagggaataatcagtggtggaatgattcctaagattgagacttgtgttgaagccttgaataatggtgtaaaatcagcgcatattttggatggaagaattaagcacactttacttattgaaatctttacaaaggatggaattggaactatgatttataagtag

SEQ ID NO: 1029 - DNA, 735 bp, Methanobrevibacter ruminantium
  source 1..735: mol_type = genomic DNA
atgagaaaagtatttgaaagcatcatagaagctttaaagtatccattcagagattggaaaaatattattgtaattggctttcttctattaattgcttctttaggaaggaaattgccttttccagaggacccacagcagacagttgtttttataggtgcactcttaatactttttttgcaaacaggatacggttcaaaaatcgtttatagcggattgaagggagagaatattcctccaaaactaaggcccataccaaaactgatatgggaaggttttaaaaaaatcattatcatcatcatttatgtccatataatggtcatattcattagtgttggaaaaacccaattaagcgcaaataatattccaatagccataatactatttgttttagggggaggaacttatctcttgatggttggaggtctcttgaacaggtatttccaccatggaaagtttattaaggcattctatttaaaggaaatcattgcaatcattaagaagattggattttgggacatgatatccatcgtcatatgtgccatgatatctcaaacattaacaatttccacattcatcaatttagttaagggcatgttcacttcaatagagctggttttatgtataattgcattcttcttggcaccaatagccctaatgtccaccaaaagattgatctcattaaatttaagaagaatcttatcttcagatgaagatttggaaaaatttgcattctaa

SEQ ID NO: 1030 - DNA, 744 bp, Methanobrevibacter ruminantium
  source 1..744: mol_type = genomic DNA
atgggaaaactagatggtaaagtagcaatcattaccggagcaacctccggtatgggtagagaatctgcaaaactattcgctaaggaaggagctaaagtagttgtctgcggaagaaacgaagaaagagcagcagctgttgtagatgacatcaaggcagctggcggagaagcaatatatgtaatcgtcgacatggcaaaccttgacgaggtaccaaaaatctatgaggcaaccatggatgaatacggcaccattgacattctattcaacaatgcaggtgtattaagcatgtccccattgatggaccttacccttgaggaatggaacaaggtattcaatgttaacgtaacctctgcattggtcctcactcaactttgcgtacctgtaatgaaggaaaaaggaaaaggaacaattgtaaacacctgttcagtagcatcctttggagctcaccatggattcgcagcatacgtagacagcaaacacgccatgatgggacttaccagatcaatggcatgggaattaggtcctgaaatcagatgtaacggtattgcaccaggtcttatccacactgcaatggtagacagcattggaggccctggagcattgcaaaacatgattgaccaatgcccagtcaaaagatgcggtgaaggtcaagacattgcagagcttgcattattccttgcaagtgacgaatgtactttcctagatggtcaaattattaaatgtgacggtggattcgagatataa

SEQ ID NO: 1031 - DNA, 1485 bp, Methanobrevibacter ruminantium
  source 1..1485: mol_type = genomic DNA
atgttaaatataaccacatttttagatgctaatgcatgcagactagagaaggaagtcttttattatccaaatagagagctaagatacaattcaaaagaacttttaacaatagtatcaggaataggacaatcattaaaggataaaaatatagaaaaaggagacagagtgctcatctatttaaacaactctccagaatacttattctcacttcttgcaatatggagaataggtgcaattgcaatccctaccaacagaatacttacctctgccgaattagactatatgattagtgattccgatgcaaagctgattataacagatgatgaagcaagagaaaccataaaagacctaaaaatcaactcatacatcatagaggactgtgagagctttaaagatagcgaggtcttacctgcagaggaaacagaatgggacgacctatgccaactccaatatacctccggaacaacaggcaagcctaaaggctcaatgctaacccatggaaactggtttacagcaatccacaatgcctgtgacgtattgacatataaggaagatgacacattcctatgcatctatcctatggctcatgtaggtattctttgggcaatagctgcactgagagccggagcattatgcataacaatggacttctttgagataaacgaatacttaagattatgtgaagaggagaaggtaagcgttctctctggaatgcctcctgtaattcacaccttgacaaaccttgaagaggaaaaaagagaaaacctatccacagtcagagagataataagcggaggaggcccacttcatagaaagatctggaaaaagttcatgggacaatataatatcccaatcataaatgcttatgggctttccgaatcaatagtcataggaacaggcactgtaataagacctgaggactatgctacagcagacagatacgaaagcgtaggacatcctgtttgcttttcagagctaaagatagtggatgaggatgatccaaacaaaacattagataaatatgagcatggagagatagcgcttagaggacctgcaatagccaagggctattggggaatggaaaaggaaacaaaggaatcattccttgaagacggatggttcctcacaggggatataggttatatcgatgaggacaatcgtcttttcattacagacagaaagaaagacatgattgtaatgagcggatggaaaatctatcctacagaagttgaggaaacccttataaaatatcctaaggtagatgagattgccatattcagcataaatgatattcataggggagagcttccagtggctgcagttgtatggaaagaagatgaagatccagagggactgcttgaatattcaagggaatatcttgcaagatataaggttccaagaaagatattcactatggatgagcttccaagagtaaatggttggaagcttttaagaagggaacttagagagatgttttcacaataa

SEQ ID NO: 1032 - DNA, 999 bp, Methanobrevibacter ruminantium
  source 1..999: mol_type = genomic DNA
atgataaaaattgcaagaattgatggagacggcataggcaaggaagtgacagaggcaggagtggctgttctcgaatcattagacctaaacatcgacttcgtagaagctgaagcaggtcgagaatgttttgataagaacggaacaaccatacctgaggagaccataaggattgcaagaaatgcaaaggcaaccctatttggagcaatcacttcaacacctggagagaaaagcccgattatcaccttaaggcaggaattggatacatatgccaacttaagaccaataaaatcattcaagggagtggactgcctctttgatgatttggactttctcattgttagggaaaatactgaaggattatactctggaaaggaaagattggaagaggataaggcaatagcccatagggtgattacaagaaaggcgagcgaaagaatctcaaggcttgcatttcaagaggcaatcaaactgaataaggaatcagtaacttgcgtgcataagtcaaatgtgctaaagaaaacagacggcgtatttaaagactcattctacaatgtggcaaaggactatccacaaataaaaacaatcgactattacgtggatgcaactgcaatgtatcttttaacaaagccacaggagtttgatgtgattgtaacaagcaatctctttggagacatcctatctgacgcttcagcaggtcttgtaggaggattgggacttgccccatcaggaaacattggagacaagcatgggctctttgagccggtgcacggatctgctccagacattgcaggaaataatatatcaaaccctattgctatgattctgtcagtttcaatgatgcttgaatacctgaatgaggattatttggcaagtaaagtaaaaacagcctgtgaaaatgtcctagaaaagggaaaagtcttgacaccagacctaggtggaaatgctaagacaatggatgtggcaaatgaagtcataaaagaaatagagaaattagactaa

SEQ ID NO: 1033 - DNA, 468 bp, Methanobrevibacter ruminantium
  source 1..468: mol_type = genomic DNA
atggaaaaatctattgatgaattgattttggatttaaaggatgaggatgactttgttcgtgaagaggcaattggctcacttgaacttaaaggggaagaggcagtatgccctctcattgaagctttaggccaaagaaataaggatattaaaataggtgccgctcaggtattggcagctatcggggataaaagagccattccagcacttgtggccactttgggtgacagaaacaagttggtaagaagagaagcatctactgcacttaccaccatgggtgatgaagctatcgaacctgtaattgcagagcttgacaatcctaaatggagagtaagaggtgctgcatgctgggtccttggtgcattggatgctaaggaagctcttccaaagcttgaagagctattgaatgatgaaagctcttttgtgcaatacggtgcaaaggatgctattaatagaataaataatggataa

SEQ ID NO: 1034 - DNA, 363 bp, Methanobrevibacter ruminantium
  source 1..363: mol_type = genomic DNA
ttgggcctttatgagcacgacttgaatgatctcttaaaaagccttgaggataagggtcttgtccattatgaaggttcctatgttcagttaagggattttgaaggggtaataaatactgtggattcaaaagaggatgttcttacagctgaactgaatcagaaggagaaaaagtcctttgaaataatcaagtccttggcagatgagaacaatttggtttcaaggtatgagatagagggcaatctattgtatggtgatttgaagcttacagactttaggatgtatcatattattctgtctttggaaaataagggacttattgaagctgtctataagcataatggggactattataagattttatag

SEQ ID NO: 1035 - DNA, 792 bp, Methanobrevibacter ruminantium
  source 1..792: mol_type = genomic DNA
atggataaggcaaaagttaataacataattttaaactataatcttgaaggagaaggccgaacaatagtgttcatccatggactctcagacagcctgaactattggaggcccctccaggagagcctaaagggagattaccaaacattgtcatttgacttgagggctcacggagagtctggtgatgataggaaagagataaccatcgacttataccaaaaggacctttattatttattgaattatttgaatatagaaaaagcagtactgattggcctatcattaggaggaaatgtggcattggactttgcaataaatcatccgaagatggttgatggacttataataatgtcaagcttctctgagttttcagaccatttgaatgagatatttgacagctttgaagaagcaatagagcagggatttgaagagttctttgatgtaattctaccttacacgctacctgaagatgtcctaaaaaagcatgaggtagaattggaatacgttaaaaaggaaggagcaaagactgcaaacattgaaggaataaaagcaggaatcaaggcaggatatagcttttccataactgacaaactaaatacaatagatgctccgacaattgtgattgcaggtgctgatgatgagctgacagatctggagcttcaaaggaaaatatatgataatattgataattctgaaatgataattcttgaagacaccaagcataatgtccttattgggaaaaatataagcagaatcttggatataattaatgaatttatgttaaaaatagaataa

SEQ ID NO: 1036 - DNA, 495 bp, Methanobrevibacter ruminantium
  source 1..495: mol_type = genomic DNA
atgagaattagtatgtctttaccaaaaaagctattggctgagtttgatgaagttttaaaggatagaggttatcaatcccgttcaaaaggtattcgtgacgctttaagcgattatattttaaggtatccatggatgaatgaaatggaaggtaacagggtaggagttattactgttatctatgatcatcattttacaggagtcatggaaaaccttgcagacattcaacatgactgcatggaagagatcaatgcaagcatgcatattcacatgacccataagtactgtatggaagtaattgtcgtaaacggtaatgtgactcatatcagagaattggcagagagaatgatgaggcttaaaggggtagagcatgtaaagcttacaagtactgcaaatggtgagtctctagaccgtgagccaggtcttgaacactctcactcacattcacattctcatttaattttttttttaaagaatttcttttttttattttcttaa

SEQ ID NO: 1037 - DNA, 936 bp, Methanobrevibacter ruminantium
  source 1..936: mol_type = genomic DNA
ttgattcttatcactttaagctttttaagagattatgagcgtcttgccgtatttaaggaagcaattgatgaatttgctatttctaatttagataaggatttggattgttcaaattcaaatggcgatataaattcagatgacgataaaaagttagattgctctcttgcatacgatttaggatgtggaagcggagttttaagctatttagcatctgattattttgataagataatatcaattgagcaaaacaggtccattttcaaatgtgcaaataaaaatttaaagtcatttgacaatattgaggctataaatcaaaatgttttggattttgactttgaaaactatcccaaggcagacttaatcatctgtgagatgctggacactgccctaatcgatgaagaggaagttcctatcctaaaccattcaaagaaatatctaaaggaaaatggaaaaataattcctcaagggataataaactcagcagaacctgttttcatgaatattgattatctccagtatgaggatgatgaatatcagccaatctatgagattttaggaaaatcagttatttatagtgagtttgaattcctggatgacattgatgaggacttctcttgtataatcgaatttgaaatagatgataaatattcagataaaaaaacagatgcatcatttgaagtagatgatagatgttcagataaaaccgattattttaataagagtaatgataaaataaaagtaaatggaattaaactgacaagctttaccaaactgaatgaaaatatcatctgtggacctactcctatgttaaatccagctatgcttgttccatttgaagagatagaggtaaataatggggataaaattagaataaggctatcctatgtgatgggtggcggagtagagaccataaaaacagaagttttagatgtttaa

SEQ ID NO: 1038 - DNA, 525 bp, Methanobrevibacter ruminantium
  source 1..525: mol_type = genomic DNA
atgttaaatcttgatgaaatcagtgagaatattgatttgtttttagaggactgcagctctcttattgtattggggataggcaatgacataaggggagatgacggtttaggcccttatataatcaaccaactgactgatttgaaagagaatctatctttaaaggaaccacaatccttagaaaatgtccatttgcttaatggaggctctgttcctgaaaactttacagggcttatcaaaaggattgatccatctcatatcataataattgatgccactttaatgaatgaagagccaggatttattaaaattgttaataaagaagacatttccaatgtaagcatatcaacccattccatgtccctttcctatcttgtaaagtaccttgaaattgaaatcgactttaagctaatttttataggaattcagcctaaggatatggatttgacctttgaattgactgatacaattaagaattcttcagatacccttgttgatttgctattttccaagtttttaaagatttaa

SEQ ID NO: 1039 - DNA, 1140 bp, Methanobrevibacter ruminantium
  source 1..1140: mol_type = genomic DNA
atgaaagttttatttatcggatcaagattatatgatgacttggcttatcatgtggatgagctgggcatagaaagcataataacagaatcaaatgaagaggctcctcatttggaccttgcaagcaaatactatatagtcccaagaggaatggataagccaatggaagtggctattgaagagaaggtcgatgcaataatacctcttattggcatagaccctccattaaaggacttggctattatgaaggaaaaaatagaaaaggaaaataatattccagtgatttcatctaatttcaatgctgtggacatcgcttccgataagataaagaccaaggagttctttaagtcaatcggattgaatgtgccagaggcaaaggttctaaataaggatgacttctccaatgagggggagttcttggaaaaattaggattccaattcccaatagtcctaaagcagggagaaggacaaggcggaaaggacatttgcataacaagccagtttgaagatgttttacaatactttgaaagcttcaatcaggctttggtggaaaacttcattgaaggggctgaggtctccattgaagtaatcggatggaatggtgaatatttgcctttggttccggtatataagggagatactagtttagaaggcatacatccgataaagaggttaagatatggtccttgtgactttgaggcaattgacaatgaagagttcaggcaattggctaaaaagatagcagtcaatttaggctctgaaggaacaatcgatatggatttaatctattcaagggaagagaacaaggtctatgcaattgaaataaacacacgtccaagcggcacaaggtatttatcctatgcaactactggacttagcccattaggtcttcttgttgacattgcagctggaaactttgatgttaaagatttggaaaataaaataaagcattattattcattggaaatacctataggtgattatgaaggtcctgcacctaatgaacctgttaaggagtatgtaaatggcaatttcattgttcacggcccaaaagggtatcaaagaattactataagaggaaatactcgtgaagaaacctatgaaattgctaaagagttaactggcaatgattacaggtcttaa

SEQ ID NO: 1040 - DNA, 1074 bp, Methanobrevibacter ruminantium
  source 1..1074: mol_type = genomic DNA
atggatttgaattatataattgtattgtttgttctaacatttcttgctaccgtagccttcacttactttgtaagacatactctacgtgatgcagatgtttcagatagccctattgtcagtgaacatagacataaagcaggaactcccaccatgggaggaatagctttcctatttgccattctattcatagtgtctatctattacagaaatacaaatattctcatagcctcatttatcatgctcacaggaggtgtaatgggtcttcttgatgatctattaggtcttaagataaaggaatatcaaaaggtcgtaaagaatgtaagcgattcagttgttcctataggattattggaccttggccctggagaagaggcaagggtaaccaccgacaaggctaaaaaacaggtatatggatatgttgatgaaggaaaattggaaattgttgctgaaattccaatcaagtatgagccaagcgaaaagaccaagatcatcgttcagctattgcctggactgtttttggcattgactggggttgtaacaacccttgggggattcactttaggcattttggcttatcctatttgcataatcgctattcttggttcaatcaattcaataaatctcattgatggaatggatggattggctgccggcatcgttgcaattgcatcattctcatgctgcatttatgcttatatctgtggaaatatggatatgattcctgcatttgcaattttaactggaatatgtcttggatttttggtcttcaacagataccctgcaagcatattcatgggagacacaggctcctttgtattaggtacaggatatgcagttgctgtcatcttaggggacattccttactttggagtattggctttggctgttccgattgtatcagtaataataagcctgatgcatagggcacatataataaatctccctgtagagcctttgcatcacaccttgaactataagggaatctctgaagtcaagatagtcttaagctattggctattgaccgtccttgtctgtgcaatcggcatacttgcaaagctttatatctttgcataa

SEQ ID NO: 1041 - DNA, 1620 bp, Methanobrevibacter ruminantium
  source 1..1620: mol_type = genomic DNA
atgtcaaaaacatactttttaaatgaattagcagattcaatatcctctcaaaagaccttttcaatcgctcaacttgcagatgccattggaggcaagatttatggagcagatgactacaagtctccaaatggatttacaggcatctttgaaaccttaaacgaagctgtagaaggagatattgtaattaggcattggataaacggaaaaggtgttgaaatagctaatgataaaaacgttgcatgcattataaccctaactccaaaggaagatgccttggaaatggcttcaaagctcgcctttccagttattgtagtggataggattgaatttgcaaatgcatttgcattgaaatggacaattgataacctttcccctaatactcaaagggtagttataagtgggacaaatggaaaatcaaccagttcccatttgatttatcacattttaaaccattgcggatataatgtatttacaaatactgatgcaaaatcagaattcaatacactaatcgacccaatggttgcaaagctaatctcagagcaggtgatatcaaagcaggactttgatgttcgcaagttggactctgtagcagacctaaagaacctggatagcgaaggaaagccaataaataaaggcgcctttgactatattgttgttgaagtctcagaggttcagggctggggaagcgaccttatgaaagatcatgcccaaataatgtcttcagcaatcaatccggatgtaggggttgtcacaaatgttgcaatggaccatatcggccttgtaaacaatatagaagaggtgttccatgaaacttcagggcttgtaaaggctataaacaaaggaggagtggtcttaaactacgacgatgagaatgtcctggcaatgaaggatcttgcaaatgatggagtagacatattcttcacttcaatggaaaaggattcaatcctaaataatgattatgacaatgataagaaggtttattttgatagaaaaagcaatgcaatagtttatgataataaaaatatccttagatatgatgagttgccctttacaggagagcattttatcagaaatattctatctgcaatttcagcttgtatatctcttgagattccaattgaagacatctgcgaaggggtaaaaacatataatcctttaagcagaaggtttacacgtctttatgatgagccaattgttattgatgactttgcacataaccccgacggaataaaaaataccgtaagggcagcatatgacttggcagagcaatttgacaagggagatttatacattgcatgtgcaatcagaggctctaggggtgaaaccttaaatggccttaattcagaggcattggctttagtcattaaggaattgcgccatagaaatgatgatgatatagaaaaagacgaaaatgtcaagaaaagggaaatatacctaatcctttcttcaagctgtgacttggtagaccatctaaactatgttgaagactttgagaggggatatatttccttctctaatttggataaggagcacataaaatacattcatttcaataagctctacggcgctttaggatatattatgaaaaaatgcatatggaagatgatgttgtattgctga

SEQ ID NO: 1042 - DNA, 1854 bp, Methanobrevibacter ruminantium
  source 1..1854: mol_type = genomic DNA
atgggtgagtttgtatttagttttttagaagatcaatttagagacatctatcttgactgtgcaaggatggataagaatctcattgaaggagatggtgttgaatcaattcttattgcaggaagaatcgctgaaaagataacaaaagccatctttgtctttgaaggcataaaagataatgaagataatcaatatttgaggatagaaaagctttccaatgcaaatattcttccaaacaacattaaaaatgacctctcccaaattagaatactaagaaacaatgtctaccacaataccttaaacagtgacggaagcggcggatttgcttcatacaatgctccaaaatatgttcaaagcggaggattgagagactataagacaggctttaatgaaatcaaggaatattctaaaatatctaaacaaaattctaactctaattctaactctagttcaaattcaagccctaataacgagttcggcagtgaattgactgcagctcgtgaagcccataagcttgtatttaatgtctgtgtctggttttatgtaaactactctggcgataaggacttcatcagaccaaaatataagctaagcagaagaacccaagatgctgacttcctaatcagactaaagtcagcaataaacgatggaaacgactttattaaattgcgccaaaacaatccaaacaatgagatcattcagatactcaatgagatttacgtcaaaaaggctcctcaagagccaaaagaggagcaggtctatggcataaacaataaggatattaaaatcagacagcctgatgttccttattcaaagtgtttaggcatctcttatgatgatgaactattcatgtggcatgcagagcatgggggaaaggacttaggtcttttcgagtcttccaaggaagcttatgaggcaagggagatttatataaattccatcccaatgccaagaaaggtaaatggagcatattcaaaggcaagaggcatttcattcagcagaattcaaaagctatggtctgcaagcgtaaagggacagattatatcatatcatggaagcgaagctgaagcaatcatggctcgaaagaaatacttaaagtctcataacctagttgacattaaggtaaaagacggatataagacaatcacccttgaagagaaggctaaattggaagagaagattagacaaaagaaggaaagttcaaaatctgatattaagacaatcccttcaaattcaaatacaaaggacgagatggaaaaggagaatattcaaaagataatggatggcgtaaagaagcttaaggatgatttgaatgaatctagtgcttctacttatattaaatccagttcattaagctcacagtccagttcttctgattctgtttcaagttattccggttctaaatccagttctttaggttccacttcttctagttctaagtctggttctttaaactctaaatccacttcaaatgaaaattcctctttttatgacattcataacataggttcaggagataaaactaaaaagaaagttaaaattgtaaatggctcaaaagtccaagcaagtcaaacaactaaaaaagtaaaggtttcagctggaaatagagtttctaaaaaacataaatccagttctaagaattcaactgtttctaataatgcaaatagttctaaaaagtctaaatctgttgccattaataagaaaaaatcctctaaatatgaaggtgtgttctatgaggatggattgttcatgtggagtgcagaggtggacggcaagcatttaggtctattctcctctgaaaaggaagcttatgaaaaaagggaagagtatattaagaataagtcaaataataactaa

SEQ ID NO: 1043 - DNA, 594 bp, Methanobrevibacter ruminantium
  source 1..594: mol_type = genomic DNA
atgtctaaatttaaatactgtccaatgtgcgcagagccaagagcagataattcaaagtactgctccaaatgcaattttgaatttttaactggaaaatatgtaaaagtccaagaggaagagataaaaatcactgaaaaggtctcccaagaggagtttgtagaatctaatcagctaatacaagatacaagtcttaaaatcaatgtattgataagcaggtatttgaattattcactaagcaataagtttaatgaaaacttaccattaagtataataagggaatacatatccagctgtttaaacagtaaagtcccatctgactttgatgacaattatctccaatccttagatgctcttttaaatgatgagggctataaaaattctattaatctttttcttcaatggatcgatgagaacagatcccatctgccagggcttgtattgaatcaatacatgattccacatcagaacaatgtcaataggattgaagagatccttgatttggagttagagaaaaatgaggataatgatttgttctttgatttattgaataagtttttaatcagtgaaaaagagtttatagaacgtttaatttag

SEQ ID NO: 1044 - DNA, 189 bp, Methanobrevibacter ruminantium
  source 1..189: mol_type = genomic DNA
atgcctgttgtaagaatttccggaaatccaaatataagtgtagagacaaaaagagaaatggtaaagaaagttagtgaaattgtagcagaatcctacaatttacctattgaaacaattactgtgcttatagaagcctttgaaagagaggacataggtgcaggtggaaaattattgatagatagagattaa

SEQ ID NO: 1045 - DNA, 837 bp, Methanobrevibacter ruminantium
  source 1..837: mol_type = genomic DNA
gtgattgaaatttcagacaaattttatgataagacattcaagttattcagatacaaaaattttgagaacttatgctcaaattgcggtatcttcattgaatttgacggtttcaatgacaaggaattagtggatgatggcggcataacttatattatggatatttcaattaatgataaaaggggatattcagtaattattgaatttcaaagttctgttgtagatgaagcggatattgaacgctttatgaaatatgccactttaacttatattcaatacaaaaaaccagttgaaatttatgttctcagtaccgttgaagaaaagaatagagttattcgccgaagatggaatttcttcaatgagtttactatatgtgtcaaatcgttaaagtctattgatggagataaagttttaaatagtttaaaaaagaaaagcagatttgatgaggattttactggagatgacattgtagatttgctgaccattatttttatgaaatccgtaaaaacgacggttgagctattgaaggaaatctgtctattggttaatgaaattaacgcattggatgaaaaggaattgtatgatatcaagacctttttattgatgtatgttaaaaaattcgtggaagataagcaagaggcaagaattttggaagagttgataggaatgagaaatgatttgtttggtaggacttgggcttccgttagaaatagggcatttttagaaggggaagctagagtggttaggtgtatgtttaatgaaggtattaaaattgaagagatttctaaaattgttggcttggaggagtcccagattttgaaaatgattgggtcaagttag

SEQ ID NO: 1046 - DNA, 1131 bp, Methanobrevibacter ruminantium
  source 1..1131: mol_type = genomic DNA
atgtggtatgatatgaaaagaagaaggttttatttaatattatttataattctattgattttagcagctatagcaatcataggaacattttcaagcttcagtgatgtttccggatatgatttgggaagtgatgacctatccattgccgttacaggggatgtgatgttcggtcgtaagatgccgggagtcctagattccggagcaagcccattcaggaatgttgaaaatgttacaaagtctgcagacattttgcttgtaaactttgaaaacccggctacatattccaccaatccagtgaaaggggacgttcctttaaaggcagaccctaaatatgtgcatctgcttgctgaggccaatgagattgtcattgcatctcaggacaataaccatgcattggattatggggatgaaggattgaacgacagcatcaaaaaccttaaggatgcaggaatctatgtgataggagctggaaacaatctctctgaggcatctaaacctgtagtcatagaaaagggagatagaaaggtaactgttttaaactatatggatgcggataactttgcagaatatgcaagcatcatgcctccggcaactgcaaactcatcaggattctgcgcatatgacagcgagcttgcaagaaaacaagtggctgaggctcgcgagaacgaatccagcatagtcattgcctatatgcattatggaaacgagtatagcagaagccctaatgagtatcagataaacatgtcccatgagctgattgacagcggtgcggatattgtgataggttcccatgcccatgtgactcagggagtggagatgtatcatggcaagcctattttctataatttaggtaatttcatattcgatcagtccaatccagcaacccataggtcttatttccttaacttggatcttcatggtgacaattgtacagtgactctctatccgactgtgatagttggctacttgcctcaattcatggatgctgattcagctaaggcattattggcagagttgtatcctcaatgtgaccagctaaaggtaaatgatgatggaactgctcaattgacctttaagttaggtaatattactgataattccactcaatcaaatgatgtaaggctgtattaa

SEQ ID NO: 1047 - DNA, 459 bp, Methanobrevibacter ruminantium
  source 1..459: mol_type = genomic DNA
atgcttggtgaaatagaacttaaaaaactctttccagactttgaagatttagttcaaccatctggaatcgatttagagcttgatgaaatatttattcaaaaatcagagggctccctaatagacaatgagaagaatcttccagatattgaagctatggaagggccaatctataccctaaagccacatactgcctatttggcaagcattaggaggaaggttaagattcctaaaggatacactatgttatatctgccacgttctaccttgcttaggtcattcatttccgttcagactgctgtaggggacccggggttctatgggacccttatgtttatgatctataatcatggcgacttcgaatacaaaatcaagtctggagatagaatagctcaagccgttgtatttccagtggaaggctctggagagtataatggctcttatcaggaagaggaaatctaa

SEQ ID NO: 1048 - DNA, 1146 bp, Methanobrevibacter ruminantium
  source 1..1146: mol_type = genomic DNA
ttggttgaaatatcaattgtaattccagtctataatgttgaaaagtacttaagggaatgcttggatagcgctgtcaatcaaacattcaaggatattgaaataatatgcataaatgatggctctacagacagttccttagatattttaaaggaatatcaagagtctgatgatagaattatcatattcaatcaggaaaatcaaggtcctggcgctgcccgtaatcttggaattaataaatctaaaggcaaatacgtatatttcttggattctgacgattatttggaactgaatgcattggaaaagctttacaatatctgtgaggaaaagtcattggactttgtacttttcaagctgcttaacttcaatgacaaaactggaaaaaccttccaaacaaagtattataatatggctttcctaaatgataggataggagataatgtattttcatataaggatttatatgattgcgtttttaatttggcagtgtctccaccagctaagctatataagagagagcttattacagatatcgattatccggaaggcatcatctttgaggataatgtattctttttaaagacccttctaaaggcaaaaagaatctatttccttgatgagtttctatacaatcgccgcaggagggatgactcccttacaagctcaggatctgatgattattatgatataattccttcaatgaattatctatttgacatttgtcgagacctagatgatttcgaactcctgaaggaaggattgtattataaaaagttcaaggagctttatataagattctccaaggtcaatgatgtccataaagaggagtttttcaatctaatcagagaggattgcctaaagcataaggaagaaatcgatgaggatatagcaaatgataagctaaggaagagatctaagttcatatatgaatctgtgctttcttcagatgactataaggagtttcattatagaatcagactttatgataagaataaagagataaatgacttgaaaaaggaaaataagtctcttaaaaatgagaataaaaagcttaaaagttctaataaaaagttaaaaaaggaaaataagcatttcaagtcaactaaggcatataaggtctggaaaaaatattctaaaattaaagattaa

SEQ ID NO: 1049 - DNA, 987 bp, Methanobrevibacter ruminantium
  source 1..987: mol_type = genomic DNA
atggtagaaattactcttggtcttccaaagggaagcttaaataatgtaaacagaggaaacacttatcaattgtttgtagatgcaggttatgaggtaagaggatacgaacctggaaatgaatcttatgaaataaacattttaaatgacagtgaaatcaaagcattcttaacacgtccacaaagtactcctgttgagcttaacaggggcatggtggatatttccatcgttggagaggactgggttaaggaggaatccgtcttaagcgataacgacatagttaaaataggtgacttgaattatggcgaaactcgtttgattgtagcgattcctaaggaatctccttatgacagtctgtctgaattctttagggcaaatgcagatagggaaagacctattcttgttttcacagaatatccaaatctcacaagaaagcatatcatggaaaatgaggcatatcaagagatttatggagatgcagttcctttcgtccaggtaaggggattaagggacggagacaataagaaggttcaagtaattaactctgacggagccactgaagtctacattgcaaaaggggcagaccttattgtggacaatacccaaacaggaagcagcttgagaaaggcagggctaaaggagcttgaaaccatattgcattcctctgcaggactctatgcaggagtctcatgcaccgaagagaagatggtaaaggctaaaatgatttatgaacagcttttaggtgcagtgactgcaagaaaatactttgacgtcaagttcaatatagcaaatgaggatattgaaaaggtgtctaattatctaattgaaaacaagttctgcagtcatgagccaactgtaaatcatggctcaagcttttcccagatcaatgtattgattcctaaaaacatcttccctgaaatgctagatggtatcaaggaattgggagcaagctcaattataagaagcgatgtcaagcagtatgttatttaa

SEQ ID NO: 1050 - DNA, 1224 bp, Methanobrevibacter ruminantium
  source 1..1224: mol_type = genomic DNA
atgaaaattacagttgcgggtgtaggatatgtagggctttcacttgctgttctgctcgctcaaaaacatgatgttacagctattacaacaaccgaatcaaaggcagaaatgctaaatcagttcataagtcccattcaggacgatgagatagaaagattctttaaggaggttcgtgaaggagagagaacccttaatctccatacaacaactgataaggctgccgcttatggggatgcggatcttgttatcatagccactcctacaaactatgacgatgtaggcaatttctttgacacctctgctgttgaggacgctatcgaatggacccttaaggtaaatcctgatgtccttatggtcataaagtcaacaatacctgtaggatatacagaatctgtccgtgagaagtatggaattagaaacatcatcttcagcccggaattccttcgtgagtcaaaggctctctatgacaacctccatccaagcagaattgttgtaggctgtgatgacgaccagatggaagagggtcagatgtttgcagatctacttcttgaaggcgctagagaagaggagaaaagagcaaactctcttgaacaggacattccaatattgcttacacacctaacagaatctgaagctatcaagctgtttgcaaacacttaccttgctgtaagggttagctacttcaatgagcttgacacatatgcccagaccaaaggccttgacacacagatgattattgacggagtgtgcatggaccctcgtatcggaggccattacaacaacccatccttcggatatggaggatactgcttgcctaaggatacaaaacagctcttggcaaattataaggatgttcctcaaaccatgattgaagcagttgttcattctaattcagttagaaaggaatttattgcaaatcagattatttcaaggaatccaaagacagttggggtctatagacttacaatgaagagtaacagtgacaatttccgtgcatctgcaatacaagatgtgatgaaaagtataaaggcagagggaattccaataattatctatgagccaacattagatgatggaagtgaattctctaggtccgaagtagtaaatgatattgaacgatttaaacgagaaagtgatataatccttgcaaatcgtcttgactgtgatgtccttggagatgttgctgaaaaggtttatacaagagacctctttagaagagactaa

SEQ ID NO: 1051 - DNA, 927 bp, Methanobrevibacter ruminantium
  source 1..927: mol_type = genomic DNA
atgttaacatctgttcaaaaggaaatattgcaaactttaataaacctgtatcagaattctgatggcaagtcaatcaagggagaagacattgctgaggtgatgaatagaaaccctggaaccatcaggaatcagatgcagtctcttagaagcttaagtttggttaaaggggtccctggacctcgcggtggctataagcctaccattgaagcatatcataatctaaacatttctgtaagcgacagcaatgccaaggttccggtatataaggaaaataaaaaaatggatgatgtttctgttgcaaagattgaatttacaagcgttcctcaccctggggaatgtgaagctgtaataaaggtattgggaagcattaaggatctccatttgggagacgtgatccgtgtcggaccgacccctgtaaacaatcttggattaatcggcgaaatcgtaggaagggacgatatggacaatatcctccttcttgatatcagcacaataaggagcatccctaaaaatactgtatttgacattgcatcactggaccttatttatctaaagccaggagattcaatcaaggacgctgcatacctcttgtcccacaatcaaatcgatggagctcctgtaataaccgaaggggtagccataggcatggtttcattgattgatatcgtcaacgcattggcggaaggaaaggaaaatgaggacgtaagggacattatgtctaaaaggcttttctttattaataaggacactttgatagccaatgcagtctataagatgtataagttcggaatcagcaggctgatagtggttgatgacgagcatgctcctatcggcgttgtaactcgtacagatcttattgaaaccattacaaactttaagaatttccctcttctttataatatggagatggatgaggaaatggaatga

SEQ ID NO: 1052 - DNA, 936 bp, Methanobrevibacter ruminantium
  source 1..936: mol_type = genomic DNA
atgaaagttaatcaaataagcataaaaaaagatatgaaggtaagcgaactcatggaggagtttaagggttctggcgtattgggggctggacgagtggctagagcatccaatctgcttgtaaacatgataaacgaccctgatatggacatcttcatgagcatggcaggtcctttggttccaggaggacttagatacatcgtaggcgaccttattcgaaacaaaagaatcaaggtgctgataaccagcggagctaacataacccatgaccttttggagtcctttggaggaaggcattatcgtgacttgggatttaatgatgaggaactgaatgatgctggaattggcagaatatctgatgtatacacccaatcagaggactttgaagtattcgagagcgaaataataaagatattcgaaacaatatccaaaaagatcgataacgataaggataatggaataatatcaattcaaaggcttttaaaagaagtgggttcattaatagaagacgaaaactccatactaagacttgcttatgaaaatgacgtttccatatttgctccagggcttatcgacagcatgttcggtcttcaattatggatgtttacccaagaccacaagcttgttgtggacgctgtgggagacatgcattacctatcagaccttgtattcgaatcagataagatcggtgcaataatgttgggaggaggccttcctaagcattatacccttgcatcaaacctattaaagggaggaatcgattcaggactccagataactatggaccgacctgaaaccggaagcttaagtggcgcccctttagaggaagctaaatcatggtcaaaggcaaagcacggttctaatctggtgacagtggttggtgatgcaactgcattgttcccattgatctatgcagctgctttggataaaatcgactga

SEQ ID NO: 1053 - DNA, 540 bp, Methanobrevibacter ruminantium
  source 1..540: mol_type = genomic DNA
ttgtttaacccaataatagcattatcatacatctcttccggtttctttatgaagatttcagacgatgagtatgatgagaagaacaacaagatacttgcaatcatatttggaatagtgtgcggagcatttacagctcttgcatcatcaatgagcacagatgcagcatgcatattcattgcaatactcattggaaacatattagcacagaaggtggatggaatccatcatgtcgttacaatgctttcatttttgattgtgcttgtttttcttggacttcctgcattcagtcgtccatccattcttgtcgtaatgatttgtgtggctggagccctaatcgatgagaagggaaatgacaatgagatactctatgaaaaaagcaagtttctgatgtatttctttgattacaggtttgcacttaaagtggttattttagcccttgctttatttgggcttgtggacatttggacatttgtttacttcttatgctttgagatagcatatgagatagcaagagtgctttttgagaagtttattttataa

SEQ ID NO: 1054 - DNA, 648 bp, Methanobrevibacter ruminantium
  source 1..648: mol_type = genomic DNA
atgaaagtaaaaaacaatattatacttgcaatggacctaatggatttagcatcagccgaatcagtatgcgaatcaataaaccaatacatagacacaataaagataggatatcccctcacacttgcagagggacttaagacaatagggctctttaaggaaaactttggatataaggttatctgcgattataaagtggcagacattccagccaccaatgaaaagatagcaaatctcacctttgatgccggtgcagatgcaatcatatgccatggctttgtaggccctgacagcgtagaggcctgtaaggcatctgctgaagaccatggaaaggaagtattccttctaaccgagatgtcacatcctggagcaatcagatttttacagaaggatgcagacgatattgcaagaatgggagttgaaatgggaatatccaattacgttgcaccatccacaagaccagacagactgtctgaaattagagacatagttggaaaggactcattcatcatatctccaggggtaggaacccaagggggagaccctaaagagacattgaaatattcaaatgctcttattattggcagatccatctacaatgcggaagaccctgaaactgctactaaggacattattgattcaatacaataa

SEQ ID NO: 1055 - DNA, 771 bp, Methanobrevibacter ruminantium
  source 1..771: mol_type = genomic DNA
atgatttttgcagctatcctggctggtggggtaggaaacagaatgggcgaagtggataagccaaagcagtttctaacccttggagacaagcctatcctcatacagaccgttgagaagttttatctcaacagcagaatcgatgaagttattgttctatgccataagtattggctaaaccatacaaaggacttgattgaagattatattccaaatgcagaaaacattgtggttgtagaagggggagagctccgtaacgacacaatcatgaatgcagttaaatatatagaggacaatcatgagcttagcgaagatgacataataataacccatgactctgtaaggccatttgtaacccataggatcattatggaaaacatagagaagacccaggaagtgggggcatgcgatacagtgattccagctacagatacaatagttgtctgccatgacggcaatatcataagcgacattcctaacaggaattatatgtatcaaggccagactccacagtcattcaagatattgaagcttaaggaatgcttcaataagctctcagatgaggataaaaggtcattatcagatgcagctaagatattcgtcctcaatggagaggaggttgcgatagtcaagggagaggtattcaacataaagatcacctatccatatgacctaaaggtggcaaatacaataattgacgatgcaaagctcaatatctcagatgcagagactggtgagtataaggtcaatctatatgacttcggtgaggaatag

SEQ ID NO: 1056 - DNA, 1023 bp, Methanobrevibacter ruminantium
  source 1..1023: mol_type = genomic DNA
gtgattaatatagtatataggctggtggctcctaagctcttggaggaagtttatacagagcttaatctggatgttggagttatagtaaggcctaaatatctatcaatatgcaaggcggatcaaaggtactattacggtaagagagtcccagagatcattgaaagcaagttgcctatggctcttatccatgaggcggtgggcactgttgtaaaggacaatacaggcaaattcaatgtgggggacaatgttgtaatgattccaaacattcctcgtgcaagagacaatataataagcgagaactatattccgtcaagcaagttcagatccagcggatatgatggctttatggaagagtatgtgtctctcactgaagacaggcttgtaaagcttccagatgatttaaacatggaagttgcttcttttattgagcttatttcagtggctacacattcaatcaagcgtttcaagcagttttcccaccaaaagaaagacgtgctaggagtatggggggacggaagttttggatacattacttcccttgttcttaaggtgatgtttccagagagcaaggtctatgtctttggaatgcatagggaaaagcttcatatgtttacctttgtggatgaaacctttttggtggatgagattccagataatgttagtgtggatcatgcctttgaatgtgttggaaaggctagcgcaaacaatgcaatcaatcagataattgacataatcaatccagagggcaccattgctctacttggcgttagtgagtttaatgtatcaattgatactaggaccatattggaaaagggaattagggtattcggtaccaacagaagcgctagggaagactttgtttctgtagtcaatctcctcgaggaaaatcctaatatgattcactatcttgagagtcttattactgagatagttgaagtgaataccttaaatgatattaaaagggcttttgagtcagataaaaaccttagatttggaaaaactgtaataaaatgggagatttaa

SEQ ID NO: 1057 - DNA, 1011 bp, Methanobrevibacter ruminantium
  source 1..1011: mol_type = genomic DNA
atgcatgaatatgaaattagtattataataccaacatataattcttcaaaaacaattgaaagaacaattcattcaattttaacacaggattttaaaaattatgagatggtttttgtagatgatgcatcaaatgatgatacagtaagttgtatacaagaaactttagcagataaaaaggtaaattatcagcttattgtaaataaaaacaataaaggtcctgcctattgcagaaataggggagtatttgcttctagaggaaagtatattgtctttgttgatagcgatgatctaattcaatttaaccatatttcctcattgcataattatgttaaatcagacaattttgattccgcctttacaaaaggaataaaaataaataatcaggatgagcttatagattttaaagtggataaatatgatggcttgattcatttggctcgtaaaaataagggaattgttagagccaaagatttgataaatcttgaattgcttatgaaaattccattttcctttgtattgttgatttatgataaggaaatcatcttaaataattccctagaattcaatgaagattatagatatggtgaggacactgattttgcacttaggtacttggcaaattgtggcaatgttcgtgtaattgataaatatacttatttttattatcaagaggaagattctatttcaagacaggtctctttggataggtttgaatctgtaaaactttttgaaagtctggattcctattttaaagaagatgatttgagagaaaagttggttcattcaagaatccctagatttatttttggcaatatgaattacttcttctacaatggatacaatagtgaagatgtttttaaaaagatggatgttcttgatttatttaacaagttaaggcagtttaaggtgtttgaaaaaagagattggaagttttatcttaaggttagattgtttttattgaatcatagattgtattataaattgtggttaaggtttaaaaataatctataa

SEQ ID NO: 1058 - DNA, 213 bp, Methanobrevibacter ruminantium
  source 1..213: mol_type = genomic DNA
gtgaatgatttaaaaaagttatatgttttgcttgcaattttaattgttatttatgtaggtattaacttttcatataatggtttagacaccattaatactttaactcatgttaatttagatttaggtccaagcatggacaatgctaacgatgcaaatcatattaaaatcggcagtagttcatttaccaaattaagcaaaatttttacctggtaa

SEQ ID NO: 1059 - DNA, 1008 bp, Methanobrevibacter ruminantium
  source 1..1008: mol_type = genomic DNA
atgacaaaaattttagttactggcggtgcaggttttataggtagtaactttataaaatatatgcttgataagtatcctgattatgaaatagttaatttagatgctttgacttactgtggaaaccttgaaaatcttgaagatattgaagataatccgaattattcctttgttaagggaaatatcatggatgaaggtcttgttgatgttgttgtaagcagcgtagactacatagtcaattttgcagctgaaagccatgtggaccgcagcatagaagatccgcagatattcatcaaatccaatataatcggaacacaggtattgcttgatgcagcctataaataccaaatcaaaaaattcctacaagtatccaccgacgaggtatatggaagcctaggccctgaaggatatttcaccgaaacaactcctctccaggctaacagtccatattcagcttcaaaggcaggtgcagacctcatggtaagagcatatggagaaacattcgaccttccaatcaacataacaagatgctcaaacaactatggcccataccaattcccagaaaaactcatccctctaatgatttctaacgcattggaagacaaggagcttcctatatacggtgacggaaaaaacataagggactggctacatgtctacgaccactgctcagcaatcgacctagtcctccacaaaggaaagataggagaagtatacaatataggtggccacaacgaaaagcaaaacatagaaatagtaaaactcattctcaaggaacttaacaaaccagaaagcctaataaaatttgtaaaagacagactaggacatgacagacgttatgcaatagactcaagcaagataacagaagaattaggctggaaaccaaaatacacatttgaaacaggaatagtggaaacaatccactggtatctagacaatcaagactggatggaaaaggtaaaatccggcgaatatcaagaatattatgaaaagatgtactctaaaaaataa

SEQ ID NO: 1060 - DNA, 564 bp, Methanobrevibacter ruminantium
  source 1..564: mol_type = genomic DNA
atgggcaagtttaagattgttaaaagtgaaattgaaggtgtatttacagttgaacctaccgtttttgaagatgaaaggggctactttatggaaacctacaatgagaatgactttaaggcagaggggattgatttaacctttgttcaagacaatcaatcaaagtcatctaaaggtgtccttagaggtctccatttccaatacacacagccacaaggaaagctggttcgtgtaataaaaggagaagtcttcgatgtgggagtggatcttagaaaagactcacccacatatggaaaatgggtaggggaaatactctctgaagaaaacaaaaaacaactatttataccaaaaggatttgcccatggctttttagtattatcagatgaagcagaatttgtatacaaatgcacagacttctacaaaggagatgatgagggaggaatccaatggaacgatccagaaataggaataaaatggccattgggaaatcttaaggaagaagatataattttatctgaaaaggacaaattatggaagccgatgaaagagactccaactgatttttga

SEQ ID NO: 1061 - DNA, 873 bp, Methanobrevibacter ruminantium
  source 1..873: mol_type = genomic DNA
atgaaaggaatagtattagctggaggttctggaacaagactgtatccaattacaaaagctgtatcaaaacagttattgcctttgtatgataagccaatgatttattatccaatttctgttttaatgcttgccggaattaaagaaatattaataatttctactccaagggatttgcctatgtataaagaacttttaggtgatggagagaatttaggaataagcttttcatatgaagctcaagaaaatcccaatggtttagctgaagcttttataataggcgaaaaatttattggtgatgataatgttgctcttattttaggagataatgtatttcacggacatagatttagtgaaatactgaaaagagctatgaaccttgaagaaggtgcagttatttttggttattacactcaaaatccagaaagttttggcgtagttgaatttgatgatgaatggaatgttttatccgttgaagaaaaacctaaaaatccaaaatcaaattatattatcccaggactatatttttatgataatgacgtgattgaaatagctaaaaatgttaagccctcatttagaggtgaaaaagaaattacctctgttaatgacgagtatcttaaaagaggaaaacttaaagtagaacttcttggtagaggcatggcttggttagataccggaactcatgacggcttgcttgaagccgcaaattttatagaaactatccaaaaaagacaaagcgtttatgtagcatgtctcgaagagatagcatttataaatggttatattcctaaagagaaacttctcgaattagccgaacctttaaaaaaaactaattacgggcaatatctaatcaaactggcaaaaatgaaaaaataa

SEQ ID NO: 1062 - DNA, 1482 bp, Methanobrevibacter ruminantium
  source 1..1482: mol_type = genomic DNA
atgaacagattttggaatgatttaattttacctttattttatgaatttaaaccagaagtaattgttgaaatcggttgttttaaaggagaaaatacaaaaaacattttagaatattgctattatactaattcaaagttaaaagttatcgatccaaatcctgattcttcttttgaccccatatctttaaaaaataaatatggagataaattcgaatttttaaaggaattaagtttaaatgggcttaatttaatagaggattatgacgctgtccttattgatggagatcataactggtatacagtttataatgagcttaaattaattgaaaaaagattcgatcaaaataattttccgctaataatctttcatgatgtttcatggccatatgctagaagagacctttattataatccagaacttattcctgaggaatttcgccatccttataaaaatttggctatgtttccagataaaaatgaattgggagatattggtttaaatccaacttttaataatgcagtttttgagaatactcctaaaaatggagtcttaacagccatagaagattttttagatgaaactaatttaaatttatcattcttctgtttaaatgcattctatggatttggtgttttgtttcctagtcaatcatgtgatgaaaaaacaatattgcaaattttttatgatagtgatgttatagggcttttagagaaaacttatttaaaattaagatttacacaggaacacattattaaaaataagaatattgaaataaataacttaaaagatatgaataactctttaaataaaaaaaatattgatttaactggcattaattctaatttagaaaaagaactagacaaactaaacaacaccaaaacagaaatagaaaaagaactagacaaactaaacaacaccaatatagacttaaaagaaaaactaatcatttcaaccaataaccaaaaggaattagaaaagctattagataatctaaaagatgacaaaacctacctagagaacgaactgaaggatttaaacaataccaaaacagaaatagaaaaagaactaaacaaggttacaaacgataaaacaaacttaaaaatagaattaaacaatataaacaatacaaatatagaattagaaaaaatagtagatgacttatgcaatgagaaatcttctttaaaaaataaaattaatgatctcgaatatgcaaatcaaaggactttaaaaactattgaaaatttgaatggagatatttactcaaagacatatgaaaatgacagtttaaaagaagataatttgctactgactaaaacaaataaagattttctagaagatattaaaaatttaaataatcttaattatgatttggagcaaaaaatattgaatttagaagaagaaaaaaactctattttatcttccaaaacttggaaattcggtgctccttttaggaaaataagcaatatatttaataaaaattaa

SEQ ID NO: 1063 - DNA, 1521 bp, Methanobrevibacter ruminantium
  source 1..1521: mol_type = genomic DNA
atgacatataaagtaagtataattattccagtatataatgcagcagagtttattattagggatactttaaaatctatagaaaatcaaacaatggattttgaggatattgaagttattttagttaatgattgttcaacagataatacagcgaaagtaattaatgaatatgctaaagaacatgagaatattgttccaataaatcttaaagaaaataacggtcaaccaggcattccaagaaacattggaattacctatgcaagcgcagactatcttatgtttttagatcaggacgatacctttaaaaagaatgcatgtgaaacattatacaataaaatatcaacggaaaatgttgatatggtatgtggtaaccacaatatcgtaagcaatggaagatctaacatttgctttaacttcgattgggccgaagaggatgaaattaaaatcaataagattgacgaaaacccaaatttcctaacaatgggagttgcagcatggtctaaaatattaagaagggaatttgtcttggataataatttgaaatttaccgaaggagttggggaagatatattcttctcaatcagggcattgttactggcagaaggaataattctgcttaaaaatttcatcgttgtggattacctagttaggggggaatccctttcacaccaagtcaatgcagaatatcttgatgaattctgtgagttttacttaaatttctttaattactgtgaaaaaaacataaaaaacgacaatttataccatcctttattcaatggcaggctgaaccatgtcctatccatgcttttcttcgctgatttgtactttgatgacctctcttgggtattaatcaagattcatgaattgtttaagaaagtggctgagaaaccattcgtttttgaagatacttcttatagaatcttttttgatacattgataaaagatgaatatcctttcgaaaatagcattaatatatacagcgccattaaaagtaatagggaaagaaaatttgacaaaggagtaaaatatctagaacaagaagcaaaactctacattgacaatggaaacggatttaatgaaaaggatagtatcatagcaaactataaaatttatgaattcaatgaagttgaatttaacctagaaaactttaaaaacattaaaagaatacgctttgatcccattacttggaattttattaattgtgtcatacatgagataaaaacaaacaatggcgatttgctctatgaagctataaattccatcaatagaagagaattatatggattaaataaagaagaacaatcatcaaatagaaattcaaaagaaaatataagatataaatcatctgatgattcttcggctgaaggaatagcggacatattcttaacaactgattcacagtatttattatacggcgattttaataatctcaaatctataaaaataaattttgaagtaaatctcattgataataatgaagtaagcaaaatagttgaaaatttgatagaaaactatgaccattaa

SEQ ID NO: 1064 - DNA, 1704 bp, Methanobrevibacter ruminantium
  source 1..1704: mol_type = genomic DNA
atgagtataaaaaataaattcttatctttatttaattcatcatctaataattctgattttgaaaatttaaataattattataaaaaagttctagaggatattgaaaatgaggatatatctggctatgatcgaaatttaaaatattacaatgacttaaaagactgtgaactttttagttctgaatattatataacaaaccaaggtttagagctttcagaagaatatgctttggcccattatctaaatgaaggttataagcaaagcagaaatccaagccctgaattcaataatgacaaatatctcagattatatcctgatgttcgcctagctagccttaatcctttagcccattatgtgttatatggagaaaaagaaggcagaagattgcctttaagcgaatatgaagaactggaaaatgagatagtttctgtaaaaaatttaatttatcaaaacagagtaaccgataatttagtcttgcttagagataaagtgtccaaaggcaagaaagtcaatgttgttttcgttttacctgcaatgatgtttgtatataaagacttatataactattttgataacgatgatatgtttaatgttcaaatcgttttggttccccacagattaggaaacagtcaaaagattacagatgttgcaaaagataagcattatcaaattttcagctatctcaaagaaaaacaatacaatgtaattgatggatatgacttcgaaaaaaatgaaggcatcgatttagtctcaacttgcaatccagatataatattttatgtcttgccttatatgaggattttccctaaaactatgaaaatcagtaatctcccatccaacatattatatgcatatatcccatatggggaatttgtagaagacaacttagacgatttattctttaatttcggatggaatgaaattgcatggaaaattttctgcagtaccgaagaatatctgattaattctactgaaaaatctattgtcggatcaagtaatgtagtcttagcaggttctgctaggatggactctttaattaattttgaagaatctgatgaggattataaatggatttacagcaaagaagaaaataaaaagagaattatttgggctcctcaccatacattagcaagacctggtatggatgacagcttatcctattctacatttgatgaaaattttgaattcttttataattatgctaaagaccatccagacattgaatgggttattaggccacacccattacttaaggaagtgctaagtaatattaacactaatatgagagttcaaggaattgctgatgaaaactttgcagatgattattttttcaaatgggaaagtttacctaatgcccgcttccatgaggaaattgactattttgacttatttgccactgccgatgcaatgataaccgattgcataagctttaaagcagaatatttatttgctaataagccaggcttaatcttaaataaaacaggagttgaacttgacggatatcaaggagaaattactgatgcatggtataattgcgatgggtctgactttgaaaagatagaagaatttattgaagatgttgtagtgggtggaaatgattacctaaaagaaaaacgtgaagaaatattcaataaaaacttcaatgtcaatttaggcagtgcatcaaaagtaatttttgactatattaaaaatgagttaacttaa

SEQ ID NO: 1065 - DNA, 3039 bp, Methanobrevibacter ruminantium
  source 1..3039: mol_type = genomic DNA
atgaaaaagaacaattttaataaaaagataactttcgtcgctaattacttttggactagcattaaggaaggttcaaaatccaattcttattttaattatgataattacctaaaaaaatatcctgatgtaaaggaatctggaatgaatccttttaaacactatctattgcatggaattgatgaagagcgcagtactaattttgatgaaaatattaattcatacagtttagttgaaaattccgatttatttgattatgaatattactgtgaaaaaaacaatctgaaatttgattcctatagtaaagcattaatgcattatcttgaaaagggatataagaaaggatacaacccaagtataaaatttaatgcagaagaatattatgaagttcgtcctgatgttaaaagggctgatgtaaaccctttagttcattatttaaagtatggaaaaattgaagtaacctcaatgactgaaaatttaaatcttaaagagtatcagctcgttaaaaattcaaatttatttgattataattattatatggaaaaaaatcatttggatttaagaaacgaaaccgaggcaatttatcattatttggaaataggttataaaaagggatataaccctagcaataagttcaatggtgaaatttattttaagaaaaatccggatattgaggaatctggctggaaccctttagttcattatttgaaatatggtcaaaaagaagagcgtactgataaatgtgataaaaacctgaaagaatattctttagttaaggaatcaggattatttgattatcaattttataaagataaatatgatttagatttaaattcatataagcgcggtttaattcattatttggaatttggttacaaaagaggatataaacctagcagaaattttgatggggaagaatacttaaaaagatatcctgaagttaaaaaagcaggatttaatcctttagttcattatttgaagtatggtgtgaatgaggaaagaataggattaagaagaataagctttaaaaatttcaacaagaactatgatgttgaagccattttagaaaatatagataatgatgttacaatcttattgaatgttgaagactcaaacaacttgaaagaatgtattgaaaacattaagagcaccactaaagactataagataattttaattcatgaaaatcttgatgatgaggatttggaatatataaaatccaataatgatatagaacttttaagaaggagccctcatgaatcattcatcaatgcattgaataatatattggacaatgccaaaaatgatatcatctttcttaaaaataacatcagaacttttgagaaatggattttcaaattaacagttgctgcatattcagatgatcgcattggatttgttagccctatttcaaattattctactgttagcctaataaatattgaagaagatgagaaatcaagcgaatttataagtaatatttcaaaaagagattatgaagaatctccgttacctaatgactcttgtgtctttataaaaaaggatgtctttaaggaattaaaatttgatgaaagttcaaacgaggaaaattggtttgctacttttatagaccgtggattagaaaagggatggaaatcaattttagatgattcaacatatgtttactatcagtttaatgaggtagaaccccaacaagcagatgaatatgattattcaactccctatgtattagaaaataggccttcagttaaatttattaattctgatgcatttaacaacagttttcaaaatattcatgagtatgctgatgataatcttgaagagaatattcaagaaaagacaaggaaaaatatcctatttgctatgcattatgggggaggagtggaatttacagtaaaagatattgttaatgcgataaaaaatgattatgaatgttatgttttaagggcatttaagaataaaatgaaattatataaagttttcaacgattattttatttctataaaagaatttaatattaaatatccttggactcctaaaatgattcacagtgatgaatataaacagatttatttttatatattgattaattataatatagacattttagaaatcgatcatttattattgcatacatttgacttgcaggagcttgcaaaaaaactggatattcctataatcctaacattgcatgatttttattatatttgtccttcatatttcctattggatgaaaataataaatattgcggtggttactgtggtgatcaacctagaaattgcagtaccagagtcacttggattgatttgcctgcaaatattgttgaatggaaaaatcaatggcaggaatatatgaaagaactatttggaatgtgtgattatattctcactgcaacagactttactaaggatatgttcttagaacattatgacagtttaaaaagtgatgatataacaattatagagcatggtcgtgatttaatacgttatgataataattatacagttcctaatatatatcaaccgattaaaatattaattcctggagttatagggcctcataaaggcttagattttattaaagaattgaaaggatttgatgacgacaatcgcttggaataccatttcattggacaagtggatgatgaattgaaatcaatgggcatatatcatggtccttatgaacgggaagatttcgctaagtgggtgtttaaaattaaaccatcattcattggaatattctctgtctgtgccgagacatattcccatacattgactgaatccatatgttctggggtccctgttttagcatctaatcttggtgctttaaaaactaggattgaatctcaagggggaggatggctggtaaatattgatgatgctgaagagacatatgaacaaattttagatatttccagtaaaaaagaggagtataaatttgtaacggaaaatctaaaggatattaggatttccagttcagaagaaatgggaagcaaatataaggaaatttatgataagctaaccaagaaagaagataaatga

SEQ ID NO: 1066 - DNA, 801 bp, Methanobrevibacter ruminantium
  source 1..801: mol_type = genomic DNA
atggaatttataaaatataaatctcaattcgaaaaaatgatagataataaaattattggtatgccagaattaattgattccaatataagctttaaaggtaaaaataatattttatgttgcaacaatattaaattagaaaatatagacatagatttcaatggaaataattctgtaatttttttaggttctaatctaggcgtaaattctcatttaactatttttaataattccacattattccttggaaaaaataatacttgcggatcttcaatttcaatttccgttgctgaaaatcaaaatcttatcattggagataattgtattgttgaaagtgatgtaaaaattagaacttcagataattacccaatttataattatgaaaacagtaggattaaccattcaaatagcgtatttataggggataatgttttattaggtgaatcttcatttatttcaagaggagttaaaataggttccggatcaataattagcccatgtagttttctgccacctctgtttaaagctttttcaaattcatatgtattagggaatcctggaagaatattgaaggaagatgtttactttgtaaatgattcaattaatgattatactattgaagagattaaaaactcttcaatcaatgaaaatgaaagtggactttttgattttgtagaaaaagaaacattatctttagacaagattgataatattctaaaaaaatttaactctgaagactctttagattttattcaaaaattatttttacagaacaagcataaaaaccgtttcttcattgagtaa

SEQ ID NO: 1067 - DNA, 1326 bp, Methanobrevibacter ruminantium
  source 1..1326: mol_type = genomic DNA
atgaaaaagccaaaaacaaaagcgcaaaaagaatctagagagaaaaaacctaataatctaaaaagtgattgtatgaaaaaaattttatatgttttacattctggagttacaggaggtactttcttaacaaataaagatttgatgaaaaatgtggaaaaggaatttgatgtttatttattgagtgctgaaaataagttcttaaaattatttagcttttccaataacaaattaaaattaataagaaaatatcatagaaattatggaatcaatgtagaaacagaagagacagaaacaaataatatctcatggtctgcaaaagatttccataattcctggctaagcaacatttattttgaaatattggttaattataacatagatattgtccatataagacatttgattaaccatagttttgatttgccgcaagttgctgaaaaattaaacatacctattgttttatccctacatgacttttattttttatgtccattttacacattattagatgaaaattataattattgcgcaggtgaatgttctcataataaaaaaaattgctattgtcctatggattcattaagcgatataaattccaaagaatttatatcagaatggagagttaatgttttaaaaatgtttaattatataaatgtctttgtaacaacttccttttttgtaaaagatttatttttatccatatactctaatgaagatatcatcaataacaataactttaaagttattgaacatggcagggatttcccaaaattaaaaaaacagatgtttgaaatcccttcatcaaacaaacctataaaaatcttatgcccagctaatcatttaaacataatgaagggttcgcaattgattaaaagaatcaaagaagaggataataaaaatctgatagaatttcattttttaggaaattgtcatgatggaattgaagaatatggtttttctcacggcacttttgaaagagatgaattccataaaaaagttgaagaaattaaaccttcatttgttggaatcttttcaatttggcctgaaactttttgtcataccattactgaggcatggagttgcggaattcctgtaataggtacaaatattggagtgatccaagatagaattttaaaaaataaagggggatggattgtggataggaataatcccaaaaaagcctatgaatatatggctgaaatatttgagaataaggaggaatatctagaaatcgcaaataatatcaaaactatggacttaaaagatacaaaaatgatgtctatagagtatattcaaatttataataatttactggaaattaaataa

SEQ ID NO: 1068 - DNA, 2007 bp, Methanobrevibacter ruminantium
  source 1..2007: mol_type = genomic DNA
atgacaaaagtttcagtaattattccaatatataacggtgaaaaatatcttaaggaatgtttggattccgtctgttgccaatcattaaaagatattcaaattatctgtgttaatgatggttcaactgataaaaccctttccattttaaatggttttgcatcaaaagacaaacgcataaaaataataagcactgaaaacagaggacaaggttcagcacgtaatactgcattaaaagaagcccaaggagaatatattagttttgttgatgcagatgattggattagtgaaaatgctttagaacttctatatttccatgcaaaatcaaaagatttggatatgcttttttttcaaatgattaattatatggacaattcaaaaaattatgttgaaactgaattatataatcatctgtgttttgaaagaaatgcaattgatgaagatacaatttttaattttaacgatataaaagaatttttatttaaaataccagtttgtcctgtttctaaattatataaaaaagaatttttagattcaaatgatctttatttcccagaaggcatgttttttgaagacaatgcctttttttacaattctttatttaaatccaactgtcttggatttttaaaaaagcatttatattatagaagacgccatgccgactccgttactcaaacatttgataaaaggaagtttgatattgttaaggcaacaaataaggtattagatgtgtttttagaaaatgaccaatatctaatttttaaaaaggaacttattaatcatacgttctccatgctgttggaatggtttaacaaatcccctctagaacttaaagatgaattttataggttaattaaaagagattttagaggatttaataatttaaaagaagattttaagaacaatttgaaagaggaatacttattaatatttgatatttccgataagaacaaatattatttggatttcttatctgaatataagctatcctcagcagattatgatattttcgataaagaaagatatttccatttaaacagtcaagaatacttggaatataagtctaacaaatcaaataattacaaaataagtgttgtcataccaatatataacaatgaaacattcattcatagaactttaatgtcaattgaaaatcagtcctttggattagagaatattgaggtcataatggttaatgataattcaaaggataataccgaacttgttataaatgaatattcttctaaatatgaaaattttaaagctatccatataaaagaaggaacagggtcccctggaacccctagaaacattggtttatatgaatctacttcagattatgtgatatttttagaccatgacgattattttgaaattgatgcactagaaaaattatataatgcaatcaatgaagaggattgtgattttgtttatggcacttatgcaagtgttgatgaggatttgcctacaaagattatctatccaaatgaacttcatggctattttaaaaatatttatggaaatccccgatctatagcttttccgccaccttccatttggacaaaactgttcaagagaagctttttaattgaaaacagaattatttttccaacaattttaggtgaagacgccatttttatttctaaagcattattttctgctgatggaattgattatttatgggatgatttgatttgttatcataccttaaacaaaaagtcttttacaaaaaatgtttcttacgattatttagttcagggttttgtttctgaagaatacttatacaatatctataacgattttgaatcccaatcctatgagttaaaggagaacagcaccattccctctgaaaaatcctcagaaaacattgaaaaaatgaatttatataaaattagatctgaagggattttagacttttatttaaatcagttttatcgcagcgatttaaatgatgaggatatctatagaattttccccattttaagtgattttgtttcgacaagaatttaa

SEQ ID NO: 1069 - DNA, 771 bp, Methanobrevibacter ruminantium
  source 1..771: mol_type = genomic DNA
atggcactgattgagaaaaacgaactcttcttattggaggaaatcgtaaaaaagaattttgcagcaaaatataaagattcgatattagggatattttggagtattttaaaaccattattaatcatgattttacttacaatcatattttcaaacttatttggcggaagcattgaaaattatccagtttactttttatccggaaaaattatctttgatttttttaattctgctacatcagtatcaatgatgtcacttaaaggcaatataaacattttaaaaagaactgctgcaccaaaacatatttttacgttagcaggagtcgtttcagaatttttaaattttttaattaccttaataatattaattggtgtcatgattgtgaccagatccccattttatatattggaatcaatgatagcaataatcccgataatgtcattaatcattatgattactggaattagcttaatactagctgttttatgtgtttacttttcagacatacaacatttatggggcgttattacattaatgttaatgtatgcatctgcaatattctatccaatgaacataatccctgaaccgtttcacggaataatgattttaaatccaattttttgggttataggccaatttagaattcttgtgctatggggaacaataccaagtaggatgaatatgttgaatttagttcttttatcagtgattattttagtgtttggaataatagttttcaagaaatttgagaaaaagattactttgaaattttaa

SEQ ID NO: 1070 - DNA, 1467 bp, Methanobrevibacter ruminantium
  source 1..1467: mol_type = genomic DNA
atgaatcaaaaaagagatgaattaaattctaaacaaaatataaacttggattcagaaaatgaaatttcctcatcagaaattaatcttaagaaaagagatcctcaaaataaatcagatttaatagctcagcaacgcatgaaagctaaaagggaattaattgaaagatataatatgtctgaaagtgaggctgaaagtactctcaaaagcatagaaaataaggtaatgcaaaagaaaaataaaaaaataactaatgaaaaagagatagaaattaattcaaataaagttagaatggatgataaaaattgttctttggagaatagcgctggtgtttcagaaaacaaggataaaaatgatgaagctataaaaatacaaagccaaaattctcaaattgaaggagaatctgaggaaattattccagagcatgttttagaaagacaaaatcctaataaaattgataatagtgattatgaaataaattctgtttccgatacactgcctgtaatagaggaaggggaatcaaagcctattcaaaatgccgaggatgaaatcgtaaagaaagagcttgttgattctgtttctgatgtggtgcctgttgtgggagagaaagaagaaaataatgaacctataattaagaaagacgattcatcagatgtagatgatgtcttgtcatcaataattccagaatatcatcagaaatcatcaattgaagtaaataatgtttcattaagttttaatattgaaaatgataagatagataatcttaaggaatatattattcgtaccctaaaaaggaccaaagagaaaaaaattaaatttcatgctttaaacaatatcacttttaaaatctataaaggtgaaaaagtagggattattggatataatggtgcaggaaaaagcacattgctaaatgttatcacaggtatttatgaacctgatgaaggaaatgtgaaaacatatggaaaaatttctccattattgtctttaggtgcaggttttgattataattattctggaagagaaaatatctacttaaatggagcagttttaggttatgataagaagtttttagaatcaaaatttgatgaaattgtggaattttcagaacttcaagattttattgatttgcctattaaaaactattcttcaggaatgcttgcaaaattagggttctctatagcaacaattgtcgaacctgatattttgattattgatgaggtgcttggagtaggagatgtgaactttcagaagaaaagtagtaataaaatcaaatctttaatggatgggggaacaactgttctgcttgtttcacattctattgttcagattagagagatatgtgacaaggctatatggattgataaaggggagctaagagagtttggcgaagttaatgaagtttgcgatcattaccttaaagatgcccagaatgccactaaaaatcaagtgaaagatattagatttaattaa

SEQ ID NO: 1071 - DNA, 2454 bp, Methanobrevibacter ruminantium
  source 1..2454: mol_type = genomic DNA
atgaattataaaattagcattatcattccagtatacaatgtagaaaattacattgaaaaatcattaaactcaattatttcacagtcaataggtattgagaacctagaggtcatattagttgatgataactctacagataatagtgcaaatattataaaaaaatatgttagcaaatatgataattttaaaggaatatactgtgacattggaagtgggttctgtggcagacctagaaatattggtttaagctatgctacttcagagtatataatgtatttagattctgatgattggttagaagaaactgcctgtgaagtattatataatactatcattaatgaaaatgcagacattgtttgtgggagtcaaacaagactagacaatgagggcaatagaaaattttattatcacttatgggttactacattaactgatccgaatgaagattacaatactcgaatgaaaacaacacaggaaattatagacgatccgaattttaagttagtcgttacagatttagataaaaatccaaatattttaggacatgcaaatgtctgggggaaaatttttaaaaaggacctaataacagaaaatgaactatcatttccagaggacatagttgctcaagattcagtttttttattaaactcctttttcgttgctgaaaaaattgtatttataaacgacataattgttcattataacaatttacgttgcgatgatgatgataaatccgcttcctatgtaaaaactactaaaaatctatttggcagaatcaaagcatatgatttaatggataatattagtaaaaaattttcaaaggaagaatttttctacagatatttattagtaggcaaattaaattactggtttaattcatttttaatggattctaatattagcacatatgaaattaagcttctttttaaaaaatattctcatttatttagtaattgttataaatttaatacaaatctacgaaaagatattaaaaatatttttaaagaaatagatgagggaaattacgatattgctgcatcaactgtttcaaaattacaatcaaaatcattttccgcaagtgaaaacaaaattaaagtatcagtaattattcctatttataataatgaaaaatttctaagcaaatgtttagatagtgttataaatcaaacattgaatgaaatagaaataatttgtattgatgatgggtcttctgacaattctattgaaatattaaatcaatacgtccttaaagattcacgtttaaaaattatatctcaagagaatctaggggccgctacagcaaggaacaatggattaaaaattgcaaaaggagaatatatagcatttttagattcagatgattggttggagctaaatgcatttgaaaaattatatgaaaatataacaactaacaattcagatttagtcctgtttaactctattgaacataaggaaaatgctaatttaaaagaaagaattcatataaaaaatgattcaatccccgattacaattattacacatttaattataattataaaaaagacttagttatgaatggatatttagatatttggtctaaaatgtataggacttcatttttaaaagagaacaatattcaattttcaaaccatcaaatattcaatgacattcaatttcacataaaaactatgttaaatgctaaaaaaatttcttattgcccagaatttttatataattatttaagaattaatcacccttctcttcaaaataatcttagcttgggcaatgaaagttttattcttttagatataatagatgaaatcgaagactatttaatcgacaatgaattttataatgaattaaaatctaattttataagatttaaattaactgaattggaaagtacgctagaaaaattagaaaatccttatagaaatgaattctttaaattaattaaaaataactttaagaaaatgcaattgacagaatatcaaagaaaagaattacctccagagaactatcaattttttaatgatgttttaacatatgattcattttttgaatatgctttaaaaaacagtgaaaaggaacgacagaaattaagtaatgccttagcggatagtgaaaaggatcggcagaaattaagcaatgacttggaaaatagtggaaaggaacggcagaaattaagtgatgccttagtggatagtgaaaaggaacgagagaaattaagtgatgctctagagagtagtgaaaaggaacgagagaaattaagtgatgctctagagagtagtgaaattgaacggcagaaattaagtaatgctctagagagtagtgaaaaggaacgacaaaaactaagtaacgacctaaaaaacagcgaaaaagaacaggaacttattaaaaaagaatttacatcatccaatagttggaaagttacagaaccccttcgaaaaatcagaagaacaattaaaaaataa

SEQ ID NO: 1072 - DNA, 1599 bp, Methanobrevibacter ruminantium
  source 1..1599: mol_type = genomic DNA
atggataaaaatgagatatttactttatggataccagataatgacgacaataacctatcgcagttagcccacctatctttaaagtcttttttattgtgcgattatgatgtgattctttatacttatgaccatattggcaatgttcccaatggcgtttgtattagggatgcaaacgaaattttagataaatcaaaaatttttagatataaaggaggttttaaaacatattccggcttcgccaacctttttagatataaacgtctatatgaatatggaggcacttggctggatttggacctgcttttaattaaaaggctttccgatgaagatattataatcggttcccagacacaggaggacatctactccaatccaaataatgcactgtttagattccccccaaaagatcctcttataaagacaatactcgattattccgaaaaaagaggttcagatattaatcatgcagaaacaggaactttacttcttaaaaaactattggctagtgaatttccagaatataaccaatatctaaaacatttcaattattcaaatatcgtgaactggaacgatgttggggattatttagaatcaccggaaatatttttaaagtgcttaaataccaatgaaatctacggatttcatttattcaataccttctttaaaaaatttgtagaatttccaaaagattcgtttttcaccactttaaaagacataattttaaattcatccacaagtgaagagtatgcatttaatctaatgaaatacaacatcactacccaaaaacaatatattggcataaatgaatgggatttatcttatctaaatattttcaaagatgcgttttcaaaaaatgaattcaaatacacaattctaattgattcacagaatcttaaaaaaatggagatttacaacatcatccgcgccatcttcagttcatatggacttgagtctgaaaaagacattcaaatcatcatatgtggaaaaagcgacatcggccatgataaaattaaatttaaagacaacgtaatatttttggcttcggactttcaagatatgaaatactatctgaatgattatatttttggagagcatattttccccattaataaaccagttatttttaaagaggaatttttcaaaaataacaatttcacttccgatgtcgaacatcatgttttaaataattccaattccattctgaatgttttaaatcgggaatcgtataaattatgtttattagctaatatagatgttttcaatttagatatggacgttttaaaaacattaaatatgagaataaaagaagttgacaattctttaatttatgattattcatttagggacgatgatgtcctaaaattaatgaaattagtggatcaatgcgattcaaaatcttttttaaacgttaaatctgagttatcaaacttaaatattaaatttttatcccaaaaaaccagttatcactatttcagtgcatataaaaatattttaaattcaaacagttatgatgaatttattttaaaagagcataatgacaaattacaatgtttaaatgcattttacctaaatagaattaatcctcgctatgactattga

SEQ ID NO: 1073 - DNA, 999 bp, Methanobrevibacter ruminantium
  source 1..999: mol_type = genomic DNA
ttgttggatgcagatgagttcataatttctgataacggtcaaaatcctcgcgaaatcattaaaaaaattaatgaaaattattattatttaattaagtggattacatatgttccaacaaataatgatgactataatataaaatttattccaaaaaggataactcatgtacgggatgaaagtttagagcaatattataaggttattgtacctaaaaaagttgtaaatgatttcaatgttcgtgttgaaatggggaatcataatttaaaattcgataatttcaatagaaatgaattagttaaaaaagatttaaatttaaagattgctcattttccacttagatctatagagcaatgcatatctaaagtttcaattgggtggcccaatataattgcaataaatttatataacttgtcttggggtttccattggaaaatgctttttgacaaaattaaagaagagaatgatatttcgcttgatgatttagaattttttgcaaaaaattatgccttggtatcgacatcagatgatattctaataaaaaatcaaccaatcaatctagatttttgcgataagatagaaataagatatgattttgaatataattaccttagaaatattttagaaaactatgcttattttgccgaagaaattgtttctttcaaacgaaaattaaaatctgttccaattttagatgaccgtttcattcttaaattggcctctgattatgacgtcattgaaaaatcaggattatttgatgtaaattggtattgtaaaagatatagtcctccacgcaatattcatcctataattcattatttgcttacatatagggaaaatatgaatgaccctgcgggatttttttcaacggaatattattttaaaacacatgttgatgttgcaaattctggaatgaatccattcgttcactatattaaatatggaaaaaaagaaaatagaaaaattgcttcctcaaaatctgagaattttggggttcagtaa

SEQ ID NO: 1074 - DNA, 1224 bp, Methanobrevibacter ruminantium
  source 1..1224: mol_type = genomic DNA
atgaaaattacagttgcgggagtgggatatgtagggctttctattgctattctgcttgcccagaaacatgatgtaaccgcaattacaactactgaatcaaaggcagaaaaacttaaccaattcataagtcccatcagagatgatgagattgagaggttttttaaggagactcgtgatggaaaaaggaaattaaaccttcacacaactactgataaagaatctgcatataaaaatgcggatcttgtcattatagcagcaccgacaaactatgatgatgtcaaccatttttttgacacatcagctgttgaagatgccatagaatggactctcaaggtcaatccagatgttttgatggtcattaagtcaacaatacctgtgggatatagcgagtctgttcgtgaaaagtatggtgtcaaaaacatcatattctctccggaattcctccgtgagtcaaaggcactttatgatatgctccatccaagcagaataattgtgggatgcgatgacgaccaaaaagaagatgcacaaatgtttgtagaccttcttttggaaggtgtgagattggaagaaaagagatctgattctccaaagcaggatattcctattctaatagcacccttcacagaggttgaagcaagcaagcttttccaaaacacctatcttgcattaagggtaagctacttcaatgaacttgacacctttgcccagaccaaaggtcttaacacaaatataatcattgactgtgtgtgcatggacccaagaatcggaggacactataacaatccatcattcggatacggaggttattgtcttcctaaggatacaaaacaattattagcaaattgcaaggatgttccacaggccctaattgaggcaatagtcaattcaaatgctgtgcgaaaggaattcatcgccgaccagattatttcaaataatccaaaaacagttggcatatataggcttattatgaaaagcaacagcgataacttccgcgcatccgccatacaggatgttataaaaatgataaaagcagaaggaattaaaataatcatctatgaacctatattggatgatggaagtgagttccttaaatcagaagtggtaaatgatttagatatctttaaaagagaaagcgatatcatccttgcaaacagatttgaccaagatattctcggtgatgttgcagataaagtatatacaagagatatcttcggaagagattga

SEQ ID NO: 1075 - DNA, 2682 bp, Methanobrevibacter ruminantium
  source 1..2682: mol_type = genomic DNA
atggagataagatataaaaatttattaaaagtttttactatttttcttgttttactcatcagttgcggatttgcctcagcagtcagtgatttagatgaaggtaattctgcaaatattgttgataatggtgatttatcattatctgacaatatgatgagtgaatctgcagataattgtaaaaatttggaaactattgaggagtctcatactttcagtgaaaaaaacactgttaaagacgtttcatatggactttcaacacctatagatggaaatacttttgaagatatccaaactgctattgataatgctgctgatggagatattattgaacttaatggtacttattttggaaacgggtctgatataaaaattacaaaagatttaacaatcagcggaaatcttgaaacaatattggatgctaaaaacaaatcaggtattttttatgttaactcaaataacgtaactttacaaaacttaaaattttataattcaatagttcctgaatatggaagtgcggttcattttttaagtaatggttctgtgattaattgtacttttataaataatactgctggtggagtttatggtactattgattacttttggtctactggaggtgtagtatatttggccaagggcaatggctctgtgattaattgtacttttataaataatactgctaatgcagatggcggtgcaatttattgtggagttgatggcgggtctgtgattaattgtacatttattaataatactgcaaaagagttagggggtgccatctatattggcggcggtcatgacggtggcgctcattattcaaatgtttatgattgctatgtagataattgcgtatttattaacaatactgctggtgaaggtgctgggatttattatggcggaggcggtttaatatttaattgtacttttattaataacactgctcgttttggagattcaattctagtaaataatatgtattatcctaacactgtgtctgatatgaaaactcttactattaaggaatgtgattttaagagtaataaagagggttggggatatgtagtagttaattataaagcatacaaaaacactatctgtggactttgtgaaattattgattcaaatttctctaatgaacaagcagaagattatataaatatttataatcaaggaaatatttatttgtctggaaacaagatttcatctaattacgctacaatatctaatgatttaatagcttatggtaataatgcaaatattacctcacaaacaagccttgtaattttggataatactactaaaagtgtagaaaaatattctccatttgatgtttatgcagttcttgtagatgatcaaggaaattatattcgtgatgaaaacattagtttatttattggttctaagaatgtaactggcgtatttgataatgtaaacttattcaaatatcatttaaatgatttaagttcattaaattatagaactcttgtttcaggcaattatgatggagcaaaagatttggttgttaaaacaggcgttttacagttagatgtagaggtcgatattgacttggattatgaggatgataatgttattataaaacttaaagattctgaaggaaatcctatttccggagagtctgtttcacttttaatagataataatactagctctgtgaaaactgactcaaatggtgaagctaaagttccagttaatgaaatatctatggtcaaggcaattttcactgatggttttggagttaatgtcagttcctatttagtggtaaaagcagttgaaaaggtaaaacttgttccaacttttgccaatgcaaaaatttcattagatgttgaagataattgcagtgctgttattgtcactttgaaagatttatccggcaaccctatcagttctgcaaaacttgatgcacttgttaatggtgctggcaaaactttaatcaccaacgcttcaggtcaggcaaaaattgatattgaaggtaacgctacagtggaagtgacttatattgatgcagagaatgctaatgcaacagtatcaagcagccttactgtaataaagaatgttgactcagttccggttattccaaataggacagccactaatatcatttgtaaagatatgaatacaactgcagtagccaaaccggatggaagaataggaaaatacttcgaggtcactttagttgatgtaaatggcaaggcattagctaataaatcagttaatataggattcaatggagcagtttataatcttacaacaaatgaaaccgggggcgcaaaacttcaaatcaaccttggatacgaaggcaaatacacctttgcaatagcattcctaggtgacgacaactatactggatcttttaaagtggcccttatttcagtaagtaaacacagtccaaaactttcagcacctgcaaaaacatataaggcaaatgcaaaaactaaaacaattaccgctacattcaaaacatcaaatggaaatgcaatcagcggcaagaaaataagtttcaacattaatggaaaaacttatagcggaactacaaactcaaaaggagtcgccagtgtgaagataagtttaaacaagaaaggaacttatagttgcactgccaaatatgcaggagatggaatgtataaagcaacaagcactaaattcaatgtaaaaatagtataa

SEQ ID NO: 1076 - DNA, 2274 bp, Methanobrevibacter ruminantium
  source 1..2274: mol_type = genomic DNA
atgaagataagatataaaaatttattaaaagtttttactatttttcttgttttactcatcagttgcggatttgcctcagcagtcagtgatttagatgaaggtaattctgcaaatattgttgataatggtgatttatcattatctgacaatatgatgagtgattctgcaaataattgtaaaaatttggaaactattgaggagtctcatacatttagtgagaaaagcactgttaaagacgtttcatatggactttcaacacctatagatggaaatacttttgaggatatccaaatagccattgatgatgctcaagatggggacacaatccaactaaacggcacttatcttggaaatggaagcccaataattttttcaaaaaacttaactattggaggtagcggcgaaacaattttggatgctaatggattatctggcattatcaattcgtcttctgaaaaaattgtcttgaaagatttaacatttgttaatgggtctggattcacagttgatttgagggagaataatggtgataatttaaaatattgctcaataattaattgttcctttgaaaagtgttatggggataaaaattctgccgttatctgtttaaatggatctggaataatcttagattgtgattttcactatactaattgcactataaatattatgggttctgaggatgtttccattttaaactcttcttttaattatactggcggatatgctatccattctaattcaagcaccattgttaaagcatgtgatttttatttcaatagtttctttgaaacatattatgagaatactaataaagtgtacaatggcaatattgttgacttatgtaagaattcatcaatcagtgattgtatgttcaaaggcacatattatgaaacaattattgattccctagttgattccaatacttatcaattcagcacactccatgtctgtgatgaagttgatgttataaattgtactttcattagatctataacagaattttctggttctgccatttaccattttggaaacggatctataatcaattgtacgttcattaacaattctgctggaggaagccatggaactccttcttacctttatacacaggatggcgttgtatatataggttctgatgattgtttagttcttaattgtacttttataaattgtcattccaatacattcggaggtgctttatatattaatgcaagaaattgctatgttataaattccactttcattaaaaatagtgcttatgaagggggtgcgatttatcttgctcaaggggattgttatgtaataaatcctgttttttctaataataaggccaatcattcactttataatgatattaacgatttaaatgctgtttcatatgaaaatgacacctctgatgataatcagactgaaaagattattaacccttcaattgaattagattatttggatgataatcttattataattttcaaggatattgaaggaaaagcaatttctggagagtctgtttcacttataataaataataagactatttctgtgataactgattcaaatggagaagctaaagttccacttaatgagacttctatggttaaggcattctatgtagatgccaatggtttgaatgttagctcttccatgatgattaaaatagtcgagaaaactaattatattcctataaaaagaaattcaagttttattgattgtaagaatatgactacctctgcaataactaacagtaaaattagggatggggaatatttcgttgtaagcctaaaggatgcaaatggaaagccattatcaaataagccaatccaaataggattcaatggaaaagcatatgacagaaccactaatgaaaacggctctgcaagacttcagataaaccttgcttatgttggcacttacacatttgcagtctgttttttaggtgatgattactacaatggatcatttgtagtggcaaaaattgatgtaaatgcacaaaaagccagcttaaatgcaccttccaaaacttataaggcatcaacaaagacaaaagcattaacagcaacattgaaagatgcaaaaggaagattggtcagcggaaagtcaataagcttcacaataaatggaaaaagctatgtcgcaaagaccaataccaatggagtagccacagtaaaggtaagtctaagcaaaaaaggaacttataatttcactgccaagttggacaatgataaaacattcaagacaactgcatcaagtggaaaattagtaataaaataa

SEQ ID NO: 1077 - DNA, 3858 bp, Methanobrevibacter ruminantium
  source 1..3858: mol_type = genomic DNA
atggcagcttacaatagcggagcatatatccaagagactctagactcactaatcaatcaaagccttgactttaaggaaaacatccaagttattatcgtaaatgatgcaagcagtgacaatacagagtctgtatgccaagagtacatcaaaaactatcctaataacatcatactaatcaacaacagaatcaactgcggccctgcccatacaagaaatgtgggcctccattatgcagaaggggagataatcaactttttagacagtgatgactacatatcaaagaagacctttgaacgtgtagattccttctttgaagactttgttcatgtggacatggcatcaatcccaatcaagtttgtagggtccaagcgtggagaccatccattaaactataaatataagggcacaggggtcataaatctcctaaataatcctgatgccatacagctatcctctgcatcagcattcttcagaagcgacattcttaaagctagccttttcaatcattccaggtctcgctacgatggatctgtctctgttgtttacaatgacaacagtcctgtttcagattcaattcctatgatattcaatgaaaacctatcagtctctgaagatgctcttctaatcaatcagatgctccttagaaaccctcttcttggaatactctcaaactgcacttatttttataggaagaaagcaactgataacacttccctaatctctgattccgccaatcacaggtcttactttacatccagagtaaataactatatgataaggcttattaacgattcccttgacctttatggaaaggttccagaattcattcaatatgtggtaatgtatgaccttcaatggatcatggagataaggcaggtggatcacctattggacctagaagaccttactcacctttatgacaagctaatctccattctattctatattggagacaaggtgatattcaatcaaaggtccatcccatctatcctaaagtcacatatccttcttctcaagtatttcggatggggatatcttgatgataagacatttaattttaaacagattgataaaaagtattatgatgagcatggtaacctcataccatatattgaaaaagaccaactatctttcattattcaaaagttggagttaaataaaatatatcttgacatagttgatattaaaaatattaagtctaaaattaatttaaataataacaataatggcactccagatgatgataaaaaggatgatggaaagaatagtcatgatttctatctttcttctcaagatgatgaagacagacaggagctatatctctctggaatgattacaagctttttcaacagcgacttcgacatctatgctatcgtaagcgaaaaggacaagagcagctcccatattcttgaaaaggaaatcaaggtcaaaaagataagctatcctcagcgggacaacctttcccttaacttcaactatggatataaccaatgctttgaggttaggatacccttgagcgaaaagacaagtagaatttccttccgcatgggctttaagagcctgaatgaggtctgcaattccctaggcattgagactctcagcgaggattcatttgactatataaatcatcatgaccttgcattttccggagaccttcttatagactataatcacacttcacgcctatctcaggtgtccaactataagatatccaaggattatcttatcctggacaacggaaatcatatgatagttagaaaaagaagcctcctaactactataaagtatgaattggtcacctttgcctctatccttggtgaacgagaggagggctggagaaccggaatccttcttagggctctttactttattctttatcctttctatcgcaataagcgcatctggatatttatggatcttccatatactgccgatgacaacggtcttcaattgttcaagtctgttcggaatatggacaagcttaagttggaggactataataagcttttggacttggatgaaagccttctttcacgtgagaggcatccatacaaatacgaattgtttgaaggcaaggacataggtttggtagggcttataaaaaacgtatttagttctataaagaatgtattctctagggattctgatgatgatgaaaatggaaaggtcaagttcatcaaggggggctctttaggtttggatgataagtatgatgagcttgaggataatggagattattcagattacttgaatgagcactttggatttgccgatgtgaatgaggactatttggacaaccaggacattcaagtggaaggctctagctttgaggatgacattgagcatagctccaagttcagaaggaatgtctatggaaaggccggatttgttaagtcattcgatgccaaagtggatgcaaagtataatgattctctgaatagccttgagaataggtttgataagagagtcagcaatataaagacaagaacaagaaatgcagatgtcagggagaaagttggcttgtctagagatagggatgacaatttctccaagggatttagcccgattgactttatttatggctttgacttgtctaagttcctaagcgaaaacagctttgtatatcttgtgaattatatattgtatcgcatctctaagctgcttttaagacctagaaagatcaagaggattgacaatagaaaaatcaagaagtactttactttggagcagtctacaagccattttaataatgttcgccatatggaaaaccagtatattgcaagttccaatagggataagcttcgtaaattgcttgcccgtgaaaagcagagcaatgagtataatgctcttaaaaagataggtcctgtacttgcctataagtcattgaagcataggatctatgcattatatgctgaggtgattgtctcatctcatcctgataacaatcttatctatccattctatggtaatttcccgcatgtggcgggccttgttaaggctaagactgtgttccttcagcatggagttacaaaggatgatgtttcattctggctgaatcgctttgacaagaaccttgacatgatcgttactgtatctgatttggaaagggattcattcttcccacgttttgatggtgatggtgagtatattagttcttattatggctatgataaagagactgtccaagtacttggatttcctagattcgactatcttgagagtttagaggataaaaaagagatagtgatcatgccaacttggagaaggcagttgcataaccttaaaaaggaagagtttgtaaacaccaatttctttaggacattcaatgcccttataaatgataaggtattgttggattatttggattctcatggatataagcttgtatttaagccacatcctaacttaaataagtatattggtctttttgataaggattcaagggtcgaatttgacttgaatgacttgaattttgctgaaaacagtaaggatgggactgccaaatatggatctcgaagatatgcagatatattcaatcattcctctttgattgttacagacttttcttccgtttcctttgacttcgcctatcttaagaagcctatcatttattatcattatgataatgactatcactttgacagcgagaatggctactttaattatgagtctatgggctttggtccagtcataaaaagtcataaggagttggttatgagcattattggctctattgagtctggatgcacaatggatgagctttataagggtcgtgttgataagttctttaagtatcatgatagggacaattcaagacgtgtttataaggccatattggagatggataagtattattag

SEQ ID NO: 1078 - DNA, 1017 bp, Methanobrevibacter ruminantium
  source 1..1017: mol_type = genomic DNA
ttgcgttatatcgcagatgagcttaaaggtcgcaagacttcagatggaaagccctatgaatttgaattcattccaaaggatgagttttcattgtctaatatgaagaaattagccacctccaagtacatttttctaactgacaacttctttgcacttgccttcatgagattcaataagaagacaaagctcattcagctatggcatggaactggaatattcaagaaattcggctatgaccttcttgaggatgaacagaagaagaccatgcttaagttttcaaacaagatcaccaatcttatggtcagctcacacaatgtgattgacatttatgcccgcaattttgcaatagataagtctaaggttcttcctttagggattcctcgaaatgactattactctccagagcatctggatgaggactatgtaagacaattgaggggcgagtttgaacagaggtatcctaatcttaggggtaaaaagatagtcctatatgctcccacatttagggaagaccctaaatacaatgctgtgtttaattattttgacattgaaaagttcattgatgagctcggggatgattatatattatgcatcaagcttcatccaaactacaataagtttgcagatagtgctaataggattgaccttgatgagctcactgacacttataacatagttaactttacagaatataaggatgagcagaagcttttcttaatctctaacattcttattacagactattcctctgttatggttgagtatactcttcttaataggccaatcattctctttgcatatgacttggacaattatcttgaaaatgagagaggattctatttcgattacagaaaggaagttccgggcagaattgtaaaggatacagatgagttggttagggtaatcagagagaaggattttaatctatctaacttgaaggagtttgcagagtttcagtttgattattttgatgcatatagcagcaaacgtattttggattatgttttggaggaataa

SEQ ID NO: 1079 - DNA, 285 bp, Methanobrevibacter ruminantium
  source 1..285: mol_type = genomic DNA
atggctggaactacaaaccttgtggatgcaatgcttgttcttgcattgggatttctcatctttgcagttatcggctggaacttacaaagcgttatattcagtgatatggaccctcaggagcgacaggccactatggagtcaattaatcaaatcactaatgtaactcaaggagaacagttaaacagtactccagacacatcaaaccagtctggagaaggttatgtagaacaaggtaaagtttataaggattcgaaaacgggtaatctgattatggttgaaacttaa

SEQ ID NO: 1080 - DNA, 732 bp, Methanobrevibacter ruminantium
  source 1..732: mol_type = genomic DNA
atggaactgatattcagcgtatttgcagtaataagcttggcagctatcctgcttctagggatagagctaggattattatcaaaattctttaatctttcattaaagaagcatttgattcttgtacttgcttattctatcataatatttgcagtcattgtgattctctctccatcttatgaggcagtccttaattcaacattctatagcttctattattatataataatgggctttgtatgtcttgcccttgggcttttgacccttttctattggagcaagatggagtggtatcctcctgcattgaaatgtctgctgtattttgattttgttcctatttcacttagtcttatgctgatttcaacagctctcatggctccaagctttgcatttaaggtacagaacttctctcttaatcttactatggtcaattcaggactaattctggtggttctaatggctatattgatggtgatattctatctattttccgattttgttgaggattatagagtgactcattatgctattataattggaagcttgcttcttatatttgcattggcatactttgtgctgggattcattattccaaatatggctccagtatttgcaaatccttcaacagagttgactttaatgcctattgagtcaatagttgttatggttgttcttatagcattattgcttggattgggggccttatttagaaagagaactaatagattagaatga

SEQ ID NO: 1081 - DNA, 642 bp, Methanobrevibacter ruminantium
  source 1..642: mol_type = genomic DNA
atgacaattcctggtggtgacttcttaaccactggacttaatttaatttcacaaagtcttttgataccggtagttatcatactattggtttttgttgtagttgtagtgatttcacttggagggcttatctatgaatacacttcaaggacaaaggtatctgtagatgacgtgtccaatctgattctggagatttccgattcagggtctgttgattccatgaagtctgcaatagcaaactctccgattcctaagcttcaaaaggacattctgcttaagatagcaagcacaggaaatatgagccctaatacaagagaggcatttgcccgtaagctcatcgagaatgaagaggggctaactgacaagtcccttgagataactgacataattacacgtatcggccctacacttggtttgatgggtactcttatcccattaggtacaggtcttgcagcacttggctctggagacgtcaatactttgtccgagtccttgattgttgcatttgatacaactgtagtgggtatcggttccggtgctttggcttatgttatttcaaagcttagaaataggtggtatgaggaatatctatctaatttagatgttttatctgatgctgtattggattttatggctaaacattag

SEQ ID NO: 1082 - DNA, 882 bp, Methanobrevibacter ruminantium
  source 1..882: mol_type = genomic DNA
atgaatcaaaaactatcaaattacttcaatatgggattgtcactatacctattgcttgatttaatccttataacattcacattagtttttaagatagaaaataatttatattatataataatagccatagacaccatattatgtgttattttaatatatgagttttataatagattcaaaaccgctgaaaataagattcacttcagcatcagaaactctacagaaatattagctggaatccctattgacctgattttccttccatttgctcctaatcttactgtttttttaaccattttcaatcttctcaagtttctaaagataatcggactctttttggaattctttgaaacaattgacgtattccttaaaaagacccatcttgatgagattttaggattggccattcttgtaatccttgtatcaacccttggaatatacctctttgatccaagcataaacagcatattcgacagcctatggtttgtcctatccacaatcacaactgtaggatatggagacgtgcttccaaattcatatattggaaaagtaatagggattttaatattgatattcggagtgctaatcttttcagcaataacaggagcaatgacctcctactttgcaagaaaggtattcgccacaaaggactttaacattacagaaaatgacgacaatatccggcttctaaaggaagacttaagcttcaacaagaaaaatctaaacaatgcaaatgaaaaaatagataaaatcaataatgatgttgaaaagcttaaaagagaattgaatgaaatgaaagaggaattaagagaatctagacaattaaataaggaacttaaagaagagattgttattttaaatgagaatttgaaaaataaatga

SEQ ID NO: 1083 - DNA, 840 bp, Methanobrevibacter ruminantium
  source 1..840: mol_type = genomic DNA
atgcaacgttcattatttgataaagttaaaacatccttatggatgcttccatccttttttggattggtaaacggcttgggatttatctatctcggacgaaagaattccaacatcaaatggaccattgaaggaattgtctatgaaattccttggttaatcgcaatcctaaacatctttaacctttcagttgcaatcactgcattttctttaggatcatttatggttcttataagcattgtccgctctgtaatggttaattatgaatatcagagattgcttgatgaggaatatgtggttcgtccttctgttgaaagcggttctcatggtttggataagcaaatcaagaatggtcaattcaacgaaaaggaagcttctcctaaggaagagaaagttaaatataatccttatgacttaagcggcatcgacaagaattatgatgggagaatcaagttcgacaagtataaggctgaaatcaaggaaatggaaaaggaattcaatgagaagaatgataatgtaaaggaattggttgaaaaaagattctcccaatctggaatcacttatgaccgattcatgtttatcataaaggattcagaggaccttttcaattcccaggcagccaatgctttggatatgattgatcttgctccagaatatacagagacaatcgatgcagagataagaaagaaaatggaaaccttaaggacaatcattgagaaaaatgatgaattaagggatgagttgatcattaatatgacaactgagactggttcagagatggaaatcaagaatctctttgaggatatgggacatctgaccagttccattaagcattatgaataa

SEQ ID NO: 1084 - DNA, 360 bp, Methanobrevibacter ruminantium
  source 1..360: mol_type = genomic DNA
atgactatgaaaacagggagcgaattaaaattcaatgacgattatgaatatatgacctttgatcttgaccaggaatttctattgggggaattaggccaagatgaaataagggacaagatcataaccgctcaagagatattggataatcatttggccaatccttatgaggcaggccaagagattgaaattgagaatccctttgaaaagcctattctaagaaagtacatcaaggtaaatgaggtgactgaggacatgatagatataatatattatcaggtccgaaatcattatgaagtttataaatttgttactttgactgacccggctcataggggacgtattttaattcctaaagactga

SEQ ID NO: 1085 - DNA, 474 bp, Methanobrevibacter ruminantium
  source 1..474: mol_type = genomic DNA
atgcaatttgatgaattgatggaaaaaggagatcaagctagaaaggataggaattatgaagaggctttggattggtatcaaaaagcattgaaagaagataaaagacgtagcgaagcttggaatatgaaagcaagtacattaggtctcttaggtaggcctgatgaggctatcgaagcttttgacaaatccttggagcttgactttaataacgaacagacctggtttttaaaaggaatgaccttatttgctgtagacaggttcaatgaggctgattcctgctttgataaggctgtaaattcagacccacacaatccggtttattggaagtataagggaatggtattaagccagttaggtcacaatcatgacgccttggaatgtcttgacaatgcattggaattgaatcctgatgatgaggctattcttgtattcaggcatactgttgttgaagccatagaaaaagaagataattaa

SEQ ID NO: 1086 - DNA, 1956 bp, Methanobrevibacter ruminantium
  source 1..1956: mol_type = genomic DNA
ttgaaagaattcaaactgaaatcaccatataagcctcttggagaccagccacaagctatcgaatcattatcaaacggaatcaaagagggattccacgaacagaccttgctaggagtgacaggctccggcaaaacttataccatggcaaacattatacaaaacgtacagaagccaactcttatcatatcacataacaagacccttgctgcacagctttatgaagaattcaaggtctttttcccagataatgcagttgaatactttgtcagctactacgactattaccagcctgaggcatatgtccctagaacagacactttcatcgacaaggaagcctcaataaacgaggacatagacataatgaggcattctgccacacagtctctcctatctcgtgacgatgtcatcgtagtaagcagcgtatcctgcatctacggaataggttcccctgaagactatggggagtttgcattctccataaatgtcggagacatctacgaccgtggagatatacttagaaagctgatctttatgcaatatgaaagaaatgacattgcatttgaaagaggtcagtttagggtaagaggagatgttatcgaaataaaccctgttcatggaactcccccaataagaatcgagctcttcggagatgaaatagatgcaataagcctcataaacccagtgactgggatgagagaggaaagcataaataggtatgtaatatttccagcaaagcactttgtagtaggtgcagacagaatggatcaagcccttaaggacatagaagcagagcttcaatcaaggctcaatgagctgaaccttgagggcaagtatcttgaagctcaaaggcttgagcaaaggacaagattcgatttagagatgcttcgggagatgggatactgtccaggaatcgaaaactattccatgcacctttcagggagaaactggggagacatgccttattcccttcttaaatacttcccagatgactatcttacaataatagacgagtcccacgtaaccgttccccagattaggggaatgtacaatggagacagagcaagaaaggaaacacttgtaaactatggattccgccttccatcagcaaaggaaaacaggccacttagatttgatgagtttgaagcaagccaaaaccaggtattatatgtttcagcaacaccagggccttatgagctatcaagaagcaagaatgtggtagaacagatcatccgtccaacagggcttgttgaccctaaaataacaataagaccagttaagggacaggttgaagacctcctaggagaagtaaggcgaaaggtggagcatgaccaaagaatacttgtaaccactttgacaaaaagaatggccgaagacctgaccgactattatgcaaagattggaatcaaggtaagataccttcattcagagattgataccctggaaagggttgaaataatagacgacctaagaaggggagagtttgatgtccttgtaggagtaaacctcctaagggaaggacttgacctgccagaggtaggccttgtagcgattctggatgcagataaggaaggatttttacgctctgagacatcccttattcagacaataggaagggctgcaagaaacgtagacggagaggtattgatgtatgttgatgagatgactgattcagtcaggaatgcagtggacattacaaacaagagaagaaagctgcagatggcatacaatgagaagtataatatcactccaaagaccacacaaagaacccttaaggagaagaagcttgccgacagagccccatcaagagatgacttaagaggcatgcctaaagatgaacttaagctattgattaaggaccttgaagcagaaatgagagaggctgctaataatcttgagttcgagaaggccgccagcttgagagatcagattgttgccttaaagagcattaaaaaatag

SEQ ID NO: 1087 - DNA, 1917 bp, Methanobrevibacter ruminantium
  source 1..1917: mol_type = genomic DNA
atgaaatttaagaattcacatatcttactcgtttcattaatatccattttcctattgttgagcataagcgcagcttctgcagctgactctgatattgcagcggatgacagctcagtggatattgttgaaatagaagatataaatataaaagaaagccactatctctgtgatgatgcctctactggctcagaagatctaagtggtgatgaaaatacaagtgcatcaggcactgatgacgctacaggtggaaatgacactgatgctacaggtggagatgacactggaaatgctacaagtgtaaatggcactgaaaatgttactgatagcaatggtacaaatgccactaatggaacaaatgcaaccaataataccaagtatgacggtcctgtaaccaatgcaaccatcattcctgtaagcacttctgctgattatcaatatggaaacttcacattcaaggtagtggacaatgcaaccggagagcctttggcaaatcaaaagatatctgtaagcggagtatatttctttacatttaataacggatcatccatatccactacaaaggtattcactaccaacagcaacggtttgcttgtcattgcaaacaagaacttaaataagaaccttgacacacttggtatggtatataatttcaccgctcttgatgtgggcaaatacgaccttaccttcagcggaaatgacagcttaaagattgttgtcaacaataccctcccaatcactgtaaataaggtcaatgcagaaattaaggcaagcaacttcaaagatgaagttggaacaagtaaaaaatatacatttaagcttgtaaataagaatacaggtactgttatcaaattagccagcctcaagttccaaatcaagttaaacagttcaggatatacaacctataattcaacaaccaacctttcaggtcaagtgggatataacctgaaccttttggccggcacatatcctgttagaatcgtcaataatgattcaaatctaaaggctagcactgtaagccgcaatgttacattgactaaaaaggtaggtgtactctctgcaagcaacagaactatcctttacaactcagcacctactgcaataatcaaattgactgataagaaaacaggcaaggcagttgcaggagcagtcctcaaggtcagagtatacacaacaagcaaaaaatatagcgatttggcattttacactgacaataaaggacaagtcagcttcaaggcagcattaagcttaggcaagcacaagatgattatcagcaccttggacaataactacactgcaagcagcattaccagatatgtaaccttaaagaaaaccactggtaagataagcgctcctaaaatcagcgctacctataagtctggcaaattgtatacaattaccttaaagaatgctaaaaacggcaatgcaatgtatggatccacattgaacatcaggatctttgttacaagcaaaagctattacaaatacactggcatgactgacggaaacggtaaggtcaatatcaacaccagttccctaaagccaggtacttacaaggtttctgtatctagcggagattcaggattcactgcaaaggcagctacaggtcaaataaaaatcactaagatacctcttaagttgtccccaactgcatataaggaaaaatacaattccggcaaaaccttcaagatcaaggtaactaataagaataccaataagatcatttcaggcataaaggtaactgtaaaggtttacacttcagccaagaaatataagacatacactgtaaagaccactaataagggtattgcttatttgaaggttactcaaaagccaggaacttataagactgtagtaagtctttctaacgcttattactcagcaagtgcagtaacttccaagataactgtaacaaaatag

SEQ ID NO: 1088 - DNA, 693 bp, Methanobrevibacter ruminantium
  source 1..693: mol_type = genomic DNA
gtgtatagcgaaaccaaaatagcaattccaatatttcaaaagaaaaaggaagatgtgatatctgttgctcaagactgcatcataaaaggtgcagatattcttgaactacgaatagacggcatggaaaatcctaatccaaagctagtaagggagattattgaagagataaactttccaataattgcaacaaacagaacaacaagggaaggaggattcttcaagggcaccgataaggacaggatagccatattaagagaatgtgcagatgtggcagactttgttgacgttgaacttcagacaaaccgaaagcttattgaatccattacagaaactggagtaaaaacaatcatttcctatcataactttaagcagacccctgatttggactttttgattgacattgtaaatcaggaaaaagagcttggagacattgcaaagatagccgttatgccaaataacttagaagacactcttactgttctagcgattctatctcactttgatgacactgtagcgatttcaatgggagaattaggaagttatacaagggttattgcatctaaattcaatgcccctttcacatttgctgtggctaatgacactacagcccctggacagatagacattgatacaatgagggtcttgctaaatagtgacttgatcaatactgatgaatttgagaacaatgaataa

SEQ ID NO: 1089 - DNA, 726 bp, Methanobrevibacter ruminantium
  source 1..726: mol_type = genomic DNA
atgaaagttgtagctattggtgcggatatttcaaacaatgatgtaagcgtttccaagtcattggttgaaaatatagagaaggacattcctaaactcattgatttaggagctaaaagggcagcattgacaaatgtcacaggagatgatgtggtaatctctgccttttgtgaagatgatcttttagaaactgtcaatcgtggaattgcagacatactaagggcaaatgcagagagcttaggtgaccttgctggagtttcagatgaccctagcaaggcaggagagggactctcatatgccgaggcaagcttgaacgatgacggctatcaggatgcaattatcatggcctttgacacctatggtggagaaggctttgtaaaggatgttgcaaactctgcaattgaggctgcaagtggcatgaagtctgtaatcgacgtttcagatagaataggctcaagaacagacattccaggtgttggctatgtgtctgaaaatgatacagatgatcctgttgtggttgtttcagtaaaagacctagaacagatagctgtggtggctggagccatgattggcgcagcacttggatgcaagaacacctatcttgtaaagcggcataccccatgcaatgtgcttcctggaagtgtgcttgtatctgtaactgcattcatgaatggaaatatgattgacctatctataccattcgagaacaaaacaagaattttaggctaa

SEQ ID NO: 1090 - DNA, 870 bp, Methanobrevibacter ruminantium
  source 1..870: mol_type = genomic DNA
atgataattttagatgaaaatgtaaaatgtttagttcaaggaattactggaaaacaaggttcattccacactgaacagatgttaaaatacaatacaaaaatcgtagcaggagtaactccaggtaaaggcggacaagagattctaggagttcctgtttttgattccattgaggaagctaaggaaaatactgatgtgaatgcttcaattatctttgtgccagcgccatttgctaaggatgctgcctttgaatcaattgaccatttggatcttgtaattataattaccagagccacattccctatccatgacaccatggaaatcatggcttatgcaaaggctaagggagtgactgtcataggacctaacactccaggagtaatctctcctaaagtgggcaagcttggaatcatgccaacccatattttctcagaaggaactgttggtgtcatctctagaagcggtaccttgacctatgagattgcaagtcaattgagccgtgcagaaatcggacagagcacttgtgtaggaattggcggagaccctgttatcggtaccccttacattgaagtcttgcagatgtttgaagacgatcctgaaaccactgaaatagtcttaatcggtgagatcggaggatctgctgaagaggatgctgcagcatacattaaggaaaacattacaaagcctgtcgttgcatacattgcaggtatctctgcacctcctggaaagaggatgggtcacgcaggagctatcattgcaggtaattctggaactgctaaaagtaaaatggaagctttggaatctgctggtgtaaaggttgctcgcaagccttctgaaatcgtagaatacattaaggaaattcgtggagaataa

SEQ ID NO: 1091 - DNA, 1203 bp, Methanobrevibacter ruminantium
  source 1..1203: mol_type = genomic DNA
atggacaaggaagaaatcattaataaactaatggctggtgaaatgaagctttatcagattgataaattcacagaaaatgctacagaggctttggatattagaagggaatttatagaaagacattccaattgtgagcttaatcagatagccaattacactttggatatggaaaaggcattttccaaaaacattgaaaaccctataggaaccgttcaagtacctattggagttgtcggcccattaaaaatcaatggggaacatgcagatgatgaattctttgttcctttagccacatctgaaggcgctttgcttgcttcagtcaataggggctgctctgctattacagcatctggaggagtcaatgcaagagtgattggagataagatgactagggctcctgttataaagacagattctgttgtagaggccgttaaggtaaaatcatggtttgagactaagtttgatgagctaaaatccattgcagagtccaccacaagccatggaaagctggtgaagatagatcctatcataatcgttggaaactatgtctatcctagattcgtatactctacaggagacagcatgggaatgaatatggttacaatagctacagaaaaggttctctctaagttatatgatgatttgggagttcatgcgattgcattaagcggaaatctttgtgtggataagaagcctgctgcaatcaaccttgttgaaggaaggggaaagactgtagttgcagacatattgattccagaggaaatagtaaaatccaagcttaagacaactgcaaaggcaatggaagaggtaaacattgcaaagaacctgattggatctgctgcagcaggaagcatggctttcaatgcacactttgctaatatgattggtgcaatattcttggcaactggtcaggatgaggcccatgttgtggaaggttcccttggaataacaacagcagaggacagggatggagacttgtattttgctgtaagcatgccggacttacctattgcaacaattggcggtggaacaaggcttgaaacagcaagcgaaggattaagcattattgattgtttaggttcaggcaaggtcaataagtttgcagagattgttatttcaactgttcttgcaggtgaattatctttagttggagctttagcagctggacatttggctaaagcacatcaagaactaggcagatag

SEQ ID NO: 1092 - DNA, 405 bp, Methanobrevibacter ruminantium
  source 1..405: mol_type = genomic DNA
atgtctgataaggagtatattgattttaaaaaggaatttaaagactttgctcaagatttggaaaatagcaagcctatttttgatgatgaagatttgtcctttgatgattttgataatctcataggcaatattggagaaaataatctttcagatgattctattgacagatatggttcaataaatgatgatttagataaattggatagtctttttggaagcgattgtccggaaatcactcttgaaacagagaacatgctaatgaatttaagcattaaaaaggattattcaaagattaaagacttcaatttaagaaagaaagagttttttaaggatttaaaggatttcattgatgaatttgaatcaactgaagaatcagatgaattgatgaagttttatgatgattag

SEQ ID NO: 1093 - DNA, 156 bp, Methanobrevibacter ruminantium
  source 1..156: mol_type = genomic DNA
atgtgtagttcaggaggcccaatggctgacctttcaatgaaaaaattgaaaacaaaaaaatacaaatgtcttgattgtggaaatgaatttaaaggattaggcagaaaggtaatctgtccttcatgccaaagcgacaatgttgaattaagagaatag

SEQ ID NO: 1094 - DNA, 405 bp, Methanobrevibacter ruminantium
  source 1..405: mol_type = genomic DNA
atggtaggaatagctaaggctggagaggataagatgctttttataggaactccagacaatgatgagattgttcagtatcttgaaaaggatgatcttattgcagtttcctcattcaatcttggcaagaagtatgaaaaggggataaggtctctcatttatcttacccgcgatatcgaatctccgataatcgttcttccaaagaaccatcccgcttcaaagcgacttaagatggtcttatcagttggtgaaaacgttaggttggattgtggaataattcctggaacccatccagagcaggatatattatgctcctgtgacagtttatctggattgaatattgtgaaatccgccgatggtgttataatagagggaaatgttcctgattataagattgagcctttttga

SEQ ID NO: 1095 - DNA, 714 bp, Methanobrevibacter ruminantium
  source 1..714: mol_type = genomic DNA
atgttattgcatgaacaggcattccagttgataggtgaatctatagttgttttagtggttcttataatcatcatactaattatagccttaatacttggaatcatactccttagaagaaacaaattggtatttccttcactcattatctttgttgtgaatgtattctattcccctttgaagagtttggctaatttcttaagattggatgacgctttggttgaccatattggaatagaggtgaggaataaggtaaataagccaaagtttgaccagattcctcctgaagagaagataatcgttcttccacattgtcttaggtctagagactgtgaggcaagccttaaggaaagcggaatcaaatgcacattctgtggaaagtgtgcaataggaactatcaagtcaaaggcagagcctatgggatataaggtgtttattgtacctggatccagctttgtaaagaagataatagagcaaaacaagttcaagtcagttgtaggggttgcctgccatgtagatttgaaccagaccatgatggcactttcagacttctatcctcagggagttcttttatccacttctggctgttttgagacaagagtggatgtctctaaggtcttaagcacaattgggtattatgagtataaggaaaaaaataaatccattgatgatgaaaaggacgactctgaagacataggtaggataaaacctagttaa

SEQ ID NO: 1096 - DNA, 390 bp, Methanobrevibacter ruminantium
  source 1..390: mol_type = genomic DNA
atggaagaaaacgaaatttctcctttctttacaattaaaaagataagagaaggagactccattcaattggatcaaaaatacattaaggtcagatcaaatacagacaaggtaattgcaattcactataaggcacctatagaaagaacaattgaacttgaaatgttctttgaagattataatcctattgaaaggttaaattacaatattggcgataccggttgggtaggtgcaaatttcagaggtctcatcgatggaaaggacaagtccttgccagttgattatgattataagatattgctattggaagaatataaatgtttaagcaaggtagagcttaaacatgtaaaaagaagttctaaatttaggcctaactatactatagctaaataa

SEQ ID NO: 1097 - DNA, 672 bp, Methanobrevibacter ruminantium
  source 1..672: mol_type = genomic DNA
atgaattctaaaaagatagcaattgttcttggaataatattgctttcatttgcaattgtaggctctgcatcagcttttaacttatttggcggacctactactgactttgacaataaattcatgtcaggtacctttacaggggatgtaagcagaaacaatataagcaccaatgactccctatccgactgggtggactcctatgaggataaggaaagaaatatcacttataatatgtcttgcattaagggaggctcattcttaactgacctatatgaattgcagggtatggcagctcctgaagtgaggaatttcaatggtgaagattggaaggtctattattctcaagcagttcctacaacagatgaaaacaagacagctaatgaatccagtgtaataaatgtctacatctgtgaggcagatgtggataatgtgacctatatgattaatatcattgcatatgacaatgaatcaattgactgtgatggcagtctctactgcggattctttaaggatgacattcagcctttattagagagcattactcttaaggatgctaagaaggctccgcaaatatatgatctcttgaatatgactaaagatgattttaaacaattgcaggattatatagaacaggtcaaaacaggaaatattcctgaaactgctgaaggatag

SEQ ID NO: 1098 - DNA, 519 bp, Methanobrevibacter ruminantium
  source 1..519: mol_type = genomic DNA
atgaaagtcactgtttttcatgcaaacgaatgcgataagaagaaatgcacagcctttaagatggaaaagcaaggaaagtgcagaatagtctataagattcatcagattcctcgtggtgcagttgtattgaatccatttagcgaaaaagcagtatcctttgaagatagggggcttgtagaggataagggagttgtaggacttgactgctcctggaataaggtgtcaaagtctgctagtttcttctccttgtcaaagtatcacagatcccttcctttccttattgctgcaaatccggttaatttcggcaagccatgcatattgtcaacaaatgaggcgatagctgccacattctatataactggattcaaggaagaggctaatcatattatggatggatttaaatggggccattcatttattgaactaaattatgacttgcttgaggcttatagctctgtaaaaacaagtgctgaagttgtggagatacagaatgagttcttggctgctcatgagaaatga

SEQ ID NO: 1099 - DNA, 162 bp, Methanobrevibacter ruminantium
  source 1..162: mol_type = genomic DNA
atggaggatgttgaaatggcaagatttgaagaagcagaaaacagaatgttcaatgtaaaaatctgtttaaaatgtaacgcacgtaatcctgctggagctaccacctgtagaaaatgtggttacaaaggtttaagattcaaagctaaagaacctagaggatag

SEQ ID NO: 1100 - DNA, 189 bp, Methanobrevibacter ruminantium
  source 1..189: mol_type = genomic DNA
atgctatttttattgtttaactacgtttttttatatgctattcttataattgctaatctctctttttctattgatttatccactaactctttttctatttataatcactatcttatttttttcaatatcccattattccttttaaaaaaaatcaccctgttaaaggtttttttaaatattttaaaatag

SEQ ID NO: 1101 - DNA, 750 bp, Methanobrevibacter ruminantium
  source 1..750: mol_type = genomic DNA
atggaaaatgttgagcaacatcttaaagaaattttaaagactcgcaaaattcatttaactttaatagatcctgatgaacaaagcccagatgaagctgtcaatatagctaaagaggctattgcaggaggcagtgacggcattatggtagggggctccactgtagacactgctgctcttgacggaacctgtaaagccttatctgaaaatatagacaatccgattatactcttccctggaaacatcaatggagcaagcaagtatgcagatgcaatattcttcatgagctatctcaattcaaacaatccttactggattattggagctcaagcattagctgcacctgcagtgaataagacaggaatagaaaagattccaatgggatatgttgttgcagagcctggcggaactgtgggctgggttggagatgcaaagcttattccaagaaacaagccaaagattccagctatctatgctatggcagctgaaaacttaggaatgaggtttttctatattgaagcaggatctggtgcagatcagcctattcctcctgaaatggttgcatatacaaaaagggcaaccagcgacatagttcttgttgtgggagggggaatccgtgacggcatagcagcttatacagcagctaaggccggtgcagacattgttgttacaggaactgttgtagaagaaacttcagatgttaaaggtaaaatccaagaaatagtcgcaggagttcgcaaagcttctgaatag

SEQ ID NO: 1102 - DNA, 1086 bp, Methanobrevibacter ruminantium
  source 1..1086: mol_type = genomic DNA
atgttaaattcattatatactgaagccatcaataagaaaggccaactgaaagagcctcttgaagagcttaatgaaagcaagatagatttggagtcaaaatggaatgatacgcctatcatcccctctaaatcaaatcatataatagctgcaggtgacggaagctataacaagaagaaatacctgaacttcaatttctatgcagttgcagcggaatcattgatttataatcccactaaggaggagaataagctatcctctatagagtctgttgaattggacataatgccacaccaatccttcttggaagaccgattgagaaacatgatgagcatatttgaaatcaagacagcaatcaagacctttagggaatatgaaatcgattattatttagatgacggctcaatattgggagatcttattaggccaattcctcttgagaccatctcctttgaaaagaaacaggaaattattgattctgcctatctaaagattaaaaaaggctatgaaaatatggactctgacatatcatcattgaattataaggaagagtttaaggaattctttgatgatgaggagattgatgagcatgacttaattaggcttttagagaacttagagaacttgatagcattgaaatatcttttggaaaacagaaagaagattattgcaatatcaaagacctcatcaagcaatgagcttttctatgctaacattccagatatggcaattctagaccgattcacaagaaaggaaggcttttctaaagcctattataggaaggtttcatataaagtcaagcatgactttccaatagagaatgagtttttccgcaatcttggctttacaacagtctttgcacgtctaaaggactataagaacatcataaagatagagtttccttattatattgatgatgatgaggaaataaagaatatcctctcaatattaaaggataattccacagaaggctatccatatcttctaaagaaggcacataaggatgttgtaatttcaaatcagaatatgacaagtctgtctaatgtaataggatttttagacaagtctggaagggaaatgttggattag

SEQ ID NO: 1103 - DNA, 1509 bp, Methanobrevibacter ruminantium
  source 1..1509: mol_type = genomic DNA
atgattggaagatgcataggggaaacatccctaattgaactgagctttatttctaaagagatgccccaagtcggcgagtatgtcagcatagagtatgatggaaaggtcattttgggaatgatcgaatcaatggttagaggcagcgtttcattgaatgatgacatatacgaccctgacaccatagaaaagatacgtgagatagagggagatgacttttacataaagggaaaggtgacaatccttggagatataaatgacaatcttaggcttccacggactccagcacctcctggaactcctatctatagggcttcatcagagattctaaaggacatttttcaaatggacaattcacttaagctaggtcacctgataagtaatgaagaagttgaaattggagttaacataaatagtatggtttcccgacacttggcaattcttgcaatgaccggagcaggtaagtccaatacagtttctgtaatcattgacggccttcttgagtataatggctgcatgcttatctttgacatgcattcagagtatgtggatgcagagtttacaaatggcgaggttaatgtaatagatccaatcatcaatcctcagcatatggaattcaacgaaataaagaaattggcaaacattccttcaaatgctccccttcaggagagatacttcagaagggcctttaatgaagctagaaagaaagttcaggaaggtgttgccaaaccaacagatttcattgaaattctagaggatgtccttgtgagcatgcatgaaagcgagcagtatgaatctgccgataagaaaaagatattggatgtaatgaataaaattgaagacttgaaggtaaagtatgataaattattaaacaccaatgtgggagatatcctaaagcaattgaagcctggaatggcaaatgtcttggatttaggacaagtagatgagaatactgctgaagtattggttgcacatgtcttaagaaggtcccttagaagcagaaaggcttatgtaaaaaataaggataagtctgccttatcctatccaatattcttcatagttgaagaggcccatattttggctcctcaaaacaggaatccaaattccaaatattggattaccagaatagctagagaagggcgtaaattcggtcttggactttgtttggtaagccaatctcctaaatctgttgatgcagagacattatcacaagcaaataatatgataatcctcagattggttgagccaaaggatcaaaggcatgttcagacagctagtgaaaacctcagtgaggaccttgttcagcagctgccttccttaaacattggggaagctttggttttaggtcttatgacaaaggttccaacccttgttaagataaatgagtttaaaggaagacaaagaggaggagacttggatatcattgagcaatgggcttctcaaaagaaagagaaaaaggaaactttgcaaatagaattaaccagattcaatgacttaagcggaggatattag

SEQ ID NO: 1104 - DNA, 1392 bp, Methanobrevibacter ruminantium
  source 1..1392: mol_type = genomic DNA
atgcgttttgcacatatatcagacagtcatttaggctgtagacaattcggcctattggaacgtgaaaaggacttttatgaagtcttcaataggaccatagataagataatagaagaggatgtggattttgtaattcatagcggagacttatttgacagtaaccgtccatctacagaggcattgctcacttttcaacaagcattgttaagattaaacgaagcaaagatacctgtttatgcaattgctggaaatcatgattccatattaagaaaaggatctttgcctccacaagtcctattcaaggacattggacttaatataatcagtccggaacatcctgttcatcagttaggtgctgttttaatctgtggagttccatttgcaaccagttcacagaagaatgcattggttgagaattataatatattatcaaaagttgcagacaccgcagttaaatccatcttggtttcacaccaaggaattagcaaatggatgcctgaggatagctatgaaattgatttggatgatttgccaaagaattttgactactatgcaatgggtcaccttcataatttctatgtagaggactatggaaaaggcaaattggtttatccgggctctatggaaataaaccgtacaagcgaattgaatgataattttaaggaatttggaaagggtttctgtatagttgatttaagtgaggacattccaactgttgaaagggtcaccatcgatctcgcaaggaaattttacaatgaaattattgagtatgacaaattggatgaaaggctttctgtaattgaggaagaacttaaaacattggaagttaaaccaatagttgatataacagttcgtggcggtgattttgaaagcgctgatgtctatgaaaagattaatgaaaaaattggtaatgatgttttaagtttcagacctacattcaagccagataatgttttaataggagaaaatcaacttgatggggataaaacattggatcctaagacattattaaagcagacagttgataagaaatttgcccgagaggaagtcactaaattgtctgttgatttattggatactttatctgaaaaaaggatgggggaagccaaatatatctctgatgaattttatgatgaatattattatcataaggatgaaaatgaagtcagttccgaatcagagtatggcggttctgaattaaatgttaatgaacataatgatgatggtacttctcacttagagtcttctgcttatgattcagtttcagacaattcatccagtttagatgactatttaaataagaacttagattctaaagaagaagtatccgataaggaaaaatcaaaggaaaatcaagtcaagaccaaagaagtaagtcttgataacttttaa

SEQ ID NO: 1105 - DNA, 2799 bp, Methanobrevibacter ruminantium
  source 1..2799: mol_type = genomic DNA
atgatatttaaacatcttcaattaaagaacttcaaatcacatgcagacactgaattggatttggatcttggcataagtctaatcgttggtgaaaacggtgcaggaaagtcatcaatatttgaagccatatcctttgcattgtttaagaattacacaaccaacaacatcaccgatttggttagaactaacaagaatttggatgaaaagatagaaatgtcagttaagctaaccttcctttgtgagggaaatgaatatatggtggaaaggggaggcatattatctccatcaaagaccaaatcaaagcctaatttcaagtcaatatcaaatctgtttaaaataagcaatggacgagaggatatcattgcatctggaaacaaggaagtggacaggcaaatagaagagctcttaaacatgaactcctcaacatttctaaatgcaatctatatccgtcagggagagatatctgccttgatagatgacactccagcaaaccgtaagaaattgattaccaagctcttgagaattgaggaattggaaactgcatacaataacattccaagcattattgaagagtataaaacaagaaaggcagtattggaaagcaatattcgtccggaatccgaacttaattttgagttgaagaaggctaaggaagaccattttaacttagatgaccagataaaaaaatcaaaagaggaatttgaaggcctcaaggtcgaacttgaaaatataaaagaggaaaaggaaaaattggacaaggaaaaatctgattttgaatctcttaaattaaagcatgctcatgaagaggaaaatctgagtgctctaaacaaaggcaaggaagagctcttcactaaactaaatgagatcacaagaaatgaaacagagatgggcattcttaagccattctgcgagaaacttcctatttataaagaattcaaagagtcctttttagctttaaataagttaaaagaagatgaagagaatcataaaaagaccttaagtcagattgaagaatataagactgtcattaaagatgagcaagaaaatcatgagaaatacattgctttagaaggtgaaataaaggtcttaaacaataagaaaatagagatgtcctctgagattaaaaatctgaatgaattggaatctcgcaaagacaccctgactcaagaggtcagtctaaacaatcaaaaattagagacattctttaacagttctaaatctgttctctcacaatttgatcttgaagaggaaatcagccctataaaaaccaatgatgacttcaataaattggaaagtattgtagaagaccttagaactaatcttagaacttcaattgacaatacaagcactgaaatagataatttaaagaaggaatcaatcagtctaaagcaggaaataaaatcattggatgagccattggctgatattaaaaaggttgaaaacaaatgccctgtctgccaatctgaaattagtgaagataagaagaatgaacttatcaatgggtatgaggccacaatatctggcaatacaaagaggataaatgaaattaatgggtttctccttaaattaaatgaggataaatccttgaatgagtctaaattaaagagccttgattcaattaaaaacgatatttatgctaataagcatattgtagatgaccttgacaagtccaataagactcttgaaacattggatgctaaaatcaaagagcttcaagggaaaaaggaggagcttgaaagtttagataaaatgatagaatccaaaaatggagaattcattgaacttgaagcccataataagaaatatctggaagcaagcactcttcttaagtctttccctgatgaaactaaagtcaaggatgacttatatgcaatatatggcaagatcaagactgaggatgaaaagcttaaaacatatatcagttcagattcagagctttctttaaatattaccttggaagagcttgatgagtcaattgaaaaactatccgaaaaggataagagatataatatcttattaggttcagttaaagataagaaagagtatgaagataaatatgagaataaaaagaaagaaatcgaatcaaaaactcaagagattgaggagattaaaaagcagatagaatcttccagctatgatgaggaatattataatcatgtaaatatcttgcttgaaaggttaaacaataaattcacttattattctcaggacattgctgttaaggagactaatcttgccaattttgaaactgtaatcaagaatattgaagagatcattcaacagaacagagaatataaggaagagtatattgcagttaccgaatattataatctccttgaggactttagaaaactatacagcaaggacggaattcaaagggatcttaaatcacaatccagaccgttgattcagaagaataccaaggatttctttgataagttcagcttcaagtattcagatttaatcttggatgatgactataacatttctatttttggccctgagggtgaggcgaatatagatatggtcagtggtggtgaaaagattgctatagctcttgctttaagattgggaattactcaagccatgtctaagggtaatattgaaacaattcttttggatgagcctacaattcatttggatagcttccgcagacaggagctgatcaatgtattgaggagcatgtctataattcctcaaatgattatagtcactcacgatacagagcttgagactgctgccgatactctgatttcagttgaaaaagaagagggaatttctaaaattgaaaatagttaa

SEQ ID NO: 1106 - DNA, 426 bp, Methanobrevibacter ruminantium
  source 1..426: mol_type = genomic DNA
atgtttgaagaagatgaaaaagtaaataaaatatttaatcttataatcacacaaggaattgactctgaaaatgaatataaaatctttacagaaagattatactcaaagccagacttcttatggaccgaatcctttgcaagagactatgcaccatttggagaacagttcttttctaaagtagacattatcgttttattgtctggtctttacaatgacaataaggaactatttgataccttgattaaaaaatcagaagaatttgatattcctttgcttttagtgcgcccttatggtatggaaatagttccagaagagcttgaagaaaaggttaaaagcgttgtaggatggaatgcaaattgcattatagatgatataaaaagcataataatgggtgattatgactttgatgatgattttgacatttaa

SEQ ID NO: 1107 - DNA, 1074 bp, Methanobrevibacter ruminantium
  source 1..1074: mol_type = genomic DNA
atgacatctcgaagagcagaacatgagagataccttaaaagcatcctatcaaactcattatcttcaggacatccatctaaagaggccatagaaaggtataggaaatcatccccaacttactataataagctaaagcttggacttatgaacaaatacaaggactgggacctcttggacatagaaggaagttcagttattgaaaacatctatggagagaccttaaggattaggcgaagggaaaagctagactttcacctagaggataagaaagatgagataaagaatgagctttcctcaaatttgaagttaattccaggtatcggctatcaaaccgaatccagactgaaggaaaataactaccatacaatctatgaccttcttcaacatgacaaatactcccataaggcccaaaaggcattgaatcggatagaaaggaactgttttgtatctgatttcaagcttttaaaggaatcatccaaatatcctatggatcactcccagccgattgacaagaacagaacccttaaggcattaagctcccttgatccgtttaaccttaaatttatggatatagaaactttagggctttcaaatgtccctatcatccttattggaattgctgagataaaaggcaaatggattgaatccaaccaatatctcctaagggacattgaggaggagcctgcagtgatagaggcttacctttcccatctggatgaggcaagcgttcatgtaacctataatggagcaagctttgatataccatatatcaagaatagggcacattattatagaatggactataatcttgaccagatacactacgaccttatatatccggctcgcaatctatggaaagatgtattacctaactgcaaactaaccacaattgaagaaaatctgtttggcataaaaagggaagatgatgtccctggagcgtttattccagactattatcaaagctatttaaaagaaaataatattggtccattgattccaataattgagcacaatcgtatggatatagtatctttagccagttttttaatgaaaatttatgaagaatccttttga

SEQ ID NO: 1108 - DNA, 309 bp, Methanobrevibacter ruminantium
  source 1..309: mol_type = genomic DNA
atggaattaactgctgaaaagagaaaagaactgcaagagaaagtcacaacagacattaatgcaatcctagaaaagcatgaacttccttataggatggatggaatttcagtaatgaaaacatcaaaaggaaccagttttttaggaaacattagagttcatgatccttataaggtaaaagatgttagaaaagaggttgaagactattttgaaagctatggaaacgttactatcacttcaagggatgtagtgccttgctgtgaattgccttatacatatataactttccatattgattattttaacgaataa

SEQ ID NO: 1109 - DNA, 2757 bp, Methanobrevibacter ruminantium
  source 1..2757: mol_type = genomic DNA
atgtctaccgaaagcaaagataagcagatgggcaaaatcgatcaattcaaaaacgacattcgttttagaagaaagatcgaatatgtggaaaccattccagggaaagatgcaagctataagaaggtagatgtattaaacaaaagaattctccaatatcttgaggataagaagataaagctctacagacatcaggcattggctattgaaaaaacaagagaagataagaacatcataataaccacccctacagcaagcggaaagacattggccttcaacctgccagtcttagaggaacttattagcgataatgatgcatgtgcattatatatttaccctgcaaaggccttatcctacgaccaattgaaggtcctaaggaactttgaggatgagatgggccttgatctaaacccaaacccttacgatggggacactccaaaggctaaaagatataaaatcagacaggagtctcgcatcatcttgaccaacccataccagattcatcatatattggcttggcaccaccaatgggagcgattctactcaaacctaaagtatatcatcatcgatgaggcccattattataagggaatcttcggttccaatgtggcgtttcttatcaggagacttaaaaggattgcaaagttttacggctctgaacctaaattcatattgtcctcagcaacccttgcaaacccattggaacttgcagagaagcttacaggagagagttttgaactcattgacgaggactcctcccctagcggagagaaggattttgtattgtacaatccatataagtcaatcaaaaaggattccaaggaccaatttgacatggatgagtattcacgctctgtccatatggaaacagagcgcatattcctgtatctgattttaaaggacatacagacattatgctttacctcatccagaaagattgcagagctcattgcactatggacaaaacgtgatatggaaaaggtcaaaaagcgaaacgtcgaaaagattgcagcctatcgggcaggttacttggcagaggacagaaggcagatagaggacggattgaagtccagagactatttgggagtcacctccacaaatgcccttgaattgggaataaacattggaagccttgatgctgttataatatccggatttccaggatccatgatttccacctggcaacagggaggaagatccggccgtacaaatcagaagtcccttgtcattttggttgcattcgagaatcagctggaccagtactttatgaaaaacccggaattcttctttgacaagcctcatgagaatgtggttattgacctaaacaatgaaaagctacttaaaaaccatatcatctgcgctgctaacgagcttccacttacattagaggaagcaaaagaggaattcaatgttacagaagacttccttgacaatatagtcagaaacagggatttaagaaaaagcagaggattctacatctatccatatgatgacagcccatcctttaacttttctttagaccagatttcaaatgagatatttacagtgatgaatggaagaactgtgatagagcatatggaaaagtccaatatgtacagggaagcccacgagggagctgtgctgataaaccaaggacagacctatattgtaaataaggttgatctagacagccatttcatctttgtcaaaaagaaggatgtggaagcccatacaatagcattgaaaagaacaaacatcaagattaccaaaaagattaaaaagcataggataggagagtttacagtccatttcggtgaacttgaagtagaggaagactattttaagtataagctgatgcaatattcaaaggttattggagaatatataatcgatctgcctccacttaagttcaacactaaaggaatttggtttactatcccagatagcgttaaggacaagcttgaagaaatctacaaggatgaaactgaagtctttgcaggaggccttcatggaacagagcatgctatgattggactcttcccccttcatgtgatgtgcgacaggtttgatataggtggactttcaaccaattaccatgaggacacacaggaagcgactatattcatctatgacggatatgagggaggaataggaatctgtgaaaaggcgattgacctaatcaccgaacttacaaaatcaactagaaacctgattaagaattgcgaatgcaaggacggatgtccttcttgcatttattcaccaaaatgcggcaatgataataagccacttcataagaaggccacggaatatattttagattatatgtgggatgagatgaataagctaagcccagaggaccttgctaaattagaggaagaaagaattaatactgaaaacagtgattatgataatctaaatggacattctgatgttgaagttgaatatgataaaaaaccaaataatgctgaaattgaaatagatgatgaaagagaagcggataatgctgaaattgagatagaagatgatgaagcccaagaggaatatgaaaaggcattggaagagtttaataaggaaaactattcaattgcaaaagacattctaactgatataatcataaattatgacaatcaatctgcagatgcttattatctcattggtaagatattgtttattcaaggagatagtatgggagcattgtcctttgttaaaaaggcattgtctattgagcctgctcatgaattggctaatgaattttactttgagttgaagaatagttattaa

SEQ ID NO: 1110 - DNA, 2568 bp, Methanobrevibacter ruminantium
  source 1..2568: mol_type = genomic DNA
gtgataagttacgaagaatttgaaaagctggttgtagagatattagaaagggatatctcttccaattcagaccaaaaggccgctatatctgctgataagtcacaatccttatttattgtagcaggtccaggctctggaaagactacagttatggttttaaagatacttaaatttatttttgtagatgatgtccagccaaaggagatacttgcaactacatttactaaaaaggctgcttcagaactattatcccgtatattaagctggggagataagcttaagaaaaaaatccctgtttttattatggataaggtaatgaatggggaaatggcagatggctctgttgtagataaggttagaaaaatcgatttcaatcaaatcaatgtaggaacaatagacagcatagcagatgagctcttaagggtccatagggatgcaggtacaagccagcctattctgattgaggattttgttgcaaattcagttatgattaatgaatgtcttttaaagaatgatatgtatttgcatgagtccttgcaggagtatttggctgagataacaggaaaggaatctcaaattgaccaaaagcctaaggttaaaaaccttacagccatggcagatatcctccttagcattaaggagcatatatattacaatatggttgacattaatgatatactggctgatacaaaggataatgaaaggggaaagaaaatagcattgaatcttattatggaatatgaaaaaacccttagaagtcagaatatctttgattttgccatgttagagactgaatttttaaacagattgagttcaggtaaattggatagctttttagatgatgttaaagtgattttagttgacgaatatcaggacaccaatctccttcaggaaagcatttactttaggattgcagaatctgccattaaaaatggcggtaacattactgttgtaggagatgacgaccaatctttatacagatttagaggagcaagcgttgacttgtttaccaatttcattgaaagagtttctagaattggcatagaagcgaaagagataaatcttaagacaaattacagatcaactgaaaacatcattgacttatgcaatgactttgttgaattggatgatgagtatcaggatgctcgtgtaaaggaaaagcctaaaatcgtttttcctaatcttgattcttctgaagatacttcagaaaatgaatctccagaagacctacctaatgaggatgaaatagaaacccaaaagattcctgttttaggcatgttccgttcatctgaagaaaagcttgcaatggatttgactaactttttagatgaactaaacagaaaaggaaaagtaaagagaaaagtaaagagagtcttaaacaaggacatcaataaaaaactaaattcagacagtgaagatgccttggaaagctataagaagtctggctttgagcttgctcaaagcgaaggggaaatcataatagagcttgatgaggagacaggttccatagatgatgttgcatttttaacatattcccctaaggaagtcactcataactctcgcaaattcccatttattcttaaaaaacgcttagaacaccttagaactccaattagagtattcaatccaaggggacaggatctgcaggatatcgaatctgttgcagtgttctgcgggttgatgcttgaatgcatagatccaaactcctattaccagaattcaaataaaaagcttcctcgccttgcaagacgaaatatgtctgtatggagaagaaaagcccaatcattcatcaaggatgtaaatccagagcctcactctccaatttcccttgaggatttcataattcattggcaggtaaggcagcctttcaatacaaacggttcaaaagacctgaaatggcctaaggaagcaggcctaatggaacttgcttataaattggttacttggattgaagagtttcaggatgatgacgaaggactggtatacctaaaggcgattacccaaacaatcaatcagacaagcttctttaataaatactcttcaaacatagttttcacttcccatgaggctgaagaggaatcaatcaatgaggcattgatgaacatattcgtacctattgccgttgggggagttaagattgatgaaaacctatttgaagtcatacctccaaacaggtttaatataatgtccatacatcaatctaaaggcttggaatttcctcttgtgattgtagatgttgggtccaggtttaagaagaatacggtaagggaatccaacctaaggtttcctaaaaaggcagacaagtcatcaatcattcaggatagaatacgaaaatacagcagcttaggtgaaagcgaaagggattcaaaggatagggcctttgatgatcttacccgactatactttgttgcattctcaagagccaaggatgttttgctattagttggtttaaatccaaatattgatggatataaacaaaaagataaattgcaaaaaatacctaatgttgctttaggttggaatagggatgaagaattcatagggtttgatgacatttatttaatttaa

SEQ ID NO: 1111 - DNA, 1410 bp, Methanobrevibacter ruminantium
  source 1..1410: mol_type = genomic DNA
atgaaactatcaacacgttctaaagagtatattattccagaatatagtctaactggagacttattgtcctttctcacttgcaatttgcaatatcgctatcagaataagggaaatcttcctccttccatgcctattcaattgtggtttggtgaatttattcatggagtcatggaagaggcttatttaaaatggaataaccttagtgatgaagaaaagaaggatttcaaatgggattgggaaagagatataaagcctatagaggatataatcacaaaaagacttaaggtaaaaggccttaatcctccaatcaattatactgaaaattatggtcctaaggaaaacatgtacagtgccagagtggacagatcaataaagatttggggacctcatctctttccattgatagaggatgctgaagttttgataaagggcattcgagatatgcctaaggacaatgaaggacattcaaggtctgagtattattctataaatggggtgatagatgtattaagctcagtcaagttagatgagatatattcaatagagaatgattttaatggtgataatgaaaaatcaaaaaatacattcaaacaaacaactttagatagtttctttgttattgattcatgtgacattgataatgttagagataaatcctctaagaaatcaggaaataaaattttagaatatttggctaataatgaagagtttaaaactattctggaaaatttagaagatgatgaatatgaaataattatagattataagggtatgagaaggcctagcgctccaaataaaaatgatattgataaaaataatattcatttgttaaatgaggattctaatgatgaaaactcattggaagattataaaacttggattcagcatgaatggcaaattttaacttatgcttggctaagatccatgcaggaagatgctaaaccagttatctgtggaattattttctatctgaatgaattggttccttctactgaggatttgttattgataagggaagatttagaaaacaataaaacggacattcctaggcaatccattcctaaggactgggaaatattaaagaattgggatgaaaatggtccgaaggcgattcacgatgacttgtctaaaaaatttaagatggaccggtcaattaggataataaatataaaggaagatttaatagatgattctctattggaatttgatgaagttgtaaatcagatagaaagctctatgattagggaattaaatggttctaagattaaggaagcttggaatgcaaatgctgaacagagaacatgcaatgcttgtgatttcagtacattttgtaataaaaaagatttagaagaaaatactaatgagaattcaaatgaagaagataataaacctgttttttcagttccttaa

SEQ ID NO: 1112 - DNA, 681 bp, Methanobrevibacter ruminantium
  source 1..681: mol_type = genomic DNA
atggattatgatattaatgaaaatgctaattattctaaaatatttattgatgagctaaagcttagcagattgcctgttgcagttaaattcatcaacgatgaaagtgaagttccagaaggtattgaaaagattgacgaatcattaagacactgtgaaatgattacaaaagcagctaaaggcgaatcattctattcaactgctgaagagcaaagatgtgctggcggagcttctgcaatgggattaatcgatcttcctcctaagattgcaagcggtgaattatactataatttaggcagatttgaatctattgaaactgctaaaagcgttcttgacaatatttatagaaaggatgaaagaagctttggcattgtatatgcgccattggaaaaagctaatttcgctcctgatgtagttgtagtcattgcaaatcctaaaaacggaatgagaatcactcaagctattgtctacaatagcggtgaaatgttcaatgcaaaattcgctggaattcagtcattatgtgcagatgcagttagcggaccttatgttagcggcaagcctaatgcaactttagcctgtagcggttcaagagcatatgctggcatagaagatgaagaaattgcttatggtatgcacagagacaatataaaaccaatcattgaagcatttgcaaatatgaaataa

SEQ ID NO: 1113 - DNA, 741 bp, Methanobrevibacter ruminantium
  source 1..741: mol_type = genomic DNA
atgagcaatttgaaaattatttcatggaatgtaaatggcataaggactaggataaaaaataaggacatcaatcctgttttagagaaagagcctgatattattttattccaagagactaaagctagctatgagcaaatggataagaaattcttaaataagaatccctatgattattatttcttaaaaggtgaaagcgctaggactggcggactagcaagctttaccaatattgtacctaaaataatcaaaagattctttattaaatctcaagatgcattccatagggcatgtgtattggattttgaagactttacattaattcatatttatgcacctgctggaactggtaaaaaagctaattttaatcaaaaattagattatttcaacagtctattaaaatatgtagaaaagaataaggacaagaatttgattattgcaggtgactttaatattgctcataatgatatagacatatccaacaaggacactaaagttagcttcaccgatgaagaaagatctgttttagataaacttgaatcatttggatttgtagatgccttaagattattcaatgaagaagaatctttttcatactggaaaaataaggaagaaaacgatggtgcacgtttagattatttctttgtttctgaatctcttaaggataaggttaaatcttcttctatattagttgatgttgaaggttctaaacatcttcctattgaacttgaaattgagatttaa

SEQ ID NO: 1114 - DNA, 657 bp, Methanobrevibacter ruminantium
  source 1..657: mol_type = genomic DNA
atgctaagtgtttcagcagtcataactgcagcaggaaaaaattctagaatgagacaagatcaagagaaaaggaatcttccgttgcagaataagcttacactcccctttaaatcaaaaactgttatagaaacaacaattgataatgtattgaatacaaagggtatagaagaatgtgcaattgtattaggtcattatagcagcgaaatattacctttaattaaggatattgatgatgaaagaataaagatagtcatgaataatcctattgatgtaggattatctgtctctttattaaatggattaaataatataaattcagacatcgccctttgtgtaactgcagatcaaccaactgtcagttcaactacttttaataatattttagattctattttaaattcttccaatcctaataagaccatttctgttttaagacgtttggatattggtaaattagacactgctaaaggattagggatgccttttgctgcaagcagatgtgaattaattgattatattaaagacaaggatgacaatttaaatccaatattaagagaaatctttgcagatggctttgaattttatggagttgaagagaatcatcctgatgagttaattaatataaattattattcagattatgaaagcttgttatga

SEQ ID NO: 1115 - DNA, 1230 bp, Methanobrevibacter ruminantium
  source 1..1230: mol_type = genomic DNA
atgccaagattattcaaaaaaacatcttttaagatttttattgcattaattgtaataataattttactaatacctatctccatggcaatgacaagtcaccataatactcaaaacatggctgaaatttccaaatatgagaatggatccactgtcttcaatggagataacataattgacaaaaacaaaataaacaagtaccctatagtttcagatataggtgcattgactgatcaaatcttaagaggagacattgcagatgcattcttctcaatatccacaggagtggtacctacccctgcatctgaacttgtaaccggaaacattactaaatccggcgagattcaaggaatcaaaggtcctgcttatatcgatattgaaaaagaccagatcaacattgttgaacctggaaactttttatatggattcaataccccatacacacaagcggtgattgttgaaggtggtattgacatcattaacaacaagacaaatgaaaccataaaacacattaatgccaatgacataactaatgacactcttccaggagacatggtaagtgaagagacaataaaatattggtataatacatcacaagttggttccaaatacaatatagaattctgtattgacggtcttaacgataaccgttcatacattactccaactgagcttaaagagaaattccctgaagcttataactattcaatcaaataccctggaggctctccagtaattctttataaagacaatgtaaatagcactgttgtaagcagcacctatacatacttaggttcacaccctcaatataacgatgcaaacagagaatataatgccagacaattcgttacagcatggaatggaactgtaattcctgcaaatacctctggatgtggaagggaaggagtttatttcagtgctgttaaagaagcaaatgcacagtctggaatggctacacacggtgtatgtcctccagcaagagctttaagaaatgctgtattagctttaggattcagtttgcctgtaggtatggattatggtgaagatgctgtactctttggatacagtccttcaactggaatcagagttaccaacactcttgactatcctatacaaatcaatatgtggactgaaggtgccggtactggaatggcaatatatgcagatgtagttgaatatattccaaataatgtaaccactaccaacagtacagaaacaggaactactatttag

SEQ ID NO: 1116 - DNA, 1332 bp, Methanobrevibacter ruminantium
  source 1..1332: mol_type = genomic DNA
atgaaggctgctataataggtttaggcgtagaagggaaaaaagcattgaattccctattaaaacataattgggatgtttatgcaagtgacttgaatgtcaatatcaaaatggacaatctgcctataagccttgcccaagtgaatgtatctccatctaaggataaaatcactttccaaaaggataatctaaccattgatttaggatttaacaatcaggaaatcatcaattccgctgatgcagttgtattaagccctagcatttggggaagcagaattgcagagcattataaaaactctggaaaactcctatgtgacgttaagaccaagcatagggatatctttacaattggagtaaccggaaccaatggaaagacaaccactgtgtccatgattaaggaaatcctagaaaatgccggcaaaaatgttttagtcggaggaaatggtggaggaggctttgaaggctattatgaccttatcctagaagcagatgaggaagaatatgatgtcttgcttattgaagtttgtgatatgactgtcggattctgcagatattgctttgactttgacattatagccctaacaaatatgggaaatgatcatatggacgttcacggttcaatggaaggatataaagattccctaaaggagtttttcaaagataaaacaatatttttaaataagaaccccgagtttccagagagctttaaggaagaatttattggcatttctaaaaataccatagaatacggcgaaacagattatgaaattgatcttttcggcagattcaatagattgaatgcaggattaagccaatcattatccgaatacataaatgaaaatgtttttgagatagatgaggaaatcattaaaacaagcctagaaaactttaaacctgtaaaaggaagattagagcttcttaagctaaatgactgcacaatctatataggaaaatccgacaattcagatgcgattaaggtcattcttgatgaagttgacttcactgcaatcttcattggaactccaaggcataatgagaatcatagattggacatcttaaatgaagttgttaatgcaaatcccgatgcaatcattctattccctggacttgaggataccctagatcaggcaatctacagattaggcctgctgaattatgatggaagaatcgaaatagccaataatctggatgagatagttgcatttgttgcagaattctcacatgaccctgctatatttataggaggaaacggtcaagagaccattattaaaatacaggatagattaagagaaattgctgattcgataaatgaaagtgattatgagtgcgattaa

SEQ ID NO: 1117 - DNA, 1104 bp, Methanobrevibacter ruminantium
  source 1..1104: mol_type = genomic DNA
atgaaaggtgaaatgatgacatctgatgaaaaaattaaattagtagaagaactctgtatgactccaggtatctctgggtttgaagaaaagattgcagagattattaaaagagaattaaaagatgtagcagataaaattgaagtagacaagatgggaaatctaatcgctactaaaaaaggttcttctaaaaaaggaccaaccgtaatgttggcatcccatatggatgaaattggtttgatggtaagctatatcgacgataatggttaccttaagtttgcaaccattggcggaatcaacgatcaaatgcttatgaaccaaacagttgttatccattccaaaaatggtgatgtgactggagttatcggttctaagccacctcatgtaaccaagcctgaagagaaaaagaaagttgttccatatgatgaaatgtttattgatattggagcaaaggataaggagcaagctgaagagatggtttccattggagatccaattacatttaaaacatggtttgaagcatttccaaataatttagtaatgtgtaaggcattggataaccgtttaggctgttatgtcatgatggaagtcttaaaaagagtggattccaaagctacagtatatggtgttggaacaacccaagaggaagttggcttgaaaggtgcaaaagtaacttcatataagttaaacccagatatggcatttgctcttgacgttaccttatccggagatcaccctggaataaaacctgaagaggctcctgttgttataggaaaaggacctgctgtaatcttaatcgatgcaagcggcagaggaataattactcctaaatacattagagagcttttgattaacactggagaaaaagaagaaattccataccagcttgaagtaagtagtggtggtacaactgatggtacagcaattcaccttaccaaagaaggaattcctaccggtgtattatctgttccaaccaggtatattcacacaactgttagcgtagcaagtatggatgatgttgaaaatacaattcaattgattgtagctgctataaacagtttagaaataaattttaaatacattttcagtattttaaatactttttaa

SEQ ID NO: 1118 - DNA, 1161 bp, Methanobrevibacter ruminantium
  source 1..1161: mol_type = genomic DNA
atgtttggagtaaagaaaatgaaatacaaatctaaatttggttttggctgtatgagattgcccctaaaggatgaaaacaatccacagtcaattgaccaagaatactttaatgagatggttgatacctatatggaaaaaggatttaactattttgacacatcctatgcatatcataatggaatgagcgagattgcaattaaaaaagcccttgttgaaagatatcctcgcgaatcattccttatctgtgataagatgcctacttgggcccttacaagtgaagaagacaatgagaaatttgtaaatactatgcttgaaaggcttggaatcgactattttgatgtcttttttgtacataatattaatattccatggctagaactggctgaggaacataatacatttgaatatgtaaagaatatgaaagaaaagggcatagcaaagaagattggaatcagtttccatgagaattccgatttgttagaaaagttccttaataaatatgctaaagacattgacattgtgcaattggagcttaactatttggattgggaagatccagctatcgaagcccataaatgctacgatttatgtgtagagcatggccttgatgtctatgtgatggaaccattaaagggaggagtgattgtaaaccaacctgaagaaataaataatgatttcaaggagcttagtcaagacgcttcaatagcaagctttgcaatgagattctgtgcatcccttgaacatgtgaaaatagttttaagtgggatgagcaaaatggaagacttaatcgataatatcaatacctttgaaaacttcaaaccattaagcgaagaggaatttgacttcttgcttaaagaagcagataaattaagagaaaatcttgcagtgccatgcagcgaatgcggatactgtcttaaggcatgcccgttagagattccaattcctgagtactttagattatacaatcaccataaagttcagaaagaatcaaatatctatagattgtattttgataagttagctgatgagaaggttccagcaagcgactgcacacagtgtgaaacctgcatagattattgcactcaaaaaataaacattccaaaagaattagaaaaattgtgtgagcatttccaagagggttttagtccttatggtaattaa

SEQ ID NO: 1119 - DNA, 7899 bp, Methanobrevibacter ruminantium
  source 1..7899: mol_type = genomic DNA
atgaaatttagaacaccatcaaagaaagacaccaataaggatattgagaaggagtttaaaaacttaagaaaagagctcttggatctaaccttaagaaaccctcttcttaactttaaggctagaaaccgaaatctcagtattatcaatcaatctcctataaacatctataggacccttgttttagagaataaaaagatgttctttcaagcaaataagaaagaaactaaaaagtcaaaggcccatgcattcatagatgaggctaaggagtttctatcacaggaaagcgataagaccttaaaggcagacttatcacctagtgaacttcaaaaaagactcttttatatagatcagcaatctaagacaatggtacaggagcaaggttacaatatcctatacattgcaatcggatttatcgaatggattgacaataagaagccaagacaaaagaatttagcacctctcattcttattccagttgaaatggaacgtaaaaaagttggaaactctttttcattatcttggacaggtgaagacttacagaacaatatttctattcaagcaaagctaagggaaatcggcatagaattgcctaagtttgaacagacttcctatgtggaaggggttaaccactatctggaaaatgtaaggcaggcaatcaggccatttccaaaatgggatgtaaaatatgacatagcattaggattcttctcattcaccaagtttgtaatgtataatgacttgaatccggaaagttgggatgagaacatcgacttgacaaaaaatgagcttattcaagcaatcttcaacccaagcaagaatgtatatgaagatacctttgaagaggatgatgtagatgaaaagctccattataagacaatgtatcaggttttggatgcagattcctcccagattgcagctattgaaaatgtaaaggccggacataaccttgttgtagaaggtcctcctggaaccggaaagtcacaaaccattgtaaacttgatagctgagcttattgcagaggggaaaaccgttctttttgtaagtgaaaagatggctgcacttgaagtggtaaaaagcagattggatagcgtaggccttggcaagtttgtattggagcttcattcacataagacaagacgaaagaaattccttaaaaaccttcaaaaagccactaatgttcgctcaacaagggatttaaagttagatcaaacattaagaaagcttgaaaacctacgtgaccagttagatcaatatgcagagataattcaccgtcctatggcaaatgtcaagctcagcccatttgaactctatggtatgaaggagtcttcagaggattatttctcccgccaaaataggttattgcctttggttaggtttgacaatccagaagatatcaccatgaaggatctggatgatataatcatatcattggaaaacctatcagagctctattcaacaatatcaaaaaacaatccttggagctattgcaatccgaaaagcttgcttccagcagatttaagggaaatagaacagctgataatggataccctcgaggcactcactgactttagatatgagatggacataataaatgaggtctatggaatcaaggttccaaataccctgcaggaatatgaagattcaatcactgcattaagcctattaaatagcgagacagttaaccttattgacagctccatcctattgaatagggagtggtatagcaatcctgaacaggcacaaattctaatcaagctattggcttcatatcagcaatcatctaacctctttgataagtttacagattatcttctcattgctgatttggatacattgattcaagacttgaataaggacttgaataagaaatttaggctcttcggcggaaattcccataaggatgagctaagcagattatataagggccctgttcctagtgaaaaggaagccttaaatgaccttattaaggtacgtaaagaaattaaagttagacaaagctataatgataatgaaaaacttggaatcagatactttggagatttatggggcaagaatgccaatgttcaagagcttaaggaagtttcaatctggatgagaaagttcacacatcttttatctaatggcacattcaatgaaaataccgttaagatgctttctaatgaaatattccacccttcaatagatgatggaatcgatgaatatattgaaaaaggcaacagattctatgaaagccttaagaaactggaatccaaactcaatccgagaagcaagattatatttaagaaggaaagcgaagatgttccatttgacaagtgggaaattcaacttaacaaatggaaaggacaattgtcaagcctccacttatggtcacagtattccaataccaaaagggcatgcatgaacactcatgcttctattttcatcaagacagttgaaaagagaaatatcaaaaaggacgatgtaaagccactggtattaggtaattttgcagacagtctcttgaatattgtatttagtgaaaatgagatattggcaggattcattggagaattgcatgaaaaccgcattgctgactttaaggatttagatcgaaagatcatcaatctaaaccgaaaaagaatattcaataaactgaatagccaaatccctaagattttcggtggagcaaacgaccctgaagcaaagatcttagctggagaattcactagaaaaagcggacacttgccagttagaacccttcttgaaaaggctggaggaacaatcaaaaaaatcaagccagtctttatgatgagtccattgtcaattgcacagtacctcgaccctacaaatcctaaattgcaatttgatgttgtcattttcgacgaggcaagtcaggttaagcccgaggatgcattaggtgcattcatgagaggaaagactgctgtagttatgggagacactcaacaattgcctcctacaagtttctttgatcagatgacagacagcgaagggggagaggaagtggcaaccgctttggatatggaaagcattcttcacttatgcaaaatgtcattccctgtcaagatgcttaaatggcactacagaagccgccatgagtctttaatcaatatttccaatagggaattctatgataatgagctcttggtctatccttcaccttgccataatgaccctgaactaggacttaaattccattataatccaaatacagcatatcatagaggagaaggctctgctaacccattggaagcaaaggatgttgtaaaggaaatattcagacactttgaaaagtatggcgataagaagagcttaggtgttggaacattctctgttgctcaaaagaatgccatattagaggaattggagattgaaagaaagagccatcctgaatttgaaccactattttctgataagagagaggaaaggttcttcgtaaagaaccttgaaacaattcaaggggatgaaagggatgtcattctaataagcgtaggatatggatatgatacagaaggtaagatgtccttaaacttcggtcctctaaaccaagacggtggagaaagacgtttgaatgtgcttattacaagggcaagggaaaaatgtgttgttttcaccaatttcagagcccatgacattcatctaacagcaaaccctccatttggggttaagtctctacaaagctttttggagtatgctgaaaacctttcacaaaatcagttcattgaccaagaagaggatgaggaggctccatttgaggatgcaatctataatttcctagcagataacggatatcgggtcgataagagaatcggttgtgcaggatttagagtggatcttgctataattgatgaggagaatccgggaaaatacctcctgggaatccagtgtgacggccataattatgcttcaagcaaggtagcaagagacagagacagactaagagagcaagtattaaacggattaggatggaaaatctatcatatttggtcaacagactggtatagaaacagagacctagccagagctagactcttggagcatattgagaatacaataatcactacaaaggttaatgacttgaagtcaaagattcatgatgctgaatcaatgcagataaatccagtcactactgttgttattgataagaaaaataaggagaaagattctgatgatgattcagacagtgataaaactgataaaaataaagaaagccttattaataattatttaaaagatttagaagatgaatttggagacaatagtgataaaaaggacaataataatgaagatgatgattctaataatgatgatggaggattagtcattgattcaactgatgattctattgacaatccagatgatggaggattagtcattgattcaactgatgattctattgacaatccagatgatgaagggttagttattgattcagataccaatttaggtagtgaagagtttgatattggttctgattctgttttagatgatgattctgatgatgaagagtttggtgttgattctgattctgatttggatgaagaagaaatcattgaagattcagaaattaaattaagcgacactcttaatactgatttaaaagatgaagacatttatgaacctgaaattgaattagatgacaattctgattctgatttggatgaagaagaaatcatttatgaaagggaaattcaattaaaagagggttctgatttagatacagaagatgaaattattattgaagaaaataataacaatggttctgatattgatttagattcagatgatgtaactgtatttgaattaagtgatgaggattctagttctgattcagatgatgtgactgtatttgaattaagtgatgatgattctagttctgattcagatgatgaagaattagataatgattccaatattgatttggaagatgaagaatcagatgataatttcactcttgatttggaggatcaatcaaataatctgatgccaaaaagcactattgataaatctgagtttttaaaagatttatatggtgaagatgatgatttaagttcaactattgacgaagaaccgaaaatacttaatgataataatgaagttattaataaatcttttgattcaaaggataaaaagagttctaaaaatattagcaaatctgagcttaaaaatcaagaaaaagctaaatctaaaactaaatctaaaactaaatctaaagctaaacctaaaaatagaaatcaagagattaaaaatattgaaaacggcaaaattaaaaatgatgattctaaaaaagagcagaataaaccaaaatctaaaaataggtctatactaaatagattaaagaatattggtggaggtttgggtttatcaagatcagaagaatctgaaggtaaagaatttattaaggctgaagataaaaaatcaaaagaatttgtatccgatgccaaaaagtcaataaaaagaaaagacagaaaggcaaaagataaggattccaatgataaaaaagaaataaataaaaaacttaataaagagcaaaatataaaaaataataaagataatattgttgaatcagataaaaaacaagaggaaattaaagaagaaattcaaaaacctgttcctaaatctaaaccaaataatacaaaagagttaattaatcaaaataacaaaaccattgaagaattagaagaatatattaataatagttcaaataattctgatttagaatttgatggtgcttctgatattgatttagaaaaagaaattatttcagaagacaaaactaaattagacgtagaatcagatattcaaatggatgatgaatatgtgatagttgatgattctgaattggaagacgaatttgagtttatagaagaattagatgatgattctgaattggaagacgaatttgagtttatagaagaattagatgatgattctgaattggaagatgaagaatttgaatttattgatgatttagatgatgattttggttcagaagatgaatatgaactagttgatgattctgaattggaagacgaatttgaattaattgacgatttagaagaaaaatccaacaattatgataatgaagatattaatcttaaagaagatagtgaatatttagaaaaagaagagtctgaggatattatgagacaaaaggaaagtgtttcaaaaagaaaggttgagcatgaaatcattgatgattctctagatgttattgttcctataagtgctgaaagaagagcagatgaatataataattattctgaagatgctaatgttattattccaattcaagatgaagaggaatttgaagaggaatattataataatgattctcaagttgattctgaagagggaattgatgaattggaagaattaatctctgaaaacattaattattcagatgatgatgctagagaagaattcttaacaaataaagagtctaatcaagaaagtgaagaagattcttactattacagcgcagtaggaattgaaaattcacttaaaaagaatgctgttcaatatccaaaatcaagcaataggaataaaaaaggcattgtaggtgctgtatctagcttaaaagatgaaatgctttatatcaatgcttcaattaaagaaatagaaaacccaactgaaagagaaaaaatctatgtgatagacccttcagaagaggaatactataatcagccagatgattctatttactataatgattcccttagtgaaaataaggaaagatatgctaaatcaaaacaatatgaagatgaagttgaagtcatttctccggtatcagattctgatgagggagaaacaggccatattcaatctgattatattgaaagaaaagctgaagacagttctaaatctagttctgaatccttatttagtcctaaaaaacatgaatatttggataaaattaaggaatatgctgctgaatctgaatatgaagaggcagctgaaaaccctacaataagtccagttcatactgaaattgaagaaagtgttgaatcttctgtaattagcccggttcatactgaatatgttgaaactgttgaatcttctgctatcagccctgtccaacaggaatatgacaaaacagaggaaccttcaaccataagtgctgaagatcaagaaacagagtttattgatgatattcttttagaagaagatgaattatcaaatattcaagatactgatgactctgctttagctgaagaagaaccggaatctatagaaatagatgatgatgaatttgaaagcattatcactgatgtggatcaagattatcaagaacttgaaaaagagagaataaaggaagctaatgtattaagtgcagtagataataccagattaactcctaccggcaaattagaagattatatcgtggcatataaggaaattgatgatgtcattatcaaaagtgccacagaaatatatgatgatgagaagaaagtggctactgcagttatggacattgtaagtgcagaaggccctattcatgtagatatggttatacgccggattagggaaagctgcaatctctctagagcaggcactaaatttaaggaagctatatttaaggcaattgaccgcaatgaatctcatatgaatcttataagagaagaggatttcttatttatagattatgaccaaattgcagttagaaaaagagataaacctaatatagaccttatttctgatttggaaatagaaaatgctatagatttggtattaagctttgaaaaatcattaaaggttaaggaattagctagaatcgtttctagaaccttaggttttaaatccacttctaagaaaacttcagctaagattttagaagtcattgatgttatgatcggcaaagagattttagtaaatgttaatgataaaatagaatttagataa

SEQ ID NO: 1120 - DNA, 288 bp, Methanobrevibacter ruminantium
  source 1..288: mol_type = genomic DNA
atgtcaatcactcttatccatactcgaaggagattagcccataagaaaacatataaatctcctaatgaacgtaaaaagaaaactctagctaggctatctcataaagagagagctcaaagaaacagagacaagaaaagagctagattagataggcaaaaaaataaaaataagcctaaaagtcgcaaacctaaaaaatctaaaatgccttataggtttaaatattatcaatttcaggattataaatttaactcagagttagatcagctagaaaagattgattctgattaa

SEQ ID NO: 1121 - DNA, 180 bp, Methanobrevibacter ruminantium
  source 1..180: mol_type = genomic DNA
atgttttacagtacaataatgaaaattgattcaattgacagattaagagatattagagatgcattattagtagaacaaggaattaatcctacaagaaacggagaacaggcaattcgtgtagttgttgatagaattgatgagatccaatctactttagataaaaaaatagaaaaattataa

SEQ ID NO: 1122 - DNA, 2070 bp, Methanobrevibacter ruminantium
  source 1..2070: mol_type = genomic DNA
ttgtcaaacagtaatacagatagctctgataatgcatcagatgatgcttcaggatctgaaatagtatcaggaattaacgaagagcttgaatcaaataatttattaactgaagatttaagcgtagacgatgtaattttacaaactagcttttatacaagttatgcagttaaatctgcaaaatctcctactgtattaactttcaaaaactctacagtggtaaaaggagataaattatacatttacttaaaagacagttccaatcatggcatttccggcgaaaaggtaatatttaaattttcaaattcatcttatacaagaactaccgattcaaatggaatggccgcacttgacattaaacttaatccaaacaaatatgctttttcagcaatatatgatggcagcgataattatagcgcttccagaaaagactttactttaactgttgctaaagtcaatacaaaattgacttcaagctcaagtgttgtaaggggaagaaacctatacacttatttaaaggataaaaacaacaatgccctttcaaataagaagataagcattaccatctctggaaaaacatataccgttactacagacaaaaatggcagagcaagcctaaaattaagtttaaagacaggaacttactcaacaaaaatcaattttgctggagataaaacatataactcccagtctttatccaaaaagataaaaatatataccttaaagacagtcatgacaattccaagtacttcagttgtcagaggtcaatatatttatgcatatctaaaagacagtgacggaaatgcactctcagggcaaaaagtggtaatgaaattcgacaaaatctactttaacctaaaaacagacaaaaacggaagagtagccctgaaaataaatacaagacttggaaaaatcccagtaaaagcaagcttcgcaggatcaacatcctactcagcaagctcaaaatcagtcactattacctcttatgttgaaaaaaccaagattacagttgaaaattcaacagtgaaaagaggaaaatatttctatgcatatctaaaagacagcaaagataaaggaatttcaaaccaaaaggttaaaattactttagctaatataaattatacaaaaactacagactccaatggtaaagtcgcattgaagatagaggaaaatcctggaaactacacaataaaactcaactttgctaagacaaacagttactatgcaagcagcaaatcattaaagattaatgtcttgaataatgcaactgctaaaatcatagcaaaagatcaaaccgttcttggagaatactctgtcagattaaccgacatgaacagtaatccattggcaaatcagacagttgagattactgcagctacagtaaatcgtagtgtaggatctggattgcctattactaaaaagactgttgttatcaattctgataacatctataacaaagcaacagactcgcaatttattaaatccattggagaagtccttaaatccaaaggatataaagtaattatcaattcaaatatcggtccgaatgctcattgtacagatgcaatgggagcttactctgatgtttgtattttctgtatcttcggtggtgtggacagtggtatgtttgttgacatggcagcaagttggtatcagaatctgttgaagaaatacgataatgaagttgtattaggattcactcacactcaaagaaacctagctacagatacatggcttgaaagagctcatgacgatgattacagtcctaaaaacttcactggattgtcatatcctggaacatatctaaatgattatgatatggattatgtatatggaagaacagctacagaaatggctaataatttcattaaatatgctgtaaatggtttaagcattggtttaaacaatactgttccttgcaatgtcatggaatataatgtaactaccggcgataatggttatgcaaccataacagatttattgccaggtgattatgctgtgatttcttcttatataaataagacagcaggatatgttgcagatactgtgattagtataattgaagttaaataa

SEQ ID NO: 1123 - DNA, 852 bp, Methanobrevibacter ruminantium
  source 1..852: mol_type = genomic DNA
atgaattttaacttaaaagacatgattttaatttttatcagaggtttccttatgggctctgcagatacaattcctggagtctctggaggaaccatcgcattaatcacaggtatatatgaacgtctaatccatgcaataagcagcataaaattcggatttataaagccattaatcaaattggactttgccggatttaaggaaaagctctttgaagagattgattttgaactattcatacctcttgttttaggtataggtattgcagttttaaccttatccaaggtaataagatatcttcttcaaaattatacagcatatacattttcattctttttaggccttattttggcttctgcctatattttatacaccaaattggatgaaatcaatataaagcttatcatattaacaataatcggtataatcttatcatatatatttgtagggttaaacccaattgcagctaaccatagcctaattgtattattcttctctggtatgattgccatttgcgctatgatattgcctggaatttccggatcattcttattattgcttttaggacaatatgcatatatgctagattcattaaattcattaaatttcactgaaatcattgtctttattgctggagcattcataggaatcttaggattttccaaaatccttaattaccttcttgaaaactatgaatctgctacaatggccttcctgattggaataatgattggtaccttgaggctacctttcaatcagatcacaagcaatttaactggatcttggttaatctgcttgattttagctataattggagttgtcttaatagtggtcttagagaaaaagcttagttaa

SEQ ID NO: 1124 - DNA, 1896 bp, Methanobrevibacter ruminantium
  source 1..1896: mol_type = genomic DNA
atgggattatttggtttcttaaaaaaggataagaaggaaaaatcaaataaaaaatttgatgaagaatctaataaggatttagatgaagctatagaagaatcaactgatatgattaaaaaagattctgattctagtaaagataaatcagaatcagatgattctaaatctaaagagtctaaggattctaaagaaaaagaatctaaatctaaagagcctaatgattctaaatctaaaaaatcaaaaaataaagaatcaaaggattctaaagaaaaagaacctaaaaagtccaaatccagactatttagacgttctaaaaagtctgaagatagcatcgacttcgattccataaagcacttaagcaaagaggatatgcaagaggctaaggaaaaacgtctaaaaaaggattctagaaccaaagaagagaaactcaaggatgaaacctttaggcaaatagcaatgaaccatagcaatagaaataaccgtcttgcagcagttatggaaataaagtcccaagatatattggaggatgtatgccttgaccataaggacagatttgttagaaccattgcagcttcacgaatcacagatccgaatatcctagaagagatagcctataatgccaaatacacagatgttcgccaaatcgcctttgatcagttaggccaagttgaaaatgtatttgcagagatagcaaaatatgataaaaaaggtaaaaaccgctttgcagcaataaatgaaattgatgatgaacttatattaatggatattgtcatcaatgccaaagataaaaaggtaaggataaaggcacttgaaaagataaataatgctgaaatattggctgaaattctaaaaaacaccaatgataaaaagataaccaacctaatcgttgaaaaggaaagctttgataatgaggaagtcctctctagaatagcagaggatgaaagctatgacaaattcattagaagcgaagcaataaagaaattaaatccagataatgaaataataagggagatagcaatcaatgattcaaatgaacatgtccgattgatagctattgagaaattagaggatgaagatgatcttaatgaaatagccttaaattcagaatactcatcatctcgtttgcaagctgttaaaaaaatcaacaaccaagagatattaagtcagattgccttaaatgatgaggataagtttgttagaatggaaactttaagcaagatagatgatgaaaaaatactatttgaagtgtataataaagattcagatgaattcgttagaagcgaagcaatcaaatacatcaattctcctcttaatttagcagacattgcaataaatgatgacaatttaatagtatctaaaaatgctttaaataaaatcttcagtctttatgaggaaggtgattttgaagaggatctggatgaattgcttggaaaaatagcaattaaatcaaataaagatgagatatctgaattgtcaatcaaatccattgaaaaagaggatgttctagagcatattgtaaacgaatctaaaaacactaatactttattgcttgcagttgacaagattaaatctgaagacatattaaagaatatctcagagtcaaatgaaaattccaaaatccgagtcaagtccgttagcaagattaaagacaaggacaatttagaagatattgctttaaacggcaattataatgatgcaagagttgaagccatagtaaatgttcataatcaggagatattgtctaacttggccttaaatgatgaagattccaaggtaagggaagctgcttgtaggaatcttaatggattgaatactttaaaagaggttttagcaaaagacacagatgaatacgttcgtaaaattgctaaaaagagatatgatttgattagtaaataa

SEQ ID NO: 1125 - DNA, 2907 bp, Methanobrevibacter ruminantium
  source 1..2907: mol_type = genomic DNA
atgatgagttcagaaagaaaaaacatcatattaaagggtggaagagaacataaccttcaaaatattgatgtatccattccacgtgatcaattcatagtagtaaccggattaagtggctccggcaaatctacacttgcttttgataccatttatgctgaaggacagcgtagatatgtagaatcattatctgcttatgcaagacaatttttaggacagatgaaaaagcctgaagtggattatatagaaggtctctcacctgcaatatccatagaccaaaagactacaaaagtaaatccaagatcaactgtaggaacaattactgaaatatacgactacttacgtttattatatgcaagaataggaattccacactgtccaaactgtggaaaggaagtctctcatcaaaccataggtcaaataaccgaatccataatagaagaaggggaaggattaaagattcatgtgctagctccagtcattaaagaccgtaagggggagcataaggacatattggaagacttcagaaaaaacggatttgtcagagcccgaatagacggtgaaatccgtgggcttgatgaggaaattgagcttgcaaagaccttccgccatagcatagatttggttgttgaccgccttgtaataagggaaggaacagacttccaaagaaggttgtcagattctgtagaaacagcttgtaattttgcagaaggcatagtgactgtcatgtttaatggaagggatagtgaaggaaatgaaaccgagtacgaaaaaacatattctgaagactttgcatgtaccgactgtggcataagttttcaagaattgacacctaggatgttttcattcaatgctccgcagggagcatgtcctgaatgtaatggtattggaacaaagatggaaatgaatccagacctaatcgttcccaataaaaatctttcattgaatgaaggagccatagttccttggtcaaagtcaaataagaaggaaaactactattaccaaatgttacaggctgtagctgaacatttcaactttagcatggacacacctttcaaggacttaagcgaagagcatcagcatatattattatatggctcaaatgaaaaggtggcatttgcctttaaaagaagaaacagatcatatagggtgaatcgtaaatttgaaggtgttatcacaagaatggaaagactgtaccttgaaaccaaatctaattataaccgcaaatacatctctaaattcatgagtgacttaaaatgtccagtctgtggaggaaagaggcttcgccctgaagtattggctgtaactgtaggggacaaatcaatcatagacgtatgtgatttatcaatcaaggaaagctataggttcttccaggaactggagcttacagaaaggcagatgtatattggaaaagagattctaaaagagattaaggcccgattgaagtttttagttgatgtgggattggattacattacaatgtcaagatcctctggaacattatccggaggggaagcccaaaggattcgcctcgctacacagataggctcaggtctggttggggttctatatatcctagatgagccaagcataggccttcaccagagggacaatgtaaagcttattgaaaccttaaagcacctaagagacataggaaataccctgattgttgtggagcacgatgaagaaaccatattatctgcagactatgtcattgacataggcccaggagctggtgagcatggaggaaagatcattgcagaaggcagtcctgaagagattatggaatcagaagagtccattacaggaaaatacctatctcgaagggaattcataccaatcagagaggacagacgtagcggaaacggcaatttcctcaccatcaaaggtgcaagggaaaacaacctaaaggatattgatgttgagattccattgggactattcacttgtattacaggagtcagcggctctggaaaaagcagcctgataaatcaggtattgtataagggcctttctacaaagataaataagaaatacatgcatcctggaaagcatgattccattgaaggcattgaaaacattgataagatcattagaattgaccaaacacctataggcagaactccacgttccaatcctgcaacttatgtaggggtattcactcctataagggagctttttgctgaaactcctgaagccaaggcaagaggatacaaacctggaagattcagtttcaatgtaaagggaggaagatgcgagtcctgtttcggtgatggaatcatacagattgagatgcatttcctatctgacgtttatgttccttgtgaagtctgtaaaggaaagagatataatgaagaaaccttggatatccgatttaaaggcaaaaacatctatgaagtattagaaatgactgttgaagaagctttagagttctttgagaatattccaagagtggcaagaaagttgcagacattatatgatgtaggattaggatatataaagcttggacagcctgcaaccacattgtcaggtggtgaagcacaaagggtaaaattagctaaggagctttccaagacaagcacaggccaaacattatatattttggatgagcctactacaggtcttcactttgacgacattaagaaattattgaatgttttagacagattgactgatgcaggcaattctgttgttgttattgaacacaaccttgacgttattaaaacagcggattatattattgatttaggtcctgaaggtggagatggcggcggtgaagtcattgcaactggaacacctgaagagattgctgaatctggaacatatactggtgatttcttaaaagtagttttaaatgagaatagaactgctcttgcaaagcagttagttgaagaaaatagtgctaaatag

SEQ ID NO: 1126 - DNA, 969 bp, Methanobrevibacter ruminantium
  source 1..969: mol_type = genomic DNA
atgaaagggacatggaaacttaaattacgattatggctttctatggctgtcatgttcggtctggtttatgtactgatcatgcttgcaggaaatttcctaggatacagaggattctacggattctacgcaattgcaggactatttgtcctattcctccaatacatattcggtccaaagattgttgaaagctctatgggggttcattacttatccgaaagcgaagcccctgaactgcaccaaatggtagcggaattagctcaagcggcaaacattccaaaacctaaggtaggcatttcaaataccatggtgccaaatgcatttgcatatggaagatccaaacgcagcggacatgtatgtgtaaccaaaggaatattaggccttcttgaccatgatgagcttaaggcggtcttaggccatgagatatcccatatcaaacataatgatatggccattacaactgttgttagtgccataccattaatctgctattatttaggattctctttaatcttctccggaggtggaggagacaacaacaatggcggaggagcattaatcggctttttagctttgattgcatacttcctaggccaattgattgtactctttatctcaagagtaagggaatattatgcagatgctggaagcgtagagcttggatgccaacctgaaaaattagcttcagctctttataagcttgtttatggtgctgcaaggattccagagcaagaaatcaaggatgttgaaggaaccaaagcatttttcttaactgatatcagcaatgcaagaaatgaaatcaatgacttatcccagcttgacttcaatcgcgatggagttattagcaaagaagaattggatcagttaaaaaacaataatgtaaagatttcaggttccaataagattatggaaatgctctctacacatccagacatgcttaaaagaataaaaagattagctgatatgaattaa

SEQ ID NO: 1127 - DNA, 1593 bp, Methanobrevibacter ruminantium
  source 1..1593: mol_type = genomic DNA
atgttatgggtagataaataccggccaaagacttttaaggaagttgtcggtaacaacaaacaaaagaaggtcatagaggactggcttcaatcatggcaggatggaaatccgcaaaagcccttattattgataggacctgctggaaccggaaagaccactatagcacatatcatagccaatgagttcagcgaatacatagagttgaatgcaagtgacaagcgttctcaggatgtccttatgagcacaataggagaatcagccactaccaaatccctatttggtgaaaacaagaaactgattataatggatgaggtggatggtatccacggaaccaatgacagaggcggaaccagcgctttaaataagatcattaaaaacagcaaacagcctattgtaatgatggcaaatgatttctatagcaataagttaactacaatcaagaagaatgcacaagtcatcaagatggacaagatcagggcacctacaatcaataagttccttcgtgatgttgtccttaaaaatgaaggaatcgaagtggaccctgatgtgcttatgaagctttcaaaacgctccagcggagacttgcgttctgcaatcaataccttgcaggcattggttgaaaacggaggggaattgacagaagaaacccttgatacaaccggccagaaggacaatacagctacagtaatagacactgttacaagagtcctaaaaagcacaaatgcaatcaatgtaaaaaggtccctaagggaaaacaacgaagatcctacattggttatggaatatattgcagaaaacattccaagggaatatgaagataacaaggaaatcaaggatgcctatgaaatgataagcaaggcagacctattctttggaagggccagaagcagtagaaactatggctattggagatatgcttcagactttatgggtccaggtgttgccttatccaaaaagcagacctataaaaaattcactagggtaacaggccctatggcatttacattgatgggcagaacccgtggacaaagggcattaagggataggattgcagctaaaatggaagagaaaatgcatgtttcattacaggtcgcctataccattttcccatactttgaaataatgtttgaagatgacgtaaccgcttggcagatatcagactttttagaacttgaagaggatgaaattaaaagattcagaaagaaaaagatacctaaaaaggtcataactgctatggaaaaagtcaaagcggaaatgagagaagaagaaaaagaagagtggcgtaacagcattaaaaaaggtatattcgccaatgttccatctgaagcagatttagcagacaataatcttaataagaacttgattgatgaggattatattgaagatataacaattaaggaagatttaaataatatttcagatgatgaattggatgaaatagcaaatgaattttccttaaagccttccaaatcaagattggataaaggaaaaaatgatgctgataatgaggagaaaaaagataaagatgaagataaaaaggaaaagacagaggaaaaactagaaaaaggtcagactactttatttagtttttaa

SEQ ID NO: 1128 - DNA, 945 bp, Methanobrevibacter ruminantium
  source 1..945: mol_type = genomic DNA
atgttaggaccttgggtagaaaagtatagaccgcaaactttagacgacattgtaggacaaaagcatatcgtagaaagcctaaagaaatacgtagatcaaggaagcatgccaaacttaatgtttacaggtcctgcaggtgtaggtaagaccacttcagcacttgcacttgtaaaggcaatcttaggggactattggagacaaaacttcttagagcttaacgcatctgatgcaaggggaatcgaaacagtaagaacaaacattaagaatttctgtcgattgaaacctgtaggggctccatttagaatcatcttcttagacgaagtggacaatatgacaaaggacgctcagcatgcgttaagacgtgaaatggaaatgtataccaagacctgctcattcatactttcctgtaactattcttcaaaaatcattgacccaattcaatccagatgtgcaatattccgctttgcaccaataaaggctgaagagattgcagacagattaaaatacattgcagaggctgaaggatgcgaatacgaagaaaaggccatagaaaccatagtcctattcggcgaaggggatatgcgtaagtctgtaaatatgcttcagtctgcagcctccactggaaacataaccgaagaccatgtttatgaggttgtaactaaggcaagacctcaagagattaaggaaatggtcgatgcggccttaagaggcaagttcatggaatcccgtaatattttaagggatgttatgattcttcagggcacaagcggagaggatatggtaaaccagatctatcaggatgttgcaggcagagtcatggatggaaagatgagcggtgaagtctatatggaattgattggggcaattgcagacactgactttagaatcagggaaggagcaaacccaagaatccaattggaagctttacttgctaagtttttataa

SEQ ID NO: 1129 - DNA, 1482 bp, Methanobrevibacter ruminantium
  source 1..1482: mol_type = genomic DNA
atgatatgtccaaaatgtaatacagtaaacgatgataatgaaaaattttgtaaaaattgtggtttgcagctgaatacaactagaatatgtcctaattgtaacactgcaaataagccaaattccaaattttgtcataagtgtggtactaccttaagccctgtagatacatttaaaaaaggaattatagaagaaaatacaagcaattctttctttagtacatacaagatacctataatctgcgctttagttattttactggctatcggcgctgttacaggagtggctattttcggtggtgacggcaataatgggatcaattcaataatccctttggcaaatgacacatatgacgatacaaacttaaataattatggcgtaaatcatgacaatgtaagccaaactcaaagtgataactttacagaaaaccagactgacaacctaacagacaatcagactgtcaatcagactgttgaaaataaaacaaaaactgcaactgttcaaaatcagacagacaataataaaacaagcaataacgatacaaataaaacaaaagtctattctgaaaagactaacactacaaacagttcagcaaaagtcaacactgaaaagacaaatgcaactaacagttcagctaagacatatactgaaaagactaacactacaaacagttcagacaaagtctacagtgaaaagacaaattcaacaaacaatagtaaagtttacactgaaaagaccaataaaaccagtgatgataataaaaagaacgatacttcaattgatttgaaaactgatgataacctaacttcaattgacagtaagataaataatacagatgatgataataattctgtgattgtaatagataataagcaaaatgattctgatttaaatgattctgatgacttaaacaagaatggcttaaacgattcagatgatttaaacaagaatgatgacttaaatgattctgatgacttaaacaataattcagattcaggaaaagatacagacaatacattaaatgacacaactgatgataataaaggagatgatactatttctgacacaatagaaatgacagatgttccaaatcttgctcaagaagctgcaaataataattaccgcttctcttctataagttataaaggaaatgtatttacacaagcacaatgcattgacattttcagtgaatatatattgaatgtcaacaatggcgtattctctccaattaagattaattctgtcagttctgcatctagtccatctggagaagaccaaagtcagtctatttcccaatctgactatatcagcattgcaaacagagtccactcatggattgacagcaataatcaagttcctaattatgttggagtgagcgtaaaaggtcaagcggatctttctccaaataagatgcttgaattgttcggccaagttgtcttaaactatgcagttacaggagacatgccacaatctgttgatatctaa

SEQ ID NO: 1130 - DNA, 474 bp, Methanobrevibacter ruminantium
  source 1..474: mol_type = genomic DNA
atgaaatcaattgtttttaatatagactgtctgttgaattttttaaaggtaagaagatctgatttgttggaaaggaagtttaaaagaattataatctctaataaggtttataataatttatccaatccaagcatatcacaatacataagggacgacttaaatacacttattgataagaaatttattaaaatagaggaaatcaacttaaacacggctgttttcgagctttattatgaaattatcaataattatgataatgaaatattaggcgaaagcgaagcttcctccattgcacttgcagtcaagaataaaaagacacttgctttcaataatccaaaatcaattgagttttatctggaaaagtatgatataaaatgcattggcactaaagacattttaaatgatcttttagacaaaaaaattatatcaacagatgaattctatggcatactcaatgaattaaatcagtattaa

SEQ ID NO: 1131 - DNA, 777 bp, Methanobrevibacter ruminantium
  source 1..777: mol_type = genomic DNA
atgagagatagaataaaactaaattcatttgctgtcgaattgagaagagattgggagttgaacccatacagtccaatagacctattctctattgtattatccaaattacccgatttaacaatcattttttatccaatgtctgaaaatacaagcggcatgtgcataaaaaatattaatcttttcaatgaaaaggaattagaagaagaatgtgattccgatgacatggttgtatgcataaattcaaacatgtctaagggaaggcaaagattcaccttagcacatgaattataccatcttttatttgaagaggataaggaggacataattatctgtgaagattcaaataaggatgactctgaaatagaagctaatatatttgcttcttatttaataatgccttatgaggggttagagcgttattataaaacaaataatattggcaaatggaccttggaggataccattcgtgcagaacagttcttccagatgagccaccatgcaacgttatttagattaaaagaacaggaattcattacaaaagaagaatgcataaattttaggaaagtttttataggttatgaagccagaatcaatggattcagcgatgatctatatgttcaatccgaggaatctaaaaagtactattcattaggtaaatatattcgatcggttgaaaaagccttctcgaataagagaatatctagtggaaaaagagatgaattgcttttagatgctttcaggagtgatttaactttcaatttcaatgatggcttataa

SEQ ID NO: 1132 - DNA, 342 bp, Methanobrevibacter ruminantium
  source 1..342: mol_type = genomic DNA
atgaaaaaaataggacaacgtttacaaggattaagagaatcaaaaggattgtctcaatctgacttggctaactatttaggtatttcacagccactcctatcccagatagaagctggaaacagaaacctgaacctgtcattgctggataagctttgtgcattatacggatgcaccgattcctatattctttgtaaagatgacgaatataatgcagtaaacttttcctttagatcaaagaatgctgcaagggaagatttggattgcatttcttcagtacataagattgtcttgaacatgcgttttttaaacgaaatagacgaagatgatgagtctgaagaataa

SEQ ID NO: 1133 - DNA, 735 bp, Methanobrevibacter ruminantium
  source 1..735: mol_type = genomic DNA
atggcagttcctgaaataaatgaattatttttaccattgcttaagacaataaaagataaggatgaatataaggtaaaggacattacagatgaggttattgaaataatagaaatctctgaagaggataaaaacattaccttgcctaatggtgaaacattgatagaatctagaatcagcacagctaatacatacctaagaaaggctgatctaattgaatcaaacagattcctttactataatattactgatgaaggattgaaagtccttgaggaaaatccagatgaattgaaagaagaggatcttatggaaaactctgcttttaaagagttaaaggatgtttatactcatgatgatgtaactgaagagattccaaatccacaggacgctttaaaggcttctctacaaaagcaaatggaagatgtcagagcggaaatctccaatgatgtaattaaagagaatgaggttaaatacttcaggcctaaaaaccaaaaggaaaatgatgaaatctatgaaatcagaagccgcagggccaatctaaaagatgataaggataaatccaaaagaaaatgccatgacaagcatcatggacacaaacaccatcataaacataagtatattgtctataaggaattctctcctgcagatgaattgttaaagtatgcagaactctttgagagaggttatttaactaaagaagagtttgataagaaaaaagaagaattattgaaattataa

SEQ ID NO: 1134 - DNA, 1200 bp, Methanobrevibacter ruminantium
  source 1..1200: mol_type = genomic DNA
atgagttcaaaagtagatttagaaaaggcaagagaatacaataaagtaaagaagtatgaagagtccttatcatgctaccaatcttacttagaatctggtgaagaactacctgaaatagataaggaaagatatgcatgggacatatactttgcaagagtcaagaatgcaagcacaatagctgaattggaggaatatgtcaaggaactgaccaaatatgcaaagcaaaagaactcttcccgtagggaaaagccttgctcctataccatttccatacttaagctaatgaaattctattcagacaatatcacatttaacaacaatgcatataagcttatagcatgggctgataagttaaatcccgattacttaagcaataatcaggctaaaagggatgacactcataaatacaattcaaacaaggaaaactggtatctccagataaccaaagggctctttgaaattaaaaaatacgatgatgtgataaggctatccaatgaggccttggaaaagattccagaatttaataatttcaatgactattggttcaaatacaaaatagccaagtcctataaggaattaggagaatacgataagtccttagaatatttggatgaaatcgttaaggttaaaaacgattggttcatctatcatgaaatagctaaaaactattatttaaaagaagaccttgattcctctgccaaatgggctgctagagctgcattatctccagacggcaaggtagaaagcaaattgaaattgtatctattgattggagacattttaaaggccaaaggctatgaagatgaatatatcatgcataagtacttggtctatgtaatacgcaatgccaaggactggacccaagaggaaggctgggatgaggaattggcttcatatgagttggatcttgataatactgactacaaatcaatccataaggaactgtctgccctttggctcagcttaaaattcataggccaggaaagacaatatggtaagataactaaggtctttgaaaacaacaatggatttataaaatccggaaacaagtcttatttctttaatgcccgtgaattccaggatgataaaagctttatctatgaaggaacagaagtgtctttctttttagagaaggcttataataggaagaaagatgaagtggttgataatgctgtgaatatttactgtgaagagttttaa

SEQ ID NO: 1135 - DNA, 1197 bp, Methanobrevibacter ruminantium
  source 1..1197: mol_type = genomic DNA
ttgaaattttataacgatactgacatatttgtctttttaaatgaagaatatgctgattttgaaggaaatgaaatcgaatcaatcgaatctaatattgaagatgattttgattatctattcaatttttacgaggaaaaagaagaggattataatcatttagttgacttttatgatgaaaatctggagtcttttgaatttgattcattaatcaaggattatgaggattacatgaatcaaatagattcatttatcgatgataatcaatatagagaagataatatagaatcctttatagaagattatgaggatgaaggggaaatatttgatttgatcattgcaaaatatgaacaggaaagacaagaagaattggattactatgcagatgagtataaaaaccagataagtcccgatgatgtggaagagaaatactatgaccatattgaatctttagatgagatgcattataataactatgaagagtccatagaatcaaaatttgaggcctaccagtcaagtccaatcaataatcacatcgattatggcaacatgcatgaggtagataacttttcagactatttggattataaggacatggacactatcgattttgctttaagccaagccgattcctataatgagattgaccgctctccagaatgggatattataaatagtgatggtcctgaatacgatgaaccctttttcatagaggattttgatgattgcgacaatatagttgtggattatttggaaaacattcttccattagatgcagagcttgaaacattaattgaagatgacccatatgactctttagagaatcttattagctttgatgaggagatcaattcaaacattgaaggagagattgattttctaatttcaaataagctagaggaaatggaaaggtatgaatatgaggtagattcatatctggaatctcttttagaggataagaaagccattaataattcaatagaagcttatttagacagggaagaatacagagagtatgatgaatattatcagttcaatgacttggaacttgaagagatagaaaaccagggcatagattttgatgacttgaataatctagatggaacagctaatatctatttcaatagagacgaggaagatgaagagccatttgacttaaatgaggatatttattatggtgattatcagtacgatgagtaa

SEQ ID NO: 1136 - DNA, 4641 bp, Methanobrevibacter ruminantium
  source 1..4641: mol_type = genomic DNA
atggaaactatagcagaaaaccagaatacagaatttgaactaaatgaataccaagaggaagctgtcacatactatggcgaaaagcctctcttgattgaagcaggtccaggttcaggtaaaaccagagttattaccgaaagggtaaggtacctggtagaagaaaaggaaatggacccagaatcattcttaataattactttttctaataaggcagctcgtgagcttaaagaaagattaatggactattttgatgtggatataatcaatcaaatgcagatatccactgtacactctttttgttataaactattaatcgaaaacactaacattacctataaaatccttgatgatgattatggaacaaaaaagaacatgttcatatataagaatagagaacgacttgggtttaaaagagagtctacattaactagaggaaaggtaaaggatgtagtggctgcttttgacaaatattctacttttgatgtggatacagaaaaactggtagaatggataaaggagaatgaaccagtttcccaagattatattgattttgtaaacgaagaatatagaaaaaccggcaagtttccaagaaagaagatagatcttgataaaaagaaaaagaatctgaaaactgctactgattatcatgcctatgcagattcctggtataatgcattgcaccttcaagtggcaaaggcatatccaatctataaaaaacttttagatgagcacaattatcttgattttaacatccttcaggtaaaggctcttgaatacttaaaggaaaacccagaaacccaatatacaaacattcttgttgatgagtttcaagatacagaccctgtacagattgaaatatttgaaatattaatgaaaaatgctttaaatcccatagaaaaaagtaaagatgatgctgaagaagattgtccccctattagtgaattagaactagatgaagcggaaatctctgataagaaaataacatcctcatttactgctgtaggagatatggaccaaagtatatatggatttagaggggctttggaaaattactttgaatattttgataataaatattgctgtaaaaaagttggattaaacgtcaattaccgctctactaatgagattattgagttcagtgaacaatacataaagatgcaaaggggtaaaaaatctagaaagaatttaagagaggcccgtaaagagtcaagaaacatctactatatagaaaacgaagaaagggaaatggaagcggcaagcattgccaaaatcatcaaaggacttaaggatgaggaaaagattaaaaactacaatgatgttgccgtcttgcttagatctgtcctcacttcctctaaagacataatcaacgtattcaatgatgagaacattccatttcaggtaaagggattgcaggaccttgaaaacaaggatgagataaaatccatcttaactctattgcatttcataattgaagacgataaccctcaagaaactccaataatcacattctgggaagctgactggcttaacctaagggcatttacaaatgcagactttaagcagacctttataaaattatcctctgaaacagaggaaatattgattgaaaagcaaaaggaatttgaagaaaatgtctttaattatgctaaattaatttataatgacatcacagggaatagatttacaaaaagaagctataagggagttttagagcttgaagatgaagttcttgatgctgtttttaaggaatatcctaaacctgtattaacaaataaaacccttagagaatatggaattactaatgaagatgatttagaattcttcaatcaattgaatgagcttaaatttgaaatattcggtgatgataaggactttgatgaaaggcctaccatattgaatgtctattataggatccttgagatatgcggtttcttaagtgaagactatatatttgaccctaaaaacaagcaagctttggattatattgggctttttacccaaatcatctacgaatatgaaaacatcatatccaacagagacataagaggcctttactggttcttaaactctaatatcaagaattacagctatgacattgaaaatgaaaatggcgtaaacataatgaccattcataagtccaagggattggagtttccagttgtcattcttgcaggcttgaacgactcatctttcccaagggaatatgaagacctaagagaaaccaaatataagaatggaagcgctgtattctacactccaagggaatgcctaagatataaaagccttgataaggatgatgtcacactccattatgaggaagaggaaaggaatatctatgtggctatgaccagggctcaggaccttcttattttatctaaaaactttaaaaatcctaaaaagaccacttattccaagaccttggaaaaggaaatcaaagcaatcgagctaaaggaaaagataagtagtattaaggatgagcttgatgagctgatgaaaaaagaggatgttaatgatttatccttccttcttaagagcttgaatgatgagttaaaagatataagggcagaacttaaggaattgaagcctcttattaaagatcataaaaagattaaggttctaaataagcaattgaaagaactttccattgaaataaaatggaagataaaagacttaaaatacgaagataagattatggatgatcttattgacttattcaatcttgatgaggatagtggattaacaagggatgatttaaagaatatgttcttgaatgactttgacattggtgaaaataatgaggattctgatgaatctgagaatagttttgaggatataatcaatgattcaactattgataaagaattagataacgataatacatccatagattcattaagtagtaataataaacctatagaagactactttgaagataaagaagcattatcagacatattagtccgtactgaaaatgaaattgcaggattaggtgaggatatagaaaaatcactaaagagaaccaaaaagctcttatctaagcttaaggagcttcaagatgatgacttaaatgattcaatgtctgaaattcacttcaaatataagatggaaatccaatcaatcattgaaggggccattgaaagcaatgaagatgattccctcagcaagaatcaaattgccttaaatgcattgtactgcatgctccagtcaatcgagtctgaaataatggaaaacaaagaaaccatggaatcaaataaggagatcttaaagcgagaaaaagagttgaacaataaaaaatcatacttggattataaaatcaagctaattaaagacactgaagaattcgacaagaaatatgacatgggatatagtataagcagttatgaggaatacaagataaaagaggacttggatgaactcagcaaagtgcttatggatgattcagtcaactccattggagatttggcactcttaagagaaaaggttctggaagctggaagtccaaagctttgtgaggacttcataatcaattgggaattgattgaatctctatttaatgatgacaaatttgccaaactggaacttctctttaagataatggaatctgaagagattgataatattaggcatatgtcaatcctaaatgacagaacagagctcaaggagaaaaccaaactcttcttcatgttattctactataagaaccaagagattgaatataaggagaaattatccttcatcaataagaaaaaggaccatcttggcaatttaatcaatgcatatgatggaattataaagattgaacctaccgaaatcgacaaggtaatagatgaaaggaagattccaaatgttattgtaatagaggatgacaagaagctaaccttaagctacagttccattcagacctatgaatcctgtcctttccagtatcatttagcctacaactataagttcaagatttcagatagggaagcaattactgaaggaaatatcaatcacaattccttagaggaaataaataagacaatcattgaaagaaaggatgaaaaagaaggagaattagttggagaaatagacaatgaacttctcatttcaagagatgaaatcattaaaatcgtcaagagaatctatatggaaagccctaatatagaccgtgacgaaactcctatagactatgttctatcaaatatctttgaatattgggacaattatggcagaagatttgatatcattggctctgaatatcaatttgacatcaatagagaggactattttgttttaatcggttccattgacttattatataaaacagataatggaattgttatcttagactataagacaactgaaaacatctctaaaaaagctcaagagaaatataaaaagcaattatatacttatgctttagctttaaaggatgatccaatgtataatgatgcagttgttgataagctgcagatatatgcaatcaaatctcttgaaatgcttgactttgagctaaatgaagaagagagggatgaaagagaagagaagattagggaaattgcatctaacattaggaatgaggaattccattcaaaaggttatgacgagttctctgaatgttcattctgcagatatagttttatttgtgaaaacaattaa

SEQ ID NO: 1137 - DNA, 1209 bp, Methanobrevibacter ruminantium
  source 1..1209: mol_type = genomic DNA
atgaaatatgttattgttatagaagatggtgctagtgattatcctatagaagagatagatggaaaaactccacttaaggtagcagaaaagcctgcattggatagaatagctagagaaggacgtacaggccttattcaaaatgtgccagaaagccttcctccaggctctgatgtggctaacatgagcatattcggctatgatccattgctatactacacaggcagaggaccattggaagctgcaagcatgggagttgaaaccaaagatggagatgtggtcttccgctgcaatacaatcacagaacgtgacggccttatggcaagctcaaatgcaggacatatatcctctgaggaagctgcagaacttatggagtacttaaatgaatacttcaatgacaagtatcctggctttaaaggcaagttctatcctggagtaagctacagacacttatttgtatacaatgataaggaaaatgcagaaaagctagctaaattggacatggttcctccacatgactttgttggagagacaatcgctgataagatagagtttgattcctttgcagatgaagttaagtcaataatgctggaatcaaaggaagccctagaaaaccatccggtaaaccttaagagaattgaagaaggaaaagagccttccaatatggtttggttctggggtcaaggaacaatgcctgcaatgccaagcatgaaagaagtttatggcctaaagggagctgtaataactggcgttgacctaattaaaggattaggcgtatgttcaggatgcactaacctagatgttccaggagcaactgcattctttgatactgattataatgccaaaggagaatatgcaattgatgccttaaaggataatgacattgtatttgttcatatagaagcacctgatgaggcaggccatgctaaaaacctagaggaaaaggtcagaggcattgaaaatattgataaacatatattagcccctctacttgaggcacttccagaatatggtgactttaagatagctgttttgccggatcatcctactccaatagatgttggaacccacacaagagatatggtccctattgccatctattcaactgtagatgagccagatgatgtccaagtctatgatgaggacagtgttaaagagggttctcttggtgaattgacagggtgtaatctcttaaaattgctattggaataa

SEQ ID NO: 1138 - DNA, 1017 bp, Methanobrevibacter ruminantium
  source 1..1017: mol_type = genomic DNA
atggatgaatgtaaacttgtattaatcggttttggcgctgtaggccaaggtgttgcacgtgcaatatccatgaaaaaggaaatgatcaatgagaagtttggcataagcctaaaagtagttgcagctggtgattcatccagctctgcaatatgccaagacggtttggatgaggaattgctccttaagactaaagaggaaactggcaaattagcaaactatcctgaatatggaagcgacatctctggaattgacattttagatgcagttgactatgacgtactcattgaagcaactccaaccaatattgtagatgcagagcctgcaaaatccttgacattgaaggcatttgcagatggaaaggatgttgtaacctcaaataagggacaccttgcacttttctataaggaaataattgaagctaaggaaaaggcaggagtcgactttaagtttgaagcctcagtcggcggagccatgcctataatcaacctatgtcaggaaacattggcaagctgtggaatcagctcaataaaaggaattttaaacggtacaaccaattatatcctttcaagaatgacaacagaaggcatgacctatgagaataccttagcagagtcccaacaattaggtattgctgaaactgaccctacacaagacgtagagggtattgatgcagcatgtaaggtagtaatcttggctaattctgttttaggaatcgatgcaacctatgatgatgttgaagttaggggaatatcagatgtttcattagaggcaatcaatctggccaaggaagaaggctattatgtcaagttgattggtgaagtgtccagaaaacaattgaaggtatctccaagacttgttaagaaaaacagtccatttgcaatagacggtaccttgaaccttgcaaacattacaacagaccttgcagatgacatcactgtaatgggtaaaggtgcaggttccttggaaaccgcttcagccatgcttacagatttgattaatattataaagaataagtaa

SEQ ID NO: 1139 - DNA, 486 bp, Methanobrevibacter ruminantium
  source 1..486: mol_type = genomic DNA
atgagaatgaacttaattcttgaaatattggatgttcctggacaattggtttccatattaggccctattggtgagcttggagctaatctggtaaccattgtacacaaaagagagataagaactgaagaaggcaaagtgcctgttcaaatagctcttgaaggagaaagggaaaaccttcaagcagttgttgataaatttaaggagatgggagtaaaccttatagaagtggatgatacaatcaagaaggaaaagctaagcactatcctttacggacatatcatagacactgacttaagagacaccgtcgataagatcaacgctgtggaaggacttgtcgtaagtgatttacaattaaaattagatggcgaactcaaatcaactgcactgcttacaatcgagcttgatttaggaaaaagggaaatagcctatgataaggttatggaaattgctaaagagaaggactttttagtgattgatgaggtctaa

SEQ ID NO: 1140 - DNA, 216 bp, Methanobrevibacter ruminantium
  source 1..216: mol_type = genomic DNA
atggcaattgaaaaagatgcagaaaaaatattagaagaattttcaaaaaccttggatcaagttccagaattggaaggaacttattatattacagataaccttaatcttaatcgtgaagatgaatctgaagaaaaggacgctagtaaaattgtcagaaatgctagaactgacaaagatggtaatgttattgtaaaaagagcagattggactggttaa

SEQ ID NO: 1141 - DNA, 1812 bp, Methanobrevibacter ruminantium
  source 1..1812: mol_type = genomic DNA
atgtgcggctgtataggtctggtaggaaattttaataaagaattactattttctatgatggaatctactaaacataggggaatggattcaagcggatattatttatacaataagggttcatctgaatcactctatgaaaataatttcattttagataatagaaaatctttcaatgaatcatctatggaagataatgattccaatcaatgttctacaataggccttggacataatctattgtccatatttaatctaatcaatgaaaaaagagaaataacagacaatatcaatgaaaacagacagccgatcatattggataatcttgtattcatattcaatggagagatatataatttcaataagcttgaaagctttctaaaggaaaacaatgaaaattatgtaaagtccaaaagtgacagtcaactattggctaatttgattcaatattattataaagagacaaattcaggcaatcaggaaaatcctcttttagaatctgtaaaagaagtcgtaggtcaattggatggagactatgcgtttgcaatatatgataaggataatgatgatttggccatatcaagagattccattggagtaaagcctttattttatgctgtaactgataatctgaaaggatttgcatctgaaaggaaagcactttggaaggctggatttgaagatagtgacataaaggatttaaagccaggatccattctatacaactttgaagaaattgatttagatgatgatttgataaatgaaatcataaatactgactttaaattgcttaaatcttcatttgatgactataaatcctatttggacactaaagatacctatgatgtttataaagagctcttggctgatgatatatatgaggcagttgaaaagcgtgttgaaaacatagtagatataggccttatattctctggaggagttgacagtactattttagcggtcattctaaagagcattgcagaaaaaaggcaaaagcaaattgattcagttaataataaatcttcagatttggataacgtgtttttaaatggtttgggggaaactagcaatccatcaaataattcactagaaaatagcaaatcatcaaatgacttttcagaaaatgttaagccattaaacataaggctatatgcagtaggacttgaaaactcacaggatatcgaattcagcaaaagggttgccaaagatttagatttagacttaaagacaataattatagatgaagatacaatcagaaagagcgttccagatgtgctgactgccatagaagacccaaacatcatgaagcttggcgttggaatgaccatataccttgcaactaaggcaatccatgaagataatataaaggtagctctatctggacagggtgcagatgagctctttggtggatataacagatatctgaaacattttgataatcacactctatttgatgcatattttgacttggatgaagagatatatcatgacattgcaaacatatatcacgtcaatcttgaaagggatgatgcagttgcaatggccaatggggtagaactaagggttccgtttttagataaggatgtaattagccttgcattggatattccagggaaattcaagataaaagatggtgatgaccttcttagaaagcatatattaagggacttggctaaggacattggagtggctgaatatattgcagacagacctaagaaggctgctcaatacggctctggcataaataagattctaaaaaagaaagttttgagaagctttaacattgaagagtttgtagaatccttaaaacattag

SEQ ID NO: 1142 - DNA, 267 bp, Methanobrevibacter ruminantium
  source 1..267: mol_type = genomic DNA
atggcaaagaaaaatatataccttgcaatgattctttcttttttcattccaggtttaggtttagcgtatgacggtgtagttaaaaagttcctaggatattttattctgggattgatttttattggactatggttttacttcggtatgcctctagatgctgagataagcaatacaggtttctgttgttacttggcatatattatcgtttggatctttggtttatatgatactttaagaaccacaatcgatataaataggggagaataa

SEQ ID NO: 1143 - DNA, 1137 bp, Methanobrevibacter ruminantium
  source 1..1137: mol_type = genomic DNA
atggctgaatttagtcttgatgtagaagaaattaaagaagaagttgaaaaaagtttccaagaagaggaaaaaacaattcctaatgacaaaatcaagaagcaagctgagcaaaacgctatcgctatctttgaagcagactttgatgatgcagcccaaagggaaggaatcatcaagcctttagacgactttggtataaatgccattaaccgttcctctgctaaaaacagtcttttaagcacacgctttaaagagatgtccaaaggaggatcagaagctgacaatgtaggtgacaagttagctgacttaaaccgtcaggtcaaggctttagacccaagcaaagtggacttcaccagaacaggattcctcggaaaccttttccatccggtgagaaaatactttgacagatacgaaaaggctgaagtcgttattggaaacatcatcgaatccctagataacagtagcaaggtcttgcagaatgacaatacaaccctcttatccgaggaaacttatcttagggaattgaccaaaaagctcatgaccgacattgagcttgcaaaggaaatggacgaatccattgaggttcaaatcagaaacgctgaaatccaaggggttgaccaatacaagattgactttgtaagggaagaggttttattccctctcagacaaagaataatggacatgcaacagatgattgttgttaaccagcaaggtatcgtttccttgaatgtagtcagaagaaacaacaaggagcttatccgcggtatctcccgtgctaaaaacgtaactgtaaccgctcttagaaccggtgtaatggttgcaagcgcattgtacaatcaaaagattgcaatggataagatcaaggtcctaaatgaaaccactgaagacgttatcgaatccacttcaaagatcttaagggagcaaggaagtcaaatccaaaagacagcttctgaaaccatgatctctcctgaagtattgaagacttcattcaatgaggcattagctgcaattgaagatgtaagcaattacaaacagcaagctcttccaaaaatgcaagagaccattattgcatttaatgaaatggctcaggaaggtcaaaaggtcattgataaaattgaaatcggaaacaatacccaataa

SEQ ID NO: 1144 - DNA, 453 bp, Methanobrevibacter ruminantium
  source 1..453: mol_type = genomic DNA
atgactgaagagataaaaaagaagataaaggacatgaactttgagggagactttcaaagtcttgacttatataaggaagccttgtttgatttgaatcagcaattcttctcaaaaaaggcaaaactaagcaatttgattgaagaaaactatcaatatacaaattataactatgacaggctcttgaatattgttttccatctggaaaagatgttcaatgaggaatataagtcaatcctatcaataatacagctctcatataagaacaatgtggtgatagatcagctactgcagaagaagtttaaatcattgatatcaataattgataagacagattccttatatgatgatttggttcttaatttatccctttcggattcaaatgaaaatcaaagaaacatatctgttctagaaagcatggattctcttatagattctgttaaatactacaaataa

SEQ ID NO: 1145 - DNA, 510 bp, Methanobrevibacter ruminantium
  source 1..510: mol_type = genomic DNA
atgaaacgatataatcattgtatttattgtggctataaattacatagcgatgatgttttctgtcccaattgcggggtcaagatcggctatgtggacgatcagtccgtttcccttcccttaagcaaatacaaagagcaggtattagagctaagggatgaatatgaaaagaaggaaaaggaagtgctgagtcttgtagaaaaacgtttcgcaccgccacaattgacttatcatagatttataggggaaattgataattgcagggtattgttcttcagggaagctgaatcaatacttgacattatcaatctggtaaccgaacttagtccaaagatagaaactgaaatcaagaaaaagatagaccttctaaagaaaatcatagatcagatgaatgacctgatcaatgaattgattataaatatgggggataaggaagaatctgaaaatgaagttaaaatcgttttggatgatatgaaaaatctgattgattctgtaaaggattatgacttttag

SEQ ID NO: 1146 - DNA, 1287 bp, Methanobrevibacter ruminantium
  source 1..1287: mol_type = genomic DNA
atgactaaaaagtatggagatagaaccttagaagtgcatgcaggtcaggaagaggcagatccttttaccggcgcaagggctgcgcctatctatcagacaagctcatatgtatttgaaagcgctgaatatgcagcaaacatatttgcccttaaggagcctggaaacatctatacaagacttaacaaccctaccaatgaagtctttgaaaagagggttgcagcaatcgaaggaggcgtgggagcactatcccaagcaagcggaatggcagcaatcacccttgcaatactaaacatcgctcaatgcggagatgagatagtttccggaaacaacctttacggaggaacattcaacctatttaaaaataccttaagcaagtttggaataaaggtaaactttgtagattcccaagacaccaaggcctttgaggatgcgattaatgagaatacaaaggcactttactgcgaatcaatcggaaaccctaagctggatgttccggactttgaagttctagcggacattgcacacaggcatggaattcctttgatggtggacaatacctctgcaataggcatggtaaagccaatagagcatggagcagacattgtagtccattcagctacaaagatcattggaggacacggaacttcccttggaggaacaattgttggattcagggtaactttcgactgggaccaaacggcaagttccccagagtttacagagcctgatgacagctatcatggattgatttatactgaagcattcggcaatgcagcatacattacaaaggcacgtgttcagatgatgagagaccttggtacatgcataagcccatttaactcatttctacttcttcaaggacttgaaaccatgtcccttagggttaagcaacatacagagaatgcccttgaagttgcaaagttcttagacaatcatgagcttgtatcatgggtcaactatcctggccttgaagacaatccaaaccatgagattgctaaaaagtatttaggagacaaattcggctgcgttcttggatttggaataaaaggaggaatagaggaaggcaagaagtttattgaaagcgttgaactattatcccaccttgctaacatatgtgatgctaagacattggttgtgcatcctgcttccacaacacattccacattaagccctgaagagcaaatagcaaatggagtgactccagactttattaggatgtctgtgggaattgagaatgtggaagatatcattgctgatattgatcaggcgttaaaaaaaagcggttga

SEQ ID NO: 1147 - DNA, 648 bp, Methanobrevibacter ruminantium
  source 1..648: mol_type = genomic DNA
atgacagataatgaattgaaactggaaacaaagtgctatgatgcctgtgaatatggctacctttatggattgaataagaagatacctgatgaagactgggaaaaggtaaagccctatatgagaaaatggaaaagaatggactttgtagaaggcaatatcaaggtaacaggaaggcctgaaggatacaggtgcctggaggaagatgttgccaaggttgaagagatacttggaataacaaacactcttgcaaaaagaagggcaaatattgaagagaaaatgtctgaccctataaaaaaggttcagtttaaggaccaatgctataattggttgaatatgctatttaaaagcggaacacagccaaaacaagacctgtccagacttgcaatccattcaacaaagatctatgaccctgcagacagctttaaaaacggagcagaagatggctatggagagcttttcatctataccccacatggaatgtggtatgtaatcaataatggaagcgatgctgccaacaagtctttaaataatctagaaagcaagtttggaggggccattggatataggttgatgtatgctgatactgtagataccttaattagagtatatacagaggaaaatgagtatactgggccacaattatattag

SEQ ID NO: 1148 - DNA, 2235 bp, Methanobrevibacter ruminantium
  source 1..2235: mol_type = genomic DNA
atggaagatgataatttagaattcaacgagctcttgaatgacctagagccacatatttttaattttattttagataatctctctgaagttccatccgatctatcaaaaaaggaacagatagaattcatcacatccaactacagccaggacacaatagatgacctgatagacgaatacaatacatttgaaatagaggcaacagaaactttagactctcttgaagatgatatctttggtctagttgcaatgggccttgacgttccagaggacgacaaggaggagcagattagctatataatcacaaattactccaaggataagatagaatacgccatatatgaagctgaattgaaaagggaaatcatagctgaactggaggaattggatgatgagtacttcaatctgattgtttgccacttcaacctatctgatgagattggggaaagggaaaccctcattaactgcatttttgataactattcaataagccaaatgaaaactgcaattgagatagcagataagaagatggtcttctataatgatatgcttggatttgatgatgacgtattttcattcatatgctttaactattcctctctagactataataacctcaaggctttggaaaataaagagagccgtaaggataaggcatattatcttatttcaaactactctccaactgagctacaccaaaaggccagtgaattttttgcaaagatagacctcttcaacagcctggactcattggatgaggtcttatttagaatccttataaagaacatgaatgcatacagcttctttttagaccgccttgacataatatataaccttatgatcaactattcagactatatcatttatattgaaatggacaaggcaagggaaagctttaagacctatgatgagcttagaaacctggaagacattaagctgctgttccttgcaaattatctcaatgctccagaggaaatgatagaaaactggataaaggtctctgattttgacaataatatcttcaaggactatgacgttaacccaaagaaccatataatcagcttttatatagatgatgaagaggaagaaaaagaggaagagcctaaagtaaaaagaaacaatctctttggtatcaattactttgacataaatccattggaattgtctccaaaggaagagattgcctattatatctataagaacaagtctgaggaagacataatagaagggcttaattcattccctaatgtgattgtggacagcgatggcaatcttgtagagggcatgaatgattccatatcaaattctaatcttaataatcctgctgatagtgatattaatgatatagatgattctgataataaagagagtgataatattagttctaatgatgattctactgtaaaagtaaatattgaaggagcagatgatggaaaatcagatgaagttgaagtaaaaatttcagatgatgaagattcagattctactgaaaatttagatgaatcagataaagattcaaattcttctgaagacttagaagaaacacaagcttcacaagcacctgaaaaagatagttcacgtcctgaagtatctaaagaagaatttacaaagatgctaaatgaattggatggggacgtattcaagattctaactaaaaagctagcaattgtagaaaacaataaggtatctatcatagaccatatcgtatctaactacaactactacgaaatagaagatagaatcaagcttatctcatttaaaaaggaccactatgttcgtttagatgccttggatgatgccacattcaacatattcttgaaagagttttcaactgttcctaattcattcaatcgctttgaaaagatagactatatcataaacaactattcctatggctatatagaatccagattggagatggttctagatgacattagagagataaaaagatcattagccgatgatgatgtcttctttgagatagccacatactttaaattgcctctccatgccactaaggaagagcagatcgatcaccttctaatcaattatgacttgattagagttcgaaaaagaatcgctttctatgagggcaagcttcacgtagaaggcttaattaggggcatagttgataaaaacaagatagaatgtccttattgtggtgctaagattagaaaagatgctaaatactgtaccaattgcggtgaaaagctaagcattaacattaatattgattaa

SEQ ID NO: 1149 - DNA, 747 bp, Methanobrevibacter ruminantium
  source 1..747: mol_type = genomic DNA
gtggacttaaaagacgtttattattcttcaaaaccctatactcaagaggaatttgaaagtatcataataaatgcttataaatatgtctgtgaggagattgaaaccaaaaataaacgttttcaggcatgtcatgattttgaaccatgttttatttgctggaacatcgaattggaagggaatgaatttacaaaatggatagaggaaaattctgatcttagagtaataaataaattcaatgcttcaatggatgttggggttctaggctcatttacagaagatactattaagctggaaaatggcattgatctatctaaaattccaagatgcaaaggaaaatgcgatagggaatatttctttaatgaggaatgcttctttgaaagaagaaggctaagagagaaaatagggtcaattgaagatatggaactaattaatccttcttcaatatttgaattcattgattataaagaagaattcattgatttaatcatagaaagcgttaatcttataaaaaatcattttccaaaggcaaaaatttatttaaaatataattgggatcatgaatattgggatttaacttcaatctgtggaaatatttatctaaaagacggaaataatgatgaaaactatagtatttataaatataaactctttccagactttgttaaattaagaaagtcctatggtgatttcaattattatatagaaatgatagatagcgatgaattggatgaacttttaaaaaattga

SEQ ID NO: 1150 - DNA, 795 bp, Methanobrevibacter ruminantium
  source 1..795: mol_type = genomic DNA
gtggatataaagactctccaaaaaagagccatatattatagcgaaagcaaatatacaagggatgaattcgaaagcataattatcggtgcattcagatatgtctgtgaagagattattcctaatctttccaactttactcgctgtggctttgatttgaattttgaaaggatttgctttgccaaaggagtcaatgggtatttaaataaatggattgaggaaaactctgatttaagaattctaagaagcactgaaatatcaatggatataggaaaccccttcagtccgaaatatgatacatataaacttcttgataatatagattatgcaaagatgcctgattgcaagttggaatgcccaaacaatgaggactatgaaaagatctggagaagaaagcattgctactgggaaagagaaaaggtcaaggaaagattaaactccattgaaggtttgatattggtaaatccaaatgaaatctacaggtttgtacttaagaaggacaatttcattgactatattgaaagcactatggatttgattagaaagcattttccaatggctgtagttattttgcagtttagtccagaccctgaatgcgaaacctatgacattctttcagctgtaatatatgatgccgatggagactatgactattcttttttagtccagaatgaggaatttacagaggaaaactgggccttgattgattattacgatatacatgaccttatccttaaattaacaaaaagtgatgaatattataaaagtttgattgaaaagaatttagaaagcgaatag

SEQ ID NO: 1151 - DNA, 447 bp, Methanobrevibacter ruminantium
  source 1..447: mol_type = genomic DNA
atgtataaattaaagaattttttaaaaggacattttgcaaaaagcaaagtcgaagacttgaattttcactgtaagatcaatgagaattttcttttgataaatccaaatgaaatctatgattttataggtgaaaataatagtttaatagaattaattaacattagtttcacattaataaaaaaatattttccagattcaaccatatatttggaatttaatcaagaccctgaatatgagggattgaattcaatctttgccaatatttatgatggtacaaattcctatgattgtaatatggatttatttgaagatttatcccttgaatttagagaattaaaaaagcaatatgggaaaatggattattttttagatatggtgtctgttgatgagccttttagaaataggctaaatgataaatttgatgggtttttaaagatagtaagatga

SEQ ID NO: 1152 - DNA, 360 bp, Methanobrevibacter ruminantium
  source 1..360: mol_type = genomic DNA
atgagctttgattgggaaagatttatagatgtggctgaacatttaagaaactattccaatagggaagagtatcaaaggacagcagttggtcgttattattatacttgttttttaatagcaagagacatctattatgatatggccaaagtgcctgagggaacatttgtatctcatgaatctgtaataacattttttgaaaagtcaaaaaaggatattgagaaagatttgggcactaaattgagaaatttaagaagaagacgtaataatgcggattatgataaggaattccgttttgctgatttaaatgacatcaaaaaaagatataaggacattattactttgcttgacaaattgaaataa

SEQ ID NO: 1153 - DNA, 432 bp, Methanobrevibacter ruminantium
  source 1..432: mol_type = genomic DNA
atgaataacaaaactagaatggtggttggtaggcactcaaaaagaacaggtcctgagatggatcaaattgtagaaaagtactacttctttgaagaaggctttgctgggctaatgatgctctttgaagaggactggtttgtggataagcttttagagttgaaggatcttgtccttgagcactatgatgatgtggtattctacttcttcaatcttaccctaaaaagcgatcttgaaagctgctgctttttggtgacagtcattgtgaagaaggatgatggccatgagatgtccaagtcccatatacgctctctgatttccgataggatcaatgatggctcaaagcttccctttatgataaatcttgttgaagtgagcgatcctctggaatttaagagatatacgcagggggaaataggacctcataaagactga

SEQ ID NO: 1154 - DNA, 402 bp, Methanobrevibacter ruminantium
  source 1..402: mol_type = genomic DNA
atgcaagtggcaatagctaaaaaggaaaatggagaaatattggaattggatgatataagctaccaatttgtcttatggctaaacgaaaacaacctaacccaacttgatccaatatatgcaaagtccgttctaaagactacagttggagagttcagcaagcttaccagccagcatgagtttgaaggtgaggatgagatgcttgttcctcagctcaactactttgtagagctttcaacatgggcttcctggaaggatggcaagcttatggatgaggatgaggaaataacaatatcctttgagatatgtgatgtggtcttcaatagggagactatgaaagaggaataccatccgattgaaatgacttatatgaagtctttcatagagtcttttttagaaaaataa

SEQ ID NO: 1155 - DNA, 1836 bp, Methanobrevibacter ruminantium
  source 1..1836: mol_type = genomic DNA
atgacactaacagcagaacagcaaagaattgcagatgatatgtgcagagagcttgcaccaatcacattcatacaaggaaaggcgggaagcggaaagacccacctcatcaatgagctcatcaatctattggagatagatgagatattgtgccctacaaatcttgcaaagcagttatatgggcgcaatgcaagaacaatacattccttcttttttcatgagtttgataaaattgaagaaggctatcagaaccctaaggcttatgatggggttcgaaatgactatttcctcagaaacatagcctttacaaagataatagtaattgatgaagtttccatggtcagatccgaccttatggagatgatacataagattctatcaactgctcttaagaacgacagtccctttggtggaataaagatgatacttgttggagacatgttccaactgcctccgattgtagaatccgaggaaacctatgaatatctgaaaaatgaatatggcgggctgtacttctttgacagccatgtaattcgtaataatctttcccaaatcaagttctatgagctgaacgagtcagtgcgacataaggatgactccgattgggtaaatatgttagatatgttacgtgaagtgcctaagtttgaaagggtccttcctattttagaaaagatcaacacccgtgtcgtttctcccgatgagattccagagaatatcactgcaataactccttccaatgctgaagcaaacagaatcaacagaaggcagttggataagatttccggagaggaattctcttcaagagctcatttcagaattaaggagctggattcaaaggattatttggaattttattacagcgaagaccctatgaaaatagacatgcaaaaatattatccaattgaagttccttccagattcgaagccttcttaagatataagataggggctcgtgtcatgttaaccggatctgttatgggcggaggtaaaaatggagatttcggcactatagtggatagggagataatcagggattatgatgatagcataacagaaatcattaaagtgaaattggaaaagaataatcaggtagtctctgtaactcttgacgctttcagcgctgtggattataagtatgaaatggaatatgatcctacatcccatagcttaagacgtaagacaccttatattcagcgtgttaaacaatacccattaaagctaggctatgcattcaccatacataagtcacagggccaaagctttcctgaaatggttttggacttgaaaagcaatatttttgcttcaggacagttatatgttgccttaagtcgtgtgaagaaattggagggcttgtatctgacaaagcctatcgcttttagtgatattattatagatgaaaggataattcaattcttggattcattaaggaatagagaatttgatgttccagaggatggctcttcaattggctctcaagaagtattaatctctaaaaagactcctttaaatgatttgtttgaggactttttgcatgagacagaaagccaagctgaaaatgaggtgaataggacaatccataggctggttgattatgcctatgccctatatcaggtagatgaatatgatatgattttacttgagataaaaaagatagctcaaattatttctaaccaattcctcattccacaagaggatatggagtttattgaaaaagttaagactatgtctgatgataaaatagatgaatctatctgtacttcagtactgttcaatctttatgatgtctataaaagggtacatgatgatcccaaccctatagtagtggataagattcattaa

SEQ ID NO: 1156 - DNA, 1701 bp, Methanobrevibacter ruminantium
  source 1..1701: mol_type = genomic DNA
atgctaataaacattaaaattaaaaatttcagatcactcaaggactttgaaatgaacttcaatccaggcctaaatgtaataataggagagaacgatgcaggcaagacatccttaatagactctctaaaaatactatttgggctgaagaagatagatataaatgactataacgaagtgggctgtccaataacaatagctcttgatgagtcaaacttccattactgccttgaatcaaggatagtggaggacactgtggtaaacacattctatctcaagcccaccgaagataaaataaatgaaatgaagacccgcctaaacgggatggatgaactgaaggaagccgaggcaagaaagatgcttaaggagtactgctccatcttcgacatcagctatcgctccaacagtattatggaaaacctcaagtcaaagatacttgaatcaatggaatctgatgaatacaccaaggttaaaagctttagctatccaataagcttcttgggaagccgcgaatttgaaaacatagactcattctttgaaaacactttcttcaaggagctgaaggaggagatatggaacatacatattggggataagaccctcaaccagcatatagatgactatatagaagagttcaaaaacgaacagctttccaatcaggatgcagaggagctcaatgcccaacttaaggaattcatgcccgatttcaaggagataaaccctatagtcaatccaagcgccaagcttagcctggacgttgatgtcgaaatcctcaacagctcagggcagaggataatgatagagaagatgggagacggaaccaaccgccgtacaaccatggccatcttcaagcataagaaggacaaaaaggaccttgtatatgtatttgatgaaatagaaacacaccttcacataaaggcccaattggacattctcaaactattgaaggaccttacaaaagagaataagcagataataataaccacacactccccattcctcataaaccaagtaaaccttaacgagatacatctcatgagcattgacaaggagacaggctctaaggtatctacccttaacagcagcgaagaaagtcaagtcgcattgagcaatttgggaataaacaatatagatctcttctttacaaacaaattgcttattgttgaaggggaaagcgaacagaactttatacctataatgtatgaaaagatctatggctatcctataagccagaatttcataaagatagtcaaggcagatggcataagggacatacctaatttcatacgtgtaatcaagaagtccttttcaaagacagacatatttgtcctcatggacaatgatgcagatgagcttaccgaggaaaggatagagaagatggttgaaggtgacctgatacatagggacaatatttttgaaataggagatgtggagtttgaagacaccttcagcgatgatatattaaggcaggccctaagccagtacatgtcagatacccttggatatgctgttgaggcaagcatgagggacattcaaaatgcaagacattcagataagttttcaaaggttttaggagaggcctttaataggaggacatataaaaactttaaaaagccattgtttgcacagtatctggctatgtttgcagagaaagaggacatagatgagaagataattaaattgtttgaattgattagcgattaa

SEQ ID NO: 1157 - DNA, 726 bp, Methanobrevibacter ruminantium
  source 1..726: mol_type = genomic DNA
atgtatttggaaatgaatgaattggcttgtgcttgcagaagacaatggaaaatagatgtaaatgaatccattgacatattctcacttgccataaataaaataaagaacttgacaatagtatttaaagtaatggataatgacataagcggagcctgtctaagattggataaggaaaacataatatttgtaaactcaagacacagtaaaggaagacaggcctttacaatagcacatgcattgtatcacttgaaatatgatgaaaacaatttcaatatatgtggaatagacagtgatgatgaaacagagcaaaaggcagatctttttgcatcatgtcttttaatgcctcatggagctttagaaacctataaattaaataataatattcaaaaatgggatttggattcaataattgatgctgagcaatacttccagatatcacatcaagcattgctctggagactaagacacttcttgaatgaaataacctatgaacagtatagggcatttaaggaagatattaatcgtaatgcatccattagaggttatgattcaagcttatacgctccatatttaaataaggactatttaaccattggaaattacatccaattaacagaaaaagcatttgaaaatgaattaatttcgctaggaaaaaaggaggaattattattggatgcttttcgtgaagacattgtatataatttaaatgaagaaatcattctatga

SEQ ID NO: 1158 - DNA, 348 bp, Methanobrevibacter ruminantium
  source 1..348: mol_type = genomic DNA
atggggtttaaaaatatggtagaaacagtaggtgatagattaaaaagaataagattagaacatgatttcactcaaaaccaaatagcagaatatcttggatttaaacaaggacaaatagctaaattagaaagtaataaaagaatattaaggagtgattctataatcaaactatctaatctttatagatgctctccagaatatataatattaggtattggagagtattccaaaactaatatggcattcagatcaaacaataaaaatctatcattggacgatattgcagagatgaacaggataatcaataatttggaattcctatcaagaattacagacaaacaggagtaa

SEQ ID NO: 1159 - DNA, 1122 bp, Methanobrevibacter ruminantium
  source 1..1122: mol_type = genomic DNA
atgattattcaagaaattttctatgattgtgaaaaatttttaacaattgttcataatggcatggataatgatattaaaaaacgagttatccaaaaatcaatagatgtttcaagacatgaaatcctattaaaagagcgttatattgaaaaatatcaattggaaaatgataattatgaattttttattaaaggatttctagattgtgaaaatgagaaaaacccttatacgaactattcaacatattttaagcaatatgtttatcctaataaaaatgatgaaattgataatttatcatttaaagattttaaaaaagtatatgattttatttatgaatatacaaattttaaatttacaaaattaaatattaataacattttcctattttttcctacggatattttagtgaaaagcattaaatctgaaacaacatcttacttaattatcaaaagttctgagaatattagtaacatttcagtaaaattcaaactaaatgatattataaaagaatcaattaatttaactgagattcctaatgataataaaatcaaatcaagggaaaattggaataattatgaaatagaaatatttgataaagataaaattatctataaatcccatacttatgtaattatgtccataaattttaatatgggaataactacaaagataaaaaagattaaattaaataaatttgataaaatggtaaattcttcaaacttaaaaaccgaaaaattcacaatttcagaggaaaatggattaattaatatttctaattatttacttgaagaatctaaaaatagaaatgaacttaatgatgtgacaaaaacagaatgtatttttttaagaaagaatgaacgggaaaaagcttatgaaatcttagaaaaattagtgaaaaacgatggagaattatttatttttgatccctattttttaaaacaaagcgaaggaaaagatgtgttaaaagatttgctgaatactattttaactcataatgatttagttaatattatcttttcaaaagatattggagaatcttttgagaactttaaaaatagtttaactgttgatgaaaaacttttttttaagaatataggagggtccgccaaaaagctatttttttaa

SEQ ID NO: 1160 - DNA, 1497 bp, Methanobrevibacter ruminantium; identical to SEQ ID NO: 119
  source 1..1497: mol_type = genomic DNA

SEQ ID NO: 1161 - DNA, 1143 bp, Methanobrevibacter ruminantium
  source 1..1143: mol_type = genomic DNA
atgaatttttatgatttaaacaaaattagaataaaaattgctgaagatgaaattgatattaaagaaaatgattttttatacgaactgtatgatttagataattttgattctttatttgatgaattggatatattaattaataaaattgaatatcatcaatttgaatttacattaatttggtatgttggatttttcaatataattaagtatgaagatattgggaatttaccaaatattagtaaattaaagtcatataattatttaaaaggagggttaataaaatattttagagggcattttcatttaactaattatacaatggaaataaaaccttatagaaactattattcatttatagaacattatgttttaagaccatttcaatatagggcaataactaaattgttaaattggatttatatttatgataagaaattcttttttgaattacactattttgataaaagtaattttcatttcttaagattatttaaactgcatgaaatcaaaaattttgaattagaagagaaatatattgattttaactgtgaagacgaattaaaaaattacatactttttaattacattattacggaatatattcatagtgtagataaaaatttgcctaaggatataaaaacaaaaattgaatccgattttaaattaattgaaaaaatagaagttaatatacttataaaaattatattagactatattagattcgatgaaacaaaaaaaataccttgttattttttagaaactatagaagaaaatgaagaaactttctttacaatatttgaatcgttagaaatttataatattaatgaattaaattcactagttaacccattgaaagaaattcatattaatcaggacagattatttcaacaaatgataacaaaattagaaaagttattaacagaagaaatcattactattgataattatgaatgggaacattttttaaatattattcctgaaaaatatgttctaatgataaatggtcttcttcgaaaaacaattggggatttaacttttatttcagaactcgatagagaaataagaagtaaaagatatttctcagaaaaaaataaagaaaaaaaattaaaagaattaatagacattgcaaaaaatataaattaa

SEQ ID NO: 1162 - DNA, 1371 bp, Methanobrevibacter ruminantium
  source 1..1371: mol_type = genomic DNA
atgcaaacatgtagttattgtggaaataaaattagaaataaagcaaaatattgtgataattgtaattcttacctgaaattaaataatttagaaattcaatttgatccaaaaaaatatgaaaaaattagattactagaaaaagctattaaagaagcttctaatctgatagaagaagataattatggtaatttaagtgcaaaaactcaaattcaaataatttatgatacaatttattcttatttagttgaaactacaaattttttgaaagtattaaagaaatatgatttaaatgaaaaatattttgtttatcattctttagagtttattaatcgagttagcaaatatcctaatggaattatatcaaatgaatttctttttgaaataaaccggattttttcagacttaaaaaataaaaataataataatactagaaaatatttattttatacaaatattaataatagagaatatattgaaaacactcttttagaaattttagaatattttgattttaaagttttttcttatgatgattttaagttccctccggaatttccagaaaattttaaaactaaattcaaatcaaaatatttaattttagagtataattcagctgagaatcatatatcaaataaagaagaaaaagcattaaatcaattgtatttattatttggatatttaacttttattcatcgatttggtagattaaatgaaaaatggcatgttaatagattcacattaaatcatcaaatctcagatttaaatgcttcggcaatgattgagttagataagaataataattttttagatatacatgaatctttagatatcttaaggacagaaattaaactagacaaaagtgatttgattaaattcaccaatattccgtttaaaacaaatttatatgaatcaattaaaaatgatgtaaaaaatgaagtagtattacataatatagaagaatatttacgattgtattatattgcttcaactaaatccgatttggaaaattcatttattaaattttggacacttgctgaaaagattttaaaagcaacttttgggcaaatgaatgatgagtctatggttagatatatgaaaaaaattttaaaatattttggttttgcaaattatatccaagatagaataccttttttaagaattaaaaggaataggcttgttcatgaaattaaagatgaaataacaattaatgataggaatataattaaattagttgtagattatttaattttatttttattgaattggagtggtgaattgaataataatgaagaatataaatttattttagacaattttaataaaactgatcttaacagaagagttgaattattaagtattttgaatgaataa

SEQ ID NO: 1163 - DNA, 2712 bp, Methanobrevibacter ruminantium
  source 1..2712: mol_type = genomic DNA
atggtactaagtcaaagtgaaatgagaagaagggctgaaaaatttattgaaacttataaggaagtgtctgatgaaagaagttattctcaaatgttctggagagacttctttgatatttttggaataagcttaaatgatgtcgctgtttttgaacaagctgtaaaaaaatttgatggaacacaaggttttattgattgcttttggaaaggaaaacttgtaattgaacataaatcagagggaaaaaatttaaacagcgcatttcaacaggcattaggttatctggatacattatcttcattggaaaaacctcgatatataattgtttctgattttaaaagaattcgtttaatcgacttgtttgaagacaaaaagacagaaatatcattgtttgatttgaaagacaacattcagatgttcaactttatttatttagatggtgtgaaacatcatgaaaaacaagaagaactgaatattgaagctgctgaactaatgggcaaattgcatgactctctcaaggagtcaggatacgttggtcatgaactggaactccttttaattagattgcttttctgcgtttatgcagaggatactgggatttttaacacttatcaattctttgattatattggtgatgaagaagatccaattagtgttggaccgaaaattcaacaattattcagaatcttaaatcagcccgaatctcaaagacagactaatttgccggaggagttggctaattttccatatgtgaacggtaaactctttgaagaacctattgtccctccatactttgattatgaaatgtacaatcaattaaaggaaatctgtaaattcgattggagcactatatctccagctatttttggctctatattccagtcaataatgaatgaagatgagagacgacaattaggagctcattatacaagtgaatcaaacattttgaaggtaataaattctttatttatgaatgatttatgggaggagtttagaaaagctaaaaagaattctaaaaaattagaacagttaagagataagatgggaaaattaaaattctttgaccctgcctgtggttgtgggaactttttaattatagcttacagagaattaagattattggaatatgaaatcttaaatattttacataatataaaaagtgaacgagatactcaagtcctattcgattccaaggagttaagtaacattaaaattgaaaatttttatggaattgaaattgaagagtttccttccttgattgctaaagttgctatgtggttcattgagcaccagatggatttaaaatatgaacaattaaacatacataaaagcaatttaccattaatatcttccgccaatattattcaaggaaatgctttaaaaatagattggacacaatttttacagcctactaatgaagtatttgttttaggaaatcctccttttgttggttcaagagaacaaactaaagaacagaaaaaggaaatgaaagaagtatttaaaggtgttaaaaggaatggtttgcttgattatgtttctgcatggtatcttaaagcagcacaatacatccaaaatacaaatataaaagtttgctttgtttctactaatagtatttgccaaggagatcaagtaggaatattgtgggaagttttgatgaaaaaatatgatatccatattaattttgctcaccaatactttaaatggagtaatgaagctcgaaatgctgccaaagtatatgttgtaattattggtttttctactgttgacatatctccaaaacatatttatacttatgaaacacttgattctaaaccagatttagaaatagctactcaaattaatcaatatttaattgattcagaaatagtttttattaaatctaggaataaccctatttcaaatgtttcaaatattatgaaaaaagggagtaaagcgtatgattatgggaatttgactctaagtttagaagagaaaaatgagttattagatgaatttccagaaatggaaaaatggataaaaacatttttaaatgctcgtgattttttaaaaagcactgaaagatattgcttatggtttgctgatataaccccttgtgaacttcaacaattgcctgcaccaattaagttaagaataaataatgttaaagaaaaaagggaaaatagtagtgattcaggtataaataatattgttaatgttccatggttatttgaaaataatcagcctaaaaatgattttttagccattcctgttgttagtggtgaaaaaagagattacattcctatgaaatttttatctaaagaaatcattgtaacaaatgcaatatatacttttgagtctgccactttattggattttgcatttttaacttctaaaatgcacatggcttggatgaagtatgtttgtggacggctaaaaggagattatagatattctaagaaaatagtttataataatttccctttccctaatgaattatctgaaaaggataaaaataatatcattaaaaaagctcaaaagattttagatattcgtgatgaatataaaaacgaatctttagaagttttatatggagaatatatgcctaactcattacaaaaagcacatatcgaattagataaagctattgataaagcgtatagttctaaaaaatttaaagatgataatgataggatgaaattcctattcaatctttatcttgaatacacttcagattaa

SEQ ID NO: 1164 - DNA, 918 bp, Methanobrevibacter ruminantium
  source 1..918: mol_type = genomic DNA
atgagtaaattttatgaagctaaatcaattttaaaaaatttggaagtgcctgataaacaacaatcagatatatgcgtatatacatttttatctttgctgtctgtttcagaagatacaaagtgggaagattcaactaatgaatggatcagaattcatgatgtcatccaattcataaagaataattatggtgtggtatatgcagaaaacagtagagaaactattagaaagacagcaatgcacccttttagagatgcagcttttattgaagacaatggtgtgcctactaactctccaagatacaaatataggataactgatgaattattggaagttgttattagttataatacttctaactggggttctgctttaagttcatttaaggaaaatcatgaaaccctaattgaaatttattcctccaagaaagagatgaggaaaatgcctgtaaagattaatggacaagatttgaccttttcaccaggaaaacacaatatacttcaaatattaatcattaaagagtttgctccaagatttgctcctaattcagaatgtctgtatgttggggatacaactaaaaaagatttgataaagaacactgaaaaattgcaggaattagggtttgagatcagtttgcatgataaaatgcctgatgtcgtattgtattcagaagagaatgattggatttactttgttgaagctgtaacaagtgtaggtcctatgagtcaaaagagagtgaatgagattgaaaagatgactgaagaagttgaatcagggaaaatttttgtgactgcttttttagatatgaaggattttaaaaagttctctgaagagattgcttgggaaactgagatatgggtagctagttttcctgatcatatgattcatatgaatggagataaattcttaggtccaaggtaa

SEQ ID NO: 1165 - DNA, 1473 bp, Methanobrevibacter ruminantium
  source 1..1473: mol_type = genomic DNA
gtgttaaattatgtatcaaacgaaactaattcatttcttaattcaatttctaaagaagaaaggaaaaaaataggccaattctttacagatgttgatgtagcaaagtttatggcccaattatatgttcctactaaaaaacatttagatattttagatcctggagcaggatctggcatactctctgctgccattatctcacaattagaaaatactgatgttgattcaataaatttaactttatatgaaaatgattctcgcatcttgcctttacttcagaataatttaaaattcatctcagaaaacacatcaataaatttaaaatatgaaatcattgaagaaaattatatacttaacaattcattcagcattgaatctcaagagttttgcaaaaaagagtatgattttgttattgccaatccaccttattttaaaatatcaagaaaagcaccagaagctcaattgatggaatcaatatgttatggagcgcccaatatctatttcctattcatggcaatgtctttacatcacttatcaaaagattcagaaatggtattcattgttcctagaagttggacttcaggagcatactttaaaaaatttagagaatatctcttaagtgctggaaaaattaatcaagtccatctttttgtcagtagagataatgttttcaataagcagaatgtattgcaggaaacaataattattcatgtaataaaatctaaaaagcctttggaatctataaagatttcttcatcatccaataatgattttagtgatattgatgaatttgaagtcccttatgatttagcaatttccaatgatgaaaatcattttgtttatctgcctaccaataagggggaggtaaaagttttaaatgatgttcataaatttgatagttcttttttaacagaagaaatcaaattacgtactggactaactgtagattttagaaataagagctatttggaagaaaaaccaaataaagataatgttcctttaatttatcctttccattttaacaaaaatttcattacttttcctgtcgaacatgataaaaaacaatatgttaatatggcaaaaaagggtttaattcaagaaaacaaagattatctgtttcttaaacggtttacttcaaaggaagaaaaaagaagattgcaaccagcaatttatcttaaagaagattttccaaactatgattatatatcaactgaaaataaaattaatttcattgagtccactaatgatgatgatttgtcaaaagagcagatttatggcttatttgttattttcaattcaacaatgtatgataaatattataggattttaaatggaagcacacaagtcaatgctaatgaaatcaattcattgaatattccttctagaactagtttagaaaatttaggaagaattttaattaataaaaatgattattctgtagaatcttgtgatgaaatattggagagtattttatga

SEQ ID NO: 1166 - DNA, 2328 bp, Methanobrevibacter ruminantium
  source 1..2328: mol_type = genomic DNA
gtgatagataggattgatatagggacagttttaggtaatgaattcattgtcattgataaatacggtggagaaggaaaatcaggatttggcactgtctttattgtatatgatgatgatttgaaaaaagctttagcactgaaaacattacaagataaatatcttaatgatgaagaaactataggagattttaagaaagagtctttaatttggacagaactgaaacatccaaatattgttgaagcattgggattagatattattgatggtagattatttattataatggaacctatttttagttttatgggtaaacaatcattagatgattacttttttgaaggtctgtcagattataaaattttagattgggctatccaattttgttatgctatggaatatatggaggaacagggtattaaatatcatggggatataaagccccaaaatattttagtttgggataatgagattaagattactgattttggcttaacaagttttattaatgaatctaaaatttttaaaaataagaatgtaggaaattattatatttcaaatggaaaactttgtggaactaatgcttatatggctccagaatcttttgaggggataaataatatttcaacagatatctatagttttggaatagttctttatcagatgataaataagggtaatttgccttttgaagcagaaaacaattttgataatgaatgggaagaattgcataaaaaagctgaaatcccttattttgatcatatattatatgatgtagttctgaagtgtttatcaaaaaatccaaaagatagatatgattcttttaaagatttaaaaagagaattaatttcaatatttaaagaaacttttgatgaagaaccatatgttccaaaagaaaaagattttgaaaaagattctaattactattattttaaaggaaattctcttgcaaatgttggcgatattgaaaattttatttcaaattatgataaagctatagaacttaatcctaattcctctgatattaggataaattatgcaataaatttgataaaatatgggtactatgatgaagctttaaatcatttaaatctagctaaaaagatatttgatgaaaataataaaaattttgttagtttagatagattatattttaattttggacatgcataccaatcaaaaggttatttaaataaagcaattgaaaattatgaaaatgctattgaaattaatgagaattatttagaatcatatgttaatttaggaaatatttataaagaattagaattatatgaaaaagcattagaaaaatatcaattagctttagatattaatcctaattttttcatggctttgattaatatgggtgaagcttatagttttttaggcaattatgaagattctgagaattgtttttataaagcaaaatatcaaaatatcaatgaggatttatattctttatggggagagagtttaagacgattaaatagggaaccttatgcattaacaaaattttttgaaattctgaaaatcaatgatgagtctatgtatgcttattataatataacaatttcttatttaattttagataatttggatcaagcaaaagaatattttggaaaagctttagatttatttggagataatattacatataaacttgatttatctaaacaattttttaagtatggttttcaagaggaatctttagaaattttagatgaaattatagaaactagtgaggataataataaattttttgctttatttcaaaaatttaatatttttaaagattctgatgtgaagtattcaacttcaattttagatgaaattatttattcttctgcagatgatgaattgaaatctgaggcatattgtgataaagcattatttttaaaggattatgaagattttgatttaattttagaatattttaatgaaggtttgagtttaaatccatataatattagaatttattatttaaaaggctgtttttgtcatgaaaatgaagagtatgaattggccatgcaaacatttgaagaaggcttgtttatagataaatataataaagaacttttgtatgaaaaatcaagattgcatttactttttggggaatgtgaaaaatgtataggctgttgtgaaaaatatttggaaatcggttatccatcggcagaaatttacttatctaaagcattaggatttatggggttagaggattataatgaatctttgaattttttagaattagcgcaatctttagttattgatgaagaaacaaaagagatgattttagttactaaagtaactatagaaaattttttagaaagataa

SEQ ID NO: 1167 - DNA, 1377 bp, Methanobrevibacter ruminantium
  source 1..1377: mol_type = genomic DNA
atgtatcaagttagtgaaaaagaaagttctgtttataaatacaaagctcttggaacttcaaacgatagggaaatcaaatcaaaggatgtcaatgaccattataaagtcacagaatacaatattgatttgatttataatgaaatcaaggaattcattcattactatttattttcaggtgaaatcagcactgatttcactataaaagtccaagatttattcgaaatggatgatgatgacttaagaaccttgaagacagtgcatttcttactgagcgatgaagtccgagacttaattcagattttaccataccttcttagaaatctttcccattctactcaaaaggaaaaagaggaatttaatggaattgttagaggaagaatagattggaatgcaactttaaagacaaggtatgccaaaggattcaatgaccctagcctttttgtttgctctcctccatccaagttctatgatcttgaagaaaatcagctattgaagtttgtattaaggaagataatcagcttgaagaacaattatctcgattttgtggattttataagaaacgatgaagagaatccttttgatatagaaagcttgtctgatgaaagagattggtatgagattgttggaaacaattacaagatggcaaagaaaacattgaaaaaggtctattttgatgacatttcagatgttaggataattaaggcaaagcatattagaaaagcatttaaaaacaggaatgttctttatcatagggtagcaagagcatatatcctttatgaagacctattcattaatgaagatattgaattattgaaggaattggtagagcatagattgattaaagctaccaatccaaataaactgtatgagatttatatattctattcattggttagagcacttcctagtcctgaattaagattattgcatagtggaaatgattattctacctttgatgtgcttgaagacggaaccaaagtgacagttcactatcaataccttccaaagcctcttcaagaggtttcagagtatgcagagattttaagaaattataatattcaatgggcatatagggctccggatattattttagagtttgaaaaagagggcaaaatcacttacaggatagttgaagttaaaaacagtagtagcgctaattatgtaagggatagcgtttataaggtcatgggatattataaagactttgagaggattttgtataatgaggaggctacttttactgaaaactgccctattgttcttgttacttggggtggaataagaataaaggataattatgatccatttaaggatagccttattgttcttaataggaacgagtttttagatagtttggaaaaattgataaatttataa

SEQ ID NO: 1168 - DNA, 2859 bp, Methanobrevibacter ruminantium
  source 1..2859: mol_type = genomic DNA
atgcccaatatagaaaaatatgcttatatattagatgattttaaggaaatcttagatatttatccaatcgagtctaaaaagccatataaaaacaatgaatttgcagctaagatgagaaatgatatagccgatgatttcaacaagtttattcttgatatggtttccaataaggagaaataccattcaaaaatctctcctggaatgatggattggtctaaaaaaccatgggctggattttaccataaggatgttaccaatactttcaaatttggtttttacttgatttacttgtttgagggagacggttccggttttacattgtcccttggccagggtgtcgacgatgctgaaaagaaattggtgaagagatccgaatacctgaattatatgattacagaaaatgaattgaaaatacctgatggttttaagcatgaagccaatgttggggaatcaatcattcgaaaattctataaaaaggaagaattggatctggaagagttttgcaatgatttggagaaaatgataaaaatatacgaatctttaattccccattacaatgaattaagagcaggtgaagagccttccagaaaggatgtgcgtccaaagaattccggaagcaaagtctggagaatttctccaggaggctcagatatttatgatgaagcttgggaagagttcaagcaggaatcatatattggcgtaggcttttatcatggagaaattgattattccacatttaaaaacaaatggtccttggacagatatttagataaggatggtgtcaaagacccttcaaaggctatgctttggaaattcgtcaattgggttgaaaagggagatattatcgtagcgaataagggaaagagcaaattagcaggcattggagtagtcactggcgatttcattcctttgacaaagaataaaaacaggaacaaattcggattggacaatatttaccctgttaaatggatttacacccctgacgatttggaaatttctaaaaacttctttgcaagacataccttggttgaatggcaaggggataaatggaatcagcttttgtgcgttttggcaagaaacgatgaagtccttaaagagagaattttgaagaagatatatgatgaatcatataagcttttgtttgaaagagaagattatcatcatatggaaggctataaaacagaatccaaagagataaatgatgtttggaatgatttattgttaaaatacgaaaatgatgaggatattgttgatgatgtatgggatagacttgtcaatcgcaagatgaaggttcatggagacggaagtaagaatatcaaggcctccattaagggaaaattaaagataagcgatgaagacttaagcaaaactgccattttattatttgaaacattgaaaggattgataggaaatagggatgaagcagatcaaaagagaataatcaaggaattcaatgacagcggatatagcaagggattcaaatcaggcagattcagttcaattctttattatctggacgattattattatgtaatcaatcaaaaaaccattgatactgttaaactcctgtctctaattctaggggatgaaatcctcttgtcaaatgaattggatcgctatataagcaacaatgcaaagtataaagagttcatacataatttaaggaacgcttattattatgataaatatgatgtatttgaatttagggcatttgatgccatttgtcattatctatgctccactccaccaatctactttgctacaaataaagctgaaaaaattccaatagaattctatgtggataccgatgagattttagagggcatagatgaaagcgagtttgatgagatggatttggatgacgaggagattgaggaaatcactgaagtctatattgaagagacaaaatatgaacttttaaacatcaatcctccattattggaatccaagcttcaatcatttgccattgctgaaactacagtaaatcaattgtgcgcatcacttaatgccggcaaaaacataatacttgacggaactccaggaactggtaaaacagaacttgcaatcaagtttgcaactgcagcaagcgacaataacttcattgacggttacattttgactacggcaacttccgattggtccacttttgatacgattggagggctgatgcctaatgaaaagggagaactctttttctatcccggcaaatttctggatgcaattgcagaaaacaaatggctgataattgacgaaatcaacagggccgacatagacaaggcattcggtcaattgtttaccgttctttcaaagcaggatgtggagttgccatacaaggaaaacggcaagccaatcaaaatcaagctatgggatgaaaactattccaagcatgataaagagaaatccacatattacatcggaaacaactggagaataattggaacaatgaatgtggatgataaggacagtctttttgacctttcttatgcattcatgagaagattcatgtttattgaagtggacttgccagaggagacccaatataaacgactcattaaaatgtggtccaatgatctctctgaagaatatactaacaatctcctaagggtttatgacgtaataaaattcagaaaattaggccctgctatattcaaggacatgactgaatacatcaaattcagggatgaaataagcgacgacagcacagatttaattcttgcagaagccatcagttcttatatagttcctcaattcgaaggacttaatagaaataaggttgaacaaatcagaaaacttatgggagacattggtctgtcccaatatttggatgaggaattgaaggaattgattcctaaattttag

SEQ ID NO: 1169 - DNA, 141 bp, Methanobrevibacter ruminantium
  source 1..141: mol_type = genomic DNA
atggaagatgaacttttaaaaaaatactttaatgaacttagaaaggaagcaaacaatgaagactttataaacgaattggaagggtctatagaaaccatttcaagggaagaaattgtggaactgattaaaaaacattattag

SEQ ID NO: 1170 - DNA, 354 bp, Methanobrevibacter ruminantium
  source 1..354: mol_type = genomic DNA
atgggtcaaaaattcaacatcaaagagttagagattagatcattcagaggaatcaaggatttgaaatatgattttgaaggaaagtccttagtgctatgtggccctaacggatgtggaaaaagttcaattacacaggcattcgaatacctcttcacaggccaagtcgcttccctaaagggaattcagggagtaaagcatgacgaatcacttatccataaaggggattcaaaggaagacctattggttaaagccaagataggaggccaatacattgaaagatcattcaatgaagaattcaatccagggcgattgaaggatatctatgaagactcaagaatggctcttttttattga

SEQ ID NO: 1171 - DNA, 1890 bp, Methanobrevibacter ruminantium
  source 1..1890: mol_type = genomic DNA
ttgaataggaaaaagcttttatctttcattgaatcaaagcctagagaaagatacaatcaaatcacaggactcatctcctatgaaaaatatgatgaaatagagacaaagcttcgacaggcatccaaagacattaatgatgaaataaaaattctaaacaaaaggaatgatgaaaaaatcagtgaactgacccaattttatagctgcgaatctgatgacctatatgaaaagattaatgcttctctaaaaaagaataatttaaagcaaattgatgaaaatactaatttaacccaatacattgatgaaaacaagcttagcaaaccacataaactattaaacaaaaacattgaagaactaaatcatgattatttaagactattggataattatgaaaatatcaccttgacagaactgaaaacaaccaattcattagtttcattgcttgaaaaatccagggaataccttttattggaaaatccagataaatgtcccatttgtcaaaaatacattgacagcgaagaaatcataaatgatttaagtccaaaaatcgataaaatcaatgaaaacttgaagttgtttaaagattggaaaaatgactgcaacattataataaagcaattatcagatttagattatgaaataaaggatttcaatggtgaaaatcacaattcattggactatgatttgaacgatttgatagaatcattaaatgacttgtcaaatttcgataaaggactatctgaaatggacagggaaatattgggctctctaaataaagatatcatttccataaaaggtaaaatgcaagcaaatacagatgagataaacaggaatttagaccatctacaaattcttaagaatattagggaaaatgaaaaatatttggaaaagattcaaaagcaatatgatgtttccaaaaaatctcatgaattgtttaaaaagatcaaagaagaagagcttgccaatatcttaaagcaaatagaagaatataccattgaattctacaattatatacactacgatgaagacataaacagccctaaaatgaaaatcaaaggttccaatagcttgactttggccctattctttgaagatgacgagtcagagccaaggtcattttcaagcgaagggcatattgataccttaggattatgtctctttttggcatttgtaaaggaattcaataaatatgatttcatcattttagacgatatcatctctaccgttgacttggaacataaggaacaggtaattaaccttctgtttgaatactttggaaactataaattcattataaccacccataacaagctatggtttgagcaattggcaaggcttgccgattactatcaacaaggcagattccaatttgttgaaattactgactgggacagggaaataggaccgtcactgtcacgtaaaaaagatgaaaaagaaaggattgaacagtacataaatgacaatgacacctttgcagcaggcaatgcaatcagacgccagctggaatatgaattggataaaatctgcaaggtaaatgaaatacctctgcctcttaaaaagcattatactgtaggggactactacactccaacaaagaaatttgctaaggaaatgtttaaggacactgatgttgaagaatattacaaaaatgtattcaaagaactggatttgtctttatacaaagcaaatctcacatcccataacaatgaaatgaactatgacttgaacatcaatgaaattaaaaaattaagggatgccgtttatggtttggaaacagcattcaagtgcaagaatcattctggaaactatgtattgaagtttgatatggacaaatgtctaggactttgcagccataaacggtgcatagacttctttacatttaatagaatttga

SEQ ID NO: 1172 - DNA, 1005 bp, Methanobrevibacter ruminantium
  source 1..1005: mol_type = genomic DNA
atgaaattagttgtagacggatttggcaaatcagttgctaaaagggacaatcaaattgtgattaaggaaaacggaaaagagataaactattatttggcaaaggatataagccaaatactattaactggcaagggatcaattacctttgatgcattgaccctgcttgctgaaaatgatgtggactgcgtatcaatcaattggaaaggccatgtggattacagactctcagctccagataggaaaaacgcaattgtcaaaaaggaacagtactttgcacttacagactcaagaagcggctatttggctaaggcttttgtaagagcaaagattgaaaatcaaaaggcagtgcttggaacccttgcaaaaagcagggaagagaaagattatattattgaacaaagagaaaaggtttcagaacatattggtaaaatagaaaaattatctaatatcaattcagataatattagaaataatatactgggaattgaagggcaagcgtcacatgaatattggtcagcttttgctagtgttcttgatgagaaatgggaattttttggcagaagtggcagaggtgctaaagatccggttaattcattgttaaattatggttatgcagtaatagaaagtgagatttggaagtcaatatatttggcaggccttgatccatattgtggttttctacattcagagcgctatggaagggctagtttggtttatgatcttattgaagaatttagacagcagatagttgataagacagtgctctcaatagttaataggaatcagattacaccagatgactttgaagaagatggcaattatattaagattcatgagagggctagacgacttttgattgcaaaaatattggataaattaaatagcaagataatgtttcatagtaagaatattagttattcagatattattttatatcaaggcaagcttatggctgattatttaacaaatggcgtaccatatgaagggttttctcttagatggtga

SEQ ID NO: 1173 - DNA, 126 bp, Methanobrevibacter ruminantium
  source 1..126: mol_type = genomic DNA
atgatagagagatatataatttctggagatgatgaaatatcctattgcagtcagtgcagaaactatgaaacttgtgatggggatgactgcgatccctactttgatgatgatttatatgatttgtga

SEQ ID NO: 1174 - DNA, 279 bp, Methanobrevibacter ruminantium
  source 1..279: mol_type = genomic DNA
atgttagtttttgtaatgtatgatatagttgatactccaacacgtacaagcttggttaaaaaattaaagcattatggcttgcatagaattcagaaatccatattctgtgggtttttatctattgatgagagattgaatcttgcaagcgagtttgattttttcatgtcttcagagagggatagtataatccttatcccaacatgtgaatcctgtgttgattccatattgattgagggcaatctggacttgcctaagaaatccctttatgagttcttatag

SEQ ID NO: 1175 - DNA, 765 bp, Methanobrevibacter ruminantium
  source 1..765: mol_type = genomic DNA
atgtgggttaaacgaatttattatgtttcattaataagatttaaaattttaaaaaaacgtttgataaaatcacttttatttaggtgcactatgaaaataaatacatgtcatttagttttaaagactaataagaaagtcaagcagaatccttcaaagttcaggggatatataggaagggaatttgacaagtatcctattctccataatcattatggaaataataaattcctatactcttatcctcttgttcagtatcaaatcatagatgggcagccatctattctagggattgaagagggtgcagacatattggttgacatatcctctaaaattaaagcgcttaagatgggagacagctattatagggtggaggatcattacttatattataaggagtatgatgttagggccactaggaaatatcatcaatataagttcttaagcccttggctggcattgaatactaaaaattatcaatcctttaagaatattaaggattggaaagaaaaaaagagctttttgaataatattatggttggaaatattctttccatgtcaaagggattaggtataatagttaacaaaaggctgcatgtcagctctcttttggatgatgagatagccgaatataaaaatgttcagatgaatgctttcacaggagagtttaaggttaacttcaatattcctgacttctttggatttggtaaaggtgtaagccaaggatttggtacggtaattaaggtcacagaccaagaagaagactaa

SEQ ID NO: 1176 - DNA, 1368 bp, Methanobrevibacter ruminantium
  source 1..1368: mol_type = genomic DNA
atgtctaaaaaagagcaaattttaattttaagtttaggaggttctccagaacctctcatttattccattaaagaattcaagccagataaagtagtcttcttatgttctcctcagacacttaaggaatgcgatggcattcttgaagagactgctttcaatgaggaaaatgtggaaatatacgagatacctgatgctgaaagcttggatgattcattttccacttcaaagaaggtcttatccaaatttgcagatgatggctttgaggttcgtgtggatttcactggaggaacaaagcctatggtttcaggtcttgtccttgcagtaatcgaagggaattattctaatttcaaattcagctatgtgggccaaaaggacagccagagcagaaccaaaaatggtgtcggcgtagttaaggatggctctgaaattacaaagatgcagataaatccatataagaaatatgcaataaccgaatttaagagaggaaagaacttctttaacacatatcagtttgaagcggccttggaaaatttccaaagcgccaaatccagattcattaagggaactgagcaaagaaggatatctgaaatctatgaaaggattgtcatactttatcaaaaatgggacctatttgaagataaggtttcaaaaaacacagatttatttaaatatctgggctttataataaatgatattgaaaaggatgaattcatattaaatgaatttgaaaatatagacttctttatccaaatgaagagaaattatgaatttttgagtttcaaaattaggggagtttcatatgatagcgaagacccttccataaagggccatttaaagttcagaatttcctattacctttcagatttattcaataatgcctaccgaagaatcgaagagggcaagtatgatgatgctgttgccagattgtataggatcaatgagctgattgcacaggttcagcttacccaaaagggcctgattgacgatgaccaattgcagactcaaaaggagtttaaggtaaatatctcaagcacaaaatccaaagcacatgcaagggacaactatgatgaaatattagatttcattgattataactccagccttaaggaaaagaacaaaggttattttggcattgcaaatgataagagctatgagcttttagacttgtttggcattaagcaaagccctaagttcgataagttgaattccaaattaaaggaaagaaatggctctattctagctcatggcctaaagccgatgaataagaaaaaggcagaagagttatatgataagacacttgattatgctaaggactatttctcatttttagatgaggatatggatttggctaagtttccaaagttttaa

SEQ ID NO: 1177 - DNA, 1203 bp, Methanobrevibacter ruminantium
  source 1..1203: mol_type = genomic DNA
atgatggttagattgcaattggaaacaatttctccagtttatattggaaacactggaaacgagtattcccgttctgaatttgcttttgctaaatttagcggcaagaagaaattagtcagattaaatttagatttggtggctaaagaactgtatcaaagggatgaaaaactctttaaggaatttctaaaggttctttcagatacaaaatcctttaaaaatattaaaaccaaaaaagataatagtcaatttaataaaaatgagaggattgcaattaaggggatgcaaaaattcttgtatgatacaattaggccttatgataaagatttatttaagaaaattttatcaagttgctcatcttataaagtttctctgcagtatgctccagaatccattaaagagaaaaatggcaaaaaggtttcagttacaagaaaaggggaaagcactgccgatattggtctaattaaggagaatttaaaaacaaataatgagccatatatctcaggttcttcaattaaaggtgcagttagaaatgccttattatattctagattaaatttatctagcaaatctaatcgtgatgtagctagagagattaataataagaataatagggatattaagaatattatgacatatgttcaattttcagacacttttaatacaatcgaagagccaagcctttatggggtcgaatcaattgggacaaaaaggaacactttttcattctttgaaacaattgataggggcaatgtttttgaatttgaatatcgcaatactttcaattctaaggtgcataatcctagaatgttaaataacttcgatttatctgttgaatcaatatttaagcatatttatgaattttctaatgatatattggatgaggaaatacgttttattgaagatacagttaactttgattatgtgtattccgatgttgactctggaaagttatataaatatttcgatgatttgaaggataaaaatactgaagagtctccattgttgagattaggtcaaggcagtggagctttaggtgtcagtcaattattggaagttaaaaattccaggtctccaacggaattcaccacttttagaaaattcaatcgtttaggtcataaaaatcattatgatttccctaaaacaagaaaattgatagtaaatagctttgaacctttaggatgggttaagttaagtaaaatttaa

SEQ ID NO: 1178 - DNA, 996 bp, Methanobrevibacter ruminantium
  source 1..996: mol_type = genomic DNA
atgtatgtttgtgataaaatgaaaatagtttatttaaaacctaaatcaacttttccttttttatcttcagatagcattttcggagcattaacctatgggatggcagaattatttccagaaaaacttgattcatttatagaaagctttaagaataaaaatgacattccatttttaatttcatcagcttttccattcattaaaaatgaaaacaattattttagattctatccaaagccaattacaaaattccaatctaaagacatgaaattatctaaaaaattcaaaaaaattaaatttattgaagaggatattttcttggaattggtttcaggcaatatttcaaatgatgggatctttgataattttaaagatgatttattccttgtgaatgaatttaatgaatctttcttagtaaaaaaagaaaattcagaaattatcgatggaagtttattttcaaaggaaatctctccccacaatgttatagatagggtaaagaataattccataaatatcttttattcagaggattataggttcagagaaaataaaggcttgtttttcttagtggactttaaggactcttcatttgaagaaattttcatttcccttttgagatttttaagagataagggttttggccatgacatttcctctggaaaaggacaatttgattttgaaatagatgattttgataagtttgataatttaaataaaagccaatatttcctatcattgtctcgtttcattccagatgagaaggatatttcttttattgaggaattatctgatgatgatgctctttatgaaattggagataagagatctcgggattcatttggtttgagaaagaaaacaaggttctttaaggaaggttctgttttcccggattacactgtcaaatatgatgttaattgcggttgtttggttgaaacttctgataggtcaattgaatatggatattcctttaatataccatataacgtggaggaattatga

SEQ ID NO: 1179 - DNA, 768 bp, Methanobrevibacter ruminantium
  source 1..768: mol_type = genomic DNA
atggaaaatttagaatttcaaggaaatgttataattaaaggaaaaatcgtttgtgatactggtttgcatattggcgaatccaatgaaactttagaaattggcggaatagacaatatggtcatgagggataagaaatccaatttgccatatatcccaggttcttctttaaaaggtaagctcagacaccaaatggaattgttcaataaggattctgtaagatatattcttgacaatccaaaaggaagaaatagggaatatgctccttgcaactgtggaaaatgttctgtttgcaagatatttggttttaccaatgatgaggatggaacttatgtaggccctactagaataatcgttagggatgcatttccagatgatgaaacaaaggaattttgggaaagttcagaaggcgtatccagaggagcagaattaaagacagaaaatgttattgatagagtaaaatcaactgcaatgcaccctagacctactgaaagaattccaaaggattcaaaatttgattttgaaattgtatttggaatatatcatgatgatgataaggaaaactttaaggaaattttcactgcattgaaattgcttgaaaataattatttaggtggaaatggttctagaggatatggtaaaatccattttgaggatttatcctatttgattagaaacaggtctttctatactgataatgctgaagaaaaggtaattgaacttggcgttttgtctaatttagaagatgaaaatttaaaaatcgaattataa

SEQ ID NO: 1180 - DNA, 432 bp, Methanobrevibacter ruminantium
  source 1..432: mol_type = genomic DNA
atgccaaatgatttgaaagatgttgaaaacaaaattaaaggtttgaaaagcttaaaatattatgaaattgaagagtttgtcaaatttgatggtgatgcagataagattactaaacaattacgaaatgatgacattaagacttcccaattaagaaagttttttgctgcagttaaggaaatcgaaatgtatgtaaaagataaaagagtttgggatgacaaggcaaaagtggatttctacttgctgatgcctaaattagcttatgctaaaggaagaaaagtcattagtgaaagattttttaatttaatgaaaattactatggaaaaagttggttctggaaataaagaagatactttagatgatttcttaagatttgtgcaatttttagaagctattgttgcattctttaaagttaacaatccaggatctttataa

SEQ ID NO: 1181 - DNA, 2658 bp, Methanobrevibacter ruminantium
  source 1..2658: mol_type = genomic DNA
atggatagaaaaaatttagaatttgcttccttacttcatgatattggaaaattttcttaccgtgcggaaaataatttttcatctgaatacaaaaatcttgataaagatgattttggttatcatggtgcacattctaaatggtctgctagctttattaagcattattggaattcagatattactaatttagcattatatcatcataatcctaaatctggtataaatgaagaaataggtttaattattcaaaaagcagaccatcattcttctggtgagcgcatagattctattaaaaatgatccatttaaaactccattgctttctatcttttcagatattttaattaagcctgaaaaaaataagaaatgcgatgagttatatgttccattggaagaatttgatttgaatagaaagtggaaaaattctattccaacttccatcgataatgctaaaaagggtcataattcattgaaaaagtgttattctgctttatgggagaaatttgaaagtgaagtgaagcatttagaaaatacggatgattttaatactattttggctttgttaaaaaaatacacttcttgtatgccctctgcaacatgggggtctaaacctgacatatctttgtatgaccattcaaagacaactgcagccattgcagtgtgcagatatctgtttaatgaagaaacagagttgaaacacacttcatcaactcaagaagtttattcagttatcagcggagatatttcagggattcagaattttatctttaaaatttcttcacctcaaaaggctcaaagtgcaatgagtaaacgtttaaggggaagatcattgtatctgactttattgacagatgcgattgcaaataagatagttcaagatttagacctgactcaagcaaatattttattctgtggcggaggaagattcacaattcttgctccaaatactgaaaaggctaaaaaatctttaaatgaaatacaaaaggaaataaatgcctttttcatagaaaagtttaatgcagaattatatttggctattgcaagtgaagaatgcagtggaaatggacttgaaaacttcagtgatattacatccattttatcatataagattgcacaggataaaaagcataaatttattgacaatctggatgatttatttgattttgaagaagatttggatggaaaatctacttgtgccgtttgcggaaatctcttcaaaccaaaagatgaggaggataagttttgtgatgactgtgaagaacatataaaactgggttcaaaagtaactaatgcaagttatatgattaagtgtttctttaatgaagagtttaaaaatatttatgataaaaataaatttaaaaaagtctctttctatgaaaagcctttaaacatagcttatatttttactagcaataccagtaagaagtctgttgacaagacttttaaagaaataaaagatattctttctgaatatgatgaatttgtcgatagatttgaaataataaagttaaatgacactgatttcttggaaattgaaaataaatttagtttagaggaattagataaaatctcatttagttttagtttcttaggaaatactattccaaaatatcataacagaaatccattatactttgaacatttagcccaaatcagtaaaggggcaaataaattaggtgttctaaagatggatgtagatgatttgggaatgatatttggcgaaggatttaatcatgcctttaaagattcagatgagtctataagcagcatttccagaatttccacactaagctctcaattggatctattcttctcagggtttattaataagattgcatcagaattctgtgtttatgatgatggaatcaaggaatatttcaaaaatgacccttctttctttgaattaaactttaaagaggtagaattgaaacttcaaaatgatgatggctctaaaaatgaagatgaatccatcattgtttataaagaaaagtatggaatggaacttgacgacgaaatcaaggaatccataaaggagtatagtattccaactattcatataaattactctggaggggatgatttattagtgttaggtccatatgatgatatcattgaattttcacaagaattaagaacaagattcaagcaatggacttgcaataatgattccattaatttatccggtggaattaacattgtctcttcaaaattccctataggcaaagctgtgattatggctgaaaattatcttgaggcttcaaaatcctgcggtaaagataagcttacagtatttaatgaagttgttccttgggatgctaaaggctctaaatttaaagatttcaatcaattacatgaatttggcctaaaattagaggaatataattctcaaaataaactatcaaaaagcatagtttattccatgttatatttatggaaagataattttgaagagcattcaggaatatttttcaatgaagaaaaatgggaaaaggagaattttgcgaaatgcaataacaatagatttgttcctaaatttgcttataggttaagaggtatgaatcaaaatagtaaagaatatgatgttgttttaaaagaaggtattaaatatatgccttggattaaaatacctgtttcatgggttagtttaagaatgaggtga

SEQ ID NO: 1182 - DNA, 4698 bp, Methanobrevibacter ruminantium
  source 1..4698: mol_type = genomic DNA
atgtcaattgatttaaataaaaaccaaaaaagggctgcctattacaatggagacaagtacttggtcatagaagcaggtccaggcgctgggaaaacacgtgttttaatagaaagaatcaagtttctcataaatgaagagaaggtagagccttcaagccttttagttattacattcacacgcaaagctgcagaagagcttaaagaacgtttatataaggatattgatgaatctgtagtaagcatgatgcaaatatcaaccatacatgctttttgcagagtgattctctcagagattggggaatacaatactcgtgtcttgggagatagcgttaacgaaaaacagaaaatgtttttaaacaaatataagaaagacttaggctttgttaatgagtgtcacatccgccagaatgaaatatttaacctaatagataaatatggcgaatacgccacctttaaggtagatagtaaaaaattggttgactatatagaaaggaatactaaaattgaccctgaatatatagattttgtaaatgaatatatgaaggagaatgatggaagatatccttttgatgaggtaatggctaatgatgcctataagaaatcccgtacaaatgcattgtatctgcaaatagcaaagtcatatcctaaatatctggagcttttggatgaaaagggattcagcgattttgatcagatgcaaatcaaaaccttaaactatttgaaaaccaatccaaacaccatctacaagaatgttttggttgacgagtttcaggatacagatcctgtccaaatgaagatatttgaaattctaatgaaaaatgcagattcctttactgttgtgggagatatagaccaaagcatatatggattccggggagccaataagaattattttgaatatctatacaataattatgacgatagggtctacaaggtgaacttaaatgtaaactaccgttcagcaaatcaaatcattgacataagcgaggatttcatcaagtctcaaagggctgagggagcaaagcaggacaaggctcttggcgcacgggatttggatagaaacacttattttcttgtaaatgaaaacagcgaaagcgaagcaaaggccatttttgaaatgattcgatatctccatgacagcgggaagattgaaaattataatgagattgctatcttatcccgttccataaggtttagcaacactgcccaagacctaatccaattatttattgataacaacatcccttatcatgtcaggggggttccagatctctttgaccggcctgaaataaggtcagtgatcacattgattcaccatcttatagaggatacaaatccccataaccataaatttgacctgtgggaattggaatggctaaatcttaaggcatatactggagaaagcttcaatcaggttttatttaacctatctgatgaaactaaaaatatcttaaatagtatacaagaagaatttgaagagaatgtcttaaaggaagaaaaaagagcttatttaaaagttacaggcaagaagtctcataaatatgtctttaaaagagtctttgaaagggatgagaaggttttaattgaattatttaaaaacattgaaaggcctatcctaagcaatgagaatctgattagatacggggtaaaaaataagcaggatttggagttctttagaagattgaatgacttgaaagcttacttcaacagtgaagagtatatggactccgaagacactattttggatatctatatgaaattgctgacagatgtctgcaattatttgactgaagatttcattaatgaccctattaatagggatgagcttaaaaatctggcaatcctaagcaacactttccataattatgagttgattgtagacaataagaatttgaagggagcatactatttcttaagatataacatagctggctacagcacagataatgatgaatccgaaggggttcagcttatgacagtccataagtctaaaggattggaatttcctgtagtcattttactgtcattgaatcataagaagttcccaagccaatataaggatgaatatgataggttttacactccaaactcctgtttggaatataagaattacgattccaaggaagaggaaattcaagactatctagaggaagaggatagaatagtctatgtggctatgacaagggctcaggatattttagttctatctaatctaatcaaggaaactcctgaattagaagggttaaaagcagaattgaatgacaatctttctcaaattgaaaagatagaaataatcaaggacattcctaaagggcatattaagattcatgacttgatcaataggaatctctcaagctgcaagtttttggaagatgactttagccagcttccaaagacggtttgtgaaaagcctcaagttaaaaaggaggatttccttaatttaagcttttattcccttgagaattatgttgcctgtcctttcaagtataaactgatgcatgacattaatttcagcgaatccacaatggaattcaataagctaagaggcttgtttgtacataatttgcttgaaacgatcaacaatagaatcaggtccaacggaaacagatatattggagatgatgaggtcttggctatctttgaaaggtttcaagactccttccgctttgaaaacttaagattgtcaaagaaggaatatgatattataaaaaatgatgttctttattattacaatacctttggaaaggatttcaatatattaaacacagagctttcatttagcattaaaaaggaatattatggattgtcaggcattattgacctaatctataagaccaaagatggaaagatgggcattttggattataagaacactgaacgcatatcaaggcattatgttcaaaattatattaagcaggtctatacctatatgattgcattaaaggatagttttgaaatcgatgagcttcggatatatgcaataaaagcaagaaagatgatatctgttgatataaatcagaagtcccttgatattcttttagaagagcttgataatgtttcattgaatattaaaaaagaagtattcgaatgtaattttggagagggctgcttaaaatgcagtttctcaaagatatgcgttaaggcaaataatgatgacgtttctgtttttgactttaataatgaggacactttatcttttagaaataagttctatcagaacttgccagattatgaaataattgatttaaaagacagatattggaaagatattgattttgattcagatgatgaaactaagtttgatgttgatattagtgcagatgatttagcttcaatctctgctaaagagggtgtttctgtatctgctaatgaaggtattcctatatctgcaagagagggtgtttctgtatctgctaatgaaggtattcctatatctgctaaagagggtgtttctgtatctgataaggataatgatttgtctgtatctgctaatcaaattaaaaatttaaataattcatctgatgataaacatcttggtgcggatttcaaatctaaaaaagattcatttaaatcagaaatgaaatctcctagttctaaaaaagattcatctaaatccaaaaagaaatcttataaatctaaggaatcctctaaatcttcaaaagaaccatttattagttcttattcaaaatatttggatttaaagtccattcctaaaaaatataagaatttccttaaaaatgattattccaaggacattgatctttttgaatatgatgatgatttgtctcttgaagagaacattttaagaaaatatatcctaaagaaaaaaggattgaaattgcttaaaaaagaactatatgatgaatctgaagattattataaaaaattaatacacaattcctattttaaagaagattactatccatataagcaattaatgaaagtctatcataagactaaaaaatatgataaagaagctgatattataagagatttcttcaaatcaagcgtttatgccaataaatatcaattcttatatttcaaatataagaataggaaattgcctaaaagagctagaataaagcataatgaactaaaagatttaattaaaaattatgtaaatctattaaaagattctgatttatctaataattctattcctaatgctgatagattgaaaaaagataagaacagactaaaaatcctatcagatgaagaggaattctataatcataaaaggtcctattataccaatattgccgatggattatatgaagaaaagctcaatcaggaagcttttgacttatatgctatggcaatttataagtacaaagaaaagagtttcagatattatcaaagattggctagtatttataggcgcactaataattataaacatgagttgctggttattatggaatattttaataaaagcaataagatccatagaacaaaaagcagcgacaaatggtttaagcaacgtttatattccactaaacaactaattggggatgagaatgcaattaggcagattgaaaatattgtttgcaaaaaaggatacaatctaaaagcagattatgctttaaattatttaaatcatgatttggatgaatattactgtttgaaaaatttagataaggaattaaattatattatttcaagcaatgaggacatttttacacttcataaaaagaaataa

SEQ ID NO: 1183 - DNA, 1197 bp, Methanobrevibacter ruminantium
  source 1..1197: mol_type = genomic DNA
atgaatgaaaccacttcaaatgaactaatacatgcacgcagactttatatgaaaaagaatatgaaagaagcagaaactaattttttaaaagttttcaatacaaatagagagctctttaatgatttggatgaaatttattttatccgtgcaatacaagaatcccatattgataactgccaatctataggtgatttaaggcactatgctgattttgtagtagaaaactttaatcaagaggattgctccaatagaaattttgaagatccatatgctgattttattttaaatcttagcactgttctaatcaaggaagaatactatttggatgcaattaaatacctgataagattagatgagtctttcctatctgatgtttcaagacataattccaatggctattatagattctcccatcatgagaaatatctttcaaatatggttaaggcattgattggcataggaaaatatgatgctgctttgcaatattccattagattaatcaatgaccttccagacactgccagtgaagctaagtattggattaaatggagcatagctaaaatatataatctgactggagattatgaactttcaattgaatatatcaatgaattattgcttaaaaggagtgaaaactatttctataaacttttagcagataactatctaaaattagatgattatgataatgcattagtcagtggggtccattatattattttaaaaaaggatatcaaatcctgtgtaaattattacacagaactcggatatatcttaagccaattgggtcttactgaggaatccaataaacattattatctcagctacgctatcaaaaaatcctatggcaatttcattccagattatttggaagagaaaatcagagatttaggctttgatttggaaaataccaattataataagatagctaatgagcttaaacctttctggagagaatgtttatacagaaataaaaagcagtttacaggaaccataagtgccataaaacaagaaaggggatttggttttattaagccagatgatggaggaaaaaaccaattcttcctattcaaggactttaaggatgatcatgattatatttggaataatatgagggtttcatattatcttggggatagcattgattattctaaaaataaggagtccactagggcagttaatgttgaattaatttag

SEQ ID NO: 1184 - DNA, 1695 bp, Methanobrevibacter ruminantium
  source 1..1695: mol_type = genomic DNA
atgtctagtcaacttgaggaattaaaaaaagaattccaaatagccgaatacaatctcgactttgatagactccacaccctatgtgacaagatacttgaacatgatcctaatctaatcgaatacaagcaatacattgcaattagctacttcctctctgaggactatgaaaactgcataaaggaatacagcatctaccttgaccgccgtgagaaggatgctgatgacgcgtacatacttgccatgagccatcttcatctcaacaacgaatctgaggccatgtcgattatcgaaggctttgatgagatagactctcttgagctaaagctcaaggcatatcatgatataaaacactactacaaggccatcaaggccggtaacgagcttcttgatattgacagctccaatgatgaagccttgcaaaccatgtcggaaatatatgacgagcttaacaataccgagatgtcgcttttctatgaatgggagctatgcaagctgaagcctgcatttaagggcttccatctcatgaggctctatgagcttggaaggtatgaagaggtcatagagatatttgaaaggaatcctgatgactttaaatgcgaccttctccactacccattcaacttcttgataggatcttcatattgtgaaatcggcaagcatatggatgcattgaagtatctatacaggtccaaccagctccatgagtgccgtgatacaggacttcagatagcccgtaactattatatactgaaggattatgagatggcatataagattctaaagggggttgctgttaaggagggtctattggactatgatgattctctctcggacgatgagctattgaatgataattctcttctcctattggatgaagatggtttagaagatgattctttactcctatccgataatgagactttaaatgatgattctttacttttatccgaggataagactttaaataatgattccttattcttaagagaagataagacattagaacaaataatggataagtactgcaagggggcacctgaagagaaagctgatgaaaagacttgcaatgaagaagaaaaagaaacagaagtcctaagcgatatacagattcttgaccagatgctgcttgagcttgatattgatgaaagccattatacccaagtggaagaagagccaagctatttcaaggaaactgatgaggattcaatcgacggcgacgaggatattgacatagtggatgcaaacatactgagaatgatgtctgaggtctgtctctaccttaaaagatatgatgagtgcatcatgatagcaaacagactcttaagcgtctcagaccgatatgacgagattgtgaatgtgataagcgcatactaccttgagatggaagacgagtggaaggctgatgaatggtaccttctccttcctatagagcttgcattcaataagccatttgtctataccattgcccgcaacctctctctcatcggtgagagcgaccgtgccctgaaaatctatagcaccatagagaagctgattgacgaaagcccatatctcctatatgaaagggccggcctctataagaggataggggagaaggagcttgccatgaaggaccttgataagtataatgaaattgccctgaaatatctatatgagaatggggaaccggaagttaagtatgaggatctggaatag

SEQ ID NO: 1185 - DNA, 135 bp, Methanobrevibacter ruminantium
  source 1..135: mol_type = genomic DNA
atgaaagttgaaataatgattatagggatcttgctgctttcaaacttcctatatcatcatgaggatggaaatcctattgtgcagtatgtagcatatattgcctcattgcttgtcataattttagggttcttttaa

SEQ ID NO: 1186 - DNA, 1290 bp, Methanobrevibacter ruminantium
  source 1..1290: mol_type = genomic DNA
atgaaaagaaaagaagtagtactattcatgaccgttggaaccgggatcaatccagactccaacgaggcgggatacaagaagctggccaagaagctctactcaaccttaaacaagatatatccaaactatgtaatcttctttgcatctaacgtatccaagcacacaataaaatacatagacgcgctatttgagcttgacggcgacgagttcaatgagggggaggattatgagatagttgaacttaacaacattgacgacttcaactactgctttgagtcctttgaagcaaagatatgggaatacgactatctcaatgagaaaaaataccagataatcatggactatacctcagggacaaagaccatgtcagctgcaatggcatgctgcggaatgctctacagccgtgaccttatctctgtcggaggggaccgctccaagggagaggtatcagcaggaacagagataataaactaccagaacctctataagatatatgacaagagggccataatgaggataaggtacaacttcaacacaaacagattccagccatgccttgacgtattgaactatatagttgacatgaacatccacaaggactccctagtggacctctgtaagggatactttgcatgggacaccatggacttctcccatgcatatgagcatctaaagagcatagaccttaactatatggagtttgcagagataaaaaacgagcttaagaagaaccttaatgccttgggaataatagtaaactcaaagtcccagaaccttaagaactgctatatacttgcatgcatcataaacaatgcaataaggagagctgaggaatataagtttgacgacgcaattgcaaggctatacaggtcatttgagctcattgcacagataaggcttgagaaatacaatctcatgagttctgatattgatatagatcttctcaaggaaaagggattaaggcaagagtttatagatgagcttgagaatatgagggaagacggtaagattaggataggacttataaaggactatcatcttttaaatgagctggatgatgagctaggcaagtactttatggagaatgagtctaagataaaggaccttacattcaagaggaacaattccattttggcccacggattggactcacagtccaaggaagactttgacaagtttttagagcttgtgataggattggccaaaaagcttgataaggacatgaacaagttcctggaagagaccaggtttgcaaagttcgacttaaagttggatattaataatgcctga

SEQ ID NO: 1187 - DNA, 339 bp, Methanobrevibacter ruminantium
  source 1..339: mol_type = genomic DNA
atgtataaaataattaatgaagacggcagtttagttagaggatatccttcagatgcattatatgatcttttaactgataaagaaaaggaacatatccaattattcaaaaatgaaattgaaaagataacagaaaaagaagggcttggaaaaataactgtttcagtaagttatgatgaacctataattgaaaaagcattccaaatacaagataaaaatggatatagctttgatgagtttcaagagatattggataaaattagattgcatatggcagatttctgtaagaataacaaagagttatgcgaatttaaaaaattctcttatattatttctgcttaa

SEQ ID NO: 1188 - DNA, 270 bp, Methanobrevibacter ruminantium
  source 1..270: mol_type = genomic DNA
atgatggttagtgataaggatttagcaaaaaataataatgtaaagggctctagaatcaatgtgacacctcttatggcagcatatttcttaggatatatgctttctgaaaagggtgagaagatctctgatgagaaaatcgaagatctttataagggggcatgcttcagcatgggaatcgatcctgttgaagacatctctgaattatttaatgaattgttcagcccaaaaaagaaaacaaaagaagatttagaaaatagtttttattgctaa

SEQ ID NO: 1189 - DNA, 1407 bp, Methanobrevibacter ruminantium
  source 1..1407: mol_type = genomic DNA
atgatccatttaggtgcaatcatgtcaaatatcgttgatagaataggtatggaaaaatcagtcatactccttgctgcagttgtatcctttgtcactgcattccttgcaaacatctctgtagctttgcccttaatagcaagggagcttgcaatgagcaatatcattcaaaattgggtagccacaatctaccttcttccaattgccatgctttccatccctttaggaaagcttacaagcaagcatggcctaaacaagtcattgcttgcaggaataatccttacaataataggagtaatcatagcctgcttttcaatcaacagtgaacttctacttctatcaagggtaatccaaggaatcggaaccgctttaatcaatgtcgcttcaatggcattaatcgtttcagcagttaacccagaaacccggggacaggcattgggactgaacattgctggagtctatataggactctcatcagcccctgtaatcggaggccttgtcatctaccaccttggctggcagagcatattctatataatgctaatcccactaatattctcagcctacctgtcatggtcactcaaggatgaatggacaatgtatgacggtccaatagacataactggatctatcatattttcaataggtattcttctagtaatctatggattcaccatagtaaacacatggcttggcatagttctattgataattggtttactattattaattgcctttgcttattttgaacttagggtcaataatcctgtctttgatgtgagactctttaagaattctaggttctcctcttcaaatattgcatccttgattagttatactgcaacttttgtaatcacatacatcttaacttatcattttcagtatattatgggctttgactctaaattttcaggcatgttattaatagtaacacctgtcatgatggcaattctagcacccctatcaggcaggctatcagataggatagatcctcaaaagcttgcagcaataggcatgggttttgtaacagtggcactaacaatcctatgcttcctaaacgaatcaaccccattatatatgattctactcgcaatgtttctccagggaataggatatggattgttctcttcacctaatacaaatgcgatcatgagctctgttccaaaggaagagacttcttccgcttcagcatcccttgcagcagttagggtgattggacagacactaagccttggaatgcttactgtgatatttgcatacatcatgggaaatgtggcaattgtgcctgaatattatccattgcttatggaaagctctagattgtcttgcattatctctgcagtattgtgtgtgattgctgttgttgcatcattagttggactgcgctctgatgatgagtatgagacttaa

SEQ ID NO: 1190 - DNA, 1785 bp, Methanobrevibacter ruminantium
  source 1..1785: mol_type = genomic DNA
atgaattcaaaacaaaaaacattaataatcctaagtctaagcctaatattgctagcatccatagccgcagtatctgcagttgattacaccctaacaaatgcagatatggactatgtggttaagtctaacggattattgcatgtccatgaggcaatcacatatgactttgacagcagccccaatggtgtctatagagacataccccttaaaagcggccagtccatagagaatctggaggtttatgttgacggggcctatgcagagtaccagatcattccaaaaggaagcggtgagaggataaaggtatatctctatacagactcctcaaaaagccataagctatcttcagactctgtaataaccgtccattatgtctatgacatgccaaaggttgtaaagatctataacgatattggagagctccagtataaggtatggggtgatgaatgggacgaagaccttgaaaaccttcaatccacaatcacattcccagatgatgaggagcttcagttctggatcaacccatacttcagcaatgctaaggccagatgggcagaggaccacctgaagatacactcagactttgtaggagacggcaaatatgttgaggcaagggcattgattccgttaagcgaattcgattccaatgcagaatatgcacagcatataaacaagaacggaaaggatgagataatcaagatacaggacgatgacaagaaatctcaagagggcttcaaatccttattctcaatattaaataaggtattggtagtgctatgctttattccaggactcatctaccttaagttcggaagggagccaaagacaacatatgatgcaatatatgagcatgagcctcctacagatgaccctccagcctatgtgaatggtatgataggctcagggctaaaggatgtaggcagtctaaatcaggaagctttccaagctacaataatggaccttatcaacagaggcaagatgggtgtatcctcagaggaagacactgaatttacaaagacaaccttccttaccataaaggacacatcaggcctcaagagatttgaagctgatgtcattaacatcctaaagagatatgagctaaacggaaatataagcctaagctatatgcaggactgccttaggggagaatctgaagccagatacttccaaggcaggtttgaaagctggaaggaaaactttgaaaatgaatacttctcagaggacagcttcagccgcctctttgacaagaaaggaaacgactatcttaattacttcgcattccttctcataattcttggaataatcgctttcgtagcatcaatattcttcgactttgcagtcaccggctcaacaatattcgtaggagtccttttagtcattgtaggtgtcgtttgccttatgcttccatctggaattgcaggaaaatacacagacgaaggaaagctctatgaggaaaaatggatgaagtttaagaaataccttcaggattattcattgataaaggagcatccgccagagtccattgtaatttggaacaagtatcttgtctatgctacagcattaggtgtggcagatgaggtatataaggccatgaagatggaagtctatagcggaagcgatgattattacagaacaaatgatctctacatgttctattacttaggaggtcataggtttatcaatgattcattcaacacagcatcctctaccatatctgctgcagacaacagctctgtaggaggaataggaggaggctccggtggtggaggtggaggtgccttctag

SEQ ID NO: 1191 - DNA, 750 bp, Methanobrevibacter ruminantium
  source 1..750: mol_type = genomic DNA
atgaactcaaaacaaaaagccctaatggtccttgccttaagcataatcctactcagttcaattgcagcagcatctgcagaggattattctttaaccaatgccaaaatagatatggtaatccaggatgacggattagtctttgtggatgaggcaatcacctaccatttttataagaccatgaatggcgtctataggtacattccaatcaataactttaacatggaagattttgctgtagacgttgatggcgcatattatgaactggagggtaatgatgacgactctcaaatagaggctaaggtctatctctataaggataaggataaaaccgaaaagatcgaccctggtacagatgttacagtccattataagtactacatgagcgatctccttgatgtaaagggagacaatgcagtattgaactattatctattgggagaagattgggaggttgacttagaggagattgaagcaaacgtccatttccctgaaaagaaggagcttgattacgagcttgttccaagcggcagtgctgaaggcaagtggtctggagacacattgaccattactggagagaatattaatgctggagatggtcttgcattaatcgttgaaatcccattagatgagttcgcttcaggcttttcaaatgctgtccacaatgacactgatgatgatgatgacatagataatgatatcgataatgataaggatgatttaaaggacttgacaaaggctaagcagatttaa

SEQ ID NO: 1192 - DNA, 561 bp, Methanobrevibacter ruminantium
  source 1..561: mol_type = genomic DNA
atgagtacttttattttagtcataataatacttggtattattttaataatcgcaggaataatcgtagctctctataatggccttgtgactgcaagaaacaaggtaaagaatgcatgggctcaaattgatgtccaattaaacagaagagcagatttaattcctaacttagtagaaactgtaaaaggctatgccggtcatgaaaaatctgtatttgaagatgtcactgctgcaagggcaggattgatgaatgcaaacggagttaaggaaatcggtgaagctaacaaccaattaacaaacaccttaaagaccttatttgcagttgctgaaaactatcctgagcttaaagccaatgaaaacttcaaggaattgcaagctcaattagctgaaagcgaagacaagattgcatattcaagacagttctataatgacactgtattgatgtacaataacaaatgccaaaccttcccaagcaatttgattgcaggcctcttcggattcaaggaagctgacttctttgaagctgcaggtgaagctagatctgtacctaaagtcgaattctaa

SEQ ID NO: 1193 - DNA, 1791 bp, Methanobrevibacter ruminantium
  source 1..1791: mol_type = genomic DNA
atgaacaataagcaaaaaacattagcaatcctcattctactcgctattgttttaacaagcatttcagcagcatctgcagtggattataaaatcacaaatgcagatgtccacttggatgtggaagacaatgggatattgcatgtcagcgaaaacataacatatcttttcaaaagcgacggacatggtgtctatagggtcatacccctaaaggcagatgagaagatgagctatctgacagtggatgttgacggctcatactttgaatataatatcattaaccgttcaggggaaaaggaagtaagggtatacttatataaggataaggatttaactgattacggagtaagcgaaggctctacagtcactctaaagcttgactattatatggaaaatgttgtaaagctattcagagatacaggactcctagaatacaagctctggggtgaggaatgggaccaaggagttgagcatctaaacgcaaaggtcacattcccaaatgatgaggagattgaatattggattaatgacgattccggaaagacagaatcaagcttctcaggagacacactatatgtaaagggctcagacattcctaagggagattatgtggaagcaagagttctcattccattaggtgaatttgattttgatgcagattatgctctacattacaatcatgatgcctctgatgaggtcaaaaagcagcaagaggattttcaaaaaaagcagcaatactttaacaccattggcaatctattaaacgttatatatggcattcttatcctcacgcctttaggcatatatctcaaatacggcagggagccaaaggtgtcaagtgatgccatatatgagcatgagcctccaacagatgactctccagcctttgtaaatgcaatgatgagtggattgagtaaggatgttggaaaggttgataagaaaggtttccaagccacaataatggatctcattaacagagacaagcttggaatggaaatagcatatacaaataagaaaagacctgtgtcccttcttactgtaaagtcaaccgatggccttaaggactttgaaatggaattgatagacatccttagaaggtatgagcagaacggaaagatcaatttcctttatatgcagcagcagctctccaataggaatgaggcatatcacttcaacagggcattcaacagatgggtcagtaactttaaggttgactacttgccggatgatgttttaagcagatacttcaatacaaagggaagcgatttgataggcaaattcaaatggattgcattagttgcaggatttacaggaatcattggacttcttttaaccggcagctggatacctctggtattgggactaatattgatttttgtaggggtaatctgtttctatctcccttcaagcattggtggacaatacactaaagagggaagggagtatcagcaaaagtggaaaagatttgaaaagtatctaaaggacttttccctaatcaaggagcaccctccggaatctgttgcaatatggaatgagtatcttgtatatgctacagccttaggggtagcggataaggtctataagtccatgaagatggaagtctatgatggattggcagatggcagcaatttcagttcaaatgatctctttgtattctatcatattggtggaatcaggagtcttgacaattcatttgttaccgtcaataatattatctcagcagacagctctagctccggtggaatcggaggaatcggaggcggatctggaggagggggcggaggagccttttaa

SEQ ID NO: 1194 - DNA, 1755 bp, Methanobrevibacter ruminantium
  source 1..1755: mol_type = genomic DNA
atgaatcttaaacaaaaagcaattatcatgctcatactctcaatacttctaatgtctgccatttcagcaagcgactataaaggaagctatatggattatgtgcatatgaacgtaaacgaaaacggtttggttcacgtcaacgaaagctttacatatcaaatggtatctccagagtctgaaataagccttcccctctatcatggcaccaatgcaagcattgaaaatatccatattagggtcaacgatctcttggttgcctatgacctcaagaaaggggacactctagatgagctagtcatacatcctaagtcttcagattatgattatgactctgaaagcacaggcacatatcttcttgatgtggaagtcgaatatgatattgaaaatgccgtaaaggtctataatgacgtaggggcattcacttaccaaatcaataaaacagattttaatggggtttctttaggaatggcccatataagaatcaagttcccaggcactcaggagcatgaatacttcataattcctaaagagggcgaaagcagtgcccaatgggatgaggaccattttcatatgaccaatagccagcctgcgaaagcaactgtcataattccattagatgaattggacgctgatgcaaaatatgctcagcatattgattctgacggattggaagcgattaaaaacgactcattcgatttgaagtattccctaattcagatagtcaacatactgataaaaatctttgtaatcatcgcattcatccttccggttgcaatatacctgaaatacggaagggagccaaaagtgacccttgacagcatctatgagcatgagcctccaacagatgatcctccattctttgtaaatgcaataatgggcggaacctttagggacgtcgggctagtggatacaaaggcattccaggcaacaatcatggacctgataaataggggaaagctatctgttgaaactgaaatcaatgaaaagaacaagcaaaggacatatcttgtggcaaaatcaacagatggcctggcagattatgaatcagacctaatcagcatcctcagaaggtatgaagaagatggcagaatagacttaaaacatatggaactctcattatacagcaagtcagaggcaagatatttcagaggcagattcaacagctggggacaccttctttatagcaattaccttacagatgacatcaaggcagaatactttgaagataagggaagcaaattatttaagtttttcgcatatggcggattgattctaagcgttattcttttcttatattgcttgatgttcaatcaaatggaacctttaccttgggtaattgctctatttatactctcatctgtcctcatatgcataccttcagcatttgcaggacattacacaaagaagggaaagatattcaaggaaagatggaacaacttcaagaaataccttaaggacttttcaatgatggaggaataccctccggaatccgttgcagtctggaacaagtatcttgtctatgctacagcattaggggtggcggataaggtctcaaacaccatgaagataaacttctatgacggattgaatgacgaaacatatagggacaatgatgtatttgtcttctgcgatggcaacggacttgacttgattggggattctttcagtgcagttagcacaacccttgactctgatagcggaggctctgacggagtaggcggaggctctggaggtgggggtggaggtgctttctaa

SEQ ID NO: 1195 - DNA, 489 bp, Methanobrevibacter ruminantium
  source 1..489: mol_type = genomic DNA
atgaaactcaaatattttgccgtatgtctttttgtcttgatattggctgcaggcatttcagctgcttatgcaactgatgtggattttgaaggcggccacagcttcaccatgccagacggctatgagattgttgaaggacaaaacactaccgaagacattatcatggaaaagaatggggacaataggattgttttccaatactggatagatgaatatgaggaccttaaaaacattgaagaaaactataattttggagacatcattaaagcagtaatggaagatgcagtaataggaaatgaagaaaactacacctttgaagactatgatgtaactcaaattgactataaagtacaaggcattcaatgttactcctatatccttgataatggtaaggaaggttatgtcattcaccatatagctaaagaagacttaaaagacttaaatgacccagataacgtcattggagatcttgttaaaagtattaaatag

SEQ ID NO: 1196 - DNA, 507 bp, Methanobrevibacter ruminantium
  source 1..507: mol_type = genomic DNA
atggataataaaaaaatatttgttattgtagctttggctcttttagctatcgttgcagtaggatctgttagcgctcttgatttaggtttccttggaggaaatgacgatcaagacactgctgctgaagatagcgatgccaagacaactactattaaaggaattgaatttaacattccagacggatatgttaaagcagaaaattacaccttagatggtgaaacaagatcaagcggaagtatagactataaggtatatcaagaaggttatgaaaaaggcgctaccgatgcaatccttttcttaattggagattatccaactgacttaactgacgatatgcttgaacaaatgaatttaggtgaaccaaagaccattaacggtcatgacggttacataaccacttccaacgaaggcggagacacattcactgtattcttctatgcagaagatggtgacttagtcactgttactgtaacagacgacacccttcttgaagaaattattaaatag

SEQ ID NO: 1197 - DNA, 465 bp, Methanobrevibacter ruminantium
  source 1..465: mol_type = genomic DNA
atgaacaataaaaaaatatttgccattgcagctttagccattatagctatcgtagcagtaggatcagtcagtgcttttgatttaaatttctttggaggagatgacaagcaaaccactactcttggaggaattgaattcaatatcccagagggatatgaaatagtagataactacactatagtaaatgaaactctacatgatggtgatgatgaatacattgtaaacagccagtattatgaaaacgatgatggggattcactagagctctatacttcagattatcaggatgatatggaagactatattttaaaaatactgactaaaggggatgaaaaaaccattaacggtcgaaaaggttatataaattctgaagacggatttacaatgttcagttttgtggatgatggtaatttaggttttgttactgtttcagatgaaagcatacttgaggaggtagttaaataa

SEQ ID NO: 1198 - DNA, 468 bp, Methanobrevibacter ruminantium
  source 1..468: mol_type = genomic DNA
atgaatgctaaaaaactaactattctagcagccttagctattctcgctatcgttgcagtaggctcagtaagtgcttttgacttaaatttccttggaggagacgacagctcaaccactactgtaggaggaattgaattcaatatcccagagggatatgagataaatgatacatacactatagaaaatcaaactagaaccagcagcggaggcaatgaatacattgtaaatcaggaaggctatggaaactccgacggtgaggaactattgttcttagttggacattatgatactgatatcaccaatgaaatgctttccgcaatgaaagttggtgatgaaaaaaccattaacggccaagaaggttttataacttccgatgatgtatacactgtattctcttttgctaaagatggtgaattggttacagtaaccgtttcagatgaaagtgcccttgaaagcataatcaaatag

SEQ ID NO: 1199 - DNA, 1257 bp, Methanobrevibacter ruminantium
  source 1..1257: mol_type = genomic DNA
atgaatataacagaaaatcagtctgataatgatgaaaaaatattaacaaagtcattttgtcttatttttggagctttgctctttacagcccttgtaatgtatgcattgatgtccactgtaacagagtatgccagctctatgggttccactgcaactattgcaggtcttgtatctggaatatatgtattcggtgggctttgttcaagaatatattcagcaaatgcattggaaaagaaggattggaagaccttagccctaatattcctttcaattcactttttagcatgcatattgtacttctttgtcgacaatgtcgaattgcttattttagtcagattcatccatggccttggatttggagcttcagcaaatgcaatagtgactattgcaagttcaattcttcctaaaaaacgctttggagaggctttcggatactttatgcttggaaccactatcgctgtaggattaggtccatatatcagcggattcttctatgatatctggggctctttcggcagctttcttctagctactgtattctcattcatagcattggtctgtgtctttttccttgatatagaaaggtatcatccagatgaaaagataaataatgaagatattttatctgatgctgaatcagtaggcacagaatctatagatgcaaacccaatcaaaaaacaaaaggaaaaaagaagcttcattgaaaagatatttgaaatagatgctatccccgtctccctatttacagcattgactgcacttggatatgtgtccatactctcattctataggctttatgcagtggaactggacctggttggcccattctcaattttctttttaatctattcagtcatcctagttgcatcaaggccaattgcaggtaagattcaggataaaaatggggataagatcatctgtgtaataggcatagttgcacagtcaataggactcttccttatagcttatgctccatctgacataacaatttatatctgtgctgtatgtgcggctttaggttttggaaccttgaattcagcatgcacaacaatcgttacaaggaattgctcaatcgaccgccgtccttatgctatttccactttcttcatattctgtgacagcactataggattcggtcctgctttgcttggatgctttgtaagtgctacaagtggatatgctcctatttattatatctctgcattcattactctaatggcacttccaatctgtttatattccttaagaaataaataa

SEQ ID NO: 1200 - DNA, 1470 bp, Methanobrevibacter ruminantium
  source 1..1470: mol_type = genomic DNA
atgggagagaaagcacaatgggatagttccctttcatttatatttgctatgattggagcagctgtagggcttggaaacatatggcgtttcagctatgtactatactctaacggaggaggatcattcttcattccttattttgtagcaatagcaatcatgggaattccttttttaatacttgaatatggtgttggattcagctttaaggattcgttcacgaatatcttaaagaaaatagatggaaggcttgaaatagtagcctggatactgattctttttgtatttatagttgtaatttattatatggtcatactgagttgggatatggtatatctgctgaccagctttacatttggctggggagtggacactgcagcttactttacaaatacagttggaggcagtgcagatttggcaaaggggggaatctttttaattcctacaaccatatgcgtagtccttatgtggattgtattatggtttatatcccatagggatgttgacaagggaataggaaaggtttcaaaagtattgatcccatccctttttgtcatcatgggaataatcgtattctattcaatcacattgccaggacatatgataggaattgatgcattgcttcgtcctaactggagaatgcttcttgatgtcaatatctggcttgcagcatttgcacagatcatcttctcattaagcatggggcaggcaatcgcccttacatatgcaagctatcttccagagtcctcaaggctcactgacaatgtattgatagttgtcgcctcaaattcattgtttgaaatattcacagcatttggagtcttttccatattgggatacatgtcattgaattctggaatggccttaaacaaattggttacagaaggaacagggcttgtatttattgttttcccaatgatattcaatgtcatgggtacggtaggaagagtattggcacctctcttgtttttagcaattctatttgctggaatcacttccgctttaggcttcttcgagcctatgctaagctcagcaagttccaagtttaatctaagccgtaagaggacagccactatcctttcaattataggatgcgcattctcaatacttcttacaactggaataagcagttatcttgttggagtaatcgattcatttgtaaatcaattcggaatcctcctgcttataggagttcagtgcataatatttgcttgggtttatggaatagatcatttcattccagttttaaatgaaaacggcatattaaaggtaggaaaaatttggaagtttataatcaaatacctattgccggttgtgctattcgttatctgggcatatggaatatttactttattcacaactgcaaagacatttgagataatggttgatataattataatcgttgcagttcttattctaagctttatattgtctcacttgaatccaagaggaagcaatgaagacaatgcttaa

SEQ ID NO: 1201 - DNA, 213 bp, Methanobrevibacter ruminantium
  source 1..213: mol_type = genomic DNA
atgacttataactgttgtttaaagacttcaagggaatatactgaagaaggattattgaatctcattgctgagacatttgatacagacgtttcaggtttgaaggttgaaaacatcgactcctatgaagatgatagaggtgagaacttcataattacctgttccaaggaagagggaaatatgaagacaataaaagtgtttcatgcttatggctag

SEQ ID NO: 1202 - DNA, 210 bp, Methanobrevibacter ruminantium
  source 1..210: mol_type = genomic DNA
atgaaagatatggaatatccgaatgaagaagctaaagaaaagtttgaagagataatgttaagaagattaaggctattatatggcatagatgtgtctgaaatggaaatcattaatatttctttaggagagtctagtgtagagcctaccattagaattgtattaattgattccactgaggaagattgtattagagtatttgaaattgcttaa

SEQ ID NO: 1203 - DNA, 1473 bp, Methanobrevibacter ruminantium
  source 1..1473: mol_type = genomic DNA
atgaagcaacattctgtaggtagagttgaaactaagacatttgccatcaatgataaattaaaattaagttcaggaaagactctagaaaatgtggaacttgcttatgaaacctacggggaattaaatactgcaaagaccaacgccattcttgtatgtcacgcactcactggggacgcccatgctgcaggctggcataagaacgctacaaagcctggctggtgggagatagtgataggccctggaaaggcattggatactgacaagtattttgtaatctgctccaatgttttaggtggatgtaagggttctaccggtcctgcatcaatcaatccaaaaaccaatgaggaatatgcgcttgactttccaatcattacaatagaggatatggttcatgctcaaaagaagctgattgaacatttgggaatagaaaagctccatgctgtagttggaggttcaatgggtggaatgcaagccttgcaatggacagtctcatatcctaatatgatgaaaaaggcaagcataatcgccacaacagctaggtcttcccctcagcagattgcctttaatgaggtaggaaggcagtccatcatttcagatccgttctggaacaatggacagtactatggaaagaacagaactcctcgttctggtttggctgtagcccgtatgattggccacatcacatatcttagtgatgaatcaatgtatatcaagtttggaagggaattgcaggataaggatcagctaagctatgactttacccttgatttccaggtggaaagctatcttcaccaccaaggggaaagttttgtaaagcgttttgacgctaattcatatttatacattacaaaggcggttgattactttgatctgtctgttgatggctcattgcctgacggattgaagaatgtaaaggccaagttccagattatagctgtagattctgattggctatatcctgtagaccagtctaaggacttgcttacagcccttcagacccttggggttgaagtgagctataatgaagtaaaatcagattacggacatgacgcattccttttggaaaacggtcagatgaacttccttttaaacaatttcctctctgagaatgtggttgacgaccttatgaaaactgatgttccaaccattgacatcaattccacaataaaggatgctgctaacataatgtttgacaatcaggtcactcaccttcctgtagtggatgagaatgataagctgcttggaatagtcactgcatgggacttatccaagtccattgcaaaggactgcaagcttttagaggatgttatgactaaggatgtcagatattgtaagtctactgactctattgaatacatttcaagacagatgaagaagtttgacatttcctgcttgcctgtggtcaatgatgacctatgccttgagggaattattacaactgatcagattagtcatttgatttcatcttattag

SEQ ID NO: 1204 - DNA, 768 bp, Methanobrevibacter ruminantium
  source 1..768: mol_type = genomic DNA
atgaaagaaaataaagaaatgaactggaaaattaaatttgcaattatcatgtttgttttggcagttcttattttccttgctcgataccttatctgcggagatggggaagagatcatcgcttatctttggaagcatatcggatttattccaatagatatcctcattgtagcattggttcttgaagagatcatgggaagaaaagagcatgaagccattttagagaagatagacatgcttatgggtacattcttctctgagattggaaatgatttaattgcagaattaagcaaggccaatgtaaataaggctaacactgatgatttaaaggctattaaatcatggaacgataaagattatgataataaactaaaagaattgaaaaacaatcctgtagactttaaggccaatatcgctccagaggaaagggaagatttcttaaacagaatccagagcttattggttgaaaacagagaatttttagtaaatcttatcaataaccctaacttgcttgagaaagatgaattctcatcacttctgcttgcattattgcacttggatgaagagcttgcaagaagaggtgaattaactgacataaaggatgctgatttcaatcacttgaatggtgatatgaaaagggtttattccaaattggtttatgaatgggtttattatttaaaataccttaataagcattatccttatatgatatctcttgctatacgtaccaatccgtttgatagcgaagcagatgttcatgtgactgaataa

SEQ ID NO: 1205 - DNA, 201 bp, Methanobrevibacter ruminantium
  source 1..201: mol_type = genomic DNA
atgacacatttgactattacagaataccgagaaatggtaaaggatataattgaatttaaaaatgaaaatggtaagatgcctgattttgcaagcgtaaacaatcaggaaatctctcatgagaattattccgccatgataaacgatgttaataactatattctacagcatggcagaagccctgaatttgttcaaattaaatga

SEQ ID NO: 1206 - DNA, 1494 bp, Methanobrevibacter ruminantium
  source 1..1494: mol_type = genomic DNA
ttgagtttttcagacaaaatttataatgcaaaacctggttatacttatgatgattttttattggttccaaatgcttcctggattgaagcgaaggatgtagacactaaaataaaccttacaaaggatatcaaacttaacattcctattatgagtgctgcaatggataccgtaactgaagctgatttggctatcgcacttgctcaagagggtggaatcggtgtaattcaccgtaacatcaatcaagaggctcaagtcgctgaagtcagaaaggtaaaaagcgctgaagacatcactgtacgtgatgttgtaaccatcagtcctgactcctctatcgaaacagtccaagacattatggaaaacgaatcagtcagcggtcttcctgtaatggaaggggacaggattgtaggaatcatctccaaaagggatgtaaggccattcctaaaaaacgattccaaaagattggttaaggaaatcatgacttccgatgttgtcacaatcaaggaaaacatctctcaagaggaagctttagatatcgcctatgaaaataaggttgaaagattgcctgtcgttaatgaggatggcgctttagtaggtattctaaccattaaagacatattaaatcaagatcagcatcctaacgctgcagtagataagaacggaaaataccttgttgcagctgcctgcggtccatttgaccttgacagggctatggcattggatgaggcaggagcagacatcatttcaatcgactgtgctcacgcacataacatgaatgtggtcaagtttgctgaaaccattaaggacaatatcgatgcagacttatgtatgggtaacattgcaactaaagaggctgctgaagacttgattgcacatggtgcagacggccttaaggtaggtatcggtccaggttcaatctgtaccacccgtattgtagctggaatcggcgttccgcagctcactgcaattgcagatgttgcagatgttgcaggagaagcaggcattccagtcattgcagacggaggtctcagatactccggtgacattgcaaaggctatcggtgcaggtgcagatgttgtaatgctcggtaacttgcttgcaggtactttagaggctccaggtgatgtagtaaccatgaatggaagaaagttcaaacaataccgtggaatgggttccatgggagcgatgactggaggttccggaggtggagctgacagatacttccaagaattggaaaaaggatctcacatgaaacattccaagctagtccctgaaggtgttgaaggtgtagttccatataagggaactgtagctgaagttgtcttccaattggttggaggattaaagtcttccatgggctactgtggagctaaggacattcaaaccatgaaagaagttgctagattcgttagaattaccacaagcggtattaaggaatctcacccacatgacttcttaatcactaatgaaagtcctaattatccaactttagactaa

SEQ ID NO: 1207 - DNA, 720 bp, Methanobrevibacter ruminantium
  source 1..720: mol_type = genomic DNA
ttgcttttattaattagtcctataaatcatgaagaagctgttgaatctattgaaggtggagcagacattgttgatgttaaaaatcctaaagaaggttccttaggagctaatttcccttgggtaattaaggatatcagagagcttaccccaaaggatatgcttgtaagcgcaactttaggagatgttccatacaagcctggaaccgtttctcttgctgcaatgggagctttagtctctggtgcagattatattaaagtcggattatatggtccaagcaactatgaagaaggcgtagaagtaatgaaaggtgtagttaaggctgtaaaagacactaatcctgatgctacagttgttgcttccggctatgcagatgctcatagagttggagctgtaagtccttgggacattcctaaggtggcaaaggattcaggagcagacattgccatgttagatacagctgtcaaggatggacatactttatttgattatctagacattgacgattgtagaaaattcacagaagaagctcatagctatggattgaaagttgccttagcaggatctgttaaaaaagaccaattaaagccattatatgatgttggctgtgatgtagttggtgttagaggggctgcttgtgttggcggagacagaaacactggccatattgatagaactgctgtagctgaattaaaagagcttgtacaatcatttgaagaatag

SEQ ID NO: 1208 - DNA, 7251 bp, Methanobrevibacter ruminantium
  source 1..7251: mol_type = genomic DNA
gtgaaattaaaattaatatatttaatttgtatgatttgctgtgttttattaacattttcaactgttagtgcaattgatatggatggaaatctaactgcttcagttaatcatttagatggctcccattcagatcagtctgcatttatttcacagtctgaatcttcgaaaacaaatttaaatgcaaataataatttaagagtttctagtggagattatgattgtgtagaaactatgaatgaattgtctaatttagattcaaaggattctaaagataataacttatccaaggataaaacatctttaaaatctgatctaaattctattgattcagatgagtattctcttaaatctagtcttagttctattaattctagtaagaaatcttcttatgaagatggagataatgaatatgagaacttggaggattctttagattcaaagaataaaaattctttaagttccaatgctctaggagcaggcacaagtacatttggcgatttgcaaaccatgataaacaatgcccaagagggttcaacaatcaatcttgatggaaagacatttatcggaaacggctcatttataaccataaagaaggccatcaccataaacggtggctctgctacaaacttggcacgattcgatgcaagaaacttatcatatatatttaagataagcgcatccaacgtccatataaagaactgttatttctcatacagtaccaactgttccgtatatttctttggaaatggatcctcaatagataattgccatttcgactacaattataagcacctgtgggttgctgtaaacatcaagtacttctcacttacaaactgcaatttcacaaatggaaagacagatatgggaagtaccgcatatgtggtagcagacaatgccactgtgaaaaactgcaatttcatcaacaatgaagcaagcggaaccgaacaatgttacggtgctgcattgcagataggggcttcatcctcaggcataaatgaaggatatgtggtaaattgcaccttcataaacaatagggttatcaccacccatagctattcccatgcaggagcgctatgcttccgtccgggaatcaaggtctataattccactttcatcaacaattactgcaataggatgggaggtgccacaacccttcacagcgatggggagataatgaactgcacattcatcaacaacagcgcaggggaatatggcggagcaatctcaacagggcttatggctgataatatcagcgtaaacattacaggatgtacttttataaataactatgcccctatgggcggagcgattctgataaaaggaaataatgtaaaggtaactaattctacatttaaagaaaacaaggcaagagaaaatgacggtggagcagtttacattctaggtaacgatgctttgatattgaattccacattccagagcaattatgcaaagaatgtgggagcagggattctaatcaacggttcatatgtgactgtcttgaattccagcttcgcaagaaacaatgcaagctatggtgctggaatctatgttataggttcaaatgcaaatcttttcagctcaaacttcactaaccacaatgtcaagaacggctctgtctatataaagggtataggcgcttatgtttataactgtaattttgcaagcaacactggagaaaacggagctgcattatatattgaaggctcaaacacaacattgattttaagcaatttcacaaataacaatgttacaaaggacggaggggcaatctatgttgtaggctcaaatgccaagctaatggcttcaaatttcctatacaacaatgcgattccaagcgaatcagacattaaaagcggccttggaggcgctgtatacattaagggaaacagcaatacaatcgattcctcaagcttcaagtacaatacagcacgtaacggatctgcaatatataccgacggaaaaaacatgaacctttcaaatgacaattttgacaggaatcaggcatggtcatatgtattggattctgtgataaaaccaagcagcagttattttaacagaagcgatattttaattaatttaactttgataggtggcaataatattgctaatgcaatttataatactgcttcagtgaatgatatttacttttataatgtaagctatatatcctcaaagggtaaaaaagtaactacttcaaatgaaatacatccggtaaatggtgcatcaaacagccaaaacggtgcattgctataccaggatgaccgtgaagacaatcaattggtaaatgttattgtgtataaggatcctaatagcaaatctacttccttatctgcaataaacaaaaacgacataatcctaaacaagacattcacaacaggaattcttggaaacgtgtccttgaatctcagctcatctgtgggcaaggcaatagctccaggaaactatcttctatatgcaaagcacactgaagatgactattacaaggaaatagatgaggacaatcagtttgagattctccctcttgtggatgtggctgtagacattgtctccagcaaggatatagtggaatataacagaacaaacaagttcacagtcaaggttataaacaatggtccaaacaatgctacagacgttcaggtaagtgctgtgcttcctaaaggactgatactcgtttcttcaagtccatctgttggcacttacaattctagcactggaatctggaccattggcaacttaaatagcggagttaaccagaccttagccataaacacaagggctaacactacaggtgcagtaaattatccggttagcgtatcctcctatgaaaaggacacaaacgaagctaacaataaggataaccaatcaataaagatacctgaatgtgacttgctcattgacattgcctcatctaatcacagccctaaatatagcgatattgtaaactggacagtcaccgttaaaaacaacggtccggatgatgcaagcaaagttgtagtttccttaggcaatctctctggaaacgaattgatatatcaaaagtccacaaatgccaatttcaatataagcactcagacattggagctttccaaattggctagtggatcaaacgtaagctttgtaataactaccaaggtaaacgcttccaataagaagattacagtaaattcctcagtaagctcagatacatttgaatataacctaaacaacaatcaggacaacgattatgtcaatgtggccccattatgtgatgttggaataactgtaaaggtctctaacaggactgcaaacagaaatgaccttgtcaaatggacaataacagttaaaaactacggtcctgataaggcaagcaatgtaaatgttgcactcagtgacctagcaagcttaggattaggccttgttaacaagtcagacgccaattacgcttcaaacgaatggaatgtaggggaccttaacaaggatgcctctaaggaattggtgattagcactaaggtaaacactgaaaataagaacattgtccttaagggaactgtaaatacaagcacttatgagacaaataaggctaataatcttgcaaatgacacattatctgtcaatccttattgtgatgtcttgattgaagtgactgcatcagataacagtgctaacaagaatgatgtcattacttggactgtcaatgttaaaaacaacggcccaaatcaggctaaggatgttaaggtctcattgaccaatatggaaaaattaggcttaatagtccaaaacaggtcattcacctttaaggatattgccgtattggagaattccacattcaacttcaacaagtcaagcaatatatggtccatcggaagcatggcctccggagacatctcaagcatgactgtaaagaccaaggtcaactgttcagataaggtcttatcagttgagggaaatgtatcaacaagcacttatgagcttaataaagccaataaccatgatgatgacctcttgactgtagaggaattatgtgatttggctgttgaagtgaacgcttcaaagaagactgcaaataagggcgatattgtaaactggacaataaaaataaaaaacaatggtccggacaccgcttctgatgtcttcttgacagtatctgatttggaatctttaggaatggtctttgtaaattcatcaagcaaagattttgacagcgaatcattcgcttgggagattggagagcttgcaagcggaaagggactgactctcatattggccactcaagtggacacctctgatgagaccataatggttgaagctgatgtggatacaagcacatatgaattgaacaaggcaaacaatgctgataatgattcattaaatgtcaatccatgctgtgatattgtcatagacatatcagtctctgattctcctgtaaacaaggaagatattgtcaattggactattgtggtaactaatgatggtcctgacgatgcaaaggctgttgtggtcaatctaactgacttggaacctttagccctaatcataatgaatgtttccgagagttcttatgataatggccaatggacaataggcgatttgcctgatggagaaagtcaaagccttattattacaacaaaggcaaactgttccaatgacactataaaacttgatggaattgtcgatacaagcacctttgagctagataagagcaataaccataatgatgatattttagagattgatcctttatgtgacttatcaattgaaatatcagtatctgattctcctgtaaacaatggggacattgtaaattggactattgtagttgccaatgacggcccagatggtgccagcgatgtgattgtcagtttatctgatttggaatcattgaacttggaaatattaaacgtttcagaggataatttcaatcctgaaacttatgaatggataataggtgatttagataataatgaaaatgctagcttaataatttccgcaaaagtaaatacttcagacgatatattggatgttgagtctacagttgacagcaagacttttgaattgaataaggataataactatgacaatgaaagccttattgtaaatcctttatgcgatcttatcatagatatatctgtgtccgattctccagttaatacagaagatcttgtcgattggacaataacagtaactaatgacggtccagatatggctgaaaacgttaaagtctatttgaatgacttagatgctttaaacttaattttagttaatgcttccgaggattcatttgatggggacgcctatcaatggatcattggcaatctggacaatggcgatgctgttgaattgctcattacaacaagggttaacgcttccaataagacaatagaagttgaatcagctgttttaagcgacacctttgaattgaataaggaaaataactatgataatgatacagtcacagtaaatcctttatgcgatttgattgtagttgttgatgtgtcaaattcaacaataaataaggatgaggtagtcaattggacaataactgtcactaatgatggccctgacactgcagagaatgtaatcttagacttaagcgaccttgaggatttaggattgatagtcttgaatgtatctgatgattcctataatccagaatccggtaaatggattataggggatttggctccaggagagactgttgatttaatagtcacaactcaagcaaatgtgtccaatgcatctttgcctgtagaggccatagtacaaggcgatacttatgagcttaataaggacaacaaccatgacgataagctattggatgtcaatcctttatgcgatttggtaattgagataactgtatccaacagctctgtaaacaagggaggcactgttgaatggaccatagttgtttataatgacggtccagatgatgcatctgatgttatagtcactttagatgacttgaagaccttaggactaatcctttccaatgtgacttatggaacaacaagcatggacatctcatatgacggttctagattgtttgttaaggacatttcttcagaagattctgaaaattctgattccatagatgaaagtgatagttcatcccctaatatgcttaaagcaagctctaaattagatggtgttggttctgatttagataatggggaattaaaatcactcaaatctggctcttatttaagtgatgattcatctaatgattcagataaagcttcaaacacattcgatgaagaaactaacttatggtacattggagatttagccaaaggaaacagtatttctttgaaattattgacagaggttaataggtcaaatgataatataactcttccttcaaatgtggatacaagcacttatgaagtcgttaaatccaataactttgacagcgctattgtagaagttcttccattagctgataatggagataatgaatctgtaaatagttctgattctaatggtgataatcctttagatggtgatggaaacagtacatctgatggttctaatcctgatggtgataattcttcagatggtgatggaaacagtacatctgatggttctgatcctaatggtggaaatggtgatgaacctttagatggtgatggaaacaatagttctaatggttctggtaatcctgatggttctgattctaatggtgataatcctttagatggtgatggaaacagtacatctgacggttccgataattccgatggtgataataagtctggtgataattccggaaatcctgatggttctgattctaatggtgataatcctttagatggtgatggaaacagtacatctgacggttctggtaatcctgatggttctggttcttctgatggtgataattctggcaattctgatgctggtgaaaagtctgatgatggttccagtgatactgatggctctggaaataccgatggcaatggctctttggatgaagatggcgataatgactcaggcagcggttctggtaattatggcagtgacctttatgatatgtacccttgggatgattatatggataataaaaccaatgacggatccaataaaaacaaccagggggataataattcccatgcaggcaaaaaggtcaaaaatccaactaaaaagaaccttagcaatcacgtccaagctaaacaacaaaaaggagttccaatgaaaaatactggacatccattggcattattggttttaaccatttttgctttgtttacattaagctatagaaaatttaaattttag

SEQ ID NO: 1209 - DNA, 1230 bp, Methanobrevibacter ruminantium
  source 1..1230: mol_type = genomic DNA
atgaaagaagaagaaatagaatcaatgagaaaaatattctcccagcttaaagacaaaatcgaacctctttcacagtctcctgcaatacaagctcttcaaaagagggtcatggaaattagaaaagaagccataaaaaacaacagtcagcttttagaaacagttcaaaatagctttaaggaaaacgacatcgactgctttttagcaagcaatgatatagaggctcaaaaaatcattttagacctaatcaatgaagagatagaatctaaccccaatatagacagcaatgatgtatacatatgcaaatccaaatccaacacccttagggagataggatttctggaacttatggaagaaaacaactacaatgtcattgaaacagatttgggagaccgcatacttcaattgaaaaaggaagataacgatccggtccatcccacaggacctgcatcacaccttacagtatcagacattgcagatatcgtcaaccaatcaatggacttgaatctaaatcctgttccaaaggaaataatggaagccgttaggtctgatgtattgaatctcatgcataagtcttatattggcataagcggctcaaactcaatagctgcagaggacggtgcaattctgatggttcacaatgaaggaaacatcagctttgtccaatcaaagaagctccatataattgtagctggaatagataagctggtcccacatcttgaggattcagtttcaattgcaaagctggagactgcatatgccacaggaaagcctttaacctcttatatgaatatagtttcaggcccttcaaagacagcagacattgaaaagaagcttttaaagaatatgtatggtgctgaaagggttgctgttatccttcttgacaatggaaggtcaaaggcaattgatgaatgcctatggtgcattggctgcggcaattgcattgtaagctgtccggtatacaatataattggaaacaaatttggctattccagttatttgggaggaagaggaattgccttaagccgatatcttaaggataatgaggtaagcgttgattctggattgtatatgtgcaccttatgtggaatgtgcactgaaaactgtccggttctcactccaacttatgaaatcattgaaaacttacgttgcgatagccaaaaagaaggcctctttcgcaatcagcacaaatctattagggacaatattaaaaataagggttctccttattaa

SEQ ID NO: 1210 - DNA, 759 bp, Methanobrevibacter ruminantium
  source 1..759: mol_type = genomic DNA
atgttattatattttagaggatgtactgcacgagagaagttagattcaataagtgaagccactcaaagcttattaaaactctttaacattgaatatgaaatcttagacaacgaacagtgctgtgggtctgttttgcttagaactggctttaaggaagatggaatcgaacagatgaataaaacctactcagacattaaaggaaagaccattttaacttcctgtgcaggatgctataaaactcttaaggaagattataagacttatctggatgcagatttagaagtaattcatatttcccaacttttaaatgaattgattaatgaaaatagcatcaataagttagataaagacttattaatcacttatcatgatccttgtcacttaggaagacatgcgggggaatatgaagctccacgttcagttattaagactttttccaatctgactgaaatgaagaatattaaagaaaagtcaagatgctgtggctctggaggtggagttaagtctgcttatggcgatttgtctaattccatagccaaattaagaattgcagaagcaaatgaaactggtgcagacttattggtttcagcatgtccattctgcaaattaaatctaagtcaaaactctgatgatttggaagttttagacctgtctgaatttgttttaaaaatgcttaaagaaagtgatttggacttatccaatttaaaaatgcttgaagaagataatttggagttatctaaaaataagaagatggaataa

SEQ ID NO: 1211 - DNA, 318 bp, Methanobrevibacter ruminantium
  source 1..318: mol_type = genomic DNA
atgattattgccataatcttcatgtataatagggtccgcaataagagatcaactcctgcaacctttgcattatgggtggttgtttggatggtggtcttattctttgctttcgcccctaaaataagtgatcccctagcaggattcttcggattcagcagaggactggatctattgattatagcaggatttgcagtaatcgcatatgctggatttagattttatattaaaatcgacaatctaaatcagaatatgactgatttggttagggaaattgctataagaaatgaaatacaattggatgaagaaaatgatgaatag

SEQ ID NO: 1212 - DNA, 708 bp, Methanobrevibacter ruminantium
  source 1..708: mol_type = genomic DNA
atgtcaaatgaaatttcacaaaacacagaaggaatatttttagtggttcctgcatataatgaggagcgaaccgtatcccaaatcatagaatgcattgcagagaggggatacaatgtagttctagtcaatgacggctctgcagacagtaccctcgaattggcaacagaatccaaaagaaagtatcctgataagatatttgttgtctcccatgtaatcaacagaggcttgggagctgccttaaagactggaatgatggttgcacttaataagggagccaaatacataataacctttgatgcagacggccagcatgaaatcagcgatattccaaatgtctgcaagcctttgcaggatggagaggctgatgcagtaatcggttcaaggccttttgaggacatgcccttgtctaaaagctttgcaaaccttgttatgaatgcccttacattcatattctatggaaggaatgttaaggattcccaatcaggattgagagcctttacagctgaagctgcagagaagatcgatgtggtttcaacaggatatggagtctcatctgaattcattaaggaaatcagtgataagaatctcagattggctgaagtaacaatcacaacaatttacactccagagactcaacataaaggtacagatgcaattgttggcttaaagatattaggtaaaatggtgattgacttatttagaatctag

SEQ ID NO: 1213 - DNA, 459 bp, Methanobrevibacter ruminantium
  source 1..459: mol_type = genomic DNA
atgagaataggaattgcagatactacttttgctcgttatgatatgggtgctgcagcaatagatgagttaaagaagaacgcttcagaccttaagattattcgcaggactgttcctggggtaaaggaccttccagtagctagcaaaaagcttattgaagaggaaggctgtgagatagtcatggctttaggaatgccagggcctatggaaaaggataagatgtgtgctcatgaggcttctacaggacttatacgtgctcagcttatgacaaacacccatatattagaagtatttgttcatgaggatgaggaggaagatcctaaggaacttaagaaattggcagataacagggcacgtgaacatgcacaaaaccttattaagatgatgttccatcctagacttatggaaaaggaagcaggaaagggaatgagagaaggaaaagaggatgttggtccattatag

SEQ ID NO: 1214 - DNA, 1191 bp, Methanobrevibacter ruminantium
  source 1..1191: mol_type = genomic DNA
atgcctaaagaagagattgataaaatcaaaaggaatctgagcggaaatcctgatttggatagggattatctggtttcccaactggaatattacaagggccatgaatattcctatgagataatcaaagagatctcccatttgattttacagtccttggatttttaccttattgaagatataggctctaaaaagactatggcaagccgcattcttgatgaagtgatgcaatatattgaaactcgtgataagaggactgccaaggaaaagcttgataaatatatggagtcatttgtagacaaatacgaaaacaaagaggaccataaggaaagtgatttcaattcaaaccggtccattcgtgaaattcaatatataagatatagggaaaacaaattggcagacagtcccaaatcctttagggtaagtcctaaaaaggataggcaagtgaattggagaaaggatgtcaagataaagaaaatggaaagcaattcaattgaagaaatccatgaaaaggaatatcatagcttcttaaatcctcttgaggagatattgttctatcattacattggactaaagaaggaattggcatatataccattcaacgagcctctatttgacttgtactatctttatggaaccttgctttttgaatctgatgaatatggaaagtcagaggaatatctcttgaaggcattgagaatcaatcccgtatcctcaaagacaatcctagccctagcagacatctataagtcaaagacaagaacatataataggtttttcctatataatgtggatgcattgaagtttgcatacagaaatgaggatatagcaagagcctatagaaactttggcttcttttatgttgaggaaaatcaattggatgttgcagctgcattctatgacttcagcttaaactatgactataataagcatgtagttaaagagcttgaatatctaaagtcaaggggagtggacacccaaatagaaacagaggaagcggtaggaatcattgaatcaaagaacattcaagttggagtcaatgactttgttttagatgccttgaagtttatatgctttgatttggatagtagaaagcacactagccaagccttatacttctataggattttatatgacttgactaaggacaatcaagtcttaggaagaataaatgctctttcgaataagatttag

SEQ ID NO: 1215 - DNA, 762 bp, Methanobrevibacter ruminantium
  source 1..762: mol_type = genomic DNA
gtggaaaagggagagatggtctctcttttaggaagaaacggcgcagggaaatcaactttatttttgcatttcaacggcattcaccagccaaagtcaggtgaaatctatatagatggagaaaaattatcctatggcaaggaagagcttatgctcgctcgtcagaaggttggaatcgttttccaaaaccctgacaatcaattgttcgcccctactgtagaggaggatgttgccttcggccctatgaatctaggccttcctattgaagaggttgaaaagagggttaaggattcccttgaaaaggttggaatgggaggatttgagaagaaatctccacaccatctaagcggaggacagaagaaaagaatagccattgcaggaattttggctatggaacctgagataatgattctggatgagcctacttcaggtcttgacccaaagggagcttcccatattcttaaattgctatactcattgaatgaagaggggatgaccattgtcatttcaacccacgatgtaggtcttgtaccggtatattcatctaagatatttctaatcagcgatggggagattataaagtcaggcactcctaaagaggtattttcagatgttgaaacaatcagaaaagctgatttaagacttccaagggtaactcaccttgctgagatattggaaaagaacaatgatatagatttcggcggagagtatcctttgacaatcggcgaggcccgtcagaaaatcctagatctgcttggaaaataa

SEQ ID NO: 1216 - DNA, 1104 bp, Methanobrevibacter ruminantium
  source 1..1104: mol_type = genomic DNA
atgacaaatgatgataagacccaagaattcaaactcatttcaaaaacaattgatggcgatgagatatttctcaatcatgattcaattgtagtgaaatttgcaggcaaaaggaatgccatagtcacttcttggttaaatggaggttatagcgaagatctctctgctgtattcaatcatcagctgtcacaggagaacattgacgaatatggtgatggtggcatattgggctttttggagatgctatcctacgatttctataataaacttgacttgaagggcaataagttaagcggtttggtcacttcagctcaaatagatgagtattcaattgctgtagagagatataaggacattgaggttctagccattacaacagctggagttcgcgttaatgcggtctcagcaggggatgtcgcttcctattatgaattgaacggagaatatgattttgatttggaaaatgaagatccaaatcctaataagcctggaacaatcaataacatcatcctaatcaattgcaggcttgatgaaagctcccttcttttagctgaaatgatagctgtagaggctaaggcagtggctctaagggaccttatgacttcaagcaattattctagcgagatagcaaccggaacaggcacagacggcatagcaatatgctcaaatctccaaagcgataactttattgagaatgtgagcaagcatgcaaagattggtgaattgattgcaaatgcagtcatccgctcaataaaggaggctttggctaatctgcaatggctcactccatcatatcagctgaatgcacttgtaaggctagacagatttaagatgaatctggatgagttctatgacaaaagcttgaatctggatgagatggagaaaaaggaatttataatgtccttaattaaggtctcaaaaaacccagagcttgttggatatgtttcattaatcattcatatcatagatcagtataggattggattattggataaaaagcctgccttaaaggttttaaattctattttgaatagcaatttcaaccgaaaggaatggaattccatgaaactgcttttggaatacgtcattgaaaagcagatagaataa

SEQ ID NO: 1217 - DNA, 702 bp, Methanobrevibacter ruminantium
  source 1..702: mol_type = genomic DNA
atgatagaggaattagtaactaacatgtctataacggaaagcggagcttcagccagctctccaatatttacaataacaattctagtctttacaatcttgctccttataggcataatatattttgtctttaagatgtatgaacagtcaaagcctacagttgaatcaatcgttctaattgccgttttaacagctattgcaactgtgggacgtcttattctaatgtcaatacctgctgtaaacctggcatcatttgtaataataatggtgggggttgtctttggcaaggaggaaggtttccttgtaggtgcccttacagcatttgtttcaggcatattcatgggaatgggatattgggtcattttccagatgcttgcttggggacttatgggagcaagtgcaggatacttggcttcaaggtttgacagcttgccattcagattcatattcggactcctatggggattcctttacggctggataactgatatttcagctatcttctattcaggaaccgcattgcagattactccaatcattgcattgtacattaacggtttcacctatgacttgactcacggagtaactaatgcagtgcttttagtcgtattgtatgactggtttaagaagatgtttacaagagctaagattaaatatctgtctaatccaagctcaagtgatgaaagcattgacttaactaattaa

SEQ ID NO: 1218 - DNA, 1938 bp, Methanobrevibacter ruminantium
  source 1..1938: mol_type = genomic DNA
atggcgttaatcgaatttaagaatttcagcttttcatatctaaattcagacggaacagaatccctagaaaagtccttagacaatatcagcctaaatattaactttggcgattttgttcttctatgcggaccttcaggatgcggaaagactactcttctaaccaatcttaaaaaggagctgatgccaaacggaagacgtgaaggaagcataaaatacaatggaactgaaatcgcccagcttgatgatttcacttcagcatgcgatataggatatcttttccagaacccagacagccagatagtgacagacactgtaattcaggagattgcattccctcttgaaaacatagggcttccgacagaggagattcgaaacagaataagcgagattgttgccttctttggaataaatgacattctccataagaatgtaaacgagctctctggaggacagaagcagcttatcaacctatgttcccttcttgtcttaaggccaaaggttcttcttcttgacgagcctatgtctcagcttgacccgatcgcttcatatgagttcctttcaataataagaagactcaatgaggagttttcaataacagtcataatgagcgagcataaggcagacagcatatttccattcatagacaatgcagtcttcctaaaggatggaaagatagagttcaatgacaatgcccatgacatctgtgaggaagtaattaatgatgatatatttgaaaactaccttcctgcagtaacaaagatctataatggccttagccaaaactaccttgaaaatgaggaatatataagcgaatatgaagagttcactaaattgaatactcctttaagcattcgtgagggtagacgttatcttaatataattagtgatgagttaattaaaataaatgaagatgtacaaaaaaataataattttgaaaatgattatgcatatgattcattagaaaaagataattctaatcaaaattccacttcaagcaaaaaagaacatgattattatcaaaagtccagtttgaccacaaaaaaatacaattccaataagttaggccttagggataggcttccattctctaatgataagaacacattaattagaatgaatggaatatactttgcatatgagaagaataatcttatactaaagaatgtggactttaaattgaacaagggagatttccttagccttgtaggtggaaatggagtaggaaaatcaaccttccttcagatattggtaggaatattaaagccgataaagggcaaggtaaggtatagtaagaatctgaagatagcatatgttcatcagaatcctatgattcacttctccaaggacacagttaaggaagagttccttgaatcaatattaagctcaaatgcattcagcgcaagcgaattcaatatggaaacctatgatggtcttttaaagctgaatggaaatgagtttttagagtcagacctattgaacaatctaaagtttaaaaatatagactatagatttaaagagcttattggattctttgacattgaaaatctcttggataagcatccttatgactgcagtggaggagagcaggaaaagatagtaatcgtcaaggcattgattcaaaatacagacgttctggtattggatgagcctacaaaaggtttggatcctatatcaagcaaaaacttggcatatatacttaattcattggtggacaatggattgacaattgtaatgacaagccatgacttggatttcgttgcaaacaattgcaagagatgtctgatgctatttgataaggacattcaaatagatgacgaccctaaggtgatatttgcagagaataacttctatactacctttgtaaataggatggtcaaggattatattccgcaagctgttacattggatgatgtaaaggagatttgggatttaaagtga

SEQ ID NO: 1219 - DNA, 1005 bp, Methanobrevibacter ruminantium
  source 1..1005: mol_type = genomic DNA
atggttctcttggctttcatttttagcgatccttattttgtattgagttttttagctttgattcttattcttatcgctcttcagggagtctccagcgagctaaagaacataatgaaatttttcatacccttaagcgtactgattataattctaaatcccctcctgaatcggacaggggcacataggatatatcttttcaacggattcttcatcacctatgaggcaattgcatatgggatattgatgtcattggcacttctcattgtaattctggttttctcatcatataataggtcagtttcctatcaggagatgctttatatcttttctaaaaagcttccaatcatctcaatgataattgtaatggcattaaggttcattccactaatcaattcaagggccattgaggttcaaaagctgaataatctgaaggccaatggggtagaatcagatgaagaggatgatttaaatgatgattctcttgaagacaatctttctgaggaaaataatctttcagatgaaaataattcaaaagaagattcagactctctcgatttagagcaattcgactcaaacatatcaagcctggacatcggttccgattcaagggtcttcaagaagataaagtcctctaaaaggttccaatccattgcaaaggaggcaaaggtccttggaaagatcatgggaataacagtctcatggtcccttgaagagtccatgtttacagccaagtcaatgaaagcccgtggatacaactccaatgagcgaacaagctatctttcatacaagttcggacttgcagacatcatattccttgcaataatcatagtcacagtatcaataatagtgataggccttatacaaggatatggcatgataaacatttatccttcaatagacttctcattcagcgatttaccatttaacatttattattttgcatttatagtatttttattacctttaatctatctagaaattaaggagagattcctatggcgttaa

SEQ ID NO: 1220 - DNA, 4056 bp, Methanobrevibacter ruminantium
  source 1..4056: mol_type = genomic DNA
atgaataaggttcaattgtcctccatacttgctttagtattaatattattcttgtctttggctgtagttagtgcaaatgatgatattttaaatattaatgtcactgacacccaagatagtgtaattgataattcaaatggcatatcggattatttctcaagtgacaatggcatcattaatgatgatgggttaagctctgatgatgaaactgcaggttctcaactcttaaacgactcagaggatttggattcatcagatgatttagcaaaggatagtgatttggaagattctaaagagacatctaaaactcaggataattcacaaaagaatgaagattctaaaactagattatcagacagttccataataagaataacagattcttcatattcaagctactttgacctatccaaggatggggccattagggaaggaaccatcaaggatggagacactcttctcattggaaatgtctctggaaagatattctcaatcacaaagaatattaacattctccctatctcagatggggacacaatgtccaattgtctcatacgccttatagagggaagctccggtacaagtctttccaatttaaggattgtaaacagaaatgagaaagtcgggtccttctacctatgcgggattcatataatcaattctgcaggtcatgatatagtcaatctgacaataaacaacagccagatgaagtgttatggtataataatgtcaaacgcttcaaataacaggattatcaacagcacaatcatcacaggccaggcaacagccataccaatgacaggctcttccaacaatctcttctatggaaactacatagagacatacaataccaatatgatctactattgtatgtacggaaacggtgatttctatccaagggaggatctggaaaagtcccatgataatattatagcaaacaattatttcactagtcgaaacggtacatatgattcctactgctattcggtctgtctcatggcagaggcgggaggatcaggtacggttatagcaaacaataccttcaacaataccttcaggccaattacagtctcaacacctgacactctggtaataaacaataccatattgaatgtagggggagaggcaggcataatagtcgatggaaataacgttacaataatgaataacaatatctccaccaaaaggcttgaaggattccaatggaacaaggaaggcgatgtggtagggattttcacctatggttccaatacaagaatcataggcaattcaatcgacacagtcggcacaaatggaatcagatccagcggagatgcaaccttcatttccggaaatacaatcaataccgaatcctctgcatgcataaacctgacaaagtcaaatgcagtagttgaagacaatgcattaaatggcataggctcaagtgcagttaggatctatacatcaaagctggttgaaaataccacaataagaaacaataatataagttcagactctgaagggatagttctaaagggtaagatagattattcccttgtctgcggcaatattattgagatttccaatccagaggatgccataattgttggaaagtatacaaacagaaacccgttggtccctcagcattatgcaatatttaataatacaattaatggcatagttgtgaatctgactgacatttctgaaatagagcgtaatgatacagatagcggattgaataatacaaatacaagtgattccggtaataatggtactggaaatacgggtaatggtactaatattacagatgttaatggtacagatattaatggaactgatgtaaacggtactaacattacagacattaatggaactgatgttaacggcactaatgttactgatgttaacggaacagatgttaacggaacagatgttaacggaactgacattaacggcacaggaaatgctaccattccagttaacataactaaattatccacttcaatcactgtctacaacacaacagtcctaaggggagactacttggatgcctaccttaaggaccaatacggcaatcctatctccggcgtttctatcgacttccactttaaggataaggtctatgctaagacaaccgacagtgaaggaaaggcaagtttgcattttgatgcgattccggacaattacactatgaatataagctttacgggaaataattattatctatcctcaaatattacaatagacatttctgtaattcctgtttcatattaccttaatgaatccaacttctatgaatacttcggcgaagacggatatcttaagggggattatgaatatgcagacctaatattccaaggtgacttccgcaataagagaattgtgctgaaccagcctttaaggatcatttcagattctgcagttctttatgattcaataatcaagatagaatcagataaggtcgtcgttgacggttttacaatagtcaaccgaaatcctggaaacaagcaagacaaccatcggtttgcaattcttttggattatgtaagggatgttagcgtaataaacaacaaaataaagttggatagctatgacagcggatatggaatctatctatccgaaactcaagactccactgtatcaaacaattccattgatgtgaaggcagataagcttacctttggaatcatcctttatgattctaaggacaatctgattcaagacaatataatcaaggtcaacggtacagacgatcctcatcaatatgagtctacaattcaggttgacacttcaatcagcgtagatgactatgaggcagagggcatgattattcctgaagtatataagacatatggcataattctattctattcatcttcaaacgacattggctacaatgtgataaacgccacatcaggccttaaaaagtattacactgcagttaaggagtctacaaactccattgtaggagtcgacctctattatgatagcaactataataaggttcatcataataatgttgttgtctctgcaaaggatccatacctttatggattaggggttttaggtgccgaaaccggtaagcgagaccaatttgcaactaataacagttttaccgacaatatcgtatttgtgaatggtacttattatgcagcaggtataattgcaggttataattcaattaatactacaatccttagaaattacattatttgcttttcaaacaatgtaagctatggtgtgatattggaaggggctttaaattcagtggtggattccaattacgttatttcaaggtctaggataaattatgtcctagagggctatgacactgattataatcttataagcaataatacattaaatgcctttggccagtatgttggtgatgtaagcttgtataactccaaacataattacattgcaggaaataagctcagtcctatctttagggaaggcaggcttaaggatgctagtgaattgcctggaggcgtcgactttgatgccatattctcagaattgggagtatccaatccattgcatgactattcagataaggactggtcagaattgctaagaacagatcttacagatcacgcagatgtgattcctcctcataccggtgctttctatgatgacggaggtgaaggcaatatctttgttgacaatgaggttccagctcctccttccggcggaaacggccagaccaatagaacaggctccggcgaaaccaacagcaatggaaacggaaacagttccaatggaagccagaattccaattcaaattccactgtggtcaataataataatggaaattcaggaagccaaagcgatatggatggctccggaaacaatccagagaccgatacactaaagggaaacactgttggaacaagctcatctgcagcagttacagagtctgcaagggcctataatttggatgttgatgaagatgccgcatcaagtagatcattatcatttggaggcatgaacatacctgtattatgtatcttattcctgcttatattcgcgtgtgcgtctgaactcgtcaagaggtctaaaagaaacataagataa

SEQ ID NO: 1221 - DNA, 1848 bp, Methanobrevibacter ruminantium
  source 1..1848: mol_type = genomic DNA
atgtcaactaaagtacactcaccagatgaactgcctcaaaagcctggaatatacataatgaaagacataaatgaggagatcatctatgtaggcaagtcaaagtctctaagaaaccgagtaaagtcttattttcaaaagaaccttgacagccctaagacaaaggtgctgatgagccatttcaacagccttgaatacatagtcacaaacaccgaaaaggaagccctcattctagaggcaaacctaatcaagaagcatcgcccgagatacaatatacgccttaaggatgacaagagatacccttacgtaaagataacagacgaggactttccaaagattgtcatcacccgcacaatatcaaagaccggaacatattacggcccatttacagatgttacagctgttcgccaaaccgtcaagtttctaaagcagctatttagaatcagaacctgcaaaagaatggacggcccatgcttaaacagtcaaatagacctatgctatgcaccttgtgacggccagatctcaaaggaagagtataaggagcatataaaaaagattgatctttttttccaaggcaaatataataagataatcaaggaccttgaaattgagatgaaacaggcagctgaaaggcaggaatatgaaaaggctgcagtgattagggaccagataagctcaatcgatgaggttatgaaaaagcagttcgttgaatttgaaaacgacttggatcaagatatcatagcaatcgcatacacaatccataatgcagttgcagttgttatgaacatccgaaacggaaagatcatgggcaaggacgactttacaatggacggttcagagaataccacttcagatgaggttatctctgccttcatcaagcagtactatggaataaacagacacattccaaaggaagttctacttgaagaggatataccagataaggagcttattgaagaatggctaagcgacttaagaggaaataaggtatccttaaaagtgcctcaaaagggaaataagcttaggttagtgcgaatggcaggaaagaatgcagagataatcaagaaccaaaggcaaaagatggaaaattcaatgatggaacttaagagatatctcaatcttaaaaagcttccaagagtcatagagggctatgacatatcaaacatttcaggaaagcttgcagtaggttccaaggtttcattcctcgacggaaagccaaacaagaagcaatataagaaattcaagatgaatactccaggacctaatgactttgcaatgatgaaggaactcttggaaagaagacttaaaccccttaaggaacattacgaaaaggtcagaatcaatgaggagcataccaaacataatgaagcggaaacagaaaagatagagcccttaaaattaggggaagagccaaacctaatagttattgacggaggaaagggacagttgggaatggctgttgatgttctaaaggaatataatcttacccacataccgataataggacttgcaaaggagtttgaagagatttacattcctaacagcagctttccaatcatcattcctcaggacaatgaggctctccatctgctgcagcaggtaagggatgaatcccataggtttgcagtgacatatcacagaaaattaaggtctaagaaaatagaggagtctccacttgatgagatagagggaatcggtaaaaagagaaaattagagttattaaggcatttcggtgactttgacagcattaaaaaggcaagtgttgaagagctgaagggcgttgatgggatgaatgagaaagtggctttgaatgtttataattattttcatgagggtgaaaaggagcaatag

SEQ ID NO: 1222 - DNA, 543 bp, Methanobrevibacter ruminantium
  source 1..543: mol_type = genomic DNA
atgaaagttataggtgtaacaggtttaccaggttctgggaaaagcattctttttgatactgctgaagaaaaaggagctctagtagtttgcatgggcgatcttgtacgtgaaaaggctgcagaaagaggagaagacagcggtaccactgccagaaaattaagggaagaatttggccaatatatagtggctgaactgacaattgaaagaattaaggaaattttagaaaaagataaagatgcaaagatcattttagttgatggaatcagaagcccttatgaaatagagctctttaaggaaagctttgataatttcatttcagtttccatttatgccagccctcaaacaagatttgaaaggcttgtccttagaaacagggaagacgatcctgaagtctatgaggacttccttgtaagggacaatagagaaataggatttggaattgctgaagttgtggcaactgcggactatatgcttaacaatgaatgctctttagaggaattcaagcaatccgttgctgattttattgaaaaggaaatggattaa

SEQ ID NO: 1223 - DNA, 747 bp, Methanobrevibacter ruminantium
  source 1..747: mol_type = genomic DNA
atgataccaaaaactcatccacgttacgaatcattattattaagagataaagtcaaaaacgcatttaaggaaggctatttagcagattctggaatgattgctcacggaaggggagagacattcgactatcttataggcgagagaaccacagaacctgctagaaaggcatgtgaagctgctgttgcatacatattgcttgcagaaaatccggtattgtcagttaatggaaacactactgcacttgccatagatgaaataatcgagcttgcaaaggcaacagactctaagatagaaataaatctcttttacagaactccagaacgtgttgaaataattgaaagaatgtttaaggaaaggggctgggaagatattcttggcggaaacgatgaaaagcttgaatatattgacaatctcaacagcccaagggctacagcaagcaaggaaggtagctacattgctgatgtgatgcttgttcctcttgaagatggtgacagggctgaagttctagttcaaaatggcaagaagataatttgcatagatttaaatcctctatcaaggacttctaagatgtctacagtctctattgtggataatattgtaagggcagttccattgatgacaagcatggctcttgactttaaagagaaaggcaaggacaaggataaggaatttttagaaaacataattaagaatttctccaatgagcagaaccttaaggattccttggctgagattaaattaaaataa

SEQ ID NO: 1224 - DNA, 579 bp, Methanobrevibacter ruminantium
  source 1..579: mol_type = genomic DNA
atgaaacgatttattgctattgatgggcttgacggttctggaaaggacactcaagcaagaaagatcaaggaaaagtatgagcaggaaggaactgtggtaattcgttctcatccaacatctgacaatttctttggccgccattcaaaatccgcattagagaaaaagggaaagcttaataagatcattgcaaccctttgctatggcgcagatgcaataaggtctgtaattaaatattatggaaaatacgatactgttatctttgtaagatatacattggctgtttcctatttaagcaaagccatatctgttcctgtttataaattggtttgtgtattgcttcctatctccgaatacttcttttatttggatgtctctccaaaggagctggttagacgggtcaagtcaagaaatgaaaaggaagagatgtttgaaaactatgatgcctttgtaaaggtgagaaaaatggcagagcctgtattgtacaattggaatgttattccagcagatgactctccagatgaaatattttcgagaatagaagcaatcttggatgaattagataagaaacttttagaataa

SEQ ID NO: 1225 - DNA, 528 bp, Methanobrevibacter ruminantium
  source 1..528: mol_type = genomic DNA
atggatgaaaaaatagaaaatcccgaacttaaagcaataatggcaatcgaccctgaagagatggatgaagaccagctaaacaagtttgttgaagcgtttatggaagcgacactaattgttccagcagaaatggaaacagatattgacattgaaggcatgagcgatgaggaaatagccttgaatgaagagattgaaataaccataatcaagcttgaggacgatgagggacatgaattcattccagcatacacagatgatgaggaagttgaaaagcttgattttgatgtctatggattaatttttaaaacagaagacttagctaaccttttatatgaaagcgaagacgaacttgaagcggttgtattaaatccattcactgaatattctgctgaaattcctttggattccctttttgagctctttgatttagaggaatgtgatgatcctaactgtgataatccacaccaccaccatcatgaccatgaacacaatcacgagcatcatcatgaccatgaacacgagcattaa

SEQ ID NO: 1226 - DNA, 858 bp, Methanobrevibacter ruminantium
  source 1..858: mol_type = genomic DNA
atgagaaaagaaataatttctatattggtaattgctattatagcaatctcagttattccaactgccttttcagcaactgacaatggtattgtaataacttacggcgaaactacatacaataatcaaaattacaagtctattgtggataattactttgcaagcaagggatatggaagttccaacgttcaaggtgaagtgattactgcagctgacgtaaatgcaatatcctctggaataagcggaaaaacatacaattccaatcagatagtgtcatgcgctttggtggatatgacccaaaacaatgagatcacagttgaagtggacaattccattacaacaatcactcctcaaatgtatgcctctgccttaaagtcagcgggaattacaagcggacatgtctatgtaagcactcctgtaactgctactggggaatctgcccttgcaggaatcatgaactgttatgaggaagttacagatgttgaaattccagaaaatgtaaagcaagcagctaacgatcaaatttatacagaagctgcaattgttgaaaataatgatgatgtaagctctgaagaattatccaaattggtggatgatgtaaaggaagaggttcaggaaaagaatattacagatcatgatacaattgtgacaataataaatgactacagcacaacctataatatcaacatttccgatagcgacattgaaaaccttgcagataccattcaacagctccaagaggttcaagatgatgcaaacagctataaggaacaattggatgatgctgttaacaataccacatcaggattctccattgatggtattctcaatgctatattaagtatttttaatttcagttaa

SEQ ID NO: 1227 - DNA, 567 bp, Methanobrevibacter ruminantium
  source 1..567: mol_type = genomic DNA
atgaaaagctccataactaaagaagactatttaagaatctatgaaatgacagatgatgttttcacacttgattttgactgtggaaagctctgcaacaatatctgctgcaccatcgaaaaggaagccaaggatgatgagtatcttgagatggtattgtatctcttgcctggcgaagaggaactcttttttgaaaaccaatggtttgagatgtattatgaaacaacagatgaatatgaataccctgattcatggaaagggaaggtatattatgtaaagtgctccgatccaccatattgcgataggaaaagaaggcctatccaatgcaggtcatttccggtaagcccacatcttgataaggacaacaagctccatcttatctatgatgaggatgacttcagctatgactgtccaatagtcagccaaaagatggaattaagcgacaatttcaaggaaaagatattaaagatgtggagcatcttaatagaggatgaactgatcttcgatttaataaagatggagtcagtacaacgagaaaataatgaaaaagagtatgattttgttttttaa

SEQ ID NO: 1228 - DNA, 600 bp, Methanobrevibacter ruminantium
  source 1..600: mol_type = genomic DNA
atgaataaaaaaagatttaaattattattaactatttttatagcatttgcactcattaacacttgttttattttaaatgataatctctcagcagcagacaatgctccaaagggatatagcaactactatattcgtggggtctgcttcaatgtccctgactcatataaactggtggatgagggatgggatgatgtaaataggctaagctacgctcattttaaaaagggaaacaatttccttaatatcagcttggataagcattccacaaagtttaacaagaaccttttggatggattcagttcctttacaataaatggaatcaatctgaataagaaaaccatatctcatgtaactggattctatgcaaagaagaatggcgtaaagcattttgtctttgcaacagaggatgattttgtatatattgcagcaaaagggccaaagcttaaagatgtcttatcatcaaccaatcaaagggattataagccttatcatgatagtgaatatgactttgatgatgatgcctattatgaatcagacgtttatgatgactcttttgatgattcctttgatgatggcgcttattatggctatgattggtag

SEQ ID NO: 1229 - DNA, 684 bp, Methanobrevibacter ruminantium
  source 1..684: mol_type = genomic DNA
atgaaatcagcagttttattttcaggtggaaaagacagtgcaatggccttaaactatgccataaacaatggagatgatgttagatatcttctttcaatgaaatcccagaatgatgagtcatatatgtttcatgttccaaacattcatatgactgatttgatctcacaggctgttgaaattcctcttatggaagtggagacagatggagtaaaggaagaagagcttaaagacttaagaagaggattcatacaactaaaggaagagggaattgaagcaatttatactggagcacttttttcaacctatcaaaagtcaagaatagaaaacttagctgatgaaactggaataaaggccatttcaccatattggcataaggatccaaaggaatatatggaacttgtattggaaacaggctttaaggtaatcataagcggtgtctttgcagaaggacttgatgagaagtggctaggccgtttgatagatgctcaagccctccaagagcttgagaaaatcagtgaaaagacatatcttaatcttgcatttgaagggggagaggctgaaacccttgtgattgacgggcctatatttaaaaagagaattgagatagtggatgccgagacagactggcatttggataatggtacatataatgtcattgaggcaagattggtagaaaaagaataa

SEQ ID NO: 1230 - DNA, 786 bp, Methanobrevibacter ruminantium
  source 1..786: mol_type = genomic DNA
atgatggatttaatctctggaataatatatctaatcctattcattataataatggtctttgccttttcaatgggtattctctcaccctatgttggaaggcgtgaaataatttccattattgcaataggatttgttctcggtgctattggcggatacttctttatatatcctatgtatcaggacagtccctatgtattgggcaatctccagggattgtttacaatggaaagtgagataataaacctgaacattccatcgacatccaatatcagtgatgtcactgaaaagattctaaatcaaaatggggtcaattcagtaagcactaatggatttgagcttacaacaagctcgataaataatgaaacgaaaacatatattgatagctatcttaagaatgattctcagatagagcgctatagcataggaaccaataatatttccgttgacctaaagaacgatgcaagctcaacagccacattgggatcccttgttacttggctttccaatactgttggagtgagctcggaatttgcctttgttcacattaaggttaatgtgaatgcaaatcaggttctggatatcaaggaatatttaagggacaatcattatactatagtctcagtagaaggccctgttcaggataccattcattatttctatgatcatctggctccagattatgttgtaatgtgcattacaggcataattggtgtattggttgctattgcaggcatatatgtagagcctttaaccaagtttgtaagagcctttagaagagggggataa

SEQ ID NO: 1231 - DNA, 582 bp, Methanobrevibacter ruminantium
  source 1..582: mol_type = genomic DNA
atgtttgataaatcaatagctaaaaaatcttctttgccttttaaatcaataaacaataacagtttatttaagtttatatcaattaataaatgtttatttaagtttatatcaatcaacaataaaggtttatttaagtttatatcaatagacaataaaggacaactctcactagaatacatactaagcgctatgatggtcattctactaataacactcctttctgttcctatcctctcactaacaattgattattcaaatgatgtcataaactctataagcacaaagaatgaactgtcaaaaataactgattctattgatttctgctactatagcggaaagggttctaaaaaggtggtcttgcttgatttcaatcaagatttttctgttcgatttaccaacaatggccaaaaggggattgcatatgctgatttggaattgtcagataataaccacaaagagatatctagcgaatatgattatataggtctaaatacaaatattcagttttcaaagggtttcaataagattttagttgaatgggatgaggataccggactaatcaggctctctaagttaaattaa

SEQ ID NO: 1232 - DNA, 909 bp, Methanobrevibacter ruminantium
  source 1..909: mol_type = genomic DNA
atgaatatctatattttattttggaatatctttaacaacattgacttttatctgatgtctggcttcattatggtattctttacactcttattggctaactattatgatctgaagtatgggattattccaaataagttaagtgttttccttatgacatttgggattctaataaatgtattgattttaattgtccttaataatcgattgtacgcaatattttatgtatcttatttaattataatttttattatctcatttgtcctatggaaaatatccttttggggaggtggagacctgaagctattctgttcaatagggttttcacttccctttatagatattctgaatcatttctatactggcagcatcttaaatagcttttcattcaatagccagataattctttatcctaagatcttttcaatactgataaattcaatcttattgtcatttccggttattctattactgcttgtttataagttgcttagggaaaacaagctgaacttgatattatttgctttttccaatatgaaattgctcataaaggaactgtcaacaaagacagtatttataaatgacctgaaggagggaatgattgtagaggattattatttcaatagcttggagctatttaacttgatggaagagctgactggaaatgaagagtgctacaatctaaaagcaagtcaatttaaagagaattcttatgtccttaagtcatcttcaatggcaggtctgacaagggatgacattaaactaatcaattttgcatatatggaaactttaataaactttcccaattttaaaatcaaaatgggagttccttttgttccctctttgactgtaggatatttggtattcttggctttcggtgatttggtgtttttaatttcaacaataatctaa

SEQ ID NO: 1233 - DNA, 216 bp, Methanobrevibacter ruminantium
  source 1..216: mol_type = genomic DNA
atgatggcatcaattttacgaaatcaggtcaatttcacattttcatacaactttcatatgatggcatcaattttacgaaatcaggtcaatttcacattttcatacaactttcacacgatgaaatcaatttactatcttgaagtaaattttacgaaatcaagtaaattttacgaaatgacatcaattttacgagatgacatcaattttacattctaa

SEQ ID NO: 1234 - DNA, 600 bp, Methanobrevibacter ruminantium
  source 1..600: mol_type = genomic DNA
atgaatgatttagataataatcttgcaaacgctaaaggcattggtaaaaccattgctacaaaggttccgatgaatgttcatgatgaattagttcatttggtggactgtggtgcttatttaagcatttcagacttcttaagggaagcgattcgtgaacaattgaagaattataaaattgctgacatgaggaaaattaattatcaggacgctaaaagagaggtaataagctacttcaaaaagtataaggtctgttttttagatgagatagcaattaatttagaattggaatttgaattggtcaatacaatcttgaacgaccttgttatggaagaaaggattaagatgatctctaaagccgatcaggtcttcaaggattatttggaggaaaacgaccttgatgaaagtcaacatttttccaataagggaaacaactttatcaagttcaagggaaaacgcataattgttgaatcaagttccaaagacgttgatttcattagcttaaggcctagtccaaagaataagtctgtcttgaaaagccatggtatggttttaaacaatgggactgtcattctatccgaatgctatatctttttaaaatag

SEQ ID NO: 1235 - DNA, 1677 bp, Methanobrevibacter ruminantium
  source 1..1677: mol_type = genomic DNA
atggatttttacaaagattcaagattttttcaaaattttaaggagtggatttatctgacaaaatatattataataactggtggagtagttagttctattggaaaaggaattacttctgcatctattggccgtattttacgttcgtatggcttaaaggttgcagctattaagattgacccatatttgaattgggattcaggtactttaaacccatatcagcatggggaagtgttcgtcacttatgatggaatggagactgacctggacttaggtcattatgaaaggttcctggatgtagagcttcctggaatatcaaacattaccacagggaaagtctatcaatcagttattactaaagagagaaacggcgatttcttaggcgcttgtgttcagattatccctcatatcaccaatgagattaaggaaatggttcgtgagatatctgccaaggacgattatgatgttgttttggtagagcttggcggaactgtaggggacattgaaagccagccattccttgaggctttaagacagcttagaaatgaggaaggctctgaaaatgtaatgtttgtacatgtgactttcgttccttacttgaatgcagctggcgaattcaagacaaagcctacccaacactcttcaaaagagcttagaagcatgggtatcaaccctaacatgattgtcttaagaagccaagaacctattgacgatgacttgaaaagaaagatcgctcacttctgtgacgttgatgtcaaagctgtcgtaaacactcctgatgctcaatcaatctatgaggttcctttggtattggatagggaaaatgccggacaatacatttcagatagaataaatcttggaatcgattttgaaaatgataaaaatactcttaacgaatgggaagaaatcgtaaactcccttaaaatacaagatccggttgttaccatcggaatcgttggaaaatatgttgaattggaagacgcttatattagtataagagaatcactccatcatgcagctgccaaaatcggcgctaagatgaatattgaatatttaagttctgatgttgatgtggaagatgttgatgaattgaaggcattcaaggaggagctttcaaagcttgacggaatccttatccctggaggatttggagaccgtggagttgaaggaaagttccaggctgttgattatgcaattgaaaatgatgttcctatcttcggtatctgtttaggtatgcaatgtatggttattcagtttgcaagaagaattggaatggaaggtgctaacagcagtgaattcaacacagaaacaccatatcctgttattgatatgatggaagagcaaaagaaaatcaagaagatgggcggaaccatgcgtttaggtgcttatgactgtaaattgattgatggcaccagaactatggaagcttatggagaagagaacattcaggaaagacataggcataggtttgaatataataatgaatatagggatgttcttactgagaatggtcttgtcattgcaggaacaactccagataatttcttggtagagattgttgagttgcctgatcatccatggtttattggatgtcagttccatccagaatttaaatccagaccaaataatgcacatccattgtttgcttcttttgtacaagcagcttttgataataaatag

SEQ ID NO: 1236 - DNA, 381 bp, Methanobrevibacter ruminantium
  source 1..381: mol_type = genomic DNA
atggatacaaaaactattactgcagaattgaatgaggagcaatataagaaatatcaaataatgcaagagaataatttgagtgtaggtgaagccatagatctgattttcaatcttagggaagagtttgaacttcaagctaatgattatcttgaagagaggcttgctgagctaaatgataaaaaagaaagtttatctaaggaaatgtcttcaatagatgatgaattgaatgttcttaaaaaaattgtagattctcctatggacttcaagcaaaaaagagacatcattgaaaaggaatatgcaagttttgatgagacttatgatattaaggttataagagctaagcatcaagtaagttgggtaactgatttctttaaattctaa

SEQ ID NO: 1237 - DNA, 453 bp, Methanobrevibacter ruminantium
  source 1..453: mol_type = genomic DNA
ttgaataaagataattcttcattaaataaaaataatcttaatttagaaaaggaaaattcaagtcttgaaaaaatacttaagccagaatctaaattaaattccagtttggatttggtttctaatatgatttcagatttggattctgatatagaatcaagattaaattctgatttggagtccagttcaagttcattctctgatttatatagaaattacctcatcgaagacaatgaaatctatttggaaatgtccatttcaaaagatgaattcttcaaaatgatgaaatttttatatgttttgattgactcatatagattagaattaaataatatagaagttttagatacaggtgatggattattaaatatctgctcaagcattttaatggaagatgagtcaaacattaaaataattgaagcatttttaataaataatgactttggaaatgattga

SEQ ID NO: 1238 - DNA, 744 bp, Methanobrevibacter ruminantium
  source 1..744: mol_type = genomic DNA
atgttattgaaaataattgaaaacaaaaagataaaggcaaatcaaaaggaatttgataggtttttagaaaggttccataacaataaaaagacattcacagtagactgtgaccatatcaatctggactatttcaattcagaatcatatgttacaatcagacatagaaagccaaataaggagtccatatattatacaagcttttttaaggaaagggatgaagtcacttacttatttggccttgcccgtgaaaatgtggtttgcacatcctcttatatggatatgggtgctcagataagacctaccttagttgcagtattgaatctggaggattcctctaaatcaactattgtatttgctgaagacagcgaagaatataacaatgtcattctgcttagaatagactgcagtcagctaaacaatgatgaattgactgtcttaaagaataagaataagataaccaagcttaaagatggaaagggctttatcaatttcggagccattggtgatttcaccacattgaaaaacatccgaaacttcatttccaatgtgacttttgaatatgacaatggcctttatgcaaaaataataaatgtatctattccaataaacaatagtttttcaaaacctgattcggatgttctaaaggacagattctataattttgataagctggattctgatctggtggtcattgatcctaatgaagatgatgattccaataaaagaattctgaagataaattaa

SEQ ID NO: 1239 - DNA, 4689 bp, Methanobrevibacter ruminantium
  source 1..4689: mol_type = genomic DNA
atgaaaaaccatagttttatgtttttagactcagattttcaggatatctctaatttttgcatgaggatggaaaagaatatagttgaaggcgacggcgtagatgcagttatctgggcaggaaagatagcagaacgtgttacacactatattacaaaattcgtgggtattgatttaaacgaattggaccaaaataaaaaactcaataccttatactctaaaggaatcatacctgaagataaatacaataaattggattccatacgtcaatatagaaacattgcaactcatcatgaattaagggatgagatgaacatagcaaagaaaactcataaagacgtttttaatatattgtcatggttttatgggacatataagggtgatgaggcatattacaaactcaaatatcctggagtcacctatcgccatgatgaaagctttttaaatcaacttaaggaaaacataaacaacaatgtaaaaaccatagataataataaggccaccacagcaatcaaatcagccaacgatcacatatatcagcatgatgttgactataacgtacacagctacttcaaccaaaacaatgttgaattcaatccggaattaaatgcatacactgcatttttcatttttgatgacaagaaagtaaccataggccatttcaagacaagggaagttgcagtgagaaagggatatagattcgttctaaacgaggactttaggatgtttcaatactttaacggatgcctgcttcctgaaaggttggaagatggaagctattccgattccaagggaatagatttcgatatggaagaaaagctatggaaagcaagctttgacgataaggatttgggatacttcatatctgaaaattcagccataatcgcaagaaaggaatatatagacaccttgccattacctgagagcaaaaacggctcctattcagattataaggaaatctcatttgacttgaaccataagctatggtacattaagaaggaaggaaagatactggactattatgatagcgaaagggaggcaatacataacctttcaaatgtctataggctcgatatagacttagaggacttaggcatagtccaggacaagaacgattcaagatggaagatattctataagaacaagtatgtaaccacttgcgacactaaggaagaagccatcaaaaagcgattaagccatatttccagctttgcaccaccaaagagaaacaaggatggggagtattcaatccataagggaatatactatgacgataagaaccttatttgggtattgacaatcaagggagagacattaggattctttgacagtgaagaggacgccttcaattataagaaggaattcctaaaatccaaaggatttgatgtaagcgaccttatattccaccaagaggaattatttgatgacagctttgactttaaggtaaggcttaacagcgaagaaaacgccgtagattacgataaggacaatgacgaatgggtcatttactttaggggaaacgagataggaaggaaagcctctgaagatgaggcaagaaagttccgtagggcatatcttaaggaaatgccttatcctccaagaaagtccaatggtaattattcattcattgatggaatagattatgacatcaacagccatttatggttggcaaagaatggtgaggagctgatcggacattttgactccgaggaagatgcattctatggattgaaggaagctcttgttaaggaaggctttgatgtaagagatatgcactttatcaattcagacattaaaagcaatgatgaaaatgacggtaacttgtctaatatagtcaatccaagcaaggattatctaataaaggacaattccactaaggattatcttagtgatggttctgtttctaatgaagattcttcagcagaagcatctaatcaaaaagatggctctgataaattaataagcttttatgatgtatttagaacaaatacaggcaattatattttaagcgattctgaagaaagtttaagcgattctgaagaaagtttaagtgattctgtagaaagtttaagtgattctgtagaaagcataaataaacctgtagaaagtgctgatgaagattttaaaaacaacagtgaaagcattgctaatgacagcgcttttgaaaccgacaatggaaggggagttatcgatcaggagtttttagcagatggagacaagcaattcaatatgggtgcaataatccaagaggacaattcaaagaatataaatgagtataagaaaagttccttttatggaattgccaatcaaaatcaggacgataggctttcagatgatttatcaattccatatttggaatcagaggataattacgaatatatggaagacctcaatttagagcagcttaatttggatgagaacaatggattcctaaacatatctgaaaaccttttcaaaagctctaatcgtaaggaactaaaggaaataaaattgaactcatacgactccaataacttcagaagggaaatggttctctcctataacgattcctatttatgcgtatcccttcagggcatggtaaataaggatgagttaaaggacatcatatttttagacattttggacaatatggtcaaattgaactattccaaggtggatgaagagtatttcagcatcttcatcaatgtgcagtataagttaagcacaattgatttagtaacattgataaatcttttgtctgatttaggttgggaatttgacttattggataaattggccatttccaatgatataaatctaaattcactagtccaatccaagataggaaaaatcagagacaaaaggaaagcccattcaaatgaattgattaaaagttctcataatgaagattcattaatctccaagtctaagattaatgattctatagtttccaatgaatctgattccaataaaggaagctctaaatttaaggaaaacttatctctttatgataaattttcactaagctctaatgatgcagaagattcagatgctcaaaaggctaaagataaatctttaaagtcaaaagactatttggatgcaaatcctatttccaaaagaaaaagctatccaaagcaggaatcaatatcctctaaaaataagaaatctaattccaaatcagaaaaggcaattatccgtggcggagttagagtcagtctagaggaagcccatgagatagataatgctgaggaaaacaaggtaataaaatccaagatcattgataagaagccagaaatggttaaagactttaaaacaacttctttagatagtcttttagaggcaaatagaattaaggaagaagaaagacttaactctacttcagatgatattggtgatgatttgtctattgaagataattctgacacatttaaagatgatttaaattctaatggtctggaaactttagaaaacggattaaatcttattaaagagggtttaaattctgctgaaaatgatttggattatgctgaagatgttttaaattctgaagaagatgatttggattctgctgaagatgttttaaatcctgaagaagatgatttaggttctgttgaagatgttttaaatcctgaagaagatgatttaggttctgttgaagatgttttaaatcctgaagaagataactatgtttctgaatctagtttaaatgatgattttgatagtttggattattcagactccttagaagactcaactgattccagttttgattatggtgatgtattgggtgaagataactcaaattccaattccattgaagacattttcaatgatgaagatgatttggattctgaaggcttattggatgaggattctgatgatgttgacttcttagaaaaggtttcatctgatctgtcttcaactaacttgtttgatgaatctgcagatttaagcgctaacgacttattcgatggctataatgattctagctctagcgatttgtttgatgatgaatctgaaactagttttgaagatgaattggacaatataggttcttcaaatcaagaagatttgtcaaccgaatcaaatgattcagattctaatttggaagaaataggatctcttaaagaaactgcagaacagactgaatcagaatcagattccactgcttcaaaggtatctaaacctaaagtaaagaaagctaaaaagcctaaaaaggttccagcagatgcatttgatgaaaagtatgcaaattccactgaaatcgaatatgatgaggaaagcgataagtggcttgcattccttggaggagatttaatcaggtcatttaacactccaaaggaagcttacattgaacgtaagaagctattaagaagaaaagtcaaaaggcctaaacgtggtatgaatggaagatattccgaatttgaaggaatagacttcaatacacaagagggcttatggacaagttcagtaaatgatattattgtctgttactcaataactgaaaaagaggctcataaaaaaagaaccatgttcgttgatttgattttagataagtttgatgtctcagaagaggaatttaccgaagatctcttagaagaaattaaaagcactaatttagaagatttatttgctgatttatcagatgaagatttgaatgactcttctaatttaagtcttaaggaggttaaaaaagaattaaataagttttaa

SEQ ID NO: 1240 - DNA, 300 bp, Methanobrevibacter ruminantium
  source 1..300: mol_type = genomic DNA
atggaagaaataagaaaggaactaatcaagtttcaaatggaaagagactggaaaaggtatcatactccagagaatttagccaaatcaatatctatagaagctgctgaactcttggagcactttcaatggcaaaaggaatatgataaggatgaagtggtagatgaattggcagatgtctttaactactgctttctaatggcggatgcattggatgttgacgttaaggaaatagtcttcaataagatgaaaaagaatgccataaaatatcctcctaaggtcagttcagatgatcttaagtag

SEQ ID NO: 1241 - DNA, 774 bp, Methanobrevibacter ruminantium
  source 1..774: mol_type = genomic DNA
atggatgactttctatcaaattttgttttaaaggaagaagaaacaagtctctcagactccaaaaaggatgtattaaagtttctaaagcaaatcggagtggacactcgttttgtaagcttctttgaaaaagacaatgaaaaaaggatatatatagagaatcttcgattttcaaggttttccagaaagagaacatctattttcaataatgaatatccagatattgaagttgtccgatcttccctttttcaaaagatatgtttaagggcttcaaagaccttgtcaaactccctggaccctaaggatagagtcatcattccaaaaatggacaatgaatataacgagcttttatttattgttttagagtcttattcaagaaaatatggcataatctttattgaatatgatgaaaatgaaaatatcaatttaaaagactttaatgccattgtctctccattaaacctaaatcaggaagtaaatcatatcttaaatgacatatttgatggaaagggaatagaatgggataggaaattcgatttgtcttctctttatggctttaatgcttcagatatcaaagacaagaaaatcatatttccatttatcaatgtgcctcaagagtggatttatgactttttaggcatagaaaaggaatatgtaattgattatgataatgatgacattggagactcctttatgggatttttaagcgaaataaatcctcagtttaaggaaaatgtattggcagcctctagctttttagagacacatcaaaaatag

SEQ ID NO: 1242 - DNA, 897 bp, Methanobrevibacter ruminantium
  source 1..897: mol_type = genomic DNA
atggtagatggaaaaacaaagatattaggagttataggagaccctatagaacatacattctcaccggctatgcagaatgccggacttgaagctttaaatttaaattacatttatcttccatttcatgtcaaatcagataatttaaatagtgccatagaaggggcaaaaacccttggaataaggggattgaatgtaacaattccccataagagagaagttataacatgtctggatgaagtggatcctattgcaaatatgataggtgctgtaaatacaatcaaatttgattatgatgaaaatgagggcatatcaaccaaaggatacaatacagatgcctatggctgcttaagggccattgaagagaaagcatcagtcaaagataaaaaaataacaatagtaggtgctggaggagcctcaagggcaattgcctttcagatggcaagttcagacattggggaattatccatattgaatcgtaatttcaataaggcagaatcccttgcaaatgatataaaaagtaatttaaagcaattaaacgataatttcaatttaaatatcaatgcttatgatatggacagcctaaaaagagagatacaggaatcagagattttaatagacacaactcctattggaatgtatccgaacattaatgacaagccaatagcaagtgcagatatgatgcatgatgacttgattgtaaatgacattgtctacactcctatggagacctctttgattaaggaggctaaaaaggccaatgctgaagtggtttatggctataagatgctattgtatcagggcattcgcagctttgaaatatggctaggagaagaagcccctgtaaaagaaatggaaaatgctctattgaaagtttttaggcatttaaatggtttttaa

SEQ ID NO: 1243 - DNA, 540 bp, Methanobrevibacter ruminantium
  source 1..540: mol_type = genomic DNA
atgaatctatgtatgacgactttaagaatgtcattagcggagaagagacagcatctaagcaagctctttttagaggtcttaaaggaacattcaggaaccatttctgtatatgaccttatgagcgttacagctgagcttagggaagataccaaatatgtccaggacaaatatagggaagagacaaatgctgtctatgtaaaatacttcttaggccgtataaagaacatacgtgatgataataatcagtatgatggcagcatagacaaggatgacttcattgaatcagttgctaccttaaagtcatatcaggaaggtgaatcaaaaacatcaaagaccaagtttcctttaatatatgcaatagtctccttatacacaacttatattcttgaagagcctattcatcctgttggaactccgtttccaggctcacttaaggtcactcagaaaaatggagtcttttattgtccggttaaggaagcaaatcttgaatctccaaatgctgtctgcaagatgtgcatagcagaacagttggagttttag

SEQ ID NO: 1244 - DNA, 4620 bp, Methanobrevibacter ruminantium
  source 1..4620: mol_type = genomic DNA
gtgagtaaaacgaataaaaagaaattatttttatctattctaattattttaagcgtattgatatctttatcaagcgtttcagctataaatacaaatgattcatctattcaagataatggagatttatccattcaagactcaattgatgaaatttcccaatttgatgaatcagaacaattaaataaaatcaataaggattcaccagaatccaattttaatcaagaattatctaatgattctaaagacatatctgcagattccaatcaagacctaatgggatttgagaattatgatttcaaatacaatacaaagagctcttattcaaatgccctaaaggactcaaatgtcataaatgttacaggaagcacatttcaagatattcaagatgctatagatagggcaaatgatggggacatcctttatctcaagtcatacaaattccatgggaatgggaccgccatcagcatcaataagccccttacaatcataggtagctatgaagccaataacaaaagccattatttagatgcatacttaaagtccagaatattatatatagattcagacgatgtcacattaatcaatattcactttgactatgggggaaatattgacaataatggcaatggaggggccatatatttggatggaacaaactgcgcaattgtaaattgctcctttaaggggaatcatgcttggctggggggagccattttccaatcaaacaattccaatgacctttatgtgggtggctgcaaatttgtagagaacaatgcccaaattggggcgggaattaccacatgcggattcaattgccttgtttcaaattgcagctttgaaaacaatagcgccgttaccgccggtgcaataatgacagacactcagaagaatggggatatgactttcttccgcttggaaaattccactttcataaataacaatgccacagggggaggcggggccatcaattttgacggctactaccaaagcgtctataattgcaagttcatagataactatgccaaaaattctgggggcgccatctatggcagtttaaaaccatttgacgtttccctatgccaattctataataactatgctaataccggaggtgccatcagaggcactgcaaactataatgtttcggactgccgattcataaataactcagctcatcatgctggcgctgtattccttcattcctatagtaatgtcatagatagttattttgaaaataactatgccgaagcgaatggaggagccatctgtactgattccaacacagtgggagttattattaaaggctccactttaataggaaataatgcaactacaggcagtgccattatgatggtttcaagtagaagcattatagaaaactgtaatttttcaggcaatatcggcaaaagcgaaggcgccatttattcaatccatgactgtaacatctcccattgcatcttcgacagcaatcaggcagaaaagggaggggccttctatatttataggggcaacaacagcaatattgacaactgccgcttcataaacaactctgccaattcttcaggaggggccatatattggtatgtcaataagggtaagatttcaaactcttattttgaggaaaatcaggctcgatatggatctgcaatttattgctcaaatgtagaggcggattcaggatttataatcacagattgtgattttataaataatcatcctaaagaggatggatctaatacaaaggggggagcgatatatttatatgatcaattaaaatgtatcatagttgcaaattccacttttgagtataactatgcctctagaggaggagccatctatgttgagggagatgtaaatcttattgcaaattcaaccttcaagtataataaggcagatattttttcattatctgcttataatgataatgccaatcttatagtcacattaaggggctatgagaattatatgaatgccatctatgccgagaaaactgtcgattttcacaatgtcacctattgggatggggaatttgtcaccggcgactatcctataaaaagaaatctggaagctggaataaacatcatccttgactgcaggggtaatggacatagcttaaatgtcactaagatgaccaatagcatgggagaggttatatttgatgagatgaggaccttgccaagcggaacttatgcatatcaggtctccgttccagataacagctattacactgccaaaaagcttaagcctgacatattcaatgtcccatatctttgtgaaaacattcttggcattgatgtggcggatatctcttatgaccagtatcctgttgtaaatataaccgccaattatacaggtaactacacagtctatattgcaaattcaagctatgatgtcacattcacagaccaggatgttgaaaggggaagggtattgggatataatatcacaatcaccgatgaggatgtagtaaaaggagaaaagctaatagtaattccacatctttttgacataaaggatggctatggggcttatgttcaattgagggcaatcgatcaggagaatgttgagcttgtctatattcaaaacaggacatccttcaatgtctataaggcagcttcagcccttgaagctgagggggcagttgctgtaaatggaagcgatatagaattgaattatatggctcaaaacggcactgtaactatagaaagcattaaaaaggacggatctcttttagaaaatggaacagactataatttcacagtaaatgatgataagataatcatcacaggattggatgcaggccattatattgctaatctgaccttgattgtcgacgattatcataacagctcctctatagatgtttcaattgatgttcttatcaaaaccagcatcgatgtggcagattctatttccattgccgaaacagagagctctctaataaatgcaacactatctccagaggaagcaggtttattgaattaccaaagtgataatgaaactgtggcggtcattgataatgatggaagaataactggaattttaaaaggaaatgcaactatatttgttagttatgctggaaatgaggattattctccttccaatgccactgtaaagataaacgtttatcctttggttgatttgaaaataaacaaaactgcaaatgtatctaaggcttttgtagataacatgattaagtttacagtctctgtggtcaatgatggtccttccaatgctagcggagtttatgtggatgagacattaagctccatccttgatcttatttccaattcctcaacaaagggaagctatgatggaaataaatggttggttggcaatttgaataatggtgaaagtgcaagcctaacaatagttgccaaaatcaacagagctggaataataagcaatgatgtgactgtcaaggccaatgaagccgattccaatcagtccaataataattgttcaatctccattgaaggattaatgattgaaactgtattgacagttccaaatgtgacttcaagctataatatggataagaattttacaatcagcttaaaagatataaacggaaacccaattggagatgcaaatataactgttgacttaaatggcaaaaagagttatataacagattcaaatggacaaatcaagctttcaactacaggattggctgtagatacacatgttttgaatgtcacatttgcaggcaattacaagtacaacggttcaagctcttcaagcaagatagttattatcaaggattcaagcaaattaaatgcaacagacattattagcacttataatgatgatgattatcttattgtaagcttaactaactctcagaacaatcctattgcaggagcaaatgtatttgttgatttggctggaaaaagaaattacactacagattccaatggccaaatcaaagtgtctcttaagaatctaattccagacaactacaatgcaagcattgcatttggaggaaatgaaaactatacagaatccagcacaagtgcaatggtgacagttaaaagggcaaagacatcatttaactacacagatatgaatacagttgcattcgattcaaaattagagggaagagttggagaatactttaaattcaaattgctggataataatggaaagccaatagccggaagacaggtattcataggtttcaatggagtcaaatacaatagaacaaccaacgaaacaggtgaggcacagcttcagataaaccttaagtatgccaaccattacacatttgcaatagcattccttggagatgactgctatagcggatcattcaatgttgcgctgattagtgtaactgaacagactcctgttctaactacaagtcctaagacctataagtcaagcgctaagacaaaggtcttgactgctacacttaaatcctcaagggaaagtgcccttccaggcaaaaaggtcactttcactattaatggaaaggtatattctgcaaatactaatgaggatggtatagctactgtaaaggtcagcctaagcaagaaaggaacctatagctttacagttcagtttggaggagacagcacatataagaagattactaaaagctcaaaacttactataaaatag

SEQ ID NO: 1245 - DNA, 5061 bp, Methanobrevibacter ruminantium
  source 1..5061: mol_type = genomic DNA
atggataaaaaggtgagtaaaacgaataaaaagaaattattattatctattctaatccttttcagcatattggtatctttatcaagcgtttcagctgcaagtgatttaattcaagactatgaagatttaactattcaaaattcatatgatgatttaatcattcaagactcttttaatgaagatttaattcaagattcttctaatacagagttaaaaactcaagattcatctattgacaatctaaaagagactataaatcaaacagaatcaatagatgacacattaactaatcaagatttatcaagtctccaagactcttcaaaggagaatataaaggattccaatttaaaaagctcaagactgggaaaatccataaccgttaagggaaatacatttcaatccattcaatcagcgattgatggtgcagaagctggagacactattattctaagcgaaaatatgtttaagggagataattattatggccttggagaacaaatttatattaataagtcccttaccataatgggcagttctcaattcggcagccaatatataattttaaatgcactacatagttcccgtattttcaatatcactgcagataatgttacaataagcaatattcaatttaccaatggctacgtagtaggtgaacccggaggagctatttactggtttggaaacaatgggaaaattataaattcttacttctcattaaattgcgccaattcctctatggaatgggatattgaaggaggtgcaatttactttgggttgaaattcaaaaatcaatatattgaaaattgtttattcaaatataattctgcatatgatggcggagcattatatacctgttcgcaaaataccacaatctcaaaatgtacttttgacagtaattttggtatttcgaataatgctggtggcatggccaatggtgcagctctcagttttagtgctaaagatgtttatgtaattgattccactttcttaaataatgatgctccagaaggatggggtggtgcagtatatatctataaacatgggtatgaaccttatttctttaattgttcctttaaaaataattctgcagcttttggaggtgcaatatgttggttaactgatggagggacatttttaaattgtacttttgagaataatcatgcaaccggcggtgacgctattccccatggtggtgctatctataaaatagggcgcaatggaggcaatattataaattccactttcacaagaaattatgcaactacaggcagtgccatttatctaaacgcttatttaaacatagacaattgtactttcacggataatcaggctgatagtgaaggtgccatttacataataactgataatgttacgatacgcaactgtttatttgacaaaaattatgcatataattacggcgcggccattttttcttgggaccatgacaatatcaaagtggaaaattccagatttattgaaaatcatgctcgcaatgaaggtggcgccatctatttcctcggaaagaattgtcagatatatggctgcctatttgagggcaatagggtaagcaatttttactctttcggtggtgccgtctttatggaaattagtggtgaggatacttccattctagattgtagctttaaaaataactctgctctttataagggcggagccctatacatttcttatggctcttcggaaaagattgcaattataaattcaagttttgaggataattcagcaagtaatggtggtgcaattcaggcggattggaatttaagccttattgcaaattcaagttttgaggataattcagcaagttatggaggtgcaatacaggtgtttgggagtgtagaccttattgcaaattcaagctttgaggataattcagcaagttatggaggtgcaatacatgtgtttaggagtataggccttattgcaaattccacctttaagaataattatgcaaacagtttagagattaaccaatccaaagagtcatatggaagagtatttacttttaagggcaaggaaaattatattaatgctatctatactgaagattacagtttgaactttgagaatgtgacctattgggacggttcatttgtcaccagcggcagccctataaagagtgactgtgaagcaggcataaaaatcagaatagttcttcgccaaggcgtttcggcaggtcctgttgttttaaatattacaaaaataactaatatcaagggggaagttgtttttaatgagtataatggtctttctccaggaatctattattatgaggcatatcatcctaaagacagctattattcagagtcagagaagttaagcggcatgatcactgtccctaaaaaagccactgacaacacccttgctatttctctagatgattcaatctatggggaagacctaaaggttaatgtaaatactgacgtctctggagaatacaggatctatattgcaaattcaaattatgatgcaatattcaccgatgacgatgtcgcaaagggcaatgtattggcctatgatattacagtaaatgagaatgagctcaagggaaataaatggacaatcctaaaaaattctttgaatgttaagaacggatatggagcatacattcagtttgcagaccttgaagacggcgaaaattacataaatattcataataggacttcattcaatgtctataaggcagaatccagcatagatgcaaatgaaacaattgccattgagggggatggcgctgaggtaaactacacaattgaaaacggaactgcaagcatagacaacattagaaggggctctgccatattggaggaaggcactgattataattttacagtcactccagataagataataatcactggattggatatgggcaattatactgtaaaattaaaaaccattgttgattccaactataacccttcaacaaaagaagtctttatttgcatcctaggtcgaacagccattgacgttcaagagtcagtggcaattgaaaaggataagagctatcttttaagtccaaccctaattcctgaagatgcagggactctacgttacatcagcaatgatgaaagcatagtgaaggttgactctaaaggcaatctcactgcaatatctgagggaaacacaaccattatggttctatttgatggaaacgatatttatgccccttcaaatgctacagtgaaggtctctgtctattcaggaagcatgccaacatcaatcaaagtcaataagtcatttgaattgtatatggatgaatccattgatatgggtgcagttctagacccggcaaatgcaggaaacttgacttataaaagcagcaatgaaaagatagtgaaggttgacaattatggaaagataactggacttggccaaggaaaagcaaatataactgttagcttcagtggaaatgagaagtttttagccagcaatgctacagctttggttacagtttatccgttagtggatttaaaaattgctaaaagtgcaaatgtatctggtgaagtctatattggtgataagatcaaatttgtcatcactgtttcaaacaatggcccttccaatgcaactggagtatatgtaaatgaagcattaaactctaatcttgttttggcttccaattctacaacaaaaggcaattatgatggaagcaagtggactattggcaatctaaataaaggagaaacagttaacctaacaattattgcaaatgtaaaatctgttggtaacattgataataaggtaattgcaaattccacagaaagggattccaattatacaaacaatattgcaagcataagcacaattaaagcactccctattgttgatttgagtattaatgtgacttctaataaaaaatcacttaatgtgggagatacattcacttatacaattaatcttattaatttaggtccttcaaaggctacaaatattattgtagatgaattattaagtcagtttattgagcttgtcaatgtcaatctaagcattggaaactatgataattccacttctgtatggtctgttgatcaattagatccgaatagtccagttagcttaaatttaactgttaaggcaataagagcaggcaaaattgaaaatagtgtaactgcatattccaatgaaaaggattcaaatgaatccaataataatttcacattatctattaattgtgttaaaataaatactcaattgactgcaaataatataactacaagctataatcttaataaagatttgataattggattaaatgacagcaaaggcaatccattaagtggatttatagtgtctgttgacttaaatggcaagaagaattatacaactgattcaaatggtcaaataaagattccaactaagtctttaattccagacacttataatgcaacaataagattcgaaggaaatgagaaatattactcctctcatgcaagtgcaatcatagttgttaaaagggcaagcacatcattaaactatacaaatatgaatacagttgccttcgattcaaatatagagggaagagttggagaatatttccaattccaattattggataatgatggaaagccaatagcaggaaaacaggtattcataggtttcaatggagtaaaatacaatagaacaaccaaccaaacaggtgaggcaaggcttcagatcaacctaaagtacgccaaccattacacctttgcaatcgcattcctcggagataacaactatagcggtgatttccaagtagcactgatcaatgtgactgaacagactcctgttctaactacaagtcctaaaacctataaatcaactgcaaagacaaaggccttgactgccactcttaaatcatcaagaggacaagcccttgcaggcaaaaaaatcactttcacccttaatggaaaggtttatagcggaaataccaattctgatggcattgcaactgtaaatgtaagcttaagcaagaaaggaacctatagctttacagcccagtatggaggagacagcacatataagaaggtgactaaaagttcaaaactaacaataaaatag

SEQ ID NO: 1246 - DNA, 1302 bp, Methanobrevibacter ruminantium
  source 1..1302: mol_type = genomic DNA
atggaatttgaaagaccaagaggaacaagagacttcctctttgaggaaatgagagaaagaaagatggctgaagacactttaagaaatgtctttgaaaattacggattcggcgaagtgcagacacctctttttgaagacttaaaattattcactacaaaatccggagaggagattgtagatcaattatacaacttcaaggacaagggagatagggatttggcccttaggccagagataaccgcccctattgcaaggctatacttaaatgagcttcaaaagacctcaaagccaatcaagatttactattatggaagctgcttcagatatgaaaggccccaaaagggcagattcagacaattctggcaattcggatgcgaattgattggagcaaagactcctgaaggtgaggctgaagtcattgcaatgtgcaacaatgcaatcgaagagcttggaataactacagcagaattcaatgtaaaccacctcggaatcataagagggctctttgcccactttgacattgacacagccacccaaagggagataatggttgttatcgataagggagacaaggacctattaaaggactcccttgttggagaaaacccaatcataaaggacaagccagagcttaatgaagtgctgttcaaacttatggacatggtaggggattcatcaatcataaaagacatagaagagcttgtcgctccatacgaagaaacccaagaggcattggaagagtttaaagagcttgtaaaaaccttagaaagcttccaggtattcaactacaaattgaaccttggcgtcgccagaggccttgactactatacaggaatcgtatttgaggtatatgtggaaggacttggcgcacagaagcaggtctgcggcggaggaacctacaatctagtcaagctattcggaggagaggatgttgtttccacaggatttgcattaggatttgacagactgatgaatgcaatagaagagcttaatggcaaagttgaattggaaccaatagttaacacttatgttgctgcaatctccgactcaacaagacacaatgctttcagcattgcacaagaccttagaaaggccaacattccaactgaagtggacctatccagaaagaaattcaagaagatcttggcttatgcaaataagatagatgtaaaatacacagttcttgtaggagaacgtgacctagaggaaggaaaggttacaattaaggacatgttaactggagagcaggaattggtagccattgatgaagtggttgactacattaaaggcaaattatattaa

SEQ ID NO: 1247 - DNA, 414 bp, Methanobrevibacter ruminantium
  source 1..414: mol_type = genomic DNA
atggaattaaacttcagacttaatatgggtggagaagaccttgtaattgcagttgcacaagactacgaaacaaatgatgtgctcatggtagctttcatgaacaaggaagctgtagaacaaacattaaagaccaaaaaggctcactactactccacatcaagacagaaacaatggctaaaaggagaaagctctggaaatgttcagactgttaaggaaatgtatattgactgcgatgcagatgcaatcattatgaaagtcgaccaaatcggtgcagcatgccatgaaggatacaggtcttgcttctttagacaattggacattgataaggagaatattgacttagacagtcttacagatgaggatataagcataatctcagaaagactctttgatccaaaagagatgtatggataa

SEQ ID NO: 1248 - DNA, 2163 bp, Methanobrevibacter ruminantium
  source 1..2163: mol_type = genomic DNA
atggattttaacgattatgactatgatagcgaatacaacaatgatgaagaagaatacaatgatgaaattaaaagaattgtgccagatacaagcgcaataattgaaggaaatgtagaaaagataataaaggaaaagggattgaactaccccgaaataataattccagaagctgtcattgccgaacttgaacatcaggccaacaaccaaaggccaacaggactaagaggtttggaaaacctaaagaaactacaggaaatggcagagattggagagctgtcaattagaataaccggcagaaggccaacaaagtttgaaaaggacaatgcaaagcttggagagatagacggacttataagagatgttgcaaaggacgaattggcactactcattacaagcgacaagatccaagccaagacagcagaggcacagggaatcccagtcatatattatgctcaagagtataaaggctcaatcgacttgaagatagcaaaattctttgatgaagagaccatgagcgtccatttaaaggaaaacgttccacctatggctaaaaaaggtaagcctggccatatcaagcttgtaaagcttgcagatgaaaagttcacctttaagcagcttgaattcatagctgaagagatattggaaaaggaaaggtatgaccctaagacctatcttgaagtggacaggcagggagcgattgttgttcagtcaagagaccttaggatatcaattgcaaggcctccatttgcagaggcacttgagataactgcagtaaggccagtagcagaagtgtcccttgatgaatatcacctatccagccagcttatagacagacttaccaacagcgcaagaggaatactcatttcaggttctccaggagcaggtaaaagtacatttgcccaggcaatagccaaattctatgacgaggacttgaataaggtagtaaagaccatggaatctccaagagaccttcaggtggcagatacaatcacccaatatgcccctcttgagggggatatggaaaagacagcagacatacttcttcttgtaaggccagactttactatctatgatgagcttaggaaaaaccatgacttcagcatatttgcagacatgaggcttgcaggagttggaatgatcggtgtagtccatgcgacaaagcctattgatgcaatatcaagaatagcaaacagggttgaccttggtacaattccttcaattgtagatacaacaatctatatagaaaacggtgagatatctgcaatatatgaaaacaagcttacagtgaaggttccaactggaatggaagagcgagaccttgcaaggcctgtaattgaggtcagggactttgagacaggaacccttgtaaacgagatctacacctacggtgagcagaccatagttatggacataggaatggttgaagagtctaaaaaggcaaaggataaggaggaaaagacccctgtacaaataatagccgagcgagaaatcctaaggaccatgaaaagaatagtccctaaggctgcaatggaagtgagcatggaaaatgacagaagggtaaatatctatatgagtgaaaagtacattcctaaagtcattggaaagggcggaaaaagaattgcagagcttgaagaggacattggtataagcatgaacattgaacctcttgacaaggctccagacagcttcagcgaaagattatccaaaagatccaagaaaaagaagtctaaaaaggagaaaaagaaaaaatccaaaaaatcaggattgaaggaatacaatggagtagaggatggagaattgtctgaagatggtttgaaggactataataaggataattattttgacttcaccgatgataatgaagattattatgaggattatgaagattatgatgattctgacatattggaagatgattatgaagagcttttctatgacacctttgaagtattcccaaaagttagaaagagccgtgttgaattgccaataggcaagaagtatgtaggaaaatcctttgacatattcattgaagatgagttcctgttcaatgcaaccgtaagcaaaaagggaaatgtcaaggtacataggaagttaaagtcctatggaaagatagtctctgcattagatgcgggagatagaatcattgctaaggttagaaaatag

SEQ ID NO: 1249 - DNA, 768 bp, Methanobrevibacter ruminantium
  source 1..768: mol_type = genomic DNA
atgaaattaggagcttcaatatttcctagaaagataattccaatagaaaaatccttagattattttgaatcaaacagatacatcgaatatatggaaatatttcacgactatccaaatagggacattgatgttgaaaaggacttgattgacaagtttaactcatatgatttaaagtacacagttcatgccccctttatagaagtgaatcctgcttctgtaaaccctgctcttgcaaaggcatctgtagatgagataaaaagatctgttgaccttgcaaatcttctggactctgacattgtcgtaatccatccaggaagagccatatttacaaatgatatggaatatatggcctctgtctatagaatagctgaagaaaacctaaaggttataggagaatatgccaaggacaatggagtgatgacatgcatcgaaaaccttccaagactaaggggattcatgtatcaggacattaatcaattgaatgagactctagagagaacaggtcttccaatgacccttgacatcggccatgcatacactgcaggctttgatgttgatgatgtctcatttgattgcataagccatatccacatccatgacaatgacggcatccgtgactcacatcttcctttaggggaaggaatcattgactttaaaagattctttgaaatctttgacaaatatgatggaatctataattttgaattaggctcaaaggaatatatagaaaagagcatagactatttgaaaggcttgaaattgatttaa

SEQ ID NO: 1250 - DNA, 774 bp, Methanobrevibacter ruminantium
  source 1..774: mol_type = genomic DNA
atgaaaataggagcttcaatgttagcaacagaagataagacaatgaaagaatccttagactacttcgatagcaacaaatacatcgaatatgtagaaatattgcatgactatccatatagagaattgaatgacgataaggagcttattgatttaatcaactcatatgacttaaaatatacaattcactctccattcattgacttgaatatcgcttcccttaactcagcgcttgcaaagctctctgttgaagagataaaaagatcaatagaccttgcaaatatgatagacagcgatatcgttgtagcccatcctggctttgtatcatttaatggaagaggcaaggaagatataatttatgaaataggaagagaagggctagtggaaattggagattatgccaaggacaatggcgtcaatgcctgcatcgaaaaccttccaaagattgaagggttcatgtatcaggatgtgaaccaacttaatgatacacttgttgaacttgagcttccaatgacattggatattggtcatgcacacactgcaggcttcagtcctgatgagatttactttgactctgttaaacacattcatgtccatgataatcctggtgatgatgatacacaccttgcattaggtgatgggacttttgatgtaaatggcttctttgatgtttttactaagaatgggtatgacggcatatatatgttagagttaaatcatatcgatttcattcaaaaaactttggactatatgaaaaatctaggattgatagactaa

SEQ ID NO: 1251 - DNA, 1302 bp, Methanobrevibacter ruminantium
  source 1..1302: mol_type = genomic DNA
atgtggaatgaagaaatagaaaccatgcctagagaagacatttacgaacttcaattgaagaagctgcaaagcactgtaaaaagagcatttgacaagataccatattacaataaaaagtatagtgaagctaatgttttccctgaggacatagagactttagaggatattgaaaagttgccattccttaccaaagatgatttaagagcatgttatccatttggaatgtttgcagttgataaaaaggaaatcatagaagtacactcctcctctggaactacaggaaagcctgtagtaagcggatacacccaaaatgacatagacaactggggagagattgtagcaagaggacttaccatgatgggccttgacagtgacgacatcatccaaaacacccacggatacggcttgtttaccggaggattcggcgttcactatggagcccacagattaggggcaaccatcattcctatctcaaccggacagacaagaagacaggttgaaatcatggcagatttcggcaccacttgccttattttcactccatcctatggaatctatcttggagaggtagcaaaggaggaaggaatagactttgacaagctaggacttaaggcaatcggatttggagctgaaatgtggactgctgagatgagagatagaatcgaagagacattcaagaccaaggcatataacatctacgggctaaccgaacttatgggtccgggagtaggtatagaatgttctgctcaaaacggattgcacattgctgaagatttcttctatccggaaatcatcaatcctaaaaccggagagaccttagctgaaggcaaacatggagaattggtattgaccaatcttgaaagggaaagcatgcctataataagatttagaacaaaggaccttacagcacttcactatgacacctgcaaatgcggaaggacacttgcaagaatggaaagaatcaccggaaggtcagatgacatgatcaaggtcaaaggagttgccatcttcccatcacaaatcgaaaaggcccttcttaaggtcagcaatattgagcctcactatcaaatcatagtcacaaggccagacattatggatgaaattgaaattaaggtggaagcttctgcatccctattttcagatgacatcaaagagatgatggctgtaaaacgaaagattggagaatatattcaaaatgagactggaattgcagttaatgttagtttagtagctcctaagagcattccaagaagtacaaaaggtaaaatacaaagagttattgacaaacgtaacttacactag

SEQ ID NO: 1252 - DNA, 435 bp, Methanobrevibacter ruminantium
  source 1..435: mol_type = genomic DNA
atgtataaaataacacaattatccatatttttagaaaacagaagagggaaactttacaatacattgaatttgcttgctaaaaatgacatcaacatcagagcattgtttttagcagacactaccgaattcggcattttaaggcttgttgttcaagaccctataaaggctaaagacattcttgaagaaaacgaccatatagttaaaatgactccaatcattggagcagagcttgatgacactccaggtggactttcaactgtcttgaaaattatcaaggacgaagagattgatcttgaatatctttatgctttcactcatgagaaaactgaaaaggccattcttcttttgcaagcagatgatttagacaatttgattggtattttaactgcttataaggtgcctttagtacctgcagaagaagtttataatttataa

SEQ ID NO: 1253 - DNA, 951 bp, Methanobrevibacter ruminantium
  source 1..951: mol_type = genomic DNA
atggtaaaagtatgtattattggagttacaggagttataggtaaaaatgtagcttttaaattggcaagagcagacactgtagacgaaatagtgttctttacaagggaaaaaagcctatcaaaagcaaaaggagagatatatgacatgtatgatgcattggctgcagaggatattgactgcaagctcactccaacttcagattataaggatatggctggctctcaaattatccttataacagcaggggctccaagaaaagagggaatggaaagaagcgacttggcacatacaaatgcacagattgtctataactatgcaaagcagatagcaatccatgctccagattcaatcattctaattgcaacaaatcctgtggatgttatgactgcagtggctcttgaagcctctggatttaataagaaaagagtcatcggccttggaaaccacttggattcattaagattaaagacatattttgcaagacgcctggacataaacagcagtgaggttcatacaagggttgttggcgaacatggtgaaaggatggttcctcttttaagctctacaacaatagggggtattcctctaaagtactttatcaaggatgtgaaactagaccttccagatattgtgaagacccttagaaatgctggaaacactatcatttcaaagaaaggggcaaccgagtatggccctgcctatgcaatatcaaacttgattaccacaatcattacaaacatccataagatacttactgtaagcatgtatcttgaaggagagatagcagatgttgaaggagtctgcttaggtgttccggttgtattatctaaaaaaggagctgccatgattgttcctattcatatgaatgactatgaggtaaataagtttcaaatagctgcaaatcatgtcagggaacttactaatgaagttcttgaaagattagaaaaatag

SEQ ID NO: 1254 - DNA, 2505 bp, Methanobrevibacter ruminantium
  source 1..2505: mol_type = genomic DNA
atgtataaagatgcaattttagtcaggggagctaaagtacacaatctaaagaacatagatgtggacattcctcttggaaagatagtggctatagctggagtctctggaagcggaaagtcttccctagcccttggagttctgtatgcagaaggatccagaagataccttgaggccctatccacatatacaagacgaaggatcacccaatctgaaaaggccaatgtggaatctgtccaatatgttccggcagctcttgcattgcatcagagacctaatgttccaaatataagaagcacctttgggacttcaacagagcttttaaattccttaaggctgctatactctcgctgtggcagctatatatgtccaaatggacatatcctcaagccttcattgaatgttgcaagggagattgagcttgaatgtgatgtctgtggcgagagattctatggtcttggagctgaggaatatgccttcaattcagatggggcatgtcccaattgtagcggaactggaatagaacgtgtcattgacgattccacacttgttccaaatgaaaacaagaccttggaggaaggtgcagttgaatcatggaacatgtttggaataaactggatgtatcatgtggctggagagcttggagtgagggtggatgttccctttaaagatttaagcgataaggaaaaggaaatcgtttataagggaccctctgtaaagagatacattaacattccatctaagaacggaaagctatttgagttgaatgcagaatacagaaatgcccatagggcagttgaagaggcattgaagaatgccaagactgaaaaggggcttactagaataaacaaatatctaaagataagggagtgcagccagtgccatggcacaaggcttaataaaagagcaaattcaactcttttaggtggaataaacattagccaagcctgtcagatgactctagaagatatcgtcaaatggattcctaatgtcataaacaatctgccaaaggaaatgcaagatatggcaaataacattgcagaggagtttatggacaatgccaagatattgcttgacttggggctcagctatatctcacttgataggccaagcaataccctttccactggagagcttcagagggtgcagcttgccagaacccttagaaaccctacaacaggggttctatatgttttggatgagccttcaataggtcttcaccctgcaaatgtggaaggcctgataaaagtcatgaacaggctgatagaggatggaaatagcataatacttgtagatcatgacgttaggatattaaggatagcagactatctgattgagttaggtccttcagcaggttcaaatgggggaaagataattgctgaaggcacaatagatgaaataaataaaaataaagaatcattgatttcaggattcctctcaaatgaggaaaagattataattaggaaaaagtcagataagaactccatattcaaaaacggatccattgacatttcaacttgccaaatccacaatgtaaagcctatggatattagttttcctaaaggaaagctcactgtagtaagcggagtttcaggaagcggcaagaccacattgctccttgaatcattgtatccagcagttaaatcattgataaatgatgaaaatatccctaacaatataaaatccatcgatgcaaagaatattaataaaatagaacttatcgatagcgttccaataggaaagaatgtgagaagcacagtatcaacctatagtggagtattggatgacttgagaaagatatttgccaaattggactcctctattgaaaggaatctgaaggcatctgacttttcatataatacaggcagcctgagatgtccatcctgcaacggcacaggaacaatctctatggatgtccagttcctccctgatgtggagataacttgccctgactgcaatggccttagatattcagatgaagctggtgaaataatgttaggtcatctttccatttcagatataatggcattgacaatagatgaggccattgatgaactgtccaatattgaagatgagagtatagatcctcttttaaaaagagcgataaataaattggctaaactgtccaatttaggccttggataccttacaatcggagagtcaacaccaagtctttcaggtggggaagctcaaaggttaaagcttgcatctgaaataggcaaatcccaaaggaattcaatattcatctttgatgagccttccataggtcttcatccattggatgtgaaggtattgcttaatgtattccagacattaatagatgacggagcaacaatcatagtaatagagcatgaccttgatataattgcaaatgccgattatataattgatattggaatagatgacaagcatatgggtggagagatacttgcaaagggaactttagaagatattcttaattctaaggatagtctgactgctaattatttaaatgagattaatttatag

SEQ ID NO: 1255 - DNA, 498 bp, Methanobrevibacter ruminantium
  source 1..498: mol_type = genomic DNA
atggtaaatgaaaaaatggaagcagcattaaatgcacaattaaacgcagaagtttactctggatacttatatttatctatggcagcttactttgaagatgttgatttagcaggatttgctaactggatgagagttcaagcagcagaagaattggaacacggaatgaaattctatgactatctcattagaagaggagcaagcgttacccttactgctattgacgctccacaaaccgaatgggaatctccattagcagcatttgaacatgttttagaacatgaaaaaatggttactggtttaatcaacgatttagtggacttagctattgaagaaaaagaccatgctaccaacaacttcttacaatggtttgttgaagaacaagttgaagaagaagaaaacgctatggaaaacttagctaaactcaaattagctggcgacgacaactctttattatacaaactcaatgaagagtttgcaggtcgtggagctgcagaatag

SEQ ID NO: 1256 - DNA, 156 bp, Methanobrevibacter ruminantium
  source 1..156: mol_type = genomic DNA
atggtttttgtatgtgacatttgtggatatgaatacaatccagaagctggcgacccagataatggaattgaaccaggaactgcatttgcagacttaccagatgattggacttgtccattatgtggtgcagaaaaagcagatttcgtagaagaataa

SEQ ID NO: 1257 - DNA, 159 bp, Methanobrevibacter ruminantium
  source 1..159: mol_type = genomic DNA
atggctcaacacagatgtactatttgcggatatgtatacgacagtgaaactggtgaagaaagaagagatcttgctgctggaaccgaatgggaagatgtacctgacgatttcacctgcccattatgcggtgcagtcaaaaccatgttcagagctcaatag

SEQ ID NO: 1258 - DNA, 618 bp, Methanobrevibacter ruminantium
  source 1..618: mol_type = genomic DNA
atgatttctttgaagacaatagtaatcaatgcaggtcctaaaaaaagaggcttcaatgcagagatggcaaagtctgctttaaggggcgcccaatctgttggtgctgaagtggaattcatagacttatatcgtctgaagtttacaggctgcttgagctgtctcatttgcatgagagatgattttgaaagctgcaaatgcttccttagggatgatctttcacctttgattgaccggatattggatgcagattgccttttgatagctgccccaatcttcttttcaaatccctcaagccattatatggcccttttggagcgattgatattctgcatagtttcaaacaagggagaaaatcttttcaagggaaaggtcaatgtaggccttatctatacattccattatgataagggctattttgaagagtctgtccgccctcatttcaagcattcagaggacatcttaaagatgctcaatggagaagtggaaatctactcagcagaatatgattccaagaaaacctattccacaagctttgatggcgaaattagttcggaagatgaatgtttcactctcaatttagaaaaaacctatgaaatcggtgctaaattaagcaattaa

SEQ ID NO: 1259 - DNA, 411 bp, Methanobrevibacter ruminantium
  source 1..411: mol_type = genomic DNA
atgtttaaaaatattttagtggctagtgatggctcaaaatgtggagacaaggcagttgatatagctattgatttggcttcaaagtatgatgcaagggtagctgccctttatatcatggattttggccttgatttgtcctatgatgatatggatgatgcaggaggggctgtattggatgatatcacagcaaaaggtaaagagaaggatgttgttgtggttgagcacattataacagcagatcctattcaagatatggaaaccatgataagaaagataaaccctgatatagctatctttggagctttcggcaagtccacagacaaagaggacaaaataagatatgataagataggcagagttgccttgaatgcattaaaggtggctaaagttccggtccttctagtaaaataa

SEQ ID NO: 1260 - DNA, 1722 bp, Methanobrevibacter ruminantium
  source 1..1722: mol_type = genomic DNA
atgataagtattaaaaacctttctaaatcatataaattagaaaatggagaagaacttcctgccttaaaaaacattaatctggaagttgaggatggagaaatcctaggaatcataggaaccagcggatctggaaagaccacacttttaagaatattaagaggggttgaaaaatttgatgaaggtgaattcaccataggaagatacaccattaagccggattcctcccaattttattataatcaagtcaagaaggaaactgcaatccaccttcaaaggtcatttggtatttggcctgaaagcgtgctggacaatgttgttcgaaaattatacggtgccaaatacggagatgagtctggaactgactttgaaatagctcatgaccaatttgacaaggaagctatggaaatcatagagcttgtaggccttgagcataaggctgatcatttggcatctgtcttaagcggaggagaaaagcaaagacttatcatggctcgtcaattggctaaaaagcctgcagtaatgctattggatgaacctgccacaatggcatgtccaaagacaaagcaggaaatattggatgcaatcaagaaaatcaatgatgaacttggaataaccgtaattctcgtatcacaccttccggaaatccataagttcctagcagacagggtagtccttatggaagacggtgagatagtcaaagacggagatgtcaacgaagtggtggatgagttccttaaggacattgaggaacctgttgacatagacatcgaatccactgacgaaaccataattaaagcaatagatattgacaaaaggttctatttgcttaagggcaaaaacgttctccatatgaaagacgtcaaccttgaagtaaataggggaaatgtgctatctctagttggcccaagcggtgcaggtaagactgttttgcttaggatgctaggaggtcttgactatcctgatagtggagatgttctcttcaagcttgtaaataaggaagatggagaagaagaaatcagatgggtaaacattgaaaatgcaagccttgacaggatggaaatcagaagaaaccttggatttatgcatcaggaatttgcattgatgtattacgccacaatacaaagtcaattggctgtcaagctaggatacaaaagatgggatatggtagaggaagccaaaaagagagctaaggaaaatggccttccagatatcttgcttgatgcattgtatcaattgacagaccttccggaaagggaggctaaggcacgtcttgaacagattggtcttgacccaactatattggatgaattattccctaaattcccagaaactcaaatcaaggaagaggttaaggacttgtttgaagcccttgacttgccgctcgatatccttccaagaaggtcatatgaattgtcaggcggtcaaaaggtaagggccatgcttgcattggttcttgtttcaaagccagatattctcttgcttgacgaaccgtttggagaccttgaccctaagacattgagaatagttgcaaactcacttaagagaatctgcaaagagtttggaacaacccttgtgatggtttcacataatacagacttcattaaggagctaagcaatagggcagtgttcattgaccaaggtcacctaaaggacgatagcgaagatgttgataagcttgtagatgacttcattggattctgtaaggctgattacttgatgtaa

SEQ ID NO: 1261 - DNA, 2586 bp, Methanobrevibacter ruminantium
  source 1..2586: mol_type = genomic DNA
atgaatattaatttaaaaaaaatcacattcttatgtttggttttagttctaatcggtttgatctcatttaattcaatcagcgctaatgatttaggcactgtattggaggataatgataataacggattaaatgacttaaataatgatgattttataaattcagatgtgaattcagatagtataaataaagaagcaatttctaatttaaaaagtttaaatagtcaggatgaatctacatcttctgattctaataattctgctagttctaattctaatagttccgttgcttctagttctaatagttctgcaagttctaattctgctaattctaatagttctactagttctaattctgctaattctaatagttctgtaagttctaattctactaattctaatagttctgcaagttctaattctactaattctaatagttctgcaagttctaattctactaattctaatgctaacaccaataactccagttcagatgcatctaaaactcaaactataaaattatcctctcaagaggaaagtgcccttaatgagttcttaaatgcaatcaaaacaactactaaaggcacaattgttctaaaaaacgatttggtccttaatcaaactatctcacttaataacaatattacaatagatggtaggaatcattccataagctccttagatgttacaaacatgtttaagacctttgcaaagatcacacttaaaaacattgtctttacaaactatcatgaaatagagaatttaagggcaatacttaactctggagaattgactgtcctcaattgccaattcaatggattttcatatcttacaaacggctcagctatctataacagcaaaaagcttaccgttcaagggactaagtttaataacaattatgtcaataacagcggaggggccatctatagcacaggaaccctgactataaacaattcctcattcaacaaaaatcatgcaggcaaaaatggtggagccatctattccactttaaacctaatcctaaaccagtctgtctttagcaataattccgctaatgaaagcggaggagctctctattcaaaaggcagcggattaaatataaaatattcccgatttaataataactctgcatcattaaatggaggtgcgctctacagctcatccaacagtacggtgatttcctattcaaatttcgtttcaaactttgtggaagcctatgataaagcaagcaatggaggggctgcatttatctattatggatctaaaattgcatattcaaacttcacatctaaccattgtaaaacaactcttacaaacagttctcagaaaaagtcaattcaatcaatgggtggagctttattctattatggtggaaatcatactttaagcttctctaattttaataagaactctgtagaaaacgacggaggtgctgtgcgcatagccaaaaatgtagggaaatttacattgaacaaatgtaatttcacaaataacaacgcatcctatgaggatgggggagcaatttccttagcaaccccaaacatcacaatctcaaactccattttcaagaataactttgcaaatgaggacggaggagctattgacacattcagtctaggaagctataaggtaaatgtattgattaagaattgcctattcaattcaaacactgcattcaaggcagcaggtgcaatatatttaggagtaaacactgtccaatcaatagtaaactctaatttcacatcaaataaggcaaccgttgcaggtgcattctatatagaatccatttcagtaagcattagcaattgcatcttctcatccaataaggcagacaatgtatccaaaaagacaatatataacaagcaaggcaaggttgtctcccattcaggaggggctgtattcgttaagaatggaagtacagtcaccattaaaaacagccttttcaagagcaataaggccacatcaggtggggccataaccaatcatggaaagatggtcattgataagtgcaatttcacaagcaattctgcaacaaatggtggggcattatatggcggtggaaaaacaagcacaataagaaattccatattctataagaattcagcaacaaaaactggaggagcattattcatcaatgaaggcaatgtcaatatgaaatcaagcatgatagtctcaaacactgcaaaatcctattctgtctacagcacagtttcaatcacattaaacaataactggtggggaaacacattgtcaattaaggacaagtcccctaagactttaggattgaccaatgttaaagtgagcacttggcttcatttaaaaataagggctaagaccactaagcttgctaaaggaaagaccacaacattgactattgacttaagatataataataacgataagcttgtttcaactgcatttaacaatcctcttactttgactgtatctgaaggcactttatctagcaagaaagtgaatttaaaaaatggaaaggccacagttaagtttaaaaagaccaattctaagactgcagttgttaaggtcaagctattgggaaaaacagcacgttgtactataaagactaaataa

SEQ ID NO: 1262 - DNA, 1056 bp, Methanobrevibacter ruminantium
  source 1..1056: mol_type = genomic DNA
atgggaatgaagaatctaattttatccaagagcgatcaattcaatcattacaaagataaggcaaatcaattgaaaaaggaaaataaggaattaaagctaaaaaatgaggaattggagtttaaaaacaatgagcttagtcctgaacttgaagagggaattagcctaatcattcctagctataagggagaaaatcatattcagcctcttttagagtccttggaaaagcaaacaatttcaaaagacctttttgaagtaatcttcatcgtcaatggagaaatggattccacaatagacatattaactgattttgcaaaatcaaatcctgacatgaacataataattagctatacaagcgaagggggagtgtccaatgcaagaaacattggaattcggattgcaaaaagggaatatataggatttcttgatgatgacgacttcatcagcgataattatctaaaagccctttatgaccatatagctccaaatagggttgtgctctctaatttcatcgacatcgatgaggaaactggagaagagatagggtctcgccttgtcccatattccatgaacagggaaggcatattcaatgatgttgttgtaaaactgactaacctttccatcataacaactgcaaagataattccagcattagccgttaagggaactgacttcaatccaaatctcaacaatggagttgacgtttcctattatgcaaggctatatccaaagaatcattttgaattttattttgtaagcaaggaagaaggagctgtctattatagaataaggcgaagcggttccatttcaagacaggaaacttcctatcaattcaatgtactggaccgattgaaggtcatcgatgacattaatgaaagctataaacaagttgataaaagcgatgaactctatgtccacttcctaaagatactctttgatgctcaaacatacttcattggattgtatttggatgaatatcctcaagatcgtgaaaaggtcattgaagaagtgagaaagcataattttgaatacttttcatatgaaaaactagaaggataa

SEQ ID NO: 1263 - DNA, 642 bp, Methanobrevibacter ruminantium
  source 1..642: mol_type = genomic DNA
atgtcatttagtttagaaagcattggaataaaggctggaggaagatatgagaccatctacaccaccatgaacaaggcaggtgaaatggacgctgctccaatcggattgaaatacattggagactacgatgttgctgcaaggatatttgaaggaagcaagaccttaaaaaacattcaagagacaggaatctttgtagtaaacattacaaatgacccttcagtctttgcaagatccctttatgacaatctgaaggaagaggaattcgttaaggatgatgacattgtttatttgaaaaatgcagatgcttacttcattgcccttgtaaaatccattgaagagatgaagccggaacatgaccatgtaaatgaaggggcaaagaattatatcataaaggcagagccattgaagataatcatcaataggcaaggagccaaggcactaaacagaggactatttgcattccttgagtcattagttgactatacaagagttgacatcatcgatgatgagaaaaaggaagaatataaaaagagatttattgaaaatgaaagagtcatccaaagagttgcagaggatgatgtaaaagagaatatggctattttaaaggaaaaaatgattgaaaaaggattggatttggaataa

SEQ ID NO: 1264 - DNA, 1119 bp, Methanobrevibacter ruminantium
  source 1..1119: mol_type = genomic DNA
atgtataatgaaaatgtggcatcaaagactaagaaaatattagatagcgctcttgacgggcctatctcagttgaagatgggaattacctaatgaatctaaagggttcagagatttttccgcttttggctactgcagatgcgatacgtgaaaaggtggttggagataatgttacatttatcaacaattgcaatatcaactttacaaatatctgcaaggtccgctgcggattctgcgctttcggaaaggatgcagatgatcctgacgcttatcatctaagcgatgaggaaatattaaagaaggctgaaggtgcagtgaggactggagctcgcgaattcacattgatgggaggggtccttgaggatgcagacattgaatactatgagcatcttctcaagctcttgaagtctgaatatcctgatattgagattcatggattttccccaatgatgattaaggatgctgcattgaaaagtgaaatgcctatagaggaagcattcaagatactcaaaaaggcaggccttggaacattgcctggaactgcagctgaaatattgactgaccgttcaagagagattatatgccctaagaaggtcacaacacaggaatggatagacattattaagacagcccataatgcagggataactggctctgctacaatgatgtacggccatattgaaacaatggaagaaagggttgagcatttggacattcttagaaatatccaattggaaaccggcggcttcaatgagttcattccaatgacattcatgcatgaatactctcccatattccttgaaggacaggaaaacttaggagcaactggaactcaagaccttaagctttatgcagttagcagactcatgtttcatgacattattccaaacattcaagtctcttgggtaaagatgggattcagatttgcacaggtgtctcttttggctggtgcaaatgatttaggtggaactttaggtggagatgaattgtctgaagcatctggtgctccagatggtgttgatgcaagtataaaagacctaagtagacttgtaagagacttaggcagagtccctctagaaagaaactctgaatatactgaattttatcctattgaattataa

SEQ ID NO: 1265 - DNA, 537 bp, Methanobrevibacter ruminantium
  source 1..537: mol_type = genomic DNA
atgaaaagaaaaaaccgtggcttattaattggaagaatgcagcctgttcataatggacatattgaagttataaaggagactttagaggaagtcgatgagattataatcggaattggaagtgctcagttaagccatgagctaaaagatccattcactgcaggggaaagagttttgatgatgagaaatgccctaatagaggaagggattgacttgaataaaacatatataatccctatagaggacatcaaccgcaacaagctatgggtttctcaggttgagatggtcagccctcctttcaagaaggtctatagcggaaattcccttgttcaagtcctattttccgaagagggatatgaagtaatcgctcctgaattgtttgatagaaaagtcctttccggaactgaaattagaaaaagaatattgatggatgaggattggcaatcattggttcctaaggctacagttgaaattattgaagagataaatggtgtggatagaataaaacaccttaataaaaaggaaatcagtgaattataa

SEQ ID NO: 1266 - DNA, 438 bp, Methanobrevibacter ruminantium
  source 1..438: mol_type = genomic DNA
atggtaattaagattgttgaaaaagatgacgaatactttacaataggcgatttaatagaagagattaaaaagtccgacagagtggacgaagcaggagccatctacagttttgaaggaattgtaagaggagaagaagagaatttaaccgttgataagcttactttaacacttccagacaaggaaaaaggacttgaacagatagaatctatcgtagaaaccgctaaagtaaagcatggagtatttgaaataagcgttatccatttcattggagagttctatactggagatcagttattcctagttgttgttcttggacctcacagaggagaaaccttggaagcccttactgaagttgtggaaagagtcaagcatgagattgactttaaaaaagaggagctttccaatcaaggaactaaaatcataatggcaggaggataa

SEQ ID NO: 1267 - DNA, 207 bp, Methanobrevibacter ruminantium
  source 1..207: mol_type = genomic DNA
atggcaattagtgcaagaaatggtattaaaggtactgtagaaagtgtaaaattaggtaaagttatggcaagcatcaagattaaagtggaagatcctgctttaattactgcagtcattactaaagaatctgcagaagacttagacttagctgttggcgatgatgtaagtgctatcattaaatctactcaagttatggtagctaaatag

SEQ ID NO: 1268 - DNA, 207 bp, Methanobrevibacter ruminantium
  source 1..207: mol_type = genomic DNA
atggcaattagtgcaagaaacggattaaaaggaaaaattgaagatgtaaaattaggagaagtaatggcaagcatcaaaatcgcagtggatgaacctgctgtaatcactgctgttattactcgtgaatctgctgaagaattatctttagctgaaggtgatgaagtaagtgcagttattaaatctactgaaatcatggtagaaaaataa

SEQ ID NO: 1269 - DNA, 207 bp, Methanobrevibacter ruminantium
  source 1..207: mol_type = genomic DNA
atggcaattagtgcaagaaatggtattaaaggtactgtagaaagtgtaaaattaggtgaagtaatggctagcatcaagatcaaagttgaagaccctgctttaatcactgcagcaattaccgctgaatctgctgaagaattagaattagctgttggcgatgaagtaaaggctatcattaaatctactgaaatcatggtagcgaaatag

SEQ ID NO: 1270 - DNA, 207 bp, Methanobrevibacter ruminantium
  source 1..207: mol_type = genomic DNA
atggcgatcagtgcaagaaacggattaaaaggaaaaattgaagatgtgaaattaggtgcagtaatggctagcatcaaaattgcagttgacgaacctgctgtaattacagctgtcattactagagaatctgctgaagaattagctttagctgaaggtgacgaagtaagtgcagttattaagtccactgaaatcatggtggaaaaataa

SEQ ID NO: 1271 - DNA, 207 bp, Methanobrevibacter ruminantium
  source 1..207: mol_type = genomic DNA
atggtaattagtgcaagaaacggattaacaggaaaaatcgatagtataaaattaggagaagtaatggcaagtatcaaaatagcagtagatgaacctgctataattactgcaatcattactaaagaatctgcagaagacttaggtttagcagaaggtgacaaagttaaagcaattattaaatccactaatattatggtggaaaaataa

SEQ ID NO: 1272 - DNA, 1224 bp, Methanobrevibacter ruminantium
  source 1..1224: mol_type = genomic DNA
atgtctgcaaataagaaattcatcagagacagtattcatggaaacctccccttaaattcatttgaacttgaaattttagactatcctcaattacagcgccttagaagagtgaagcaattaggattcatctatctaatctatccaggagcaaatcactccagatttgagcattcaatcggaaccatgcatcttgcaagcaagctggcagatcagcttgagcttaacgatgacgacaaggacttagttagaatagccggacttctccatgatgcaggacatggaccattctcccatgtatccgaagcagtgtttgatgttccccatgaggagctaactgcatttgttgtcaagaacacttcccttgcagataagctctctgaaaaattcaacacaagtgaaataatcgacatcatcaatggaaaaggtaaattgggaccgatcatctctggagagctggatatggatagaatggactatctaatcagagattcccactatacaggagtggcttatggagtgattgataccgaaagaatcatcagcaatctgaagctagaaagggaactgattttagacataaaaggggttcaagctgcagaagcagcacttgttgcaagatatcttatgtatccaagcgtatatcagcaccacaccacaagaattgtcaatgcaatgtttagaagatgcctaaggcatatgattcatcaggacattttaaatcctaaagagatgtacaaatatgacgatgcagacatgataagcatgtgcagaaactctgaaggattctcaagggacattatggagcgcattgacaacagaaggctcttgaaggttgcaaagtcaattccagtcaacagatttgagaacccagacaagatatttaaaataagcaaggaagagttgcttaaggccgaagaggaaatcagccaggacttcaatatagacagaaactatctcattatcaaccttccggaatatcctagatttgatgagatgaaaacctgggtgtcctttggagataaattatatcatttgaatgagatttcaagcattgtaggtgctttaagcagcgcaagattcaattccccagacatttgcctttatgtgcctaaggaagaccttgaaaagaccaaaagaatcaagctggaaaactatttggacttgcctgaagaagtgagaaggtatgatacaattcactttaaccagtccaaattgtttgattaa

SEQ ID NO: 1273 - DNA, 555 bp, Methanobrevibacter ruminantium
  source 1..555: mol_type = genomic DNA
atgattattatagcaattacaggtgcaagcggagtaatctatggagtggaactcttaaaagcacttaagcaacttaaaatagaaacaggactgcttataagcaatcctgccaagattgtaatcgaatatgaattggaagaatcagtagaagaaatcaaatcattagcagaccactattttgaatctgaagagatagactcctctgtaaacagcggatctttcaagtttgactctgctgtaatcataccatgttccatgaagacagtatcagcaatagccaacggctatgcatccaattccataactcgccttgcagatgttgcccttaaggaaagacgcacccttgttctggttccaagggaaactccattaagggatgtccaccttgaaaacatgcttaggatatctaaggaaggaggcataatccttcctgcaatgcctgccttctatcatgaccctaaagacataagcgacatgaccaatttcatagttggaaaagtcttggatgtcctaaagatagataatgatatgtttaaaagatgggagaaggaataa

SEQ ID NO: 1274 - DNA, 564 bp, Methanobrevibacter ruminantium
  source 1..564: mol_type = genomic DNA
atgataaaagattttgactttattaatacctgcgatatctccggattcattaaagaggaaattagagcaatagccctctataaatcagatgtgagtaaagaggacattgttttagacattaactgtggaattggagaaatatctacagaattttccaaattatccaaggaagtctattgcatagatgaagacaatacagcaatagagttttccaagacaaatattgaaaagcatggagatattgataaggtcaaattcataaatcaggaccctctttctgctataagaagcatcatcgactttgacattgccataataaaagcaaatgatgacaatattggtgagattatagaagagattcacaatagaatcaattcaaaaggcagaataataatcttgacaaacattcttgactttgctttaatgagtgtaaataagttagatgaattattatacaatccaacaattagtcagattgatgtatctaaaggacagcagttaaataaaggggtaaaattaatttcagacaatcctatgactatgatttatgttaaaaagagatag

SEQ ID NO: 1275 - DNA, 732 bp, Methanobrevibacter ruminantium
  source 1..732: mol_type = genomic DNA
atgaataatcaaaataagtattcttgcatagttttagctggaggcatgagcagaagaatgggtcaggataagggatctatgattatttacaataaacctatgattttacacatacttgaaaggctaaaccataagataaatgatgctgtaattgttttaaataatgcagaaaggatttcaatttatagaaatcttctaaatcaatatgcagacaatgatatagaagaaaattttgattatgaattgagcttcattgaggatgaggtcaagtcaaaaggccctatttcaggggtcatgactggattaaagaatataaaaacagattatgcactagtattgccttgcgactctccatttataagtggagaatatatagaaagcatgtttgggattcttgatgaaaatcctttagcagatgccataatcccttttcatattaagtcaaataaggataagttcaaggacaatgaggagtttaactttaaaaatgcagatgaaatgtctttagagatgaagatacagaattcagagcctttgcattcaatttataaaaaggacaatctgaataatataaaatctcttttagatgatgacagcttgtatgtgaaatcttttatcaggtctttaaaaagccctgtttttattgaagtggataataaggttttatttgatgatgactttaaaaatctaaataaacaagaggatattgataatttaaagtttaaaaaatag

SEQ ID NO: 1276 - DNA, 699 bp, Methanobrevibacter ruminantium
  source 1..699: mol_type = genomic DNA
atggatatattaaataagtttgacatagtgccaaatgatatggaactgtatgagacagcatttacacactcatcctatgcctccaagcatcatttgaacgattatgaaagattagaatttttaggtgactctgttttaaacatgctcacttctgaatttcttcaaaacatgcatcctgatttcggtgaaggcaaattgactaagcttagggctaattatgtctgtcagaatgcattgattgtttattcacatgagtttggattggacaaatgcgtgaaattgaatcttgaggacaatgcattaactgataatgaggtcatttcaatcacagctgatgtcttcgaatcctttttaggagccatctatctagaccaaggcatttctaagtgtaaggagttcctgacaataacagtatttccttatattgaaaatgagcagattttcttccatgactataagtcaactataaaagaatatggcgatgccatagataaggaaatcacttatgagctgattgaagagcatggcgctccccatgacaagacatttgtgatgaaaatattgatagatggcgttgatttcggccatggagtaggaaagagcaagaaggaagctgaacaagtcgctgcctgcaatgcaattaagactttaagattggatcatggccaggatgttgcgtatatgcgtttgtataaatag

SEQ ID NO: 1277 - DNA, 459 bp, Methanobrevibacter ruminantium
  source 1..459: mol_type = genomic DNA
atgctattgaattggtgtgaagagataacaaatatagacccttcaattaactttagagcaactggaggatggcttaaaaccgttactggtttagataaaagtgtcttgaatggctattcattagttggagagtttgttaaatcaggagattataaacatgaatattccgatggattgtatcttgattgcaacaaggaagggaaaaaatcaaagccaaaacaggactttagactctttagacttaaaaacggcaaactgactcttatcgatcaagtttatgacggcaaaaagaattgggcctgtgaattctgggaaagcgttagcgaagagctgaatcccaatttcagagaaagcgaagctgataagataatcagccttattttagataaaacaggtaaagacaaaaagcttttaagagaggttcaaagccaattggatttagtcatttctgaaatttga

SEQ ID NO: 1278 - DNA, 513 bp, Methanobrevibacter ruminantium
  source 1..513: mol_type = genomic DNA
atgacaaaaagcttaatcctatatttttcaagggctggagaaaactatacaagccaaggaataaaaaacattgaaattggaaatactgaggtcattgctaattatatcaaagagtttacagaagcggatatgtttaagatggagcctttaaacgactatcctgaagattatatgcaatgtactgaagtggctcaaaaagagctgaatgatgatgcaagacctgaactgaaggaatacattgaagacattagtgaatatgatatgatctatcttggttttcctaattggtggaacactatgcctatgcctgtctggactcaattggaaaagcttgatttcgatggaaaaaccataaagccatttgtcacccatgaaggcagtggattcggcaaatctgaaaaggatattaaaaacctatgtcctggagttaaattagctaaaggattatccatccgaggcagttcagttgaagattctaagaaaaaggtaaaacattgggttaaaaaaggttaa

SEQ ID NO: 1279 - DNA, 186 bp, Methanobrevibacter ruminantium
  source 1..186: mol_type = genomic DNA
gtgaaaggaactccatcaatgggtaaaaagaataaaaagacccatattagatgtagaagatgtggtaaaaactcataccacgtacgtaagaaagtttgtgcttcctgcggattcggaagatctagcagattaagaagttacagttggcaaaacaaaaaatccactactcgccaaagattagtgtag

SEQ ID NO: 1280 - DNA, 234 bp, Methanobrevibacter ruminantium
  source 1..234: mol_type = genomic DNA
atgagcggacaacaaaatgttcaaagaccacttgacgcattaggaaaagcagtaaactctccagttttaatcaaactcaaaggagaaagagaattcagaggcatcttaaaaagctttgacttacacatgaaccttgttcttgatgatgctgaagaattagaaaaaggagaagttttaagaagattaggtactgttctcattagaggagacaatattgtatatatttctccatag

SEQ ID NO: 1281 - DNA, 705 bp, Methanobrevibacter ruminantium
  source 1..705: mol_type = genomic DNA
atggtggaattaagagtaaatgctggaaatgtaaagaatcctaatgttcacaaaattggcataattgcccttggatctcatcttgaaaatcatggtcctgcgctgcctattgatacagatgctaagatagcttctcatattgcctttcaagcatctcttgaaagcggagctaagtttttaggagttatctatcctgctcatgagctaaaggaaataaaccatggcatacatgttagtttagaagatttaaccgatgaaatcgttaaggtattaaaatcagcaaagaaattcttaaggattagcagcgtaatcattgtaaatggtcatggtggaaatctgcctattgtaactactttatatgatattgaagagagaactggccttcttataacattaaacagcaagatcatagaatctgaaggacctcatggaggttctggcgaactctctatggctaaggctttaggaatcatagatgaaagtcaggttgaaaaccagaccaatcttgaggaatatggtgaagtgggcctttatatgtttggggaagctcgtagaaacgatcctaacattgaggaaggggctcttgacgttgaagagaatggcgtttatgtggatgatgtctatggacaggagcttttaaagctagccattaattctgttcttttggatgttgaaaaacagttggattctcattatggctattag

SEQ ID NO: 1282 - DNA, 546 bp, Methanobrevibacter ruminantium
  source 1..546: mol_type = genomic DNA
ttgattaaattaattaaaatcattgatttttttaatttaaatctactaaatggtttcaaggtgctgattttgaaaattaagaaaagatattttttaaagaagaagaaagtaaaggaaattaaaagcgaacttggagattacggatcatttataaataataaggacactcttgaaatgcttgaggcagaggattataactttattcttgtaaatggagagccttatattattataattaatgacaagccatatcctaccttaaaggctgccttaaatatggaattggacagcaaggttgttgttgtggatatgggtgcagtcagatttgtaacaaaaggggcagatataatgagtccgggaattgtggatgcagatgagtccatcgttccagatgacattgtcattatcgttgaagagactcataacaagcctttggctattggaatcagtcttataactgggcctgaaatggttgaaaacagtgaaggaaaggctattaagtcaattcattatgttggagatgccatttggaatcttgaggtctga

SEQ ID NO: 1283 - DNA, 1488 bp, Methanobrevibacter ruminantium
  source 1..1488: mol_type = genomic DNA
atgagtgataaaaatgaatggggcagcaatctatcatttgttcttgcgatggtaggttctgctgtcggacttggaaacatatggagatacccgtatgtattatacagcaacggtggaggggcattctacatcccatatatcgttgccatactattgatgggaattccatttttaatattggaatatggcgttggatataatttcaaatcatcctttccaaaggccattcgcaagattagctccaaagcagaatatctaggatggctgcttcctacctcagtattcatcatcatgatatactattcatgcatactgggatgggatggaatctatgtgatattaagcttctttaagggatggggagcagatccaaacacattctttgcaagcacattgctccagtcaagcgaatctgtcagcggaataacaaactttattccagtcattgcaattgtaatgcttataagctggggaatcgtttggtacatttcccataaggacttggaagagggccttggaagggtgagcaagattcttgtgcctttgctttttataatcatgattgtgattgtattgttttcattgaccttgcctggcgcaatgattggattgaatgaactcttttcaccggattggaacttgcttttagacttcaacatatggatggcggcattcggccagataatattctcccttagcctgggaatgagcattgcatttacatatgcaagctatacaggaaaggaaggagacattattacaaatacactggccattacatttgcaaattgcgcctttgaaaacttctgtgcattgggagtcttttccattcttggatatatgtcccttcaaagcggaacagcggtggcagaccttgtaactcaaggtacaggattggtgtttgtagcatatcctacagtcttaaacgtattgggacaatatgcatatgtaatcggacctttattcttcataacagtctatcttgcagggcttacaagcatcctatcaactattgagccattgtctttcagcatacagaataagttcacttggtcccgtaaaaagaccatgaccgttctttgcctgataggggcagtcctttcaatgatgtatgctacagcttatggaggaaccttgcttggatatgttgatgcatatatcaaccaaatagcaattctatttggagtgatacttgaatgcatagtctttgcatggatattcaaatgcgaaaacatcattccaatcttgaatgagcgaagcaaaaccataaaattaggcaaatggtgggtggttatagtaaaatatattttgccgttgttcataacgattgtatggattggtggagtattggatacaatcaatgatggttctactgatcaattgattgtatttggaatacttactgtaattctgcttggattaactgcattatttactcatttgccagctacaaatgaagaatgggatgaaactgaatatagattatga

SEQ ID NO: 1284 - DNA, 450 bp, Methanobrevibacter ruminantium
  source 1..450: mol_type = genomic DNA
atggttaatgatgaaaaaagtttaagtcgtatgagtaaaacagattactaccttgcaattgcatttgcagtatcaaaaagaagcacatgcttaaagagacattatggtgctgtaatagtcaacaatgatgagataataagcactggatacaatggaaatccaaggggagaggaaaactgctgtgacagaggatcctgtaaaagaatggacgttccttctaattctggagactattctgactgcttttcagttcatgcagagcagaatgcaatgatcagcgcaagcagaaatgaaatgattggagcaaccatttatcttgctggtgaaatgtttaaggacgattcttggttcgaaatagaagatgcagaaccttgtccaatatgcttcaggatgattaagaactctggagttaaaaaaatagtaagtaagggagtagttattgatttataa

SEQ ID NO: 1285 - DNA, 2424 bp, Methanobrevibacter ruminantium
  source 1..2424: mol_type = genomic DNA
atggaaggggaacaaaataacttaagaccttatattgaggatttctttagagatttgcaattatatgacgattacaagaatggtcatcactataaagaccttttagaaggaagcattattctttttttagaaaaggaaaacacatataccgcctatgaaatctatgaaaactttttcatgatctatcaaatcacagatgaggacaagtcccatgggcataagactgaaagcatagacatcagcgagtccaattcattattgaaactggtcaatgtaatgaaggactatgaagagaatacaggggatttgattgaaaagcagagggatcatttcatccattcagtaaacgtattcatccttggtttggccatttatgcaagcaatcataaatataggaatgcatttgaggcttatgtgacagacagtccatataagaaatactataagactgctgatggtgaattttccgcagaggagttcctataccgttggggaatagcttcccttttccatgatatcggctatcctgttgaaatcattggaaagcagttatccaaatttataaacgacagcagccaatcaatatctcaaaaatataaggtcaatacagctgtcaactttaagaatttcaatgaattgaattccatcataaagctagaccctaaattcccaataatctataggatggactatcctgaaaccaatttcattgatgtatacaagccaacaaaccttatggctcatcagatttttactgatttgtatgtggattctgatattagggccattgacgagtttgatgagttgaatgaatatctatataagttggttgtccatttggatggctttgtggattatatgacatcaaacaatttcattgaccacggcttcttttcatctatctttgtattgaactcctatggagccattatgcagaaacattatctcaatgatgatgaggaaaaattcgactattatataaataaatatgcttatttcttttatcctgtcttaaacagcgcaacttccatattgcttcataattattttagaggaaccttaaatgagaaggaaagcaagactgatgagtttaatctaggcaaattggaacctatgcaaaacccattagcttttcttttgattttctgtgacgaacttcaagaatggaaccgcaggccaattggactaaaggacaaggctaaaaaccatgtccatgatattaaaatcaatattaatgagaatcaggtcttagttgattatatcgttaaaaacagtgcattaggtcttaatttctctgaaaataaggaggaattaattaataatcttttggatgttacatcaatattctccaatggtttgaaagtaaacataactccttatttggatgagaagtatcctttagaggacatttcattatctgaagttgagactccaaggatattgctccgccatgttgaggagattgcacgtgcaagccataacagatataatgaaatcggaaaggcccatggcaatcctgatgagccttatgagtcattaagtcctaagaggaagctctccagcataagacagactaaggagtttcctatgaagctgaatctcattggatgtgagatggtctcagaaaatgatcctagagatgaatattcccttagcgatgatgagcttgatttccttgcagaaagggagcatgaggcttggtgcagagaaaaaaggaatgtaggttacatttcccatcatgatgcattcaaaagaggtcttatcgatgatgcagaatatgaccgactatgcagaacaaatgaggaaggctgcgagaccaataagcataataagatagaatctccagagagaaacctttatgttcattcaaatattattccttatgacgaactcaatcaatattctaagaataaggatagaaggccgtttgaagaccttccagataatttgaaattgattaagaacaatcctttaaagattgttgaaaacagatataagttgtttacagttgccatgcataatgaatatatggattatattgcaggcaagaaagaagttcctgagtttaaggacttgccatttgaattgcagcagataaattataagcaaacctatctcattgcaaaatacctaaatgaaatcggctatgaaattgttgaaaaggatgatgagagacctgctgtaactaagtttgagaacaataaggaaactggctatttggctggaagagagcataatgcttggtatttaagaaaattgaatgatggttgcactaatggtaagaataaggatggaacagacaatcctaggataaatccttgggatgaattggattacagtttgaaaaagcctaatatgaatacctttaagaaattgcctaaactttgtttgaaagctgatttgaagattattaaaaataaatag

SEQ ID NO: 1286 - DNA, 795 bp, Methanobrevibacter ruminantium
  source 1..795: mol_type = genomic DNA
atgaatgataaacttatagaattgccaaattatggtcgcttgatggttgtaagcgatttgcatggtaatttaaatgactatgaaaagtatattgacctttgggattgccaagatcctgattttcatattgtctttcttggagacctaattcattccccttactttaatgataagtctgtagagctgttggatgatgtaatcgaaaaggataagaaatattccaattttcatgtattgctcggaaatcatgaatgggctcatattgttcatagggacatattcaaaaatggagaaaacattagggaggatttcgaatacttgatatcctataagaaaggtactatagagccagccattacagaatatatcagattctttaaatccatgcctttctttgtaaaaactgaaaatggccttttcttatcccatgcagggccttcaagaaaggtaaagtcaatcgaagactttaatggcatttttgatggagattatcataatcctattttagatgatttcttatggcttcgcccaaaaagaaacctttatggacgtagaaacatattgactgacagtaatttgtatgatgagggagacatcttcaatttcctaaatattgtgggagcaaactgcatggtggtaggtcatagtcctgtagatggctataagcagtatggaaatcaattgataatctcttccagctttcaaactgaggacaaggtttatttggatattgatttgtctaaagaaatcaaacacatgagggatttattggactgcattaggtattttgactga

SEQ ID NO: 1287 - DNA, 360 bp, Methanobrevibacter ruminantium
  source 1..360: mol_type = genomic DNA
atgatagacagttttagatatgcattaaatggaattgcagtttctattaaagatgagagaaacctgaaaatccaaatgattgttatgatgcttgttataatagccggatttcttttaaagattagcagaacagaatggataatttgcataatcctatttgcacttgtaataagtgctgaaatgataaacactgccattgaaaatgctatagactacaccagagaaatgactgttgataaggacaatgacttagccagaattgctaaggatgtctctgcaggagctgttcttgtaattgcaattgcatctgcgattgttggattaattatttttattccgaaagttctcttattgctttaa

SEQ ID NO: 1288 - DNA, 255 bp, Methanobrevibacter ruminantium
  source 1..255: mol_type = genomic DNA
atggaagaaattattcaaaccttaaaagagattgaaaaggaaaataacattgaaatcctatatgccattgaatcaggatctcgcgcatggggattcagcaatgaggaatcagattacgacattagattcatatttaaaagaccgatcaaagactacatctccctaaaaaacaataaagatgccttagacattacaatcgacgattatgacatagtgggatgggacattaaaaaagactttaagcctccattataa

SEQ ID NO: 1289 - DNA, 444 bp, Methanobrevibacter ruminantium
  source 1..444: mol_type = genomic DNA
atgggaaattgcgactttctaaatgaactgccagacttcgataaggatgttttaaagtaccattatgcaagcatagcatttaatgtatggaaagaagccttggatagagaagaaatggatagaaaatctactaaacgttatttatattgtattcgttgcatccttgcttggaaaagtgcagatttaggcaaagattcttcaataagcatttttgagctgatggaagacagtgagattaatgatgatttgaaaagtgatataaatacacttattgactattacaaatcattatgcaagaatgaattggatgaagagctgattgatcgcctaagcatttggatagatgatactgtgaaaaacatcaaggatcactatcctaaaaaagagaaaaaggacatgagtctttatgatgatgtcttatttaaagtcttggagattgaataa

SEQ ID NO: 1290 - DNA, 834 bp, Methanobrevibacter ruminantium
  source 1..834: mol_type = genomic DNA
atgggatttaaagaagacaataaagacaaatacctagacccttttaaaagagtcactgttgatgtcggaagctcttttaataggataaacgtttcagcagatgtaattggaaacagaatccgcataactgtgccaaaggacaagagtggtaatttaactggaactattgtagagaatattgctttggaaaattccacttggatttttgagcctgttgccgatgagataatggaagatcgcatcgaccgtaagctctctcctagaaaatatatggatttatctaaatttgattttgaaaggggatttttgccaaaggaaatattggatgatttggtatatccaattaattacagaaaggattattctccatttgcaaagaaggtattggagcatccaaacgatgagattcgtaagattgcccttggatatatcgatgatgaggatgttttggcatccattattcttttcagcaaggataaggatctttccttatttgttctagaacatattaaggataagtctattctattagatattgtcagaaatgatttcaattactattatttcactggagcagtggatattttctatgatatggataaattgcctttaaagctctttgatttagatattcgtaaggctgctttagaaaggatagatgataaagagcttttatttgaccttgcctttgactgtgaggaatggtttaagcctattgatatgatcaaagacaataatcttttaagtaaaaaagagttggatagtctgaatttatatgctcaaaacagagagattcgtgaaatcattaaaagtaggttaaaaaatgagttatag

SEQ ID NO: 1291 - DNA, 1740 bp, Methanobrevibacter ruminantium
  source 1..1740: mol_type = genomic DNA
atgtgtggaatcgtaggatgcatacttaaagataagcaaaagtctgtagctcccattttacttgaatgtgtggaaaaccttgactatagaggatatgattcagttggaatagctacttttgacggcagcatccacgtaaaaaaggacaagggaaaaatccctgaagtggatgaaaagctagacttggccgacatgcctggaaactttggaatagctcatgtaagatggccatccactggaattgcaagcaaggagaacgcacatccccaattggatgaatccgacagcattgcagttgttcacaacggatcactgaaaaactatgacgaacttaagggagagcttatagcagatggattcaaattcaaatccacaacagacactgaagtgattcctcatctaatcagaaaatatatgaatgaagggcttgaccttgaacatgcatttagaaagaccatagaaaggcttgacggctcatatgcaattgcagtaatctcaaaagaagaaagcaataagattctagctacaagataccaatcaccattgaagattggaatatcagatgatgcctacttcatatcatcagacataccggcaatcataaactacaccagaaagatcattcttccagctgaaggggaaatggtcatattggatgaagatggagtccatgttcatgatgaggatggcaatgagattgaaaaggagattctagtgattccatggaccgctcaaatggcaagcaaaggagaccacccttactatatgattaaggaaatcctagagcagccagatgctgtggaattcactttaggtgaaagggagaatatccaaagaatcgttgatgaccttggagatattaaaaacatctgctttgtagcatgcggaacctcataccatgcatccttaactggaaaatatctgcttcaacatctggctaagataaaaacagatgtggttcttgcttctgagttcaagtacactgcagacacattagataaggacactttggttgttttcatttcacagtcaggagaaaccttagacagcatgaatgctttaagaattgcaaaggaaacttcaccaacccttgcaatcgtcaacaatataggctcttcaatgacagaggaagccaaatatacaataatcactcaagcaggccctgaaaagggagttgctgcaaccaaaacatatatagcacagcttactgcaatctatctgtttgcaggtcttttggcaaatgatgaaaaattgatcaatgaattgtataatgttccaggttacattagggaagtgttgaaaaaatcatctgaaatcgaggttctatctaaaagatacagctttgcagatgacttattctaccttggaagaggattctcttatcctattgccttagaaggtgcattgaaattaaaggaaatctctcttattcatgcagaaggctatgcatcaggagaattgaagcacggccctttagccttaatcaaccataagattccagtgattgtgattctacctccaggcagtgattatgaggacactatggtaaatctggaggaagttaaggcaagaaaggcaattatcctatcaatatgtgctgaaggagatgcgaaagcagaatgcaaatcaagagatgtctttacagtcaattcaaaagtcagtgagaccattgcacctcttgtctatacagttcctctccaattgttagcttattatgtgactttagaaaaagtagcatga

SEQ ID NO: 1292 - DNA, 3105 bp, Methanobrevibacter ruminantium
  source 1..3105: mol_type = genomic DNA
atgatagcaaacagccctaaagaaattaaatccagattaattgaaatctataatgaagaattattaaatcttaacatattcattaagaatagagatgaacttaaagggaataaggatttaagatatcttcttttagagagaatcaaggaggaatttgattatttggatgatgaggaactttttattcttttatcattttatcaaaccatcccttcattttatagaaaaacttttaataagattcttgaagcatctattgataaaaattatattgaaattcaagatgaattattgaaacttgttgaaatcattaaagaagaaatatcaaatatagatggggcaattgaagagcaaaatctaaagattgaggaaaaactcctaaagagtttatattctaaagacaatcaaaatggagaaaattcagatattaatcatttgaacgaaggaaaaagcttagatatcaataatctaactgatgaggaaatacttgaactatacaacattagcgatgaggaattttctcaattgcaggactattatgaatgggaaatatttgaaagtgattttctaaatgaagaaatcttagaggattatgatgaatctgcctttctggatatagcctataatcataaggatgcagaggttcgagggtttgctttaggcatggttttaaaaccatatgtttggcttgattttctatttaatgatccagatttatttgttcgaaagtctgctttattttatctttttaaagaaagatatttaaacgatattgaagacattgattatttgggcaaaattcctattgaaatagattttaatttggattatagcgacgcaatcgatgattttaaaatcgatgagtctctttttaataggcatgacaagatcatcattagtgaaatttcaattaaggatgatgatcttattgtaaagacagaccctaaaaactcatatgaacatgctgtaagcaagataagaagtcaagacgccttaaaggcaatcgcaaattatcataatcaatggtctgtacgctatattgctgtaaataagataacagacattgattatttatatgatattgcattaaatggttttaataaggatgcaaagcctagacatggaatattatattatcctggggagattagtgaaggagatgtattgaaatccctattaaatagacttttaagattgaagaacttatctgatgaagattcacaaagcttcctaaaggagcttttttataagtcaaaggatagcataataaaaagatattgcttatcaaagatagaagatgatgtatttttagtgaatttagcaaacactgaagcaaacccaagctttgcaagagtttgcttggatacgattaaggatgaggattacttgattctcctttccattgcaataataacaaaccctaggttcaaaggaaaaaatcaagatttatatgacgggctctgtgagggaggtattggggatgaagatagtttcataagggagtctcaatttgatgaaatagattatcacaatatccgggcctatgcctctaagattcttattgcattgcctagaaaaactctaaatgagactcttgaaagctttagtttaaaattagatattcccaatctaaaggaacatagagtttttaagcctataattaataaaaggattacagatattttaggagatcttgctaaaattgatgaaagtcctttagttcgctctattgcagttttaggtcttgaagataccaatgatttgatgtctattgctttagatgatgaggatgataaagtctcatttaatgctataaaaaagttaaatgatgataatttcattgaatattacttaaaagaaaccaataggaaagcatattatttagttgaaggaaatctagtaaaagaccaatcccttttaaagaaaattgcactaaatgattcatggggacctacacgcagtgaagctgtaagaaacatcaaagatgaggatttattgataggcattgcaaaaaatgaccctgaagcaattgttagaagggaggccgtactaaaaataaaaaatcagtctgctttgattgatattgcatatgaagatgaggatgatttagtaagggattttgcaatctcaaatattgatgatgaggatgttttggaggatttaatctataaaaatgaagattcaaatatattaagaacaatcttgtccaaattggataatgaggaaataattaaggactttgcttataatcatccaagagggattgtaaggaatgcagcaatctcaaatattgatgacaatcgtgttttggtggatattgcaaaaacagatgaagattggacggttcgacgaaatattattgctcgcctagttggaaagttcattaaaagcagtgttgatgtttatgaggataaatatttaaatcatttaaaaagaagggaatattataattctttgattaaaggagataatgagaagtttaaatctgaaaataaggtaaaatctagtgaaaatgagaaaaatgaatatgcagatgcaagttcaatagttctatatgaagatgatgaaccatacacacttcaagatcttttagttgacagggcacttaatgatgaatcagaaaaggttcgtgcatttgttgtttcttatattgatgatgaatatttcttattttacattgtaagcaatgataaaagcatcaaagttcaattatctgccattgatggaataaaaagaaatgagctattggccaaaatatttatcaaaagcaagaatcatcatgtatatagaaaagccatttcccggataagatatgaatatattcttttaaaattggtttgtttgaagaattattatggggagctttggcctaaaaggcaaatggctgaagctagaatggaagaattaggatttaagtctcctttaataaagaaagaggataatagaaaaaataaattcttcaggcctatatttgatataagggattatcaaagagatcttgaacttttagatcgtttggataaggaatataaaaatcgtagtaataattcagatgattctgatggttcttccgatgattttcaatttaaacgaattgttttttaa

SEQ ID NO: 1293 - DNA, 462 bp, Methanobrevibacter ruminantium
  source 1..462: mol_type = genomic DNA
atgaaattaatgtttgtttgtactggaaacacttgtagaagtgttatggcagaatatttatttaaaaccatgattagtggagatatagaaatatcctccgcagggattatggcaaaagacggcagttccccttcattgaatactattgatgtctgcaaaaagcatggtttggatgtatctaatcataaggccactaatgttaagaggtcaaatatcaaggatatggatttggtattgactttagaggagtctcatagaaacaccttattgaatatgtatcctaatctttccatctatacaatcaaggaatttaatgatgttgattatgtttatgatatagaagacccttataatcaaagtttggaggtttatgaagccactttcaatgaaatcaaggagtctttagaaaagattgatccagataagcttttaagctatggctttaatgtagaaaaggattaa

SEQ ID NO: 1294 - DNA, 381 bp, Methanobrevibacter ruminantium
  source 1..381: mol_type = genomic DNA
atgattatggacaatatgtggattgaagcattaaaaaacaaatatagatttgaattcaagggtctaatcaatgttgaagacttattcgatttaaagttagaggaccttgactacatctataagaatttaaaaagagacgaaaatgacttacaagttgattctctattagatgctaataaaaatcctttaaaaggagaattagactgcaagatcaatattgtaaaaagcattttccaaatgaaagtcgctgagattgaaaaagcaaaaattgctatggctaataaggctcaaaaggaaaagatcttagcaattattgaaaacaaacaagatcaagaattatctgaaaaatctattgaagaattaagaaaaaatctacgatga

SEQ ID NO: 1295 - DNA, 2013 bp, Methanobrevibacter ruminantium
  source 1..2013: mol_type = genomic DNA
atgcgtgacagattattcaatcattttaatgaaaatatggcaccaagaaaattatttattgtagaccgtgattgggaagaactatggaacatgtatctagacggatttccaagagaaatgaacccaatctatcgtgaaagaagagaactggattgtagtgcatgccgcagcttttttaaaagaatggcaaatgttgtagcacttgatgaagacactggtgattttatttcattatttgctggtgaaaccaatggagaaaaagaagtattccgtgctttagacgaatatgtcaaatccgcaaagattaaggacgtatttatgagcgacactcaaagggtaggaatcgaaagcaatcatgaaatgcttgatagcggaagcgtccatacttggtaccatttctatgtggatgtgccaagtgaatatgttggaaacttaagccagaaggcaatctatagaaataacagaattgtcctagaaaacagtacccaaagaatctctcaagatgctgtagacactgtattagagcttatcgcatctaacagcctatatcgtggagaccaatgggaagacgctttaaaaagttttaaggactacttaaaggaatatgaagcaaacgacatggatgaagatttattctactggattaaaagcattgagcttggatcattacttgttagaatcaaaaaccacagtattggagttcttttaatggacgtaacccaaggagtgccattagatgaagctgtctcaaactatgaaagaattgtagcacctaccaattatcaaagaccaaagccaatcttttctaaaagaatgctagaggacgcacaagagaagatcaatgaattaggttttggagagtcaatctacagacgctatgctaatatggcagacttaagcattaatgatgttctatttgcaaacagggattacaccagtgagattcaagacaatcagaatttctttgacaagctaaaagagctaactgttaacagggctcgtaactttgataaggttcaggagatctcactagaggactttgttgaaagcatccttcctactgctcttgaagttgaactatacctatcatatgacttaagcaataatttcatgtctttaatcgcaccggtcaatagggacgctccatcaatgtttaaatgggacaatcctttcagctgggcttataaaaacaacattgcagacagccttatgaaagagagagtaaaggctttaggtggagacgttgatgtagatttaagatttaccatccaatggaatgacaatgaatgggacaaaaacgatttagacgctcattgtaccactcctgaaggggaggaaatctacttcagccatatgagaagctcaaaaaccggaggatggctggatgttgatatcatcaaccctgaaaagaatgtacctgctgttgaaaacattcaatttaaagacagaaatcagatgattcctggagattacctattccgtgtccatcaatacacctaccgtggtggagatgacggatttaaggcagagattgaatttgacggaaggatctttaacttcatctatccaatgagactgtatcaaaatgaatatgtcgatgttgcaaaagtgagcttaggtgaggatggaaacttcactttaaatagctttttagacaatcaaaccgctagcgctaaagaatggaacttaaactacaacagattcgttccagtaagcctgatttgctacagccctaactactggggagacaatgctgtaggtaataagcatatcttctttatcctaaaggactgtttaaatgacggaagaccaaacccatggtttaacgaatacttagttagcgaattaagggaccatcgtaaggtaactgaagctttagcaactattgcaaaagtggaagagtctgatgagcagctaagcggtattggtttctcattcactcaaaagaataaggtcactttaaaggtcaaatctgaaaacattgaaagagtgtttaatgttgttattggatag

SEQ ID NO: 1296 - DNA, 1185 bp, Methanobrevibacter ruminantium
  source 1..1185: mol_type = genomic DNA
atgggaactttaccattaggaaacgataatgatttagatgattcacagttttacaatagagcagaagaaatttcatttatttctgagaatttagaattaactaaaaagggatccaccccaacaatactccttacaggcattagaggcgtaggaaaaactgcattgatgaaaaaattaaaaaaagatttccaaaaagatggatatatagttgtttatatggaattatctggaatgaataaatataaaaaagattccctagaccgcttttgttttatgaaattattctatgaatccattataaatgcatacaaggaatcaaatatcttatccataaatacgcaaatcttgaaatacataaaaacccgtaatttcaaaatagacaaaatatcatcatttgaaaaaattccaattccaatcatcacaacggaagaggactattccaaatttgcaggttttgtaatggatttgcctcaaatgatatatgatgattttaaagacgagataaatggagttttaatatttatggatgaatttcaaatcttaaaacaactcgatgaagatgtgaatgggttcttatggtacatcagaagcattattcaatcacaaaaaaacataggttatatattctcaggaagcatgagccttaaagatgatttgattgcagacattgcaggtcaaaaaggtgcctttggcgggagaatattgaattatgaaataaaaagattttcttatgaaacaacaaaaaactatttgaatgaaaaggcagattatcttaattttacagaagagggttttgaaagattttaccattgcaccaaaggcaatctatattatgtaaatagttttgcaagattgctccctccaaatatagaattaaatgaagaaaaggtaaactctgaatttgacaagtccctgccttatttggtaattcatttatcaagcgaatggtataaattaagcaatcaagaacaaagaatcgtcattgccctaatcgaaggaccattaaaaagaattgaaatagcaaataaattacaagtaactagcggtgcaattggcagttccttaaaaacactgcagaataaaatgttgattgaaatggataataataaatatcagatatatgattccattttcaaagcctggctaaaaaaggaatatagggaaaagggagattatcccttttaa

SEQ ID NO: 1297 - DNA, 4440 bp, Methanobrevibacter ruminantium
  source 1..4440: mol_type = genomic DNA
atgggttttttcgataagttgaaaaatgcacttgaatcaggaaataaatctcatgataagagggaatctcaaaagaatgaagcgatttcagataatccaagaggagattctctttcagataataaaaataggaattctcttccagataatcaaaatagaaattcttcagataacaataatgttcgaaatttcaaatatctggatgatctaatccatagcggccaaaaggatattgttctggattgcgatattgttctagctgatagtgaaattgaatcttacaaaagaggaatagatatcggcgggagtaatataacccttgatgggaatggacatgtggtggatggaagaaataaggcggaaatatttaaggtttcatctaaaaaccttgccattaaaaatcttagaattgaaaatggatatagtgagcttgattcaatcatagatgtgttttcaaaaggcgagttgcatttatccaattgcagcttttttaaaaattccaatgagtcccataggatatttggcgataatctggtttgtataggaagcataatacgaaatatgggggagctgaccattcaccattgccatataagaaacaactcttccaggggacagggaggaaccattaaaaatactggaacccttaatatatccgattcaatttttgaatataatctctctttagaggacgggggagcaatctttaatgaaggtttgctcaagctttcagactcaagatttgaattcaatcactccaataaacggggaggtgcaatccacaatgaattcaatggagagacaattattgaaaatagctcctttgataaaaatggaggccgcaaatcagctaatgacatttcaaacagattcaatcttgttttaaaggatatgcattcagatttgaaaatagataatgaatggactgtttttattgaaaagggaaaatcctttgatattgataataagggaggtataatcgaatttgctccattaaataatgatgagaaaagttttactttcctaaaggaattattggatggaaatgactcccaaatagatttgatgcatgatataaagttagacatagccaatgacgagcaattgtactttccagatggaataaactttaatcgggacaatctcatttttaatggaaatggccatactattgatgcattaagaatgagaaacattttcaccttggcaggtaatgatattatatttagaaacgttaatttggaaaatggattctcaaaactctccaatggtgctgcaataagcatgaaagaaggatttcttaaaatatatgaagtggagtttagggataatgcagcatataatggaggtgcaatctcaattaaggatgcatcggtttcaattgacagttcaatatttaggcataacgctgcaaatgccataaaatttgaaactggaggaggtgcaatatataatgaaaatggctccctttccataatcgataccctatttataagtaattcatctctttggggagaaggtggagctattttaaataagagcggtgcattgtcattgaataactgtgatttcactgataatcgttctgtaaaaaatggtaatgatataagcaattatgatagcttaagaatctgcaaatgcagttttgaaagtgataaagctaataattccaattcagatagtggtgaaataactaattccaatttaggcagtaaaataaacaattccaattcagacagtggtgaaattagcattttcaataataacctctccaagttatatgattccaatttcaaccattcaatcatcataaacaagggccttttaaagatagataaggacttcccaatcaaaagtgcccaaataaaaaattccggaaagctaaaggcttataactttaatgataagcaaattgaaggcattgatataaataatgaggatggaggcaagctggtttttgtaatagatggggtggaagttttaaatacagtggaaattagccaaaagtggattgaaattaagatatttataagctccacctttaaggatatgcattccgaaagggattatctcattactgaagtcttccctgagctaagcaaatggtgtaaggaaaggaggatattgcttactgaagtggatttgagatggggtatcacacgtgaggatagcagatcaggcaattcaataaatatctgcctccagtatattgataagtgcaggcctttctttatatgcttccttggacagcgcagaggtcgaattccagaaaaaggagaaagaaaggttactgaagaaacatttataaatttcccaaaggtttcaaatcttgttggacatctgtcagttaccgaaatggagatagagcatgccacaacattgcctttattcaagcttttggaaaatgattttgataatgagcatgcaaaaagggcactgttcttcttgcgtgagaacccatttgaagatgtagatctctcccctgcccaaagggacatctatttgaatagaaagcctgaagatgatgagaagctttcccaactgaaggacttgataagggagaaatgcatattctttgattattcctgcatttgggatgagaatatggagctttatgaattgtcatcctcaaagggagggctcactgatttcacctgtaatggcagacccctttccgaggtcattatcgccgaggttaaaaagcagattgaaaatgagtttccagattataagcctgttaaaacagatgatatcttcctagatgatgcaatgcttcagaacttggagataatgtccatatcacacgattttgtaggaaagcaaaaggaaatcgattatattaatgaattcatcgaatcagacaatgaaagattgcttctagttaagggagcagagggcattggtaaaaacacccttctttctagggtacatgccctattgaatgaaaagggaatatcttcaataatgaggatatcaaatgcaacagcaaaaagcaattcctcttccaatttgtccttaagcattggaagtgaaataggtcttttcaatggagaggaggcattatataaaggagttaaacatgcccttgatgatgagttccttaagcagttaagcgatagtggagtgagagttctaattatttccaatgcagataagctaaatgaccgtttggtctttaatgagattccagacaatctccatatcatactctcttgcggtgaaagctatgaaattgccattcttcataaggagttgatcattgaaggatttgaagatatctctgaaagggagcaattaatcaacgaataccttaatcatatcctaaagaacttgaatcaggcacagaaggaattgataatatcaaatcccgcttcaaagtctccattattccttaagatactcttgaatgagcttaaaaacttcggttcctatgagaatttagttgaaaagattgaaggattcggagattccacattaagcgcttttgaggaactgcttcgcgcacttgaaaatgatgcaagctttgcaaatggctttgctagagacacattgcttttgctcatctattcaaaacatgggttgaatgaagaggaattggtctttgggcttgaatcattaagccatattgatgcaagatcaaagctaaggctattcctctatagaatgggcgattatatccttgccattgaggataggtacttcatcaagtttgatgagtttaaaaaggctatccttggcttatatggtgattgtgagcaaaggataagggaaatattggttgaaatatataagaataacattctaaaatctccagattcacttgcaaacggaagcgatgagatattgtataatctagaactcctaaaggattatgatggaataatgaatgttttaaatgatgatagattgattaacggcattcatcctagttgcattttccttggatataaatatggaaagttctatggacctagcaaagagtatttgggctttacaatgatagactctaaagataagtttgagttctttagccaaattgcgttagtccttgctaaaaagagtgccgattcattgaagtatgcaatgaaagcatatcctcaccctcacactcaatggccgcgtaaattcagaaatgagaatgacagcgagagctttatgaaatatcaggatgccttttatgccattcctatgtttatagaagctgcctgcagatatgccaataaggcaattaaggatgaagaggatttggataaattaagggagtttaaatctgaatttgataaaaggataaatggtgtagactcatttttgaattatatgtctaattttggcagcagtcaattggatttgggatataaggttgaagccttggcagatgatgcaatattttcattggataatttaaacgagtattataatggtggggttagtgaaaagtag

SEQ ID NO: 1298 - DNA, 2196 bp, Methanobrevibacter ruminantium
  source 1..2196: mol_type = genomic DNA
atgtcaagaagagacaaaatgattgcaaagataaaggaattgatgtacaagccagaatacatcagaaacataggaatatgtgcacatattgatcacggtaaaacaaccttatcagataacttgcttgcaggtgctggattgatctccgaggatttggctggagaggcacttggtatggacactaaaaaggacgaacaggaacgtggaattaccattgacgctgcaaacgcttctatggtacaggaatatgagggagaacaatacctcattaaccttattgacactccaggtcacgttgactttggaggggacgttacccgtgcaatgagggctgtagacggtgccgttgtagtggtatgtgctgtagacggtgttatgcctcagactgaaacagttcttaagcaggctttaagggaaaacgtaaagccagttctattcatcaacaaggtagacaggcttatcaatgaattgaaattaggtccagaagagctattgaagcaacttacaagcattatcgttgaagtcaatgcattaatcaagtcattggcccctaaggataagaaaaatgaatggatggtaaatgtagaggaaggaagtgtagctttcggttctgcattcaagaattgggctatcaacattccaaagatgcaggagacaaaatttacctttaaggacattatagattactgcaatgaaggcaaggaagacgaattgaagcagctcttgccattgactgaagtcctgttgaatatggtagttaaacacttgccttcacctaatgtggctcaagtctacagggttcctaagatttgggatggcgatattgagtctgaagttggccagaccatgataaagatgtctccagatggtcctttagccggaatgattaccaatgtggctgtagataagcatgcgggaatcgttgcaacatgcagaatctatggaggaaccttggagaagtctagcgaaatatatctggtaggttcccacggcaaggcaagagtccagcaggctggaatctttatgggtgctgaaaccatcgatacaggtaaggttccagttggaaacattgcttacttgacaggtgtaaagggagcaagcgcaggtgagaccatctgttctgcagattgtatcatcgatgagtttgagcctatcgaccacatttcagagcctgtagttactgtagctgtagaggctaaaaacaccaaggatcttcctaaattgattgaggtcttaagacaggtctctaaggaagaccctacaatcaaggtggaaatcaatgagaccactggagagcaattgatttcaggtatgggagagcttcacttggaagttgtaacaaacagaataattaatgacaagaaattggaaattcttgtttcagagcctatcatcgtatacaaggaaagcgtattaggtcattctccagtcattgaaggtaaatcacctaacaagcataacaggttctatattgacgttcagcctttagacaagcctctttatgatgccttgattgaaggagacttgaaggaaggcagaattaaaaccaaggaaactgctcaagacttcattgagcttggaatggataaggaagaggcaagaagggtatgggatgtctacaacaggtccatgtttatcaatatgaccagaggtatccaatacttggatgaagtaaaggagctattgcttgaaggttttgaagcagccttaaaggacggtcctttggcaaatgaggaagctgtaggattgaagttcatcctctcagacgctaagcttcacgaggatgcagttcacagaggtccggctcaagttcttcctgctatcaagaaagcgatttacgcttcaataatgtctgcaaacccatgtctattggagcctattcaaaaggttttcatttcagctccattagagtatatgggcaattgtaataaggacattcaaaacagaagaggtagaatcattggtcaggagacaaaaggagtcattgcagagatggactttgaagttcctattgcaaagatgttcggatttgcaggagacataagatctgcaacaggaggtaaaggtgacttctcaacagaaatgaaaggatttgaaaccttgccaatctatctccaggatgatattgtaagacaaatccgtacaagaaagggtctttcaccagagccttatggtccagaacactattctgcatag

SEQ ID NO: 1299 - DNA, 1986 bp, Methanobrevibacter ruminantium
  source 1..1986: mol_type = genomic DNA
atgactattcctgtaatgtatgatttggatgaggaacgtttaagagccttaaataaagatgaaaagaaggaagataggcttttttcaatcagccttctaaatcctttttatcctcttgactctttagtaactgatgaagaggaggatttagacattcgcatagctgctttagactgtcttgatctatttggagtcacattataccatattgatattgacagcgttccaaaggagcttgctttagctgttatagaaatgcttgacgatgggtctaagctaaaagaaatagctttaaaccataatgatattgattatcgtattaaagcattggaaaacaaacatctaactgatgaagatgccttaaaatacataattgaaaatgaatcagcccccaaattgcgctctcttgcagcttgtcacccttgcttaaatgacagcaaatttttagaaggccttgcattgaatgatgatgatgaagatgtccgtgccgctgcagtttctaactattctacaaagggtgtggatgttttaaagaaagtcattagtgatgatgaggatattgttcgcattcctgctttaaagaacttggtttttaaatataatcttttcaatccttccttaaataagaaatttaactttaaaaagaaatttcatgacatgtcttggcatatgattagctctatcgatgattatgtccctaaggaaatggataatgatgagggaataagggatctgattgactttgagctattggatcagatttatatttcttcagctaatgaatgctataatgaattgatagataagcttaaaatcttttttgaaaaggccctttaccattatgagattcataatccatttgatgagagtaaattagagaatgattcctataggaaaaaaatgtatgacaagctaaagcttgcagaaggtgaccaaaggagcttttatctctatcaaatggcatatgatggaggacatgcttatttgaacttttatttggactatctaaatggtttggattatgattcttatttgggagattctgatagttctaatgaagattcggatttaaaaaaactgtttaatgagtctaatgattcctactctttagataaggagattgaagagtcttacttcattgatttggcatatgccgattccaattgtgaaatggttagattggctattgaagcaatatctgacaattctgtattgtttgactttgcaaagaatggaaaaacaagtgatattcgaaaaactgcaatcaaaagattgactgattcagcatatctactagatttagctgtcaatcaaatcgataaggatattagggaagctaatttctatgatgatgattggatatgcgattatatctctgataattcaaatgattactttgatatctttaatacttatgacttttacagtcatgacctagagcattacgagcgtctatttgacaataggctggattccttttattatgaaaaggtagcttggaactattatagaaacaccatttcattttgtcttcttgaaaggatagacaactatctggatttggtttatgctataaaaaacactcgaagctttgttttaagggacttggtgatttataagattgaaaatccattgtttctaacagatattgcattaaatgcaatcgatgaacgcattcgctatactgcattcggcagaatagagtcaaaggcattcttaaagtatgtctatttgaacagcaatgattttagaataaaattattatatctttctaaaacaactgataatgctattctggaagaggccttcctaaatgaggaaaatgatgtattaaggaagtacgttttggataattccaattttaaaatcagtccaaaggtgattgagcactgtattaatgaagagtctgttatttccgattatgcagagaataagtttgcagagcagtttgttaattacaggctgatggataagaaatttttatag

SEQ ID NO: 1300 - DNA, 372 bp, Methanobrevibacter ruminantium
  source 1..372: mol_type = genomic DNA
atgggatttataatgattattaataaactatttaatatgaatgaagataatgaaatttatttagtaattatacttgtattagctcctttaatcttttctatcattgattttacaagctgtttagtagatcatggagtaataacatggtttaactgctatacatttaagacatatatttgttttattccaatattgcttatttgttctattatagccaaagtgatttggagagagaaaagccttaaagatgtccttgagatagcatttgctcctttgtttttctggctaattgaaataggatttgcattgtttgtcagtttattcattggagtatttattgatatgattatagggatagaagctatggtttga

SEQ ID NO: 1301 - DNA, 477 bp, Methanobrevibacter ruminantium
  source 1..477: mol_type = genomic DNA
atggctaattggtgtgaaaacaaattaacagtaaaaggaacaagtgaagaattagtaaaacttatagaagaacatgtaattgatggagaattgtcctataagacatttgcaacagaacatagattattcggtgaaaatcattttgaccttgatgagatcttaaatgaaagaataagcgaaatagtcttttggttttcaacaaaatggtcacctgtccctgcagagaaagtttgtgaagagataaatcagacttatcccacccttaaggcagaattatcattcttttcagcagaaagcggattttggggacaatatagcgactatggcggtgaggagtattatgaactaaaagaagaggatattgaaaaaacaagtgaggaattttttaaatttggacttgaagaaggctttttagaaaaaacagaaagtggaaaatacgccttcacccatgatgtccctacttttagattattatga

SEQ ID NO: 1302 - DNA, 4764 bp, Methanobrevibacter ruminantium
  source 1..4764: mol_type = genomic DNA
gtgagccttatggaatggaaatatgcaactatatttataagcagcagtttcatagacatgcatgcagaaagggactaccttatcaaaaaggtcttcccagagctagaggagtggtgcgaagagcacaagatacacttatcaaacattgacttaagatggggagttccagaagaaatctccaacaacaaaagcacaatcgaaaagtgcctaatcaatattgacgaaagccgtccattcttcttatgtttcctcgctcaaaggaggggatggattccagatttcgctgaagacatcagcgatgacactttcaaaagatatgaggagattgcagcctatagcggtctttcagccactgaaatggaaattgagcatgcattgctttcaccgttaaaagactttttaaatgatgacgatgagcttccagagaatctacgtacaagacattccctattcttcataagggacaagtcctcattggatgaaatcacagacgctcaaaagagggtatatacaaattacggtttggtagatgctgaacatggagagtttatccctggagaatatgacagcgaaggcaattgcataagggaacctaagataatagatgacttgtccttaaaaaccaaggaaatcatcgaagatgccgacaattcctctcaaaagattgttgatagaataatcaaaatgaaaggggactgtgatcttccagaggatgaaaagaaggttcacattgaaataacaaagtacactggggattggaacaggaacttgaagattccagaaattgaggctctcaccaataaggataaggacgatccagagaaaaaggtccgccgttacaatgactatgaatggatgggcaggctaagtaattttaaagaggttaaagaggattataaggatataagtctaatcaagaaatctgaaaatatagaatctaaaatcggcaggccacttaaggatgtcataatcgaacagatgaagagacagttggaattggaattcccagaaaactttaaggaggatgaggacctaaccgaagaggaaagaatcctccagaatgagttgaatcaacaggataactttgcatatcttaacagccaaggctatattccaatcaaaaaggacacagacatattaagcaaatacattgaagacgccgatgaaagcaggatatgtcttgtatcctctgaggcaggtttcggtaagactatgcttcttgcaaacttggccattcaacttgagaagaaatatacaaataaatatgatgagacaaggccaaaccaaaaggctatctataagagattctgtggagcttccaatttaagttcaaaggcattctctctatgggatacaatcattcaagaagcaggtttgacagaggatgatgatttcaagattccaaagaatttggatgagctaaagaaatccatagataagattcttgataaaatttcccagaagggagagtctgtaatcataatcgatgcagtcaatcagatgcctgacggcttagagatgctaaaatggctccctgcacctgaatcatctaatctaaagataataatatcatgtaaggaagataatgaagataaggaactatgcctcgaaagcttaaaattcataaaggatagaaatgcaatctgcccttactttgaggacggtcatgaggatgagcttggaggagaatataagaactatagctttgagcttaaggccttggaggattgtaagaacgaaaagactaagataatcaatgcatatcttaaaaactacttgaaggagctttctaataaggatattgaaaccatatgtagtttcgatgcatctaaaaaccctcttttcctaaaggtattgttggccgagcttagggtatttgcctcatttgaaaagctaagggatgagattcaagagtttattaaggatgagtttgcagatgaatctaaattgacttctgaagattcttctaatcattctgatgattctgaaggctctaaaaagcaatctcaaggttctccaaagacagcattcaaccatgttttggaaagattggagcatgacgaggaccttgttgaaggtgaagctcttgttcctttaatctttgcactgcttgcaaatgcaagggtgggattgtccagggatgaaatggcttccataataaaggccgcaaagcctgatttggatgatgaatacatcagagatacaataaaccttaacctaaggcaagtgaagccattcatggcaagaaaggaaggaagggacgacttcttctatgaaagcttcaaactagctgcacaagaaaggtatgctcctaaaaacattccaaagaatgagcgtttgaatgaatactttaaggataaggaagattctgataagttaatcaatgtcaatgccttgcttgcagattatttcttaaaagatgctttaggtcaagattcggcggattctaatgataaaaccctagacttaagtactatagatggtttcaactttaaaggggaaaatatccgctcatataatgagcttccataccatgcaaacgagtcaagagactttgacagattgaaagatatattgtcttcatactcattcattaaaaacaagatcaatctaagcgacatcaacaatcttattgttgattatcagttcaaggactttgaagatgcccaacatccattcataaaggatgaggaggaccattcaatagtcctgataggtcgggcattggaactctctgctcctatcctctctgatgataagtctgagcttcctgcccaattatatggaaggatggttgacttaagggatgatgaagtgataagtccacttatagatgaaattgaggctgattatgagatggtcttaaagccaaaatccaattccctttactctccaaagagctcaatcataaaaaggccaaaggtgaatggaacaaaatccacatcaagcattgaaataaccgatgataaattgcttatctctgcaaatgaggatggaacattaaacctctttgaccttgaaagcaatgacttggagattcttgaagagcctcatgattctaaggtaatcagaataataccaacagatgaaggccaaaatatgctgatggcatcaagcaatggccaaatcaataaatgggacataaacaatcgttcaatcttcaaggatgacgataacatttatccaaaaataaatgccaatatcacagacatctatctctctggaacatataataagatttatgcatcttcccatgagggaatattcacaatagacctggatacaaaagagctatgtgaagaaaaagagatagagcataagaaatataatcaaatccttgttccaagaagaaacgaggcaatccttgtctgtgacgagaaggaggttgacggctgggatgtctatgaaaagagaaaggcatataacaggcagcatcagcaaaatcctgcaggagaggaaagctccacccaattggattcatcagaggaaataaggtttatgggacttaataagagattccttaccttgatttctgaaaacggacagatgaagttctggaacacccttaaaaactctggcggtggagaaagcattgatgaggcacaggtatgcagccctcacgacaagttcgcccaagctatcacattagagaaggaggaccagataataaccatttcagatatgggagtgctaagggtctggaacattccaaggccaaggcagcctaagtttgaaatagctaaaatcgaaggctcagacattcctatggacattcagacaggtattaagtcacctacagctattgactatttcactgatggtgatgagagatgggtcattgtagctaatgagaacaatgacataagcgtaatcgacctgaataagaaagtggaagccaataaggaaactaaacatagtgagtctgtattgtcaataaaaatagatggaaatcatatgattacagcttcagataatggtgaaatatttgcttgggatttaaataaggaagaatgcattaataaatttgcaagtgaattcagagtcaattctatttcatatgatagggacaagtcacaattgctcttatcaggtgtaaagaaggagaaagacggcaataagatatataagatagctagccgtgacgctacagatatgtgggagcctattaaggtccaagatgatggaagcgattctaaaaagtccaaaaagcttattgacttaaatgctgatgatagggacaatcctaatcctgtcattgatattgctcaaatcagtgatggaatggtattcattgaagagaaaaagatttccatgcctgattatgaggcaggctttgataaaaaggctacaagcttagctactcaattcgactccaatctagcatttgtaggatttgaagacggaagcattagttcatatccaagagaaacagaatttgatgcaggaatcaattctccagttgttaaaattagagtaagtggcgatagattagtcgcaggatttaaggatggatctgttgtgatatttgacttaagcggtacaaaaacagcaagctttaaggctcatgataaggccataacaaatatctatcttgatgagtccagattaatcactatttcagaagacaagacattaaaattctggaagaatgatgagtgcacttatacttacttcttagacatatttgcaacatctgtcagtgttaatgatggcaaattgattcttggtgacactttaggtaatttaaggttctttgaattgtag

SEQ ID NO: 1303 - DNA, 2286 bp, Methanobrevibacter ruminantium
  source 1..2286: mol_type = genomic DNA
atgatgagacaaattagacgaaatacaattgattttgcaattgatctaggaacaagcgactctgtaatagcttgttttaacggtcaagagtctgagattataaaaaatcactctacaggtgaggaccatactccatctgctgtttatatagacagtttaggtgaaatccacgttggcaggattgcaaaggaagctgtcttaaaatgtccttctaatgccacaagtgaatttaagctcaatatgggctttccaattccatttttatttgaaagctcacagattaagatgtatccagagcaactgtctgcggaacttctaaaggatttaagaaaatccatctatcaccaaacaaaccaaaacattgaagagattgtgataacagttcctgccaattcaaatccccttaagacaaaggcaactaaagaggctgcagagctagctggattcaaatcagtttatcttattttagagcctgttgcagcagccatcgcctatggattaagggcaaaaaaagaggatactggtatttggatgatctatgatttagggggaggaacatttgatgtgtcccttgttaaggcaaatgggcaggagatagagaagcttgcaacaagcggtgaagacaatttaggtggaaagctctttgattggaagattgtagatgactatttcactccaaagatcattgatgacttgaatctgactgactttagaagggacaatcctaattatcttaaggtattttcaatacttaaaaatgaagctgagaaggctaaaatagctttatctggttctgataatgacattaaagattatgaactttctattgaaaagcttatcgaaataggggacaaatcatatgactttaattatatattaggcaaagaagatttaatgaatataatgaagccatttttaaaaatcacctttaatcattgctatgaggtattggaagaaagcaatctttctattgatgatgttgaaaagatcattcttgttggaggttccacattaagctcaattttaagggacagcctaaaagatgaattcgataggccattggaatatggaattaatcctttgactgtcgttgcacaaggtgcttccatttatgctggaaccatagaaaaacaatttattgaatgtgaaaatcacagatttgctttaattttggattatgaaaagataggttttaaggataatattgatattaacggaaaggtctttgcattggacgagaaatattcatttttggattattcaattgagattacaggctccaatggagaaatcatttatattgaggactctaaaactggaaatcctactgaaaggattgatttagatatagatggcaatttcagacttaatctgaatgtaaaagatagctataatgagtttttaatcaatatctatgacggcaatggggatcttgttgaacttgatgaaaattctccaaattcaattcattataagaaagccttaaatccaggttatcctattttatcttcctcaatcagtctttatcttgatgaggattcttcattgatattaaagaattcagaggacttgattgatcttgacacagaaaatgactttataattgaatattctaaaaggttcaactcttcctatcctattgcatctaagggggatataatcccaatgagcagaaaagagattctacacaccagtaaaataatcaaaaaaggagatggtgacagcttcattaaattttcattctattttggagagcttattctagccaattataataccttattgggacagatagtcatcacaggcaatgatattattgatgatttgcctaaggatagcgagatagaattgaatataaatataaacgagtctaatatgattgattttgaagtatttattccttatttaaggcaaagctttaataattcatttagcttcaataattacaataattataatggttttattgataattatgataatttaaagagcaagcatgatgagattataaaaaaatacaataaaattagggattttgctcgtgatgaagataaaaaagagctttttttaaaaaatggcatttatcaaagcatagagagagtctatgagaatattgaagagatagaggaaaaggagataattgattatcttgatatattggttgatatggctaggtatgataagatagctgtttatccatctttagagtatttgaactatttggatgatgttttagatgaatgcaagttctttttgaccattgcagatgtggagctttctatttaa

SEQ ID NO: 1304 - DNA, 1659 bp, Methanobrevibacter ruminantium
  source 1..1659: mol_type = genomic DNA
gtggttctcttgaattataatcaaacaaaagacatgatagaagattatttccatggccaatatgaggtcttaaagtttttaggggaaggatcattcgctcaagttttcctcgtaaagcaaaacttcctaaacgataaaagagccatgaaaataatcaaagaaccactttcaaataccaaaaatatcgaccatatctttcacgaagtgcaaatagcaagccaactccaccatgagaatatattggatatatatgatgccggacttatcggagatattgcatactttgttttggagtatgtttccggcggagaccttgaggactataggacttcatatcttaaggccaacaggccaattccaatccatatttccttggatataatcaagcaaatccttatggggctaggcacccttcactcttcaaatcctatcatcatccatagggacctaaagacaaagaatatccttatgaattatggtgatgaaaggctgattgttaagatatccgattttggctttgcaagggagctcagttcaaatgcagatgattttgaggtaggtggaaccaagccatatatggctcctgaatgctttaatggagtgttttcaacaagaagcgatgtatatgctgttggagttatattctatcttcttctagcaggtgaatttccttataggctttctgattatgtcattggtgatatagttgatggaaagccatggaagattgatttgaagcctcctagccattttaatcaaaacgttcctaagtttgttgacaagcttgtattgaaggcattggatgtcaatccaaacaaaaggcatattgatgcaaaggactttgaaaatgatttggataaggcaattgaaaaatttaaggaatattcttattataaggagtatttgaatgagcttaaaggacttgaagaactggatgaattagataatttaggaaaattgggagaattaggtgaatttggcgaattaaaggaattggaagaatcttctaggattgctgaattaaaggaatcttctaaattaggggaatctaataaggattctaaagaccaagaccatatcctaaatgacaatattctagaggcattcagattggctaaaacagaggatggattggatgaggcaagttccattcttgaaaaggaagtcttgaaggattatgaaattagaaaaacctatggaaaaactcttaggttatggaaaggggattatcccgatgccaaactaatttcagaggctttcacagttacacttaaaggagaaaattataaattggctattgatcttttaagagaagcctttgcatataatcctatattgaaggacacttacggttactacatagatttatggagtatttttatagatttaaataaaaataaggattttattatatctattaatcgattagagaatcttatggatagaaatgataagataagggatatttataaggattcaatagacacactaaaaagctatgatgaggataggattttgaatgaggcaattgatttggctgataggggtaatttgatagatgcttctaagttattggagctattggtagtttatgatgatgaaataagaaaggattatgcttataaattgtccttgtggaaacaggacttgagtatgtga

SEQ ID NO: 1305 - DNA, 1146 bp, Methanobrevibacter ruminantium
  source 1..1146: mol_type = genomic DNA
atgaagaaaaagttagaatatatacaaactgaaaaaataaaaaacaagaactatgaattttatcgcaacatagaaaataacaaaacagtgatttttagaaaaacaaagtttggaaaaagagagaaagtcaatatcatagattcagatgacttgacagagcagataattaatttatcatacaataaatcttctagaaataaaaaaattcaattcccttatgataaaatctgcaaatttgtttttaaaaacaattttcaagcatgcaatatagtatttaaactaggtatagactttaattattttttagatactgaagtgatcaatcagatttttgaatctacaagatcagacatagtcatttgtgcaaaggaagaaataatatatataatagaattccaaaaggataagcttaaaaagaaagataaaattcggtttggaaattatcagaccaatcttcataattattatcacggccgaaaagtaattgtttttgttattagttttgaccctaatgaagaattgggagacattccctatggatatgataaggaatatgggtttactatgcatgtcaaatcgtttaacgagcttgatgcggaagaaactataaatatcataaataaaagaattagaactagggctaaaataaattttattgatattgttttattgcattttctaccatttatgaagtctcataggtcccaagaagaactattaaggatagctgtggatttgacaaaccaaataaggaccttaaacgaagataagatcttggagttaaaaattacacaaactgtacttgcacaagaaattttaagtgaagaagaatttgaggaattattcaaggtgataaaaatggaagacactggattagttgaagaagttagacagctctattgggaacataaaataagaaatgacatgaatgagctaaatcaaatgagaaacgaactcaacgaaagaagcaaccaactcaacgaaagaagcaaccaactcaacgaaagaagcaacgaactcaaagaagaaggaaaaatagaagttgcaattaatttactaaaactaaaacaaccatttgatttaattgcaaaagctactgaactaagcgaaagcaccatcagaagccttcaaaagacaatattataa

SEQ ID NO: 1306 - DNA, 804 bp, Methanobrevibacter ruminantium
  source 1..804: mol_type = genomic DNA
atgagcgaagaggaaattgactatacagaatttatagactttgaggattccaatctgatttcatttaagctggcagcaatcaacaacaaggtcagattttccatactcgaaatattaagggattttcaaaagctcaacatgaataaggacaagacattcaaaaaagacccttattactctcgcgaacttaatgagattcttttaaagaaatatgatattaatatttcccttcagatgttaggccagcatatgaagcagcttttgacagctggcttgattgaagaggttcctctaaagaaagaggttcctaataagataggtgccagaaacgtcaagggatatatcctaaagcctgatgcctttgaagagctgtttcttgaaatcaacttcctctcagatgagctcttaagtttctttgacttatataagataaaccaaaagttccatgatgaggactactgcatattgaccatattcaatggagcagataagggcaagacatttaaggtccataaggatgatacagtccttattggaagaaaagcagatttctcaaaaggagatcttgcctcatttgcaatacttttagacaatagctatactgcagtgagcaatgtaggcaaacctcatctaaagttattctataaggatgacagttggtgcatattggatgaaggaagtacaaacggtacttttatcggacaaaatgaagttgccactggcagaataactcctttaaagaagaattcatttttaaaattatccagaggtgaaggaggagcagttatttactgttctttctaa

SEQ ID NO: 1307 - DNA, 771 bp, Methanobrevibacter ruminantium
  source 1..771: mol_type = genomic DNA
ttgaatattaggccctcatattcatatgcaagtatcttaaatgtctttatagaagaaaaatacaaagataatctagggtgctttcgaaacactaatttttatgatgtattagatttccaatcagatgattcttctttttactatgatatggcttttttcagcttctattatggggactataagtcatcattctttctaagccaaaaggccatgattttaggtcatgatgagggggacttgaaattattgcgtcttgcagctttcaatgaattgtctccaatcaaaaaactattatttgacagtataaaagaagagttctctaatattatcaaggaagacgatgaggaactgttcttattttatcttgaggacatgcattatttggagattgccttaaatcaaaaggacattaatgttgaagaggactttctaaatcttatttcaaatttatatattcaagtgaaatatatggattatgtggattattatgcaatgatcaatctatatcagttcttttatataaataagttttatagcgaggcattgcttcttataaatgagattctagctcgcaatctaaacgtatttaatttaaatagaaagttagatgtattgtttaatataaatgacattcctggagcatatgacgtctatcaggatataaggctattggatcctaattattttgattcatctccaaatagggaagagatgtatctggaagtgtttaccgaacatttctttaaaaatagtttgggtaagttagaataa

SEQ ID NO: 1308 - DNA, 717 bp, Methanobrevibacter ruminantium
  source 1..717: mol_type = genomic DNA
atgactaatttagaattaaatatcctggatttaagcttaaatgaacttttaagaactgtaaataaaacagaatcaattcttaaagaccaatatgatgaaataaaggaattcagagacattatcttaactgctagaaatttacgctttgataatggaaatgatgcaaccatctttttagcaggttctggcaggtctggttttgtagctaagttctttgctatgagattgatgcatttaggctttcatgtatatgtttttggcgaaactttagttcctcctgttcatgatggagatataatcttattcatatcaaaatcaggtggagagaatgctgtaaccgattcaatcgaatccaccaagcttgaaaacattaaaaagtccaagagttccccttcaaaaaacaatatgatctttgagaatgtaaagattctatcagtttgcggaagctttgactgttacttggctagccactctgatgctaagattgtcattgaagcagaaagggatagaaaatccaccaaagaagagtctgaaagatttgattcattaggatttaactctaatgagcttgtaatcatgggaactggatttgaagactctgcattattgattcttgacgctttagttgtagagatgatgaacaatctaggtctttgcgaagaggacttggaaaacaatcatgagaatattaataggcctaaagtgtctaaaaaataa

SEQ ID NO: 1309 - DNA, 1113 bp, Methanobrevibacter ruminantium
  source 1..1113: mol_type = genomic DNA
atgtttgaattaagtggaaagtacaatacagctaaagtctttgcagacaatatagacaatgacagcgtatctcaaataattcaatttctcaatcagcctatagctaaggaccaatccatccgaatgatgccagatgtccatgcaggaagcaattgtgtaatcggaaccacaatgacaatcacagacaaggcagttccaaaccttgtaggctcagacattggctgcggtatggaaacagtctatcttgacacagatgaaatagatttcaatcgctttgatgagatagtccgcaaatacgtccctcatggctatgacattagggaaaatcctcatccatacataaagaaactaagactcactgaaatgagatgctatttcgatcttgaagcaggaagccaaggcaatttttccttaggaacccttggaggaggaaatcacttcattgaagttggaaaggacaaagaggaaaacttagtccttgtcgtccacacaggaagtagaagaatcggtgcagacgtatgcgaatactatcaaaaccaggcattgaagagctttaaaagaatgcataagactgcaacaaacaaggaactcatatactgtgaaggccaattgtttgaggactatatccatgacatgaagataatgcaggaatttgcaagctggaacaggaaggcaatcatcgaaaccattctcagccattatggaatggactatacagacagctttacaacaattcacaattacatagacacagaccataatcaaatgatcttgcgaaaaggagcggtttcagcttacaaaggagaaaagctattgattccaattaatatgagagaaggttccttaatctgtaagggaaaagggaataaggattggaattgctctgctccacatggtgcgggaaggctgatgagcagaagagaggcaaaggacaagatctctttaaaagaatatgaaaatgcaatgaaaggaatttttacaaattcagtaaacagaggaaccattgatgagtctccaatggcttataagccaattgaagccattgtaaacaatattcaagacactgttgaaattattgatattattaagcctgtttataactttaaggcttaa

SEQ ID NO: 1310 - DNA, 735 bp, Methanobrevibacter ruminantium
  source 1..735: mol_type = genomic DNA
gtggaagttgaaggggataaaatgaatttcaaggaatttgaagaattaataaatagcggagtaaaggagatttctctaaatgaagatataagtttggaggataagacacaagcgcctattgaaatcaagacagatggcttggtcattgatggaaaaaaccatatcatcgatggaaataacaagcttccaatattatatataaaagcctctaatatcactttaaaaaacatcatatttaaaaacggattctcagaggactatagcggtgccataactaactattccaatgacttaaaggtagagcactgccaattcatagataactctacagaaaatgcaggtgacttgtatgggggagccatctacaatggagaaaactctaaattgactgtggaaaagtccatatttaaggaaaatgattcagactttggaggggccatttttattgattcagattcaacagtaaagataaataattctgtatttgagctcaacatctctgaattcgatggaggagccatttacaataagggagaattgatcatagacaaatccatattcaatcagaacatggcctttaagggaggagccatctttaatgaaaacagtttgactataaatgattctcattttaaaaacaataaagcaagcgatggaaatgacatacagacagaaaatgaggatatttccatatcaaactctctttgtgagtttataaataatgataactattga

SEQ ID NO: 1311 - DNA, 1113 bp, Methanobrevibacter ruminantium
  source 1..1113: mol_type = genomic DNA
atgaattttacggaatttgaagaattattgggcggcgaagcaaaggagatctctctttatgaggatgtcattttagaaagtgatgaagattacagaagaggcattgaactcaagagagatggcttagtcattgacggcaagggacatgtcattgatgcaatggaaagggcaaaggcattccatattcaaggagataatataactataaaaaaccttaagtttaaaaatgccgtttctcataagggcaatgggggaggagccattgagaatgtgggaaaagaattatccataaaaaattctcattttttcaataattgttcactgggtcctcttggcggcggagctatttgcagctttgaagatatgaatataaatgattgcatatttgaatctaacacttcagtaagatctgatggcggtgcaatatatttggagactttttttaagcctaatgtaactgtcataatgaaaaattgcagctttaaaaataattatgcagatggcgggtttaaggattttggctctaatgccggtgcaatatttaataaaaacgctaatttatatttatttgattgcaattttgaagataatggggtggtgagcgcttatgattcaagcagtgaatcgattcaaaataaaaatggcattataaccatggacaattgctgctttaataccagagagtcccattccatattcaatcttggatttttgttaatcaatagttccagattttatcatcatccggaaaatcttgaaattcaaggttcgattttcaatcgaggctttgtaggattattatatggggaaagaaaccaatataaagtggaattagatggaaaggtactggatagctcagatattggtgatttaatcaatgagtataagaagacatacaatctcgatacaaaagaagttggcttcatctttaaaaagaatattattgaatccattaatgatttaagttcggataactttaatttagaggatttcaatttaggcgatattaatttatctgactataaagatgacgaatatttgatggatttattaaaaaataaaattgatttgatttactctggagattttgaagactctgatgaatctatttaa

SEQ ID NO: 1312 - DNA, 411 bp, Methanobrevibacter ruminantium
  source 1..411: mol_type = genomic DNA
atgttatattatcgtggagcaggatgggccgattgggatttggataattttggaagcagaatatcatatattgacgattttccatttaatatcttgaaggctctcttaagctattttgaaacaggtgatgaacagtctgtcgaattcaatgcagaaggatggttttatactttcaagttctcttccgatgtcagagttggtgagagagtgatatatgaaagcactattgattttgcaaatgattttatctgtgaaattgaggaaagaatgggcttatgggctttttttccatcccgaagaacaagtgatgaagactattatgaattggtggatttaatcgtcaaaatcaggacagaactattagataaggatctaataaataaatggattgatataatttcacaatcttaa

SEQ ID NO: 1313 - DNA, 1761 bp, Methanobrevibacter ruminantium
  source 1..1761: mol_type = genomic DNA
atgatgggggattatatgaatacggattatcttaaggaatttgaagagttgaatcacactacagaaagcctatttgatttgggaatctctgggcttttaatcattttaaaggacggaacaaatctgaccagctggagtgagctaagcaatcctgatgatatcttatatctaagtgcagacttccggtgtaaggaaaattacactgaatttagtaattttaaaaatgcaaaggtgcttatcctacagaattatgtccgccccaattttggagtgggcagcttgtttttcaaagaggcagatctaattactaaactgtctacttggcattcattggtggctttctatggaataaactgggacatctccagcactgattctttaaagaatatgtttgccaattgcctttcattggaatatgcatattttgaggattgggacacttcccatattcgtaacttttggggaatgtttgttgcctgctgcagcttaaaggccatagatggaatggagaattgggacttgagctctgcagagaatatggaatccatgtttgagtcctgcatgtccttggaagacatttcattcctatctgactgggacatgtccaatgtggaaaacatctttgaaatgtttagggattgctatagcctaaaggatgcaagctgcttgaattggaaatttaagaatctaaaaaatggtgacaatctatttgccaactgcagaaagcttgaaagctttccaagctggtatgatgatgagttcatcaatcaattcggcatcagaaatcagctaaaccttattgatgacgattcatttttctataagattgcagggggattcgacccccaggacattttcatagcagtaggatatatcagggatgaagaatgcctgaaaagattgcttagagattcctctgtccatttttatgcaagaagggccgctcttttaaatccaaacttaaatgacacagagattttagaggaatttgcagatagcaaggattatgtggaaagggcctatgcaattgaaaatcctaatttcaccaatattggaatcataagaaggcttgccaataatgataaaagtcatttggtccgcttcaaggcagagaataagttaaaagagcttaaaagtgaaggacttgaaataatagaggattatcctagagagttcaagcaagcctttgaaggtcatgacagagaaagggcatctctagtcttatcccaatggagaggatatgattccacagatgctaattttattctggccaaggttatttcagactcttcagatgaggaaatagaattcagcgaaacctttgaagcctatattatatcaatggaggaaaaaccacaagacccatcattatttaattggtttagttccacagctgtagaatgtatggaaaaaagggtggatgaggatattggattctcccagttgtttaacaatatgtataagtcacatatgaactcaactgattatgcaacggcctttttagactttttccaagatattcttgaaaatgatcgcgtcgaaaagttgaatctgcttaggggtctagttgattcttgggatactgactgtcctgatgacgccaatatgcactgcgcttatgttattttaaatataaaaaagatttctaaagatgaattggaggatagaatagcgaaggctaaagtttgcattccagaaaatttgaattcatatcctaaactgatggcctttatgaatgcagtattggaggcagataaatag

SEQ ID NO: 1314 - DNA, 945 bp, Methanobrevibacter ruminantium
  source 1..945: mol_type = genomic DNA
atggaacttgaagaaagaattgaagaagctttagaatatattcaaaatgatagcaattatgcattggaacttttcaatgggattctaaaggaagacccccataatataaatgctctcaatggcaaagggtcagcccttatgaagctgcatagaaaccaagaggctctagatgcatttaatgactcattatccgttgaagaaaatccttctgcatatctcaataaagggatcatactgaaaatcaatggagactataggaatgcattgaaatcctttgatagggcattgaactataatccccgattggcttccattgtgagtctgctcaaaaacgaaatactggaaatctttgagaaggaatctacggatataagtttgctatatgatttcaatgaaagctgtacagcactgattaaaaaagcttatggctataaaaaccaaggccttctctgggatgctctagactgcttggaggaagccgttaaacaagatccaaaatctgaaaattccataaatgacatcattaaaaaacttattttaaccatcaagaaagaattcttatacaaagaaataaattccaaaagcaccaaaatcgacaaattgaaatttcaaacaattaaaagcataattgttgaagacaatccccataaaacattactgcttacaaataagatatttgaaataaatgaaaatgatttagatgccttaaactatcagggcattgcctattttagcttgggagaatatattaaatcgatagaatcatttgataaatgcttatccattaatcccaattatacttactgctcatttaataaaggactcgttttaagaagaatgggactcttaaacgagtctttagactgttttaataaagtgatgaatgaatctgattttttaaataaggttaagccatttcaagaagaggttttaactaagatatag

SEQ ID NO: 1315 - DNA, 603 bp, Methanobrevibacter ruminantium
  source 1..603: mol_type = genomic DNA
atgaaaacaatagcaaagcctttccagaattcaatagacataaagaaatctcaattcatctgtcgcctttttcctgcacagactgaaaaagaggctaaagatattataaaagagatatctgaagagtataaggatgccacacataactgcactgcttatgttgtaagcgatggggaaggctatgatgataatggagagcctggaggaactgcaggaaggcctatgctgaatgtcctaaagaaaaatgagataaataatgtggttgccattgtcacaagatatttcggtggaatcaagctaggagcaggagggcttgtgagagcatatagcaaatctgttcttgaatgcttggcaattgctgagatagttgaaatggaactttatgaactctttaggttcacttttgaatatcaggacattaaggcaattgatgctgaggttagggccaagaatttggctgtaattgaaaagcagtatgaagcacaggtcatttattttgttgcaacagataatgttggcattgttaaaagcgttcaagataaattggctaaacaggtaaaaatagagcatctaggcagcagatacttggaaaaaatagtttaa

SEQ ID NO: 1316 - DNA, 510 bp, Methanobrevibacter ruminantium
  source 1..510: mol_type = genomic DNA
atggaagatagaaaagcaaaatttatcgtttatgtcgttgtatgcttacttgcttttatctgcagcagcacagtcttctctatgactggcggtctttctgattggattgtatcaaatgtaaacactaatgaggatgccaataacaatggctatatagacagcagcgaaggacaatattattctgactctgacggacaatattattccagttccgactcctatgacaattcaaatggaggctctggatttttagatgggctcttttcaagttcggacaattcagaatcaaactactattcaagctctgatgaagaacctgattttcttgcaaggctcataagggaattcataggtggcagttcaacaacagacagttattatgactcctctgattcaaactactactatgaggacacatcaaatggatatgatcttggaaatggattctcatatgatttaaatgaactctttacaaaaacagacaataagcttaatcagttgtttaattaa

SEQ ID NO: 1317 - DNA, 3513 bp, Methanobrevibacter ruminantium
  source 1..3513: mol_type = genomic DNA
atgatagttttaaacaaaagaaagaaatcttgggaaatatatcctattggaagtcctaaaggagctcttaatacaaaaaggcaggctgagtttgtaggcattctccgctttatggaaggggaggacggattatcaatcaagcgttttctaattaaaagcgataaggaagaaaagcctcttgctccttctaaggcgatcaatttattaagatctcaagctgttttcttggcacaaaaagatgatgaaatggaggcattccttgaaaagaacaatgtcaaggtcagatttacaaacatctgtcagcattgtagttatgaaggatatgtgaccattataaactcagatttttcatataactatcatgatcagctcatctgcaaatcctgtgccgaagagacaatcaagagagagcttcagcttaggggatatgacaagaaggtatttagaaacttcaagaaggtccttgaaaagactggcagcttggatgatgttttagagatgctttcaccaagatttgaccctctcgcccatacagacttgactttatttgacaccataaaggttcatgaggataagatacctaaaatcgcaatgaagcgtcttaaggttccaaaggaatttagggatgttctcctcaaggataaccaatatctcctgccggttcaataccttgcaattagggaaggcctccttaaggatgagaatctcttggttgtttcagctaccggaagcggaaagacattggttggagagcttgcaggggttccaaaggcattgaatggtaagaaattcctctttctgacccctcttgttgcacttgcaaatcaaaagtacagagacttcaagaagagatatgagccacttggccttaaggttgcaatcaaagtggggatgaacagaatcaaagcaaagggagagcttaagcttccagattcaaatattgccgatgcggacattgtggttggaacatatgagggtattgattttctacttagatcaggcaaatcagacctcttgaatgatttaggccttgttttaatagacgagattcatacaatctccgatgaggagagaggtctcagactcaacggacttataaaaagaatcgagcatctctttccaaacacccaagtgattggcctctctgcaactataaaaaatccaaagactttggcacaggactttaacatgaaactggtccagtataaggagcgcccagttcctttagagagacatatcgtttttgttaatggagatgttcaaagaagactgttaatgagaaaattagttcaaagggagttttactcaacatcctcaaagggattcagcggacagacattgatatttaccaattcaagaagaaaaacccataagatagctaatttcctatctggtaagggaataaacgcctccgcttatcatgccggactatcctactttaaaaaggaaaagatagaaaaggacttttcaaagggaaagattgcagcggtggtcaccactgcagctctagctgcaggagtggatttcccggcatcccaagtaatatttgagtcccttttaatgggaaacaaatggatttctccaaatgagttttcacagatgttaggaagagcaggaaggcctagctatcatgacaggggaatcatatatcttgttccagagattggaagtgaattcgacggtgaaagtgaggagtccgtagccctagatcttttagaaagtgatgtggagaatatcattgttgattatacagaagacggatcacttgagcagatacttgcagacatctcatcaaggtctttaactaaagtgagggatgtaatcaatttctataaggatattccagttccaattgatataaatactgcccttgaagaattaagggataaaaaagcgatagagatacatgcagatgatactattgatgtaactcggtttggaaaagcggtggctatgtcattcttgtcaattgatgatggggtaatcattaaggattccattaatgataagaattatttaagccagtattacagcaagccattctttaagaccaatcttagggagcttagaaggttgtccgataggattgatgaggagaatgaggagattcttaatagaaataggaagatacaacataagttggatcagttaaagaagaacgaatctcaaaagaaagaggataaggataaggaagataagactgataagaagaataagaagtctaaaaagaataaatctaagaagtctaaggattctaagaaggataaaggtaaagataattctaagaagtccaagaaatctgaggattctaagaaagataagaaaaataaaaataattctaataaatctaaaaaagataaatctgagaataagaataaatctaataaatctaataaatctaaaaaagataaatctgagaataagaataaatctaataaatctaataaatctaaaaaagataaatctgaaaataagaataaatctaataaatctaataaaaagaacagttctaataaggaatttaaggattctaaaaaagataaaaagtctaagaattctaaagacaataaatctgagagttctaaaaaggataaaaaatccaataaatctaataaatataataaatataataaatctaataaatataataaatctaagaaatctaataaaaataataagaattcaagttcaaagaacaaaaatgataattctaaagattctaataaagataaaactaatcataaagagtctaaatcagaatctaatcaatctaaaaacttagaaaaagacagccatcctatctctaaggactataagaattcaaatgcatctgtctctgatgatttaaaggactattctaaaaaagtaatgtataataaaagaatcaacatgtctaaaaagcagcataaaaccatagaagataagcctattcttgtaaacaagcttaactttaaggaaaatatatttagcgagatcaatccaagaatgtctaaaaaggaagtgaacgctaacaatcttcttaaggtccagtccatagcccttgacttggaattgtttgaaaatgcatatcttgctcctgttgttcataagcagatagtatctgcacttaaagtaaacttttccacaagattgttttcagaatcaacccttgatataatatcctctggtgaagccattgccaaattggatattaagttccaggatgctcttttaaagcttcagatagatttcttaagatgtgactgcaatgacaggccattctgtgaatgtcttcaaaggggaatttcctattatatattgaatcaaagattgaataagagggatcctattgacatttccaaatcacttcttaaggaatatcagattcaagcttatcctggagatattttctcatggctggatgcctatgtgagaaatttggatgctattaaaagagttgcacaggcatatggtaaaaaggacatagttaaagaagcggataaactaataaagataattgaaactggtaaataa

SEQ ID NO: 1318 - DNA, 969 bp, Methanobrevibacter ruminantium
  source 1..969: mol_type = genomic DNA
atgaacatactaatcaatggaactggagctatcggaatagggcttggagcatctatgatttcacaaggtgcaaatgtatctttctttgcaagggaagagactgcaaatgcaataaggaaaaacggaattaaaagaacaggcatattcaatcactattcatttggtccagaatcatttaaagtctacacagattacaaggatattccagataatgagtttgactttgtccttgtatcaagcaaaacaatagctaatgacgatataagcagaaagctaaacgaacacaagtccatcttaaaagaggatgctaaaataatcatatttcaaaacggctttgcaaatgacgaaccatacttaagattctttccaaaggaacaggtctactgtgcaagagtcattacagggtttaaacgcccagaaagatacatcagcgaagtcactgtccatacagaacctatattgcttggttctcttcaaaaggatgatgacggcgagttcattgacagccgcccagtctcaatcatttcaaagatgatcaacgattcaggaattccatctgaaaccactgaagaactggataagttcctatgggctaaaatgctttataactgctcccttaatcctcttggtgccatattgaatgggaattatggaaaactgatggaaaatgaatattccgttaaaataatgaatgagcttattgatgaaatatttgaagtaatcaaggcatcaggatacagaaccaattgggacagcccagaggagtatagggaagtcttctattcaaagcttgttccagacacttataatcacaggtcttccacattacaagacatttccaaaaggcaaaagacagaaatcgatacattaaatggaaaggtcattgaacttggagagaaatatggtgttgatgtaagtgtgaataagacaatttataatattattaaaacaatagagtctgaattttaa

SEQ ID NO: 1319 - DNA, 489 bp, Methanobrevibacter ruminantium
  source 1..489: mol_type = genomic DNA
atgataatagtcactacaatctgtgttatcttaattttgatagttcttttttatggattgttccctggattgacaaacagcaatgataacagtgacaataatctaattattcaaaatcagacttctcattttaccatagatattgaaaacggcacttatttaagcggagaaggcaaatctaaaatggtggattccaattattccacattagaatcctatgagaattttacgatttcaggctatgaggcctatgagatagaacttgacaatggctcttggtatatagtcagtctgtataaggtggattataatactccatctagcgattgggtatataatagtgatgtagatgaggatggaaacgcttatatcttcttcaatagcaaaggagagtattatggctactttattaacattccaagctctagcgatccttccacttttgagaatttaagctttttaactagcattttccattataatcattaa

SEQ ID NO: 1320 - DNA, 243 bp, Methanobrevibacter ruminantium
  source 1..243: mol_type = genomic DNA
atgtctgatgttggtaaaactgtaataacaactattattactttagtaactactgcatttggtttagtcgcaggtttagcatggaacgatgcaattcaaaaattaatcgactctgtaatgggtcctggagacgcacttactggattatttacttatgctgttattgtaaccattcttgcagttgttgtaaccattatacttgctagaatagcagctaaaatgggcgtagaattagaagaataa

SEQ ID NO: 1321 - DNA, 387 bp, Methanobrevibacter ruminantium
  source 1..387: mol_type = genomic DNA
atggaagagatagtatttaagccgatcggatatattaaatccaaatatgaaacagttgaaaacatgcctaaatccccaagggaaggcatggaggatgaggcagagctaatagtcaatgaagagtacttggaaagcatgtctgacatgaaagcaggcaaggagtatatggttatattctatttccataagtcaaacggatttaagcaaagggttccttttagaggtgacggtccaataacaggcttgttctcaacccatgcccctaataggccaaatcctattggagtttcaataataaaagtcaaggaaattaatggaaatgtgatcaaattcaatggtgttgatatgttaaatggcactccagtccttgatataaaagatgcttag

SEQ ID NO: 1322 - DNA, 339 bp, Methanobrevibacter ruminantium
  source 1..339: mol_type = genomic DNA
atgaaaagagtagttgcggtttttcgtcaacaaaagtttgaagatgtaaaaagagcccttcttgcaataggctgtgaaggaatgaccatctccgaagtaaagggaaggggaagacagttaggtgttaaagaatcatataggggctctaactattgcattgaccttattcctaagacacgccttgaattgattgtaaatgaagatgaccttgaagatgttattgacacaatcattgaaagtgcaaggaccggtgaaatcggagacggaaagatctttgtatccgatgtagaggaagttattaggataagaactggtgagagaggttctaaggcggtataa

SEQ ID NO: 1323 - DNA, 1212 bp, Methanobrevibacter ruminantium
  source 1..1212: mol_type = genomic DNA
atggtagtacttagtgcaggagatactgcatgggtgctcattgcaacaatccttgttcttttaatgagcatccctgaagtagctttcttttatagtggtttaacaaaacgtaaaaatgtcttaaatacaatgtttctgacttttattgcattttccatagcaagcataatatgggttgtatatggatacccatttgcctttggagatgtcagtataagcggtttgatagctcaacctgctcatttcttcatgagcggaatcggaattgaagatcttacaggaaccatccctacaatattgtttattgtgttccaattaacctttgccggtcttacagcggcccttatctcaggttcaatcgtcggaaggatgaaggtctcagcatggatagtcttcatcattgcttgggtcacccttgtttatgtaccgattgcccactgggtatggggaggaggattccttatgcagatgggttccctggactttgcaggaggtacagttgtacatattaactctggtgtaacagctcttgcattggcccttgttctcggaagaagaaaagacacttcccttttgccacacaacttaggatattcagttctcggtgcaggattcctttggttcggatggatgggattcaacggaggatctgcccttgcagctaacggacttgcagcatcagctatccttgtatcaaacgttgcagctgcaacagcacttatcacttgggtaattatagatattgtaaaagtcggaaagccaaccatgttaggggcaatcaccggtggagtggctggacttgttgcaatcacccctgcagcaggattcgttgatgttccagcagctattgtcattggttttgtaaccacattcgtatcctactttgcaatctattacttaaagacaagattcggctacgacgatgctttggatgtatttggagttcacggtctttcaggtatttggggagcaattgcaaccggtatatttgcagttccagcagtcggaggtgcagcaggtttgctctatggaaatccaggtcaagtcacaattcaagtaataagtgtaattgtaaccattgtctatgcattcactataagcttcatacttgctaagatccttgataagaccatgggaatcagagttgatgagaaaactgaaatcgaaggacttgatactaaaatacacaaggaatccggttatagattatag

SEQ ID NO: 1324 - DNA, 420 bp, Methanobrevibacter ruminantium
  source 1..420: mol_type = genomic DNA
ttgaaatcagataaacgggctaaatttgccatattcttctcaattgcaatccttgccttgggactgagcaatattgcagctgtatggactggagacttgataagcggttcacttccggtaatcaatgaaacagataagttgattgccttggacaatgacaatttctctccagcaagtttgaatacagtttatgaagaaaaaaaggttgtagaagtagttaatgacacatctgatgcaaacgatactgattccactccgaacaatgcagattccaatacggaaagtgatgatacatcaaattcaaacaataataacaataatcaaaacagcaatggcaacggcaatcaaaatacaaatccaaataacaatgccgagcctagctctggaggatctgcaggtcagacagaaacagaggaatag

SEQ ID NO: 1325 - DNA, 570 bp, Methanobrevibacter ruminantium
  source 1..570: mol_type = genomic DNA
atggaagaaaataaaaaattcgctcaaaaggtaaaagacattagagaaagacaacaaatgagtattgaagaacttgcagaaaaaagcggcgtaaagcttgaagtgcttcaggctatggaaaacggtgaaatcattccttcactcactcctcttacaaagatggcaaaggcccttggagtaaggcttggaaccttccttgacgataccgaacagctcggacctgtagttgtaagggacggcaagatggaaaacaccttatacttctcaggaagggaagacgtcgcaaatgcaacaaatcttgaattccactcattaggtgcaggcaagcatgacaggcatatggatccgttcatgattgacatagaccatgacgacgaatatgaattgtcctcccacgaaggtgaagagttcatctatgttatggaaggagagattgaagtggtatatggccaagacagcattacattatccaaaggagacagcatatactatgattcagtagttcctcatcatttacatgcaaaggctgaaaaggctaaaatattggctgttttatacactccattctag

SEQ ID NO: 1326 - DNA, 1665 bp, Methanobrevibacter ruminantium
  source 1..1665: mol_type = genomic DNA
atgagtgaactatttacagagcttccaattggaaagttctttgaaatgcaagtggaaaagcaaccggatcacgaatttatggtttatccagacagaaatctcagatttacatatgaacaatttaacgaaagggtggacaaccttgcaaaaggcatgctctcaataggcatagaaccgggagaccgtgtaggaatatgggcaaagaacgtccctgaatggcttacattcatgtttgcaacagctaagataggtgctgcaatcgtaaccatcaacactgcataccagtcccacgagcttgaatatgtcctaaagcaatctgaaatgaaagcgattgcaatgactgacggattcagagacacaagctatttcgatatcatctatggccttgtccctgaaataaaggaaagggaaaggggaaaccttaaaagcgaagagttcccttatcttgaatacattatccatgtaggtcaggaaaagcataggggaatgtacaacaccaatgaacttttattacttggaatgaactatgacaatgataagtatcaagagataaaggatgcagttacccaatatgacgttatcaacatgcaatatacaagcggaaccgaaggattccctaaaggagtaatgcttacaagcagaaacatcctaaacgacggctattacattggagaaaatatgaactataccgaaaaggacaggcttctcctccaggtacctcttttccactgtttcggaaccgtgcttggggtaatggctgtaatcacccatggctcaaccatggttgtccttgaggaatacgaccctctccttgcaatatcccccatccaaaaggagaaatgcacatcagtctatggagttcctacaatgtttatcggaatgatgaaccatcctatgtttgacatgtttgacatgtcctcacttagaacaggaatcatggcaggctcaacatgcccagttgaaaccatgaaagatgcaatcaacaagatgaacatgaaggaaatcacaagcgtatacggccttacagaggcaggtcctggatttacccaaacaaatgctgcagactcatttgaaaagaaaatcagcacagtgggaagaaaattccctaatattgaggtaaagattgtagaccctgaaaccggagaggagcttggccctggcgaaaccggagagattatgtgcagaggattcaatgtaatgaaaggatactacaacatgccggaaaagactgctgaaacaatcgagccagacggatggctacactctggagaccttgctacagtggatgaggatggatactactcaattgtaggaagaatcaaggatatgatcatcagagggggggaaaacatatacccaagagagatagaggaatatctattcacccacgaatgcgttcaggatgttcaggtggcaggtatccctgatgaaaaatacggagagattgtaggagctttcataataaaagagcctggatacgatgacattaccgaagcagacataagagacttctgcataggcagcatcgcaagatataaggttcctaaatatgtcttctttgttgatgagttcccacttacaacaagtggtaagattcaaaaatacaagttaggagacattggattaaaactcctggaagagagaagagaaagaggagaattataa

SEQ ID NO: 1327 - DNA, 879 bp, Methanobrevibacter ruminantium
  source 1..879: mol_type = genomic DNA
atgacacttgttttgataggtcctgcatgtgaggatttgattataataggcaatgagaagagctctaggataggaggtgcaagctattttcaaagctttgtctatgaggagttttatgatgactacattgctattgtaaatgctcaaaacactgatttgattaatgaatttccagatatgtctaaaacagaactcattttaaaggacgatacccattattttatcaatgaatatccagataaggacaatcgagatattagaaagcaatccactaattttgcagacattccaattctggctgatgatttaaaagctatttttaacaatttgggattgaatgaggataatatcgatgcctttgtcataaatcctttaaacagcaatgacattcctttagaaactctagagtatttaaacagttttaatttgcctatatttatatcccttcagggatttttgagattcaaggataaagataattccatggttttaaagtcatatgaagatttggattatatttttaatattgctgaagcgatctttttagatgaaaaggaattaaagattgtcagtgatgaagataagtctgattctaaaattgaaattcaagacattggttttgatgaaaaaaccaacactatttttatcattacaaacggaagcaaagggtcaagaatcactgattttaagggcataaacataaagatagattcagtgaaatgtgataatatagtggatgccactggctgtggagatagttatatggctgcatttatttctaatcttctaaatggaaatgatttaaaggactctggtgattttgcatcattgattgcaagtaaaaaattagaattctttggtccttatagaacagattaa

SEQ ID NO: 1328 - DNA, 552 bp, Methanobrevibacter ruminantium
  source 1..552: mol_type = genomic DNA
atgaacatcttaaatctgccacttaatatcctcataggaaatggaatctcattctttgcctcaattgcacttatcctaagctgtgtagtcaatgacaagagagaggcctataaatatcaggtcattgaagcccttatcctaacggtttcatcagccttcttcctctcatggactggcatacttacaatgctcattgcagcggcaagaaactatcttgtcatgaatgagagattaagctccagattggccataatctttatcataataacactgatcatatgtcccctaattaatacaatgggccttatcggacttcttcctatgattggaataatacagcttacaatctgcaactattatcttaagacaatcaaatggataaaggtggcattcattgtaaatgtattgatatatgctgtttacttcattggaatctatgaccttgtatcatgtgcaacccaagtgattacagcaataatcggattcatatctttagtaaagctaatcaaggatgaaaaagagggcaatatagactctcagcccaataattaa

SEQ ID NO: 1329 - DNA, 273 bp, Methanobrevibacter ruminantium
  source 1..273: mol_type = genomic DNA
atgtctgatgatgaattatatagaagagctgaaagaaaagtggatgaaaaaattggattttataagcatttatatagctatattggtgtaaacatacttctttttgccataaatgcaatcacatccttcggcaaatggtggttctattgggtaactatcttttggggaataggcattgtaattcactttttaaaaacatttgtcttgactggaaaacttgaagacaaccgagaggaaatgattcaaaaggaaatggaaaagatgaaaaaataa

SEQ ID NO: 1330 - DNA, 951 bp, Methanobrevibacter ruminantium
  source 1..951: mol_type = genomic DNA
atgaaaagactttttaagctagttgaaaaatatttctttataatcatcataattgcagttgcaattgcagttgtctttccaggctcattcgattgggttatgggagagtttatgggtatcaacatcataaacattctacttggaataatcctttttggaatgggtaccactttgaagatagagaattttgtaaacgtattcaaaaggcctaaggagatattgcttggggtcggcgcccaatatatcatcatgcctcttgttgcaattggggttgccagcctattcggcctcaatgaggcattgacagttggccttgtccttgtgggaacagttccagggggaaccgcttccgatgttatcacattccttgcaaagggggatcttgcactttcagtatcccttactgcagtctctacagtcatatcaccgattcttacccctttaatcactctgattcttattggaaacaatattgcattcaatcctgtggatatgttcatttcaattgttcagattgtaattcttccaatagctattggattgctcttgaattacaagtttccagacttctgtgaggagcttaaggattatctgcctgcagtgtcctctcttgtgattgcaataatcgttgcaggtgtgataggtgcaaataaacaggccattcttggctcatctgtggtgataattgcagcgatcgtggtgcaatacttcatagccatgcttttaggatttgtgataggatatctctctggaatgaaaagaaagcagatggtgaccatagcaatagagcttgccttccagaactcaggattgtctacaagccttgcaaagactcactttccagcattgtcccttgcaactgttccaggagccttgtattcagtatggcaaaactttgcaggttccatacttgcatatatttttagaaaatatttcactgatgaggaatag

SEQ ID NO: 1331 - DNA, 2817 bp, Methanobrevibacter ruminantium
  source 1..2817: mol_type = genomic DNA
atgtctgaaaatagatgttatgatccagattgtgatgctgaggattgccgtaatccccaacattacaattacatttgtttcgaccctgactgcaacgatgagaaatgtttgaacgaagagcattacaataagcagctattaagggattatcaagaaagcactgatttaagtgtttatgatcatagagaagagatagattatgatgaagatgttgatataagtctttgtggatgtcctgattgtgcggatgaccatgaccataatcacgaccatgaccatgatcatcaccatcatcatgaccatgaccataaccatgaacacagtcatgagcatgagcattcttatagtcatgagcatgagcatgagcacagtcatgaacatggccacgagcatggggatgagcatagccacgaacatagtcatgaccatgaccatggccatgatcacgagcatgagcatggggatgagcatagccatgaacatagtcatgaccatgagcatgagtctgaggatacttgtggatgcggttgcgatgatgatgactgccatgatgatttagaagaacatagtcatgagcatgaccatagtcacgaccatcatgaacatgaccatgagcatcatcatgaacatgaacatgaccatcatagccatgagcatgaagatgagcaccatcataatgaagaacattctcatgagcacgaacacagtcatgagcatgatcacgaccatgagcatcatcatgagcacagtcatgaccatgaccatagtcacgaccatcatggacatgaccatagccatcacgaccatgaccatggagactcctgcggatgtggagaggaccacgatgatgacgacttctcattatgtgcatgtcctgactgtgcagatgatgacgatgatgaccatggccaagaggaactcctcgcagagggaaagccactcatatacaacagacctattcaaatcatggtttccagtggaatattgtttatcacaggccatatcctcgaattcctctcattcagcccaacaattgtcacaataatctacatgcttggagcacttatagcaggctatgagatagcaatccttgcatacaagtcccttgtcaagcgtcacactgtcggtcctgcacttcttgtggttatcgcatgtattgcttccttcatcataggccacggtgaagagggtgcagctgtagctctcttgtactatatagcagaattccttgaggaccttgctgagcacagggcaaagcgctcaatcaagtcacttgttgaaatcgctcctgaaaccgctagggtcaaggtaggtgacggtgaagagtcccgcaggattgaagaggttaaagttggagagattgtgcttgtaaaacctggagacaaggttcctttggatggtgaagtggtctatggaacttcatctatcaatcaggcatcaatcacaggtgaaagccttcctgtaacaaaaaccgttggagatgaggtattctcaggtacagtgaacgaagacggataccttgaggttgtggttaccaaggaagctaaggactctgtaatcaataagatagtaacccttgtaaagcgctctcagcttaacaggtcaacaactgaaaccatggttgaaaagatctccaaatattacactccattgatgattataattgcagcctgcgttgcatttgttcctccactcgtctttggtcaggaccttatcgactggatctataaggcactttcaatcatggtaatatcatgtccttgcgcattccttatctccactccaatcggaatggtttcagctatcacatcagcaaccaagaagggtgtcctcatcaagggaagtacctatgtggaagagatgagaaacgtaaaggcagtcatatttgacaagactggaacactcactgagggaaagcttgaattaaacgacatcaacataataaacgacgaatacagcgaagaggagattgtaaggatagccgcatcccttgaaaacagctcatcccaccctattgctcaggcaatcgtaaactatgcaaatgaaaaggaaataggatttgaagagattgaagacttcagaaacgttccaggtaagggaatcataggaaatataggtggaaagcagtattatgcagctaacgaatccttgattgaaggaagccagttcaacatttcccaagaggagataaaccaatactcagcagaaggtaaaaccctgatattcattggagatgagcagtctgtcattgcaagcatcactgtaatggacagaatccgtgacaacgcttcagaagtaattaaagaccttaagagccaaggtgtcaagacattcatgctcacaggtgacaataagattgcagcaggtaaggttgcagatgagataggccttgactatgtctattctaacctccttccagaggacaagctaaacatattggataccctccgaaacaagtttggtgatgtggctatggtaggtgacggaataaacgatgctcctgcattggctagggcaaacataggaatagcaatgggtgctgcaggatctgacgttgcaatcgagactgctgatgttgctctcatgcaggatgacataagcaagcttccatacctattcagtttaagccaaaagacaatgaatataatcaagcagaacatcacccttgccattgtggtaaaggcactctttgtaatccttgcaatattaggattgattaccttgatgatgtctgtaggtataggggaccttggacttaccttggtggttatcttgaactcattcaggatagctatggttaaggatcctttgttttag

SEQ ID NO: 1332 - DNA, 384 bp, Methanobrevibacter ruminantium
  source 1..384: mol_type = genomic DNA
atgaaagattataaggagcctacaaacgacaatcataatgacgatttatgtgaagtgtttcatcctcatgaggaatcaatagagcgtgcaaagaagcatgttctctctgaagaggaatattctgatttggctgaattctttaagatctttggaaatcctacaaggcttaagattatatcccttttaagctttgaggacctatgtgtatgtgacatctgcgaatcattaggattgaaccagaatgcagtgtccaatcaattgagaatattgcgtgcacataatattgtaaagtttgaaaaggaaggaaagtcagcaaggtattcattgacagaccttcatgttgaaatgatttataagatgggcttagagcatatgactgaataa

SEQ ID NO: 1333 - DNA, 639 bp, Methanobrevibacter ruminantium
  source 1..639: mol_type = genomic DNA
atgggtaaagtgtttatcatgtcttatatttttattgatgaaagcggggatttgggaactaaaaaatcaagctccaaatactttgtgatggctggaataaaagttgaagattctcaaaaattagatagagttatcagaaaaatcaaaagagatgataaaaaaaatatcattacttctaatgaaattaaaggttccaatttacctcatgacataaaaattaaaattttaaaaaaattagatagtgttaattatcaagtttttataattatttttgaaaaaatcaataggtataaagttaatgatggttatgacaatattaaattgtatgatcttttggcttgcgaactagctaaacaaattgatataagtagttcttctaaaatctttattgataaatcaaaaaataaaaaagaagaaatagttaatttcaataaagcatttttggaaaatctgaataactttaaaaaatttcctataaaactagaacatgccaattcaatgagttataaaggtttacaaatagcagatcttatttcttgggctatttttcaaagtgttgaacacaacaataatgaatttatagatttaataaaaaataaaaaaataaaaagagtatttgaagaaaagaagaacctatag

SEQ ID NO: 1334 - DNA, 183 bp, Methanobrevibacter ruminantium
  source 1..183: mol_type = genomic DNA
atgaattcagaatttattatacttttttctcatattcttcctttgattttaggatttttcagcatcttattaatgattaatggaataatggacaagcagaaggttataactgcctttggcataattctatttttggcagctgctttcagtccgtttgtagtcttgcctatcttaggagtttaa

SEQ ID NO: 1335 - DNA, 696 bp, Methanobrevibacter ruminantium
  source 1..696: mol_type = genomic DNA
atgttagaaataattcctgtaattgatttaatgaattctgtagcggtttctggtaaaagtggaaacagagaaacttacactcctcttcaaactatatatgcgtcatcatctgatccattggaaattgcactttcacttaagagtgcaggtgcaaaggagatgtatattgcagatttggatttcattgaaagaaacggaaacaacaatatcttcaagataaaggaagttaacagtgtattgcctgtaatccttgatgtaggagtcgacaagcttgaaacatttgagtttctccttgaatttgcatataagataatagtcgctaccgaaacccttgaatcaatagaggaacttgggaagatatttgaaaagtaccctaaggagagaatcattgtaagcgttgatgtcaagaacaatgagctctatgcaaagaatatggatcttgaccttgaaggattcaaggaagtcttaagacgaatcgatcctaatgagataatattgcttgacatcagttcagtaggaacagaaggtggattcaataagcctctcttggaatcatttgaagagtttaaggacaagataatccttggtggcggaatcactccagatgaaataagtcaattggatgccttgggaatcaggaaggcattggttggaactgcattgcataagggacaaatcagattaaatcctttttaa

SEQ ID NO: 1336 - DNA, 624 bp, Methanobrevibacter ruminantium
  source 1..624: mol_type = genomic DNA
atggaaaaaagtgaaatagaacattatttacgagatatctgggttagagaatatgaaagaggagaaaagctagttgtagatgaattcaatgctgatgatatagaattattagctaaaaaagaatatatcaaaacagatgatggctttgtcaatctgactgaaaatggagaatatttgggaagatcccttgttagaaagcataggatagctgaaaaagtggttgccgacttgtttttagcagatatggatgagatggaagagttggcagaccaaatcgagcacgttatgagtgcagaggttgaagagaacatctgccgaatcttgggaaaccctgaaaactgtcctcataataacccgattcctaagggggacactactcctggcataagcaaggaatattctgttcctttggtctcctgccatagcggagagtctggagaggtatcccatatcaaaacagaggacgcccgtaaattaagaaagatcatgaatcttggtcttattccaggctctagaatctgtcttattcaaaagtttccaaattatgtcttccaattgggaaacactcaattggcagttgacaaggaattggctaacgaaatatttattaaactagatgaataa

SEQ ID NO: 1337 - DNA, 219 bp, Methanobrevibacter ruminantium
  source 1..219: mol_type = genomic DNA
atggatgaaaatgataataaaagtcagataatcaaatgtgaattctgcggattcacatttcaaaagtgtgatggcatcagctgtgattcctgccctattaattgcaaaacggttagatgtcctaattgcggttatgagattttgcctgagtccaaatcttataagttcctggaagatggtgttaaaaagataaggaataggctttttaagtcaatttaa

SEQ ID NO: 1338 - DNA, 2049 bp, Methanobrevibacter ruminantium
  source 1..2049: mol_type = genomic DNA
atgagtgaaagtattactcctaatggtggggctaaatattcaaataataaaaacaaagcccttgccagcaagaaaggcaatgattcctactataaaaatgtccttttgataggaagtcccaatgtaggcaaaagcctgacattcaataagctgactggaatgacagctatggtttccaattatcctggaaccactgtggatatcgatgagggcaatttcacatatgaaaacaagacagttcatataacagaccctccagggctttatgatctaaacacaataaccgaagaggaacgtgtagccaagctattggtattggacaaacgctttgacttgatggttcatgttgtggatgcaaagaacatagaaaagtcaatagaccttaccttgcagcttatagatgccggaaaggaagttatccttgtattgaacatgatggatgagcttgagaaaatgggtgcaactgtagatgccccgtcattgtcccatgagcttggaattccagttgtgcttactgcagctgcccaaaaccgaggattggatgacttgaagcatacaatcgtaaactatgattcaatagagaatcaaatcttaagcgagtctaagacattgttggatgtcgattatggaaggtcaattgaaatagcaatctctgagattcaaagaaatatcaaagggaattatccggtttccaaaaggtatcttgcagtttctcttcttgaaggtgatgaggacagcgaagaccttctaatggaaagtgaggattgggataatctatcccaggtcattggtgctcaaaaggcaaaattcgaccagcctgtcaagtatctgactaagttgcgtcttgcagactatgcaaaacatataaagtcaagttttacaacaatagacagcgtaaacattcaggataccgacagccttggagaaaagctaagcagaatcatgatccatccattctatggtcttatcatacttgcctgtgttttgttctttggcctttatcttattgtaggagttcttggtgctggaattcttgtggatttccttgaaaacaccatattcggccagtacataaaccctgctgtaacatctgtggtcgttcaatacattccatgggttcctatacagaacctttttgtaggggaatacggtattgtgacacttggtttgacctatgggttcggaatcattctccctatcgtgtcccttttcttcattgtattttcaatattggaggacagcggatacctgccaaggctggctcttcttgtggataacggatttaaaagaataggattaagcggaagaagcgtaattccttttgttcttgctgttggatgcggaagcatggctacaatggtgacaagaacattggagaccaaaagggagcgaaacattgcaacaatgcttatggctcttacaatcccttgctctgcacagcttggggtaatcatggccttattgtctgcaaggccaaggtcaatctggatttggcttgctgtgattgtctttaattttgtcgttataggatatcttgcaaagagattcgttccaggggcacagccaagcttctttatggaattgcctcccctcagatggcctaagctctctcacattgcaaagaagacttggacacgtcttgttatgtatattaaagaactgattccaatatttattctaataagtgtaatcatttgggctcttgacttggtcggtattttccaatggataattgcttgtgtaactccaatcgttaatgcaataggtcttccaggctcaacaagttcctcatttgtccttggattctttagaagggactttggagcagctggactaatgacaatccaaaatcaattgactggagttcaattgcttgttgcatctgttaccttgacattgttcctcccttgcgttgcacagcttatgatcatgataaaggaaagaggggtaaaacttgctggtcttatagctgttatgagcatagttctagcattcagcatgggttttattgtcaatttcatattgactagcttgaatgtggtcttatag

SEQ ID NO: 1339 - DNA, 1197 bp, Methanobrevibacter ruminantium
  source 1..1197: mol_type = genomic DNA
atgatagaaactgatgttttggtaataggtgcaggtcctgcaggctctgctgctgcaaagcatgcagccttaggaggggctgatgttattctaatcgataagaagtctgaaataggaactcctaagagatgtgccgaaggcatctatgaccatggacttaaatggctggggattgagccggaccctgcatgggctgttcaaagaataaacggaggaacccttattgctccggataaaacaagacttacccttgatgagacaattctgcctgaaaagggctatatcatagagagaaaggtctttgacaagtatatggctatggatgcagccagggctggcgctcagattatggtgaagactcaagcaaagtccattcaaaggggtgaagattccaaaggctcattttatactgttgactgtgagcagatgggagaaatcattgaagtgaaggcaagaatagtgatagctgcagacggtcctgaatcacgtgtagctaaggcatttggcgtaaattcaactacaaaaccaaagtatatgatgtctggtgtccaatatgagatggttggggtcaactgtgagcgtatggatttgatagagcttcatttaggtgcctttgcaggtggaggatatgcttgggtatttcctaagggagatgacattgcaaatgttgggataggaatatcaagcgaaagcgataggcctgcaattgactatctcaacgaattcattgaatcctatcctccattgaaggatgcaaagccggttgagcttaatgtaggaggagaccctatcggaggattgataggccagatttattctgataacttgcttgtttgcggagacgctgcaggtcaggtggatccgataacaggagggggaataatccttggaatgcttggaggcatgactgcaggccaggttgcatcaagagcaatcaaggatggcgattattccaaggaaaggttaaaggaatatgatgaattgtatgatgaatatactcaaggtgcaattcctaaattggcagttggccgtgatgtatatctttcattaagcgatgatgacttaaaccagatcattcatgcatttgaaggtcttgattataagagcatgagcccaaaggatattttaaaggtcttctttaaactgtctccaagacttgcattgaagtttaggaagttgtttaaggttgtgctctaa

SEQ ID NO: 1340 - DNA, 909 bp, Methanobrevibacter ruminantium
  source 1..909: mol_type = genomic DNA
atgtttaataagaagatggttttagccataagcttattagctgttatctttgcatctatgtgcatagtttcagcagatgactctggagagggaagctttaaggaattggctaaattagtgtccggcgataataagaccggtgttataacattgacaaaaaattttgcaaatactgacggatatgatgcagatggaataaagatcactggagataatcttgtcattagaggggaagaaggcaaggacattacaatagatgcaaaaagtgcaggaaggattttcaatgcgaacggcacaaagaatgtcacttttgaaaatattcattttgtaaacggcaattcttccgatgcaggtggtgctgttctattaggtgaagagccaagcagttcagtaaagaattgtcaatttgacaactgctattcagatgcatttggcggtgctgtagatggaaatgccataggatgcacttttgaagattgcagcgcaaactaccatggcggtgcaatattcgatggatctgctaccaactgcaccttcaatgactgtttctcaaaaagctgtggcgggagcaaatttcctatcataaggcaaccaattgccaatttcacagactgctattcctattggcaaggcggtgcattgtatgaagtggaagctataggctgcgactttaaaaactgctattcaagcgaaggaggttccatgtgtggaggctctgcatttaactgcaatttccaagactcccttgctaagaatggaaatggtggagcgaccttaaacacaaccgctaaaggctgttcattcagcggatgcagtgtaacaaatggagaaggaaatgccatgtatggaggcactgctacagattgtaaattagataaggcagatgctgttaaggttaactttaaatag

SEQ ID NO: 1341 - DNA, 441 bp, Methanobrevibacter ruminantium
  source 1..441: mol_type = genomic DNA
atggcgaatttaagttttatcaataataattttaaaatgattgtgggaatcttgtccattatcttagcgatagttgtttatttcattacacctccatatattgaattttacttgatatttgtatttttaattccggcaatagccttgattgttcctaatgatgcaattaaaaatagtagagcaataggtgctcttacttttattttagtcattattgtagcatattttgcaattagtggaatgttaggggcctatgatgttcttacaaatatgtatgtcaacggtttaattaactctactcctagtacaagtgatatcagtgcttgctctaatggctatttgatggtattgatttatgcattattcaatatattttgtggagcattgttctttaaacgaacaagtagtattgatgatgttgatgatgaagatgcattttaa

SEQ ID NO: 1342 - DNA, 1407 bp, Methanobrevibacter ruminantium
  source 1..1407: mol_type = genomic DNA
atgcaattggattttaaccatgtcttaactcggatttcagattatgaaaagcctattgtcttgaatcatgatgttgttttaacaaggtctgaagcccatcaatttaagaagggaatagaaatcaagcgtgataatatagttattgatggaaatggccattccattgatgcaaggggcaaaaaccgtattttcaatgtgctctctaaaaatgtagtcataaagaatttcacctttaagaacggattttctgaaaagtttggaggagcaatcagagttgcaggggaatgtaagctcataaattgcacttttgagaataatcgtgcaaaaaaaggaggaaatgacatttctaacggctctgaattaagcatctgccattgtaatttttcagatgctgatggttcaatcaataatttaggtacaatatatcttttaaaggatgaggaacatgagataaagcctcttatttctaataatggtgaaattaaaagaatcattccaaagcatgatgtctcttttcttataaatggtgataaggaccatataaagggcgcccttattaggataggggataaaagcggattttccaatgatgagggagcatgtgttttagaaggaatcgaagagggaaaacattcgctagaggtatctgctgagcattacatctcatttaatggaaatattgatgtttcagaaaataatgtcctttttgacattcagctagagagactgattcaaaggcatgacattaaaattttagttaagcataagggtgagcctgtcagtgatgcaattgttagcgttggcggcataaagggctctacagatgaaaatggagaatgcatctttgatgatgtagaggaaggagaaatatctgtaaaggtaaattccaatgaatatgagaatcagaagtataccatcactgtctctgataataaaacaaccttccctattaatttgggattcactcatttgataactccattccctgcaagtgatgaggatccttatatatttgccagctattctcatgatgatgcaaacagggtttttctagagctaaagcgctttcatgattgtggcttaaatatttggtatgatgagggcattgaatcaggacttggttggcaaggtgttgttgagagtaagttaaaggcttgcactctttttattgcatttatttcagctaatgctgtggaatcaattaatgtaaggcgagaaatctttttagctattaataagaagattccggttgttccaatatatcttgaaaagactgaattgcagtatggtcttgatttgcagctgtctccagtacaggcaattttgaaatatgccatgactgaagagttttatgtggaaagatgcagaagggcctttgtaatgtatggattgatggatgaggaatag

SEQ ID NO: 1343 - DNA, 759 bp, Methanobrevibacter ruminantium
  source 1..759: mol_type = genomic DNA
atggcaaaagtgacaagcatatttttctctccatcagagactacaaaaaaagttgtaaatcagatagcagagaacttcaaagaggaaaaatcaatttgcgacttattatatttcaatgataaaaaggaatttgagtccgatgatatagttattgtaggaatgcctgtatttgcaggaagacttccaaagactgcttcagaaagactatcaaagctaaccggtaataatacaaaggcaattgctgttgcaaactatggaaatgctcatgttaatgatgcattgatagagcttgttgacattcttaatgaaaacaattttgatgtgattgcagcggcttccactgtcagccatcattccatctttgatggtgttgcgttaggaaggccagatgaagatgacattgaaaagattaatgactttgcccaaaaggcaattgaaaaaatagaaaatggaggctcccttgaatcagatattccaggaaacaggccttatacagattataagcagcttccatttgttgtggcatgcgatgtggataaatgcgtattctgtcttgaatgtgtttcagtatgtcctgagaaggccattccagatgatgaccctgccgatatcgaccttgagatatgctcaagatgcactgcatgcataaacatatgtccagaggatgcaagatcatttgctggagatgctttcctatctaaaaagccactatttgaagaggcaaatgcagaaaggaaagagcctgaattttatttctaa

SEQ ID NO: 1344 - DNA, 297 bp, Methanobrevibacter ruminantium
  source 1..297: mol_type = genomic DNA
atggaagcaaaattaaaaaaattaactcaagaggatatcgacgacatatctgacttttttgcaggagtcattgataagaaaatcgcatcttctgtaaagtctcaaaaagagattcttgctatggatattgatatagaagtagcatacaatgatgaaaatgaggaactgatggtagatgtagatgttgatataactacagatgaactgtccaacttatcagatgaaaaagtcaatcaattaatcgaggactcttatgtggaacttgatgaatacattaacgacaattataggaaatga

SEQ ID NO: 1345 - DNA, 348 bp, Methanobrevibacter ruminantium
  source 1..348: mol_type = genomic DNA
atggaaattccacaaaatgtacaacatcaattaaatcaattccaacaattacaacaacaagctcaagctgttaccgttcaaaagcaaaatgtagacatccaattaagagaaacagaaacagctctcgacgaactcaagaaaactccagaagatgctgaagtctacaaatccgcaggtaacttactcattaaggttgaacgtgcaagcactttagaagatcttgaagacaaggttgaaactcttaagttaagacagcaaaccatgcaacgtcaagaagaaagagtcatgaaaaagcttgaagagatgcaagcatccattcaacaagctatgcaaggcttacagggatag

SEQ ID NO: 1346 - DNA, 135 bp, Methanobrevibacter ruminantium
  source 1..135: mol_type = genomic DNA
atggagctcactctagatggaaattcaataaaaatcaaaatagatgccgaggacgccacttcctttagggcatcaatcaattcagcaatcaaatggataaagctggctgtagagattaacgaattggtagaatag

SEQ ID NO: 1347 - DNA, 492 bp, Methanobrevibacter ruminantium
  source 1..492: mol_type = genomic DNA
atgcttatttccacatcaagaaaaccttcacagaaaacaagaaccttttgcaagaatttctcacatgcatttggctttgactatacaaacagaggcaaaagcagcttaagggatttgcttgtaaaggccaagcaactaggtcacgacggtctcgttttggtctatcaaatcaagggaaacccaagcaagctgacattctatgacctggaagaaaatgaaagattggctcttctcatatcagtaaacactaccaatgagcgtcttcacataaagccagaggaattgaagatacgctcaacagttccagaattggatattctagcagaagttctagggattgaagtaaccaaggaacctcaagactccaattatataaggatctcatatgcagattatgatgacgagagcaattttgcaattttatatttcattaacaagaaaggagaacagattgattttagaatcaatgtcaaaaagattgtagagccttaa

SEQ ID NO: 1348 - DNA, 132 bp, Methanobrevibacter ruminantium
  source 1..132: mol_type = genomic DNA
ttgtataaatgtccagaatgtggcgaagaagtcgaccataaaggatacatggaaaataaatgtcctaaatgtagatataggattttatttaagaaagttcctgaagttagaaaactcgttaaagcaaggtag

SEQ ID NO: 1349 - DNA, 270 bp, Methanobrevibacter ruminantium
  source 1..270: mol_type = genomic DNA
atggctagaacaaaaaaagtaggaataactggtagattcggtgctagatacggaagaaaagcaaaaagatctgtaaagaacattgaagaaaacatgaaaaagaaacatgtatgtcctaaatgtgacagaccttatgttaaaagagtaagcgctggaatctgggaatgtaaaaaatgtggtgtagtattcaccggaggagcttacgtacctgaaactcctatggctaaatctgcaacccgtagtattaaaagagttgttgggggagaataa

SEQ ID NO: 1350 - DNA, 792 bp, Methanobrevibacter ruminantium
  source 1..792: mol_type = genomic DNA
atggatattgtacctgaaattactagaaaaagtattacaagacttataaatgatggtaaaagagctgatggaagagcttttgatgaaagaagagatattttcattgaacctaatgtgattgataaggcagaaggttctgcaagagttaaattaggagacactcaagtcattgtaggtgtaaagccaaccattggcgaaccatttgcagacactcctaacttaggtgtcttaatgaccaactgtgagcttttacctatggctgctcctggatttgaaccaggtccaccaagccctgaatcaattgagcttgcacgtgttgtagaccgtggaatccgtgaaagcgaattggtagaccttgaaaagctatgcattgaagaaggtaagaaagtttggatgcttttcattgacttgcatgtaatcgattatgacggaaacctcttcgactgtgcaaatcttgctgtaatgtctgcattgcttaatacaaaattgcctgttgctgaatacattgatgatgaagtggtcctatccgaagatgaaacaatggaccttcctgttagggacaaattggctttatccacttttgtaaagataggcaatggattgatcttagacccttcccttgaggaagaggaaatcttggatgcaagaatcacaatcggagtaactgatgaaggaaatcatatctgttctatgcaaaaaggcggagaagaacctctaacaagagatgacattctcgatgcagtccatttagcatttgaaaccaaagatgatcttcttagttatctcgactag

SEQ ID NO: 1351 - DNA, 711 bp, Methanobrevibacter ruminantium
  source 1..711: mol_type = genomic DNA
gtgttttttattatctcagaaaatgaaaaattaagaggggacggaagagcatatgacgaacttcgtccgattaaaatagaagctggagtcttgaaaagagcagatggttcagcttatttggaagtaggtggaaataaaattttagcatctgtttatggtccaagagaatcttatattagacgtttattaaaaccaaacactggtgtaatcagagtaagatacaacatggctccattttcagtggatgatcgtaaaagaccaggtccagacagaagatcaactgaaatctctaagattgcagctgacgcacttagacctgcattgatgttggaatctttcccaagatccatggtggatgtttcaatagaagtaattgaagcagaaggaggaacccgttgcgctggaatcactgcagctgcagttgctttagcagatgctggaattccaatgaaggacattgttgtaggatgcgctgcaggtaaggtaaatgatgagattgtattggacttatctgaaaaagaggataaggaaggacaagctgacgttcctattgcaatcatgccaagaaccggtgagattaccttgcttcaagcagatggaaacttgactgaagaagaatttgaagaggctttggatttagcaattgaaggatgtatgaaaatcagcgaaatccaacatgaggctcttaagacaagatatagttcccaatag

SEQ ID NO: 1352 - DNA, 1476 bp, Methanobrevibacter ruminantium
  source 1..1476: mol_type = genomic DNA
atgggaagtatatgtatgatatatgtgaatgagaaagatttagtagttcctggagaattattggcagaggatgattattattcaggaagaggaacctttgaagatgatggaaaaatatgttccaaacttttagggttggtttctttaagaaacaagaagataagtgtaattcctctaaaaagcaaatacattccgaaaaaaggagatgttgtcatcggtaaaatcgatgatgtaagattttcaatgtggggagttgacattaactcaccttactctggaatcttgccggcatctgaagtattcggaagagagaaaaaggaattaagtagagttttcgatatcggtgacgttcttttcttaagaatcgtcgatgtcgatgaggtcaagaaggttaagttaggattgaaaggccgtggaatgggcaagtttagaggaggagtcattgtagacatcgctcctaccaaagtccctcgtttaatcggtaagaaaggttctatgattaacatgatcaaggataaaactggctgtaagattgttgtaggtcagaatggtcttgtttgggttaaaggtaatgaagacatggaacaaatcgttaagaataccattaaattaatcgaaagagaagctcatacctctggtttaaccgacagagttaaaaacaagctctgcttgcttattgatggagaacttccagaagaggaaactgaagtcatggaagaaaaggaagagattgttgaagaatcctttgaagaaggcttgaaaaagcctgaaattcaagatttcagagatgaagttgaaaaagaaattgctgaagagatggctttagaagagtctgaagaagacttggatgaagagtttgatgattctgaagaacttgatgactctgatgaagagtttgatgattctgaagatatttcagatgatgaagattttgatgactctgaagatgatttggattccgaagaagaaattgattatgcagattctgaagatgatgaagatgagctcgcaatagaagaattagaagaaaaagtagaaaccgaagagttcatggatgattccgatgaggattctgattttattgaagaggatatcatcgaattagacgaagatgcagaatcccttaatgaagaggatgatgaagaggaattcgatgtccttgaagagtctgaagcagaaatatttgatgaggcggaagtccttgatggagctgaagaaatctcagatgatgagcttgaagaagtaatcaatgaagcgatctcagaagatgaagaatctcaagatgattctatagaagatgaaagtgaagatgaagaggaaaaggaaaaagaagaaaagtctaaaaaacctaagtttttagacactttcgaatatattaacgaacagaaaaagaaaaacaaatcttcttttgatttaagtcgtgcagataattccgactctcctactttaaacatttcacaaagaagaggtatctaa

SEQ ID NO: 1353 - DNA, 705 bp, Methanobrevibacter ruminantium
  source 1..705: mol_type = genomic DNA
atggttaatatagatgatgctattattgcaagattagaatcttacggtgaaaagtttgagattttagttgatcctgatttagctgcagactttagaaatcctgataatgaaaaagaaattgatattgaagagatattagctgtagaggaaatatttaaagattccaaaaaaggtgacaaggcttcagaggaatccatgagaaaggtatttgacactacagacgttttggaagttgcagagcagatccttcataagggaaatgttcagctgactgcagagcaaagaagacagatgcaagaggataagagaaagcaagtagttgctaagatagcaagagagggaatcaaccctcaaacaggtcttcctcatccggcagtcaggatagagaatgcaatgaacgaatctaaagttaagattgatgctttcaaatcagtggatgaacaggttcaaacaactttaaaggcaattaaagttttaattccaattaaatttgaaaagataaaaatggctgtcagattgcctagcactgctgcaggcaatggctattctgcaattcgtccatttggaacaatcttgaatgaagaatggcaacaagatggttcttggattgcaattgttgaaatgcctggcggtcttcaagatgattttaatcataaaatggcttccatctcaggaggagaagctgaaactaaagtaattaaataa

SEQ ID NO: 1354 - DNA, 144 bp, Methanobrevibacter ruminantium
  source 1..144: mol_type = genomic DNA
atgtcagtaaaaaaactaatcataaaaaaggttattcttagcaaaactgctagaaaaaccgcaaagaagggaataatgtttgttgtgccttcagatttctttgataggcataggcatttaggaaaaattgttgacatgatgtag

SEQ ID NO: 1355 - DNA, 885 bp, Methanobrevibacter ruminantium
  source 1..885: mol_type = genomic DNA
atgcaacctttacaacaacagaatgcaggttatgacagagcaattactgtatttagcccagatggaaggcttttccaggtagaatatgcaagagaagctgtaaaaagaggtaccacttccttaggtcttaagtcaaaagacggcgtggtccttattgtagataaaagaaccgtcagcagattagtggaagcaaagtcaatcgaaaagatattccaaatcgacgaccacattggcgtagccacttccggattagttgctgatgcaagagctttggttgaaagagctagaatcgaatctcagattaataagatcacttacaacgaacctattcttgtagggggacttgctaagaagatctgtgacttaaaacaattatatacacaaaatgggggtgttagaccattcggttccgcactcattataggcggagttaatggcgaagaaactagattatatgaaacagatccaagcggagccttaattgaatataaggcaactgcaattggttctggagtgcaagctgctgtagatgtctttgaagaaagatatgaagaagacttaagcttggaagatgcaatcaacttaggcttagatgcactttatgaagctactgaaggcagaacaactgaagacagcgtcgaaatagctgtaattgaagttgcaacccaagcttatagaaagctttccgatgaggaagtttctggctatgtaaaagatcttcttgagagaaatgctgaagaggaagagccagaagaagaagctgaagaagaagcagtagaggaagcagtagaggaatcagaagaagcagaagacgctgctgaagaatctgaagaagaaacttctgaagaagaagcttctgaagataaagattctgctgaagaataa

SEQ ID NO: 1356 - DNA, 2244 bp, Methanobrevibacter ruminantium
  source 1..2244: mol_type = genomic DNA
atgaactttatgaaaacaaatcttaaaaaaacaacaatcatattggcactgctgatggccattttaattttatcgattggagccatctctgcaaatgatttaacatcagcagattcaaatgtagatatgaataatgatttaaacacaaatttggatagcaatgatataatcgccaattcaaacagcaattcaattgatgctgaaattgatgaagcaaactattcaaatcaaagagcagatgccaaggaaaagttaaaggaaagcaattcattaatagaaaacgaaaatactgaaggcaatacacaaatagaagatgaaaattcaagcccttcaaataaaacagatacatcaatatcaattgaaacaaacagcatagaaaggggatccgatttaacaatctatctaaaggacataaatggaactggaatagcaaatgaaaagctatcaatccaaataataaacaagacctacacaagaacaacagattcaaagggctctgccctttttaaaataaatcttgcatctggaaaatatcctatagcaatatcctacaatggcagcgaagattatgaatcatcatcagatgacttcaacataagcgtttcccctatgaaaacaaagatcaatatgctcagcaattccattgtaaacggaaggaaactaactatagaattgttggataagaacaacaatccattaaaatacaaaaagatctccattatcctaaataaaaagctatataatctcaccacaggcaaagatggaaaggttagcttaaacattaatctgaatcctggaaaatttcctatccaaataactttcagtggagatgcaaactatcatacagtatctaaaagctctgcgattgatgtatataaattaaaaagcagctttacagttccaaaaacatcaatcataaaaggaaaatacttatatgtctatttaaaagatagcgaaggcaaagcaatcccatccgcaaaggttgccttcaagatcaatggagtaagctccacaaaaacaacagacaagaacggaagaatcagccaaaagataggccttaaggtaggaaactataccgtccagctcaactataatggagacaagtcccatttgaaaaaagtccaaagctttaagattcgctcttgcaactccaaaacaaaattcactgtagctaattatacagtggtgagaggaaaatacctaagcgtctatctgaaggattcagaaaacgccaatcttgcaaataagaaagtgaccttcacatatcttaaaaaatcatatacaaagacaacagacagcaatggaaaagccagcctaaagatgacagaggcaggaacaactaccgtcaatcttcaattcaagggaacaggcccatatctaaagtcaagcgcaaatgtcaaaatcaaggtactaaaaaacacaacagcagatatcattgcaaaaaaccagacaagacacttgaacggcagttccacaataaggtattatgtaaagcttactgacaataacggaaatccaatagaaaatgaaacaatagagcttaaggtcagatgcaataacataacaacaggaagcggaaacaagattactaaaaagaccatcgtattaagctcagataacataattaacaagagcgaagacaagaagctcctaaacgagatggcaaagatcctcagggcaaaaggatataaggtaatcgtttccggaatcggacctaactatcatgtaagcgatgtaagggactattccaatgtctgcgtattcagccttgtaggaggagtcgacagcggaatgtttgttgacatgtcacacagctactataagaactaccttaaaaaatacaagaaccagttcgtattgggatgtgtagcccctccggtatatcttaatttaggtaatatgacctggcttaaaagggctcatgatgatgactacagtccgaaaagctttaaaggactttattatccaggaaagtacttcaatacagtgactaaactggattatgtctatggtgatggtgctgaagagcttgtcaataatttcttaaactatgcaaaaaaaggtaaaagcatagaccttggacagtcagtacctaagacaactacaacttataagctcactacagacaagaatggaaatgcttatgtcgatttgcaagtaggcacttataccatttcctcatctatattaggcaataattataaggttgacacccaaacaagcaaggtaaatgtgattaagtag

SEQ ID NO: 1357 - DNA, 378 bp, Methanobrevibacter ruminantium
  source 1..378: mol_type = genomic DNA
atgaagcttaaggtcctgcctcccacccttcgtaagaatcaccattatcttattctggatgtaaagtctgaagtaaaactttccaaagatgatatagttcactatatatgggacgcttgcattagatattggggagagaaccattcaagtaacttcaatctatgggtcatgagacactatcctattgaagaaactatctataataatgagcctgtattcaattataagacagtcttaagatgtcaaagatcttatgaagatgatgttcgctctgcacttgccactttaaacagatataataagaaaaagatatccataaatacgattggaatatctggaactgttaagtctggcattaataagttcattgacgaataa

SEQ ID NO: 1358 - DNA, 972 bp, Methanobrevibacter ruminantium
  source 1..972: mol_type = genomic DNA
atgaaattccatgacttgaacataagaggaacagactacaataacgatttggctctaatcaaagaggcctataagttcggatgggattatcttaatttaaattattcccaagaccattataaggaagccttatcctataaggatgatttgcttgaggaaatatctctttttgaatggaaagacagctatagaaacaaatacaacagccagtccatagagatttccatgggaatcaacattcagaatgccaattcaaatgagataagaaagattgtaaacaaatataggaacaattgctcttatatgagtgctttaggcggggacttaaaggtaaaccgtagcgtatgtgaaaaccataggatggatgtattgtcccgcccatattataaaagaagggattccggcatgaatcatgtattggctaaggaagcagcccgaaacaatgtggctatcgaattatgcttccgtgacgtattaaagaacagcctgaagtttagggctaatataatcagcagctttaaggaaataatgatgtttcataggaaatataattttcctatcattctgacaactgattccaaatcaatctatgacattcgctcaacaaaggatatagtcggcttctttaagtcaataggattttcagacaaagagatttataatggattctattactatccaagggagataattgactttaaccgccaaagaaagaacatggttattaagggagttaaagtgattgaaggagcaagtgattttactgaaattgattcaaaaactcctaaatttgaagagtctgaatgttttgatgaagcaatatctcaaaaagaagatgatttctttgattgtgatgaatctgaagatgatttctccgattatgatgaagaagatgaagtttttgttggggaatctgaagatgaatttactgatgttgagttcgaatctcttgaaaaggaggatttattatga

SEQ ID NO: 1359 - DNA, 441 bp, Methanobrevibacter ruminantium
  source 1..441: mol_type = genomic DNA
atgattcataatatcagatatcgtgtttttatttatgaaaatgaagataaggataaggttttagaagccctactcaatatacttccaacagcagagcctgaagctgaagaggcagaggggcttctcgaagagaagatgcttattctaactggagccatctccaaaaagagagaaaccaaagagttcttaaacacccttatcgaatccattggagaagatcaattaatcaagctatataatgatttggatagaaagatggatgaaaaaggcaatctcttcctaagattatccaaagagaaggcattagatgaggaatgggaaatattggatggtggagacagcatacatctaaagataaagatagctgcatatccggctaaaaaggaagttgcattaaaaaagattaaagaagtcttcccagaggatattataaatgcttag

SEQ ID NO: 1360 - DNA, 552 bp, Methanobrevibacter ruminantium
  source 1..552: mol_type = genomic DNA
atgatgtacaaatatattagagatgcatggaaaaatccagatgagtcttatgtaagggaacttatgtggcaaagagttcctaaatggagaaaacaacctgcaattaccagaatcgacaggccaaccagaatcgatcgtgcaagatctctcggttacagagctaaaaaaggtttcgtagttgtaagagtaaaagttagacgtggtggacgtagaaaaactcgtttcaaacacggtcgtagaccaaaaagaatgggtgtaaacaaaataaccatggctaaatccattcaaaggatcggagaagaacgtgttgctaagaaataccctaacatggaagtattaaactcctactgggtatggtctgacggaaaatacaaatactttgaagttatcttagtagacccacaaagtccttccattaaaaacgacccaaaaatcaactggatttgtgaaaaacagcacagaagcagagctctcagaggcttaaccagtgctggtaaaaaaggccgtggccgtagaaatggaggaaaaggcagtgaaaaaagattaaaataa

SEQ ID NO: 1361 - DNA, 420 bp, Methanobrevibacter ruminantium
  source 1..420: mol_type = genomic DNA
atgattaaatgtgataattgtggtttaaaatttgatgatgacactgaaatatgtcctaattgtggcaataaactagattctacccaatctgttcaagaaactgaagaagcttctaaaaaatgccctagctgcgggtcactcattggaattaatgagtttatttgtccaagctgtggaaataagatagaggaattaaaaatcattagaacatgtcctaattgtggtgtgaatttggatgatgatgcggtattctgtgataattgtggtgctaatttgtcttcaacttcagatcagattcaagagttcaataaatctttaattgagtctaataaatctttaatggaccaaattgctgatttgcttactaagtttgggaaatttatcgatgatttattctcttcatttaaaaaagataagtaa

SEQ ID NO: 1362 - DNA, 921 bp, Methanobrevibacter ruminantium
  source 1..921: mol_type = genomic DNA
atggttaaatgcagtaattgtggtgcagaagtgggagatgcaagtttttgcttttcctgtggtgagaaggtagatggtggaaatgtagattctaacatatgccctaaatgcggtactgaaaattcaaaaggaaccgtattttgtgttggatgtggtcagaaatttgataatgcattagttccagaatctgtagcgcgcaaacaaaaggaatgggaacttagacgtcagcaaatcattgaaagatatgatcagcttgcagatgagtttggaattaaggataaggattatttcctaaccagtgtggtaagggttaatatgttggaagagaaaactactaaacataaagtttggggttctgttggctcttatggcggaaataaaactacaattgatggtttcttcttaatagaagatgataagtttgtctttatggaaatcgataatagagactggaaaaaagtcaatgcgggaataaacaatttctactttgacaagattgtttctatgagaattacaaaaagacttggtgacatttcaagatatgaggacattactaaaagaacaagtctaaattccgctcatgccattaaaagagccattcaaaatgatatccaatctcttaaagccacaagatttaaagatcttattgtaaacaacgatagtgctgatatgtttgataggttattaatcaagcttgtagataacacttcatttgaaatcagacttcctagctttgaatttggagagaatttggtggcattgtttgaaatatctagaaacagtcctcaaactgttgtcatcgagactgattcaaaaccaagcaaagcagatcttttaaaggaatataaggaactattggattctggcgccataactgaagaagagtatgatgagcttaaaaaagaggttttatctagttaa

SEQ ID NO: 1363 - DNA, 534 bp, Methanobrevibacter ruminantium
  source 1..534: mol_type = genomic DNA
atgttagttcgtaatttagatttcttgtcaattccaaaggaattttcaaaagttgaattagatatttatgaaggtaaatctatcgttcttgtttatattgaaaacaaaggttattcactagtattaaaaaagaacaacgaaaacgattctatattcctactaaaaactgatttggctccagataatattgattctgataaagaagacttcattaatgtaataaaaatgttattggataaaatctacgaaggtgcagagattaaggaatatgaaaagcagcaccacgagcatgtgttcttacaattgatggatttattgattgaaggagaaacagttgaaacaatcactgaagaatctaagatttatgccgacattgaaaagggattcatgaagttggagcttgatatcatggataacaagatcaattccttaaacagtgcaatcggtgagatttcaggtaatttaaacaatcttggaagcaaagttgaagatagcaagatagaaaacagacttaagaaaactttctctcaataa

SEQ ID NO: 1364 - DNA, 549 bp, Methanobrevibacter ruminantium
  source 1..549: mol_type = genomic DNA
atgaaagaccctaatatggacaggattcttgaagataataggaaattaatggaagaaaataggaaattgaaagaggatttaaaagaattgaagaatgaattctatcaatttaaaaaaaattcaagacccggaaagccattcaacttagaaaataatgatgattataaaccttctggaaactattatttccataataattttaaagaagaatttgatgatgcaaacatcaaatacaattccaaggataatccagaaggaagcttccacaatgactctgcaaatatagtggatatgagcctaatctcatttttagcaaggtccaataaaagggttgaaatactaaaatcattgaatcaaggggacaaaataccatccaccataagcaaagagattgacgacagcagccaccacgtctccaaatacctctcaagcctaaaagaaaaagaattagtcgtttgcatgaatgaagaggataaaagattcagattctatagaataactgcaaagggcaaatactatttggaaattattcagaacaaccaatactga

SEQ ID NO: 1365 - DNA, 546 bp, Methanobrevibacter ruminantium
  source 1..546: mol_type = genomic DNA
atggcagatttaaaaggaaccaaaactgaagaaaacttaaaggccgctcttgctggcgaatctcaagcacgtgtaaaatatgaattctatgcctcccaagctaaaaaggatggctatgttgaaatcaaggacattttccaagagtcctctgacaatgagaaggaacatgcaaaaatctggttcaagctcttaaacggtggaaaagtacctgacaccttaactaaccttgcagatgcagcagctggagaacatgaagaatggacttcaatgtataaggaatttgctgagaccgctagagaagaaggctttgatgacattgcagcattattcgatgcagctggagcaacagaaaaggctcacgaagacagatacaatgctttaactgataagataaaagcagataaggtctttaagaaagatgaagagattgcttggaaatgtaataactgcggttatatccactatggaaaagacgctcctgaagtctgtccgttatgtgatcacccacaagcacacttcagaaaacaagacactagttatatctag

SEQ ID NO: 1366 - DNA, 978 bp, Methanobrevibacter ruminantium
  source 1..978: mol_type = genomic DNA
atgtgtacagcaagtgaatatttaacagaaaaccattattttggcagaaactttgattatgaaatctcatacaaggaaagagtttgcataactccaagaaattatgaatttaaatatagaaaaatagatgatatgaaatcccattatgcaattattggaattgctgcaggtattgacgagtatcctttatactatgatgcttgcaatgagaaaggggttgctattgcaggtcttaactttgcaggaaatgctatatatagggaaatggaagaggatatggttaatgttactccatttgaattcatcccttacctcttatctcaagcagatagtgttgaagatgtaaaagaattgcttcagaatcttaatttagtgaatatcaattattccgaaaaccttccattgtctcctcttcattggatgatttccgataaggattcatctataattgtagagcctttggaagacggcttgaaggtatatgacaatcctgtaggagttttaaccaacaatcctaaatttgatatgcagctgtttaatttaaacgattataggaacttgtcagtaaagacacctgaaaacactttctctaagaatctcaatttggatgactatagcaggggaatgggagcaatcggacttccaggtgacttgtcatcagcatccagatttgttaaggtggcattcacaaaggaaaattcattttccggcacaagcgaaagcgaaagtgtctctcaatttttccacattctaggttctgttgagcagcaaaaaggattgacatttatcaatgaccctgatttatatgaatataccatttattcatcttgctataatacaaacaagggtattttatattataaaacctatgacaatcatcagataactgctgtagatttaaatagggaagatcttgatggggatggattgataatttatcctttgattaatgaggcacagattaactttattaattaa

SEQ ID NO: 1367 - DNA, 546 bp, Methanobrevibacter ruminantium
  source 1..546: mol_type = genomic DNA
atgaaaatcttagcattaataggaagtcctagaaaacacagtaactgtgaagcaatcgttgacgaaatagcaaaaggagcagaagaaaacggccatgaagtgattaaatacattattcaagatttggatattgctccatgcagtggttgtgagctatgccgtaaaggcaaggactgtcgctatacagatgacggcactgaaatcatagaccaattggcagatggagcaagcgttatattggcaagtcctatctatttcggtcagatgtctgctcaagcaaagacaatagtggataggttctatagcattttcaacaatccaaataaaagcttctcaaaagatgcaaaggcagctattgtattgactcatgcttatcctggggattatgatgcttatcttcaattgaccattgcccagcctttccaaaacaatacagaaatggaatttattggagcaatagatgctggagatttaaagttcccaggtgatgtaaaggataagccagagatcttgagagaagcttatgagttgggtaaaaagttctag

SEQ ID NO: 1368 - DNA, 777 bp, Methanobrevibacter ruminantium
  source 1..777: mol_type = genomic DNA
atggcttcttgtaatataggaaaaaaattcatagcagagcttataggtacctttttcctagtgttcttcggtaccggagctgctgttgtaactttacttatttctgatagcgtaactccaggaaaagctggcatcggattgctcggcggtcttggagattggatagctattgcattagcattcggtttaactgtaatggcatgtatctacttgtttggaaagatctcaggtgcacacttgaaccctgcagtaacaataggactccttgcaagcaaaaacatctctgcaattgacagtatctactacattgtagcccaagtaattggagcatgtttaggaagcttattgctatatgtatgtttaggagctcaagctgtaacaattggaggattaggtgctaccgctccaggtatgggagtgggatatcttcctgctttgattgccgaatgtataggtactttcttccttatgcttgttgtaatgggcgttgctgttgatgaaaaggcagaacctggatttgcaggtatttcaatcggtatgactgtagcagctgtaatcatcgttttaggtgcattcaccggtgcttcaatcaaccctgcacgtacctttggtccttacttgatggacaccttgcttggcggaaccaatttctggggattcttcccgatttacttgattggtcctatagtaggtgcagtccttgcagcaatattatatggatacttagctaaaggcaatgatgcatgtgcattgccacaacctttctttgaagaatag

SEQ ID NO: 1369 - DNA, 1497 bp, Methanobrevibacter ruminantium
  source 1..1497: mol_type = genomic DNA
atgaaagaattatatgaaaaaatgattaatgaatcagtagctgcattgcaagcagatattgatgtaattagtgcaaatagatacaacgactttaagattgttgatgcaaaaccttatgcagatgctgtagctggaatgacctgtatagacggacaagcaaaatctgtaattgacttgcacaagaaatctgtggaaagccattacaaggtattgacttccgttgctgaaaccatcagacctgaagacgatccatttattgaacattaccaaactcctcctatacttgaaatcctatgtgaggaagacggtgaatttgcagacagtatggctacatttattcaagctattgctgacagtgaaacattgattacaagagaatccgtccgccgttacggtggattctatggtcctacctgtgtagtggactttgctttgatgccaggaagcacttccaatgtagtaaaccaaatcttgaagaccattcacattcctgtaatgcacaaacaagcaatcctctctgccaaatcttggggtatgaacacatcctatggtattggtgattcatttgctcatgcaattgaaaacggtgcaactgcagcagaagcagctgcaaaagaagttgaatcaatgcaaatgatctataaggaacctgtagaggctcaaggtaaattaatggacgatgcaggacactcttcatttgatgtaagagcatttatggaaggatacaaaaaagaaatgagacctgttgtcaaagctgctatggatgatggcgtgcattatggtaatatcgtaaccgtacctgcatactgtgtaggggacattggtcaccacatcggtcaagcaagctacaacatgtgtaaggatgacgtgactttagctattattcaagcaactgctaaagtaatggaagcttccttgaaagacaacattggcaaatttatgcatccatcacaagtcttgaacttagctaccggttcaactgcatgtgctactgagtacattcttgaattagatggatttaattccactatggttgtagacttattaaccaaaagattccacaactttgtacaacaatatcctaccagaggagcagctgcagaattgcacaactgtgactttatggacatgattcacagaggttccacttacataagcgctgcaagaaaagcaagaagcagtgcaaaaatcgaccttgtacctaaagtcaatggatttgctgttgacttaggagcaatcacccataatgaagttctcatgaacccacaaagatacacttatcctgcttgtggaattacagtaagattctcctcactcatgagacttgcagactatccatgtctccttactcctgaacctgtaactgcaaccatgatgactaacatcattgcactcaataaggaagttcctggttctcctgtaagaggatgtaaaaactgtgcttcttgcataattgatgcaaaacacgaatactgtcaatggaaagaatctgtatag

SEQ ID NO: 1370 - DNA, 627 bp, Methanobrevibacter ruminantium
  source 1..627: mol_type = genomic DNA
atgaatgaaatagttttaaatcatccattaataactcataaattggctattttaagagatgtaaacacaggtacaaaagaattcagagagcttgttacagaaatatccactcttttatgctatgaagcaaccaaagacgcaaagcttgaagaggcagaaattgaaactcctcttgctaagatgaagacaggcaagctgaatgaagacaattatgcagttgtccctatcctaagggcaggtatgggtatggttgaaggaatcatcaatgtgattccaaatgctaaagtaggtcatataggtctttataggaatgaagagacctttgaacctgttgaatattactataagatgcctgatggaatcggagataggatagctatgattattgaccctatgcttgcaacaggaggaagcgtatctgcaaccattgacaagctaaaggccgatggggtaaagcaaatcaagttcctatgcatagttgcagcccctgaaggaatcagggctcttgaagcaaatcatcctgatgttcagatatactgtgcaacagttgatgagcacttaaatcctaatgcatatatcgttccaggtcttggtgacgctggagataggatttatggtactaaataa

SEQ ID NO: 1371 - DNA, 1188 bp, Methanobrevibacter ruminantium
  source 1..1188: mol_type = genomic DNA
gtgaattcaactgttggcgaacctgtgctatctgttccagttgctttaatcacttctgggataggtacactcatttatgtaatctgtacacggaatagaagtccggtgtatctgggaagctcatttgcattcattgcacctatggttgccggatatgccatcggcggaaaatcaagtatcttctcagcattgatggttgtaggtttggtctatgttgcaattgcaattatcatcagggccaccggtaaggaatggatcaataagctattgcctcctgtaattgtaggtcctatgattatggttattgggctttgtttggcccctaccgctattcaggaaataggacttgatcaggctgtagttccaatcaataacattattgtggctcttgcagcattcctgaccactgctgtaatagcaatccgtggaaaaggagtattgaaggttattcctttcctcattggtattattgtagcatatgtcgttgcagcgttattaggtatggttgacttttcaggattcttttcagcaagcctctttgaagttccagagttctatatgccgtttataaactacagcttcaatcctacagctcttcttacaatagttccgattgctcttgtaacaatggtagagcatgttggggaccacaaggtattaggggaaatcattggacgtgacttgattcaggaccctggattgaacaagacccttcttggtgacggtcttgctaccttctttgcagcgctcctcggtgggccagctaacaccacttacggtgaaaacacttctgttgtaggtcttacaagagttgcatcaatctatgttatcggtcttactgcagtgtttgcagttatctttgcattctccggacacttgactgcacttcttgccgctatgcctaaccctgttatcggaggtgtggctattcttctttacggattcattgcagtaaatggtgtaaagctcttgattcaagaggaagttgatttcaacaataacaaaaacattgttgtagcagctaccatgttggttttaggtttaggtggagctaccttgtccgttgctcaaggtgacttatctgtgtcaatttctggtatggctcttgctgctattgctggtgtaatccttaacttgataattccagaaagaaaagaagataacaaatttgttcctgaagttaaataa

SEQ ID NO: 1372 - DNA, 480 bp, Methanobrevibacter ruminantium
  source 1..480: mol_type = genomic DNA
atggctaaattaacatttaggaacgctagcgaagaggatgtgcctttaattttagaattcattaagaaattagcagattatgaacatagattggatgaggttatcgctacagaggaagcattaaaatactggatttttgataagcaacaagcggaagtcatatttgcccttgaagatggaaaggaaataggatttgcatttttcttccttagcttttcaacatatatcgctaatgtcaacatgcaccttgaggatcttttcatagaccctgaatatcgtggaaatggttatggcaaggctcttcttcgtgagcttgctaaaatagtaaaggagagaggatatggcagattcgaatggacatgccttgactggaatcagccaagcaaggacttttataaatccattggtgcaaaacagaaggattggaatgtatttcactttacaggccaagaactagaggatttcattaatgaggattaa

SEQ ID NO: 1373 - DNA, 1725 bp, Methanobrevibacter ruminantium
  source 1..1725: mol_type = genomic DNA
gtgtatatcaaaagcttttttaatgatttgaacttgaccaagaaggatggcatatatctgctggcattgactgttttttcaattctctatacagtccacctaatcgatgtaaactatacccttaactttaaatcagacccatttgtctatttaattaacggtttagtctatgctggaatgcagggccatatagagaactattcctatggaatgttcctaacacctgtcgtatcattcctgacatcacttctctttagaatgggaatagtggacaagatagcaataatgatcgttagcggagtcataagcatccttggtgaaattggattgtacctactatttaaaaccaagttcaatgaggtctactcctttttcggctgcatcctatttgcaagcttccacatagtcctcacaatctggggcgggggaggcatagacattccagtatgcgccttcagcatcattacattcctattcatggtattggcagttgacaaaaaccctaaatactacattccaacttcaatattcctgattatatcaatattcacaaaatatgatgcattattcataatacctatattgttcttatactacctaactaaacatgacttcttcaatcttgtggatttggcattaagcgatagggatgagcttaagatagttattaagaactatataaaaagcgaagagtttaaatacattgtaatatctctgattatagctgttgtcttatttatactgttttgtgaagtgatatggtcatatggagctaatctgacattcctgacacaatctcaagagtctctaaacggattcaacagtgcaaaagcagcgagaagtcatttttactataacgataagaagttctatataagaaatctctacactttcttctatcctcaaatcagccaagagttttcattgatcattcctgcaatcatagcaatcggaacagtgttcaactttgcaaacataatcagaagaagaaaggaataccctatggtgagagattacaagacacctcactttaaatacctgttggtagggcttataataatcctaattccaatagctatcatcggatttaagtatatctcacatatggtgactaatgttgcacttctaaccatctgcgtatgccttctatcgctggcagataagttcgatatagataagaggaccttcaatctggacatatttttcctagcttggatttttgtctttgcagtcttcttcagctttatcacaataaaaggacaaagatatctgattatagcattgcctgctgtagtctattttgtcttaaggacaatagaagagatatttaataagttcaaggattcaaatatccttaagataactttaataatcattgcagcgataattattgtctattccctttcattcacattcactgacggaaactttgacactgaaagaaacaataccgcaatccaagaggtatacgactatttggttgaatatgaccctgactatcttaataagaatttaagttcagactattcatatggatcccgttttggaacctggacccttaaaaaggacgttcgttatgtcaagctaggggtgatagaccagtcagagagtgattatctgattgtaaagcatgacaatgtaagtcttgcaaattatactgagatttatagggctggaaagatcaaattatatcaaaataatatgtatgataattcctcaatatga

SEQ ID NO: 1374 - DNA, 735 bp, Methanobrevibacter ruminantium
  source 1..735: mol_type = genomic DNA
ttgtctattgttagtgcaaacgatttgaattcaattgacgattccattgaagcagataatctaaattctattgaaattgaagacattcaagttgattctgtagaatcagatgatttagaaaagtctaatattgatgaaaaagttttaagtgatggggaatcagatggcgattccggcaatgaaactgaaactctttcatcaggtgatgaaaataatgaatctgatgtctcttctaatccaaatgaaggtgtagctactaatttagaattggataacgatgctgataaggaaaatgtcaagattggcgagttggttacttggactctcgaagctaaaaattatggtccttatgatgctgaaaacactcaagtctatgacgaattgcctgaaggcttagagtatgtcagccatactgtcacaaagggagaatttaatcctgaaactggcatttggaaaatcggggacttgaaagtcggtgagaaagagtatttaaaaatcgttacaaaggcagttactacaggtgaaaaggttaataaggctaatttaacaagcgatacagatattatcgatccggatgaatgttacgaggaagaagaaattgatgtggaagatgatgatgacaatcattttgaaaaagttatacattcaaaacaattacctcgtgtaggaaatccgatatttttacttatcttgtctttattgacagttttaggtttaaatactagaaaaaaatag

SEQ ID NO: 1375 - DNA, 1455 bp, Methanobrevibacter ruminantium
  source 1..1455: mol_type = genomic DNA
atggattatgatgtaatatacattggaagcggaaatgcatcttggcaaggtgctaggttcttgagaaaagagggtctgaagattctaattatagaaaaaagcttatatggtggtacatgtgctaataggggctgtaactctaaggccttgcttgatgctccatatgaaatcaaggcatttgcagataactttgaaggctatggcaagtctggcaattttgaagtggattggcctgcccttatgaagctcaaaagaaaaagaatagcaaacatggctcctttcttggacggcaaatataaggaatatgatttggatgttgcccatggggaaggatacattgtggatgagcatacagtgagagttggtgataagacattcacaacagataagatagtaatctgtactggcttaaagccaatcattcctgacattaagggaaaggagtatcttcatgacagcactgactttttagacattgaagagcttcctaaacatgcaatcattattggaggaggctttgttggaatggagtttgcatcaatccttgctgaggcagggcttgaagcggatgtgatcatcagaggaaacatggccttgaaattcttccatcagccttatgttcaaaatgtaatcgagatcctaaaggaaaagaacattcgattccacttcaatgagactgtaaatgaagtcattaaggatgattctgtggtcattgaaaatccagaggagagagttaatatcttcgaaaacgctcagaatactgatgatgatttaagggacccagatgcaaaggtggacaataaggcttatgaaaatgcattcactgtcaactgtgatagcggacttagcttaaccggcgactatgttattgcagctatgggaagaacagccaatgtggatacaataggccttgagaatgttggcttggattatacaaaagccggaataaaggtaaataactatttgcagactgctgtacctaatatctatgcatgcggagatattgcagatactggaattgcaaagcttgtgactgttgcaatccatcagtccaaatatcttggaaaggcattgttaggggatgctgaggaaatagtctatcctgttgttccggcagttgcatacacaatccctagaatagcaacagtaggtgttccagcctatattgcagaacaaagcgatgaatatgatgtccataggataagatatggaaagtcatattcccttgagcttaaaaatgacacaagatcagaggcaaaggtcattgtagataaggatttaaatatagttggtgctgaaatatatgctgcagatgctgaaaacgtggcaaatatgtttacttttataatcaatcaaaagattactcttgaagagcttgataatatgatttatgcattcccttcaagcagttctgtttgtttgtataaattgcataatattcattataagttctag

SEQ ID NO: 1376 - DNA, 1194 bp, Methanobrevibacter ruminantium
  source 1..1194: mol_type = genomic DNA
atgaaaatattggtagtgcaggaatcagactggcttaagagaaaccctcatcagcagcaccatctaatggatcgcatggtgctacgtggacatgaagtaaaagttatcgattatccaatcgattggcctaaagaagactcaaaaggacttatctttcatagggaagtccacgaaaatgtctctaaggtaaagccagaggcagacatagaggttatacgtccttccttcataaaggagccagggcttaactatgcctccctatacttcacacataaaaaggaaatcaaaaagcagatagatgagttcaagccagatatcatcatgagcctagggcttctaaatgcatacacaggttcaaagcttgctaagcagcatggcattccattcgtatactaccttattgatgtgctatatgcacttattccagagaaggcatttcagtcattcggcaagaaggtaaacatgaaagcgatagagaactcagaccttgtaatcactatcaatcaaaagcttaaagaactggcaatggaactaggttcaaaaccagaaactaccattttgattgatgctggaattgatttaaatgactttgaccctcagcttgatgattccaacataagaaatatgtataatataagtgaagatgacacagtcctattctttatgggttggatctatgaatttgcaggaatgaaggagcttgcaatggagcttggaaagaataaggaaaaatatcctcatatgaagattctaattgtaggggacggcgatgcctatgataggatggtggagataaaggaggagtatgatcttggtgaccaattgattctcactggaaagcagccttatgagaggatacctgaatttttagcctctgcagatttctgtcttcttccggcttatattgatgaggaaatcatgcaggatatcgttccaatcaagctttatgagtatttagctatggaaaaggttgttatagcaagtgagcttccgggcatttccaaggagtttggatatggaaatggaatagagtatgttcaaaaggcagaggaggttctcgagacagctcaaaggatacttgatgagggaagatatgaggagatttctaaaaaaggaagggaatatgtaaagtcaaacgattgggaagccattaccgataagtttgagaatgctcttgaggagcttattaaataa

SEQ ID NO: 1377 - DNA, 540 bp, Methanobrevibacter ruminantium
  source 1..540: mol_type = genomic DNA
atgagaatttgcgtttatggtgctggaagcactcaaataaaatcaaaatatacagatgaagcatataagttaggggaggaaatagctaaaagaggccatgatcttgtattcggaggaggctctacaggaattatgggagctgtatcaaaaggagccatagacaatcatggaaaagtcttgggaatagcccctgaatggatggaagagtttgaaggaatctgcaaggattgtgatgagttcatctatacagaatcaatggatgagagaaagaagctctttttggaaaattcagatgcattcattatagcccctggaggaataggaacccttgatgagttttatgaagtaatcgtgctaaagaagctaaataggcatgataagaagattgtgatatttaatatgtttaattattatgatcatatgcttgagatgattgattttatgatagaagaaggagtcattagggctggaagagataagaagacttttaaaatagctgattcaattgaaaaggtctttaaaatcttggaaagagaatga

SEQ ID NO: 1378 - DNA, 492 bp, Methanobrevibacter ruminantium
  source 1..492: mol_type = genomic DNA
atgtcacatccacatgttgagtcaataaacaatatgaacgcctcttctttaattggcattatggaagagtctaaaattacttatgtacgtgaaaatctggatattcatttgcatgctagtcagataaaactgttaaagcaggttagaaaacatgaaaagcctcatcataaacgcattagagttaaacgttatgagcaagcggaaaaatcagacttattcaatttgcatttggatttgtatttgaataattataagaagcttgctaagaaaggattgattgaaatcgatgaagatcctgaaaacggtcttccttatgactgcgctttaactgaaaaaggaaaagaagttttagatgatatcgataggcttgagaaggattgggaaaaagttgtccacattgatgataatgatttggaagctttaaagagaatagctcttgattcctttgaaatctcttatcagcataagaaaaagcaaaactttattttttaa

SEQ ID NO: 1379 - DNA, 321 bp, Methanobrevibacter ruminantium
  source 1..321: mol_type = genomic DNA
atgggcgaaaaggttttttatggaaaagggattcgcagaatcaaggaagaagaccctcaattatatgattctattgaaaacttggataagaatatttggaatgccaattcattggattataggactcaaaagttgattgcaatagcaatttcagctacaaatcctgaaagttcttcattcctaaagcaattatccaaggctaaaaaagagcttgatatcagtcgtgatgaagttatggatgttttaaaggtagttcttctgacatctgggatgatgccctttaataaggctttagaagtggtcaataagttatatgactaa

SEQ ID NO: 1380 - DNA, 336 bp, Methanobrevibacter ruminantium
  source 1..336: mol_type = genomic DNA
atgagagtgagtattatgaaagaagaagtattctacggaaaaggcatggaaagagtaaaaaaagaagatgaaggtttatatcaagctattgtaggattaaacgaagctgtatggaatggaaaagtcttggattataagactcaaaaattgattgcaattggaatagccgcatccaatgcagatagccgtgcaactgaaaggcagattatgagcgctaaaaaggaattgggagtcactcgtgatgaagttgtagatgtattgaaggttgttttattgacttctggcatgcagccattcaacaaagccttgcagattgcaaataaggtatttgaataa

SEQ ID NO: 1381 - DNA, 756 bp, Methanobrevibacter ruminantium
  source 1..756: mol_type = genomic DNA
atgaattccaagggaaaatatcttgttttatttcttattttaatattatcatttagcataatctctgcttcatttgcttatactggaactggattttctcatgacattccattttccaaatactcaagccagtcaaacagtgatatcctaaataaatacaataatacagattgccatagcgaaatcaaaggaatatgtacttatgtggcagatggggacaccatcgatgttgaaggtgttgggagagttcgttttgtaggtgtcaatactccagaacgtggcgtcacagcatatatctgctccaagcgttttgttcaaaagttctgtctgaataaggaagtcagcctggatgtagatgactctaagagaaacgatagatatggaagaacattggcggtggtcattgtagatggcaagaacctgaatgaaatgcttttaaaggaaggccttgctgagatcatgtacattcctccaagtgagttctatccatatgactggtcttcagactccactacaagctcatcctatacgtcaggcagcagctcttcaaatagcggagggtcctattcatcaagcagttttacaagcggttctacagtctctgctccttatgttggaagtgcaaacagtcataagttccattattccacttgcaaatggggaaagaagatctctgataagaatagggtgactttcaatagcaggtctgatgcgataagtcagggttatgctccttgtaaggcatgtcaaccttga

SEQ ID NO: 1382 - DNA, 414 bp, Methanobrevibacter ruminantium
  source 1..414: mol_type = genomic DNA
atgaagatgcctgaaaagatagacaatatgatgtttgcaccttgcggaatgaattgcaagctttgcataaagcacatatccaagtcaaacccatgccctggatgcctgattgacagtccaaacaagacaaagaatgccttaaaatgcaagataaaaaaatgtctggagacgaagagggtaaaatactgtggcagatgcagtgaatttccatgcaagcttatgaaaaagcaggacaagaactataaaaaacgctacaattactcaacattggataatgcaaaaagaatcacttacactggaataaataggataatgcttgaagacaagttaaattgggaatgtccgtcatgcggaggcataataagcattcaagagagagtttgcagcgattgtggattgaataaggaagattaa

SEQ ID NO: 1383 - DNA, 513 bp, Methanobrevibacter ruminantium
  source 1..513: mol_type = genomic DNA
atggcagctataatatgtccaagatgtggaaaaatgaatgatggaagcttagatttctgcatctattgtggaacttactttgatgattataatgaagaagacaacaatgacaatctcttttttataagatcaatgaccaatgatgggagacctggcaagaaacaagtggtcagattaaatgaaatgccagataatctccaaaaacctaaacataggcttgccatacttttaggatacctgtttgcaatattaggcggacttataggatttgtctttgcaatttatctaattacaagaaaagataagaatgccagaaggcatggactaatccaattggttattctattaatagaatatgctttaataggtgttttaatcttaaatggacaattggatataaatatggttttagatcctttcaatatgactcgcatgaataatataactcaattatataattccagccaaatgaatgttagcgggtctaatatctcaagtttatttggcttttaa

SEQ ID NO: 1384 - DNA, 1842 bp, Methanobrevibacter ruminantium
  source 1..1842: mol_type = genomic DNA
atgaagaaaaatttaagcttaaaaaatattttaattttatcattaatcttcctttttgtattaagcataggatcttcatttgcaacagaagatttaaatacaacaggagataacaatctaatagatgataatgccatggcagacacattatctgatgaaaaagagataagctatcaaaagccattaatgtctgatgaaaactctaattcaaataatggatccgatgaggaaaaggttataagttccaataatagtaaatcagagagttttcttatcatacgtcctaacgaatcttctattacagtattaggaggtaattttcaagatttgcaagatgcaattgattatgcttcagataattatacaatatatctaatttgtaatatgttgggtgaaggaaaaccgattattgttaataagagtgtagtcattgaaggaaatggccatactttagacgctaactattcatctagaattttctgcattttgtctgataatgtagtattaaaaaatttagaacttattcatggctatcaaagagcttatgattcttataagttaaggccatatgatagtaaaaactttgataatgcccctgctttaactcaggagttctttgattatagtgtccctcctcttaattcaactgatgatattgaatatggttggggtcctgctattaaatggcttggaaacaatgggacattgattgactctgcaattttaaataataagattgattatgctaatgatattggggaaggtaaagccgtatcctggcttggaactggcggaagaataattaatacatttatggtgtctaatgagtatcatcatttttttgttccttggggaattgttggctatcagcaaaagtctgaaggaaaggttttagatacttctcctcatggggtttattatggcaatattgaaggaaatgtgtattttcttgatgtggccttaaatgttttgcctaatttggatgttaaaaatgtcacttcatattatggtgaaggcaaaaagatttcatttaacttgaatcatggcaatgcgtccttcgtcaatgaaagtcttgaactcagcatcctttcaaagaaatataactatacatttaatgttttctctgatgaaaatggaaattttgagtttaacttgcctaaaaacttaagcgttggaagctacaatcttatagtgggattcaatgatggcaaaaacaatatcagttcaaataccactgtaaagattaataaagctactgtaagcgtttcagcaccggatttcaaggcccaatattactccggcgccaaatacactcttaagcttatcaatgccaagaccaaaaagcctataagtggcatgaaagtaaacttgaatgtctataacggcgagaaagtcaagacttatacagtcaaaaccaataataaaggaatagccacctttgataagttcacactcccaagcgtaatatatgacgctggaaaacataaggtgaccatttctgttgataagagttatgacttaagcaagaaagagttcactgtccagatttccaaagcaaagacagacattaagctttcaaaaacaagcttcaaatataagaaatcagacaatcttaaaatatccatcaaaaaccagattaaaaaaacagccatttcaggcttaaaacttaaggtaaaggtttacacaggcaaaaaatacaagacctacactttaaagacagataagaatggaatggttaagataaataccaaaatcctttcaaaaggaagtcataagattcaaataacatcagaggataaaagatatctggtatcaaagaccacttctataaaagtggcatag

SEQ ID NO: 1385 - DNA, 2958 bp, Methanobrevibacter ruminantium
  source 1..2958: mol_type = genomic DNA
atgaaaaggaatatttattttattattttattagttacactatttttaatcagtatgagtgttgttagtgcagcaaatgatgctgatgtctcttatattgatgatgaaatagtttctgatgaatatttagaactttctgattctgaaatgggcatttcggatatagattatgatgatattgaatccgatatgcttgaaaatgaaatcaaggagaatggattgtcagataataatgatgttcttaaaagtaatttacctgaaaatgaatttaaggaatcaaattataatgagtattatgaggatataatgaattctaattcccaaaagtatggggaattcattaatttcttgattaacaataaatcatttgaatttagagaaaattccttaagtgaagacggttattttctttatgcaactaagaactatactcttcggttatgggatggtgtaaattacactattttaaaagatgattattattttgcttcaaccgctgaaaaatcaggctattttgtaaatgagagtttttacgatgatataatatattaccatgaatataactattatctggatgaagaattcttaggatggctgatgtggaacgctaactataaaaaagttttcgtgtcaggttcaatagaagataaagttgatatctcctcagtagtcaatcctgaaaagggaggatctcctaaaagtggcaatctaccaagttcttatgatttaagggattatggatttgtaactccagtgaaagatcagggaaatactgctaattgttgggcttttgccacaatggctgctttagagtcacatctcttaaaaactgaaaatacatcatataccctttcccctcaatgggatttctctgaaaataatttgaagaatgtgatgagttcccttggacgaaacggtacagataagttagtaaatagtggggggaatatgttaatgtctttagcatatcttattcgttggagtggccctataaatgaatcagatgatccatataattctaactatactaacattagtgaggatgtttatccattaaagcatgttcaaggagtaaaattcattcctaatcgtcaaaattatttggataatgattatataaaagaatcagtcctagaaaatggggcagtttatattagtatgtattgggattctttttttgaaaagaatgatgcatattatttttataatggaagtggttataattttaattcaaattatatgcatgctgtaactattgttggttgggatgataattatcctaaaaataattttttaatacaatctgaaggtatgggtaatggagcatttataattaaaaatagttggggcacaaatgcggggaataatggttattattatgtttcctattatgatcaaatgttaggttttgataatacatatgccggctttgcttttacaaatgttgaaaatgtgacaaattatgattataattataactacaatcctttaggctttacaaatgtttttcctgttaacagcactagtgcgaaatttgctaaccaatgggctgcattaaaaagcggaacattaaaatcttttggtctatatgttgtaagtccatctatttgtacagctaatttgattgttaatggaatttctattggaaacactacaagttatttatctagtgcaggttttcatactattctatttaatcaagcagcatatgttaatgtaggtcaaacatttagggttgaaattactttacaacatatcgggtcttcacatacttatattcctcttgaggaaagaattgaaaattattccaatgttgtttccggatacaatcaatcatttttatggttaagaaaaaatggtgtagatcaatgggtggatttaaagactgaagtggataatgccaatatctgtttgcatgtttatactgaatgtattgaaggattgcttgaaactcatgttcgtagtaacaatctggttacttattttaataccagcagtttaaatgcaacccttgttgacggatcaggaaatcctatagcaaataaactaatatactttaaactattaaatgtgacatataacagaactacagatagtaatggtaaagtaagcttgccaatacatttaaatccgggatcatataaatttttaataagtttcctaggggatagcatttaccataaatccaatcgtcttgtcaatgtaaaagtaaataagatgcatacaaacattaatcaaaatgtcagtacggttcatcaaggagaatatttaggtttaatattaaaagatagcaatggaaaagcattatccggacaaaaagttgcattctgtctcctcagtgtcacttacaacagaactacagatagcgctggaaaagcaaagcttttaataagattaaatccaagaaaatacacattcactctaaaattcttcggaacagcaggttactatgcatgcaacaaaactttcaatctaacagttctcagtgccaaatcaggacaatcttatgaaatgggcatagatgattatgatggaaagaacattgatgagaacattataattaataatgaaacttttgaaagttcggatgtagtgaataatgacataatgtatatgtataatgacactcaatattataatataattaatgaagataaaggttattataataatcattcaaatgatatcaattttgaactattggataatgatcaaaactatatatactctgatttaaatcttttagaactattgaataatgatcaaaacgatatatgctttgatttaaatcttttagaatatattgattttgataaaacagattattataacgataatctttataatctcgaacattattatatgaaagattcattaaccgaaaatgaagatttatacatttgtgaaaataagctaaatattcatgatttaaatcaaataaagataggaggtatttaa

SEQ ID NO: 1386 - DNA, 996 bp, Methanobrevibacter ruminantium
  source 1..996: mol_type = genomic DNA
atgtccaaatataacgaatatcaagataaaactattttagtaactggtggagcaggctgtgtaggcagcaacttaactagaaaattagcagagcttggtgcagagaaagtgatcattttagataatatgtcctctgcatatgaatggaatgtgccaaccaacgaaaacgttgagcttattcaaggggacatccttgatgatgaggagttaaagcgcgtatttaagatgaagccggactatgtattccatttggcagctcacttcgctaatcaaaacagtgtggacaatccggaaaccgacttgatggttaacggcataggcattctaaaggtgcttcaatatgcacagctcactggtgttgaaagatttgtatactcatcctctggctgtggagtatatgggcttgactctaagatgccttttgaagagcatgacatatccatttccttgcacaccccatatcaggttactaagcttcttggtgaattatataccaattatttccataacctatatgacatgcctattgtaaatgcaaggttctttaatgtattcggcccaggggaagttccaggaaaatacagaaatgtaattcctaatttcttctattggtccatgaccaaacaggcattgcctattacaggagacggaaccgaaacaagggactggacctttgttggagatatcgtcaacggccttttgtcaatgggagttgaagaggaagcgataggtgaagcgataaacctaggttcaggtaaggatcacagagtaattgacatggcaaacaaggtcaaccaactcactggaaatgaagagggcatcgcctatgttgcaagacgtaactgggatgctaagaccaagcttttatcttcaattgataaggcaaaggacattcttggttataagcctaccgtatcctttgatgatggtttagaaagagtttacggttggtttacagacaactgggaagacattgaaagagatgctgaattttaa

SEQ ID NO: 1387 - DNA, 774 bp, Methanobrevibacter ruminantium
  source 1..774: mol_type = genomic DNA
atggagatagaacatacacacgaacttatcaaagatgtttttggaatgaatatgaaagaggcaaggcttttagacgatctcttaaagactaacgacctatccgagatattggaattaggctttgcacatggagtgtcctcctgttactttgcatccacacttaaggatatgggaaaaggtcacttgacaaccatagacaatactacagctaaaacccgtaatcctaacatagaggaattattaaaaaagacagggcttgaagaatatgtgacctattattttgaagcggtttcatacaattggagattgatgaagctgattgaggaaaataacggacctatatttgacttttgctatattgacggcgcccacgattggaacaatgacggatttgcattccttttagtggataagctattaaagcctggaggaattataatatttgatgattataactggagcttttcacgaagcccctctatgagccagtctccaagagttcttgccatgtcaaaggaagaacaggaaacccctcaaattaaaaaggtatatgatatgctagttaagacccatcctaattatcataatttcaagatcttaaatgacaatagctgggcattggctcaaaagaaggaagaagaggacctttttgaaaaccaagtaaataagctcgaatctgaaaacaggaaattgagaaaaaagcaaaaggagattatgtcttcaaacagttggaagatgacaaagccattaagacagcttagaaataaaaaataa

SEQ ID NO: 1388 - DNA, 636 bp, Methanobrevibacter ruminantium
  source 1..636: mol_type = genomic DNA
atgaaagctaaagagatgatggataagaaatttgtttatgtatcaaaagacgatacaatagaagctgtttctataaaaatggaagaatctaaaagattcactgcccctgttttagataaggacatgaaattggaaggatggattacttcattcaacattacaaaaggcttgcgcgaaggcaagaaactgatttcagaggtaatggatcctgttgagaacatattggccattaaggaagatgaggctgcaaagaatgcggttattgaaatctcaaagcataagctaatcagcgttcctatcattgatgatgaaaataaggtcattggagtatgcagatctgtagatgtggttgattcaatgtcttccctttatgacattaaggttagcaagatttatgaagctatggaaaaagagcttaaaggggttacttgggatgaattgatggaggcttctgctaaaatcagtacaagaaccacaggggtaaagatcactgctgaagaatatgagaagaatattcagaatgccactttcggtgaagcgatttgggcaactggtggacttgaaaagttctttgcaggtcttatttcagttggagaaattgtaattgcacgtaaagtaggccgtgcaagacgctag

SEQ ID NO: 1389 - DNA, 828 bp, Methanobrevibacter ruminantium
  source 1..828: mol_type = genomic DNA
atggaaattaaactaaaaaagcagattgaaaccttagagagggaaataactcttaaatctgtagatttagatgaagatattgaagattttaatgtggatattcatagctatgaagataatgacaagctcattaccatttcacctcgctgtgtcagatgcaatctttgtgtagaggaatgtcccattaatgtaatcagttcttccacttggcttaaaagggctaagattggcgaaggctgtgtgcaatgtgaaatctgcgctcagacttgtcctgtttcatgcatttatgtatgggatggggaaactgtaattaaagaggatgattctgtagaatacaccttaaaagagcttaaggttccccatagaaatcttaaaatggaagacatttccataaatcgtgaagtctgcattggctgtggctcttgcctgaagtattgtcctactaatgcaatatcccttagaagcaaggagtttattgaagcccatggagaggaatgccctgaagttggagccattgactctgaacatggtcatatgtattcatatattgataaggaccgctgctgcggttgcggatcttgtgcaaacttatgcattcagggagcaatcactcttaagagagatttaggtcctgtggttatttacagccaccttgatgtaaatcaggacatctgtgtggcctgtgagctatgtgaggataactgtcccgtcggcgccataaaggtggttgatggtgagatagttcttaataatgacaaatgcataagatgtaaggaatgcagttcaaggtgtcctgtaggtgctttgaatttggtttcagataattag

SEQ ID NO: 1390 - DNA, 1029 bp, Methanobrevibacter ruminantium
  source 1..1029: mol_type = genomic DNA
atggatgaaaaggatttaaaatcttcaaataatgtgactgctgaggatttaggcgttgatgagatagtctatgatgcaatcaatgtagatgtcatcggctttggcgcattgaatgtggataagctttaccgtgttggccatattgcagagattgatgaagaaagcttcatcaaaggagaagagcaatctccaggtggttctgcagccaatacaataatcggcctatctaagcttggatgctccacatcttatatcggaaagatagcagatgatgaggaaggagacctattggaatataaccttatggtcaataatgtctatctgacaaatcttatctatgccgatagtggcaattcaggcaaagtacttggatttgtctcagatgagggagatagggcattatatgtcgaccctggagtaaacgatgacataactattgatgagattaatccattgaatgtaaatgcctgcaagatacttcattacacctcctttgtaggggattcctttaatgctcaaaaggaattgctcaatgtcttaggtgatgatattgtattaagctttgatcctggaatgctatatgttaaaaagggagtcttagaacttaaggaaattcttgaaagaactaatattcttctcattaatgaaaatgaactgaaaatcctctttgaagatcattataaggaaaaattatctgtctctaaggatttgacctttagggacttggcagttttcatccgtgatgatggcattgatacagttgttgtaaaaaggggagaaaatggagtctatgcaataaataaagatgatgatgaggttaaggcacctgcattcaagtgtgaggcagttgatacaactgctgctggagattcctttaatgcaggcttcctgtattcatatcttaagggctatgatttggctaaatcatgtctgattgctaattgggtggcttctaggtctgttcaggcaattggaatatctggattgcctaatctggaagagctggaagagttcatatcttccttatga

SEQ ID NO: 1391 - DNA, 891 bp, Methanobrevibacter ruminantium
  source 1..891: mol_type = genomic DNA
atggtaaattatgataaggttgaagataccttctttgaatcatttgatggaatgtatataagagcattgattacagcagaagacgaattgactgtaaaggaagcagcatatgatgctacagctactccaagtgcagttattggcagggttgaagcaggtgtagagtcctttgtaagtggagataagactccagacggaaggcctggagccattgttcagttctggcttaccgatgacttggctaagtttgaaaaggaactgtcctataggattcgccaggacattcttgtaaagccatttacaagggtattcagcataactgaaaatccggtaggttcaattcctatgatggaaagcgtaggccattgcggtgacggctatgaatgggaaatcgaggagtatggaagaaagatgatcaatgttcctattgcagttcccgattttcaaatcgagtcagagcttgcttatgcagaaggaatcatgggaggaaacttctggtatatgtgttccactaaggaagctgtattgaaggcaggaagaataataatagacaccattatggaagttgatggggtctgcactccatttggaatatgctctgcagccagcaagcctgaaacaaacttcccagagattggtccaagcactaatcatccttattgtccttctttaagggaaagacttggcaaggagtcaaaggttccagaaggagtaaactatattccagagattgttattaatgcagtaagtcaggaagctatgaacttggctattaagaaggctgttgatgccattattgacataggtggtgttgaaaggatttccgctggaaactttgagggccagttaggagagcataagaccaatttgcttgatatcttaaaggaatga

SEQ ID NO: 1392 - DNA, 1107 bp, Methanobrevibacter ruminantium
  source 1..1107: mol_type = genomic DNA
atggtaaaaaaggtttttatcacagattgtgaaggtccattgactttaaatgacaacgcctatgaactagctgctgaatttattgaagatggagataagctattcaagatcatcagtcgctttgacgactacctagttgatgaggttcatcttgaaaactatcatgcaggggacactctcaagcttatcgttccattctataagttagcagggcttacaaacgaaaagatgattgaattttcaagaaataatatctatattgttgatggctctaaggacacccttaaattagcaaatgagcttatggattcttatatagttagtacaagttatggccaatatattgaagctctatgcaattatatgaactttccatttgaaaacacatatcacacacaactagatatagatggggctactaattttaaccaatctgataaaaaatcatcaacaattggagtcaagtctccattgtttattgaagagcttaagaaagtggaggaatttagaaagataattcttgagcatggtgatgaaaatgaggatgacttcaatgtattgtatgacattttctttaatgagtttccaaagcttgaaataaacaagtatatccaaagtgttaagactgttggaggaaagggcaagcagattgcagttgaggatatagtggagagattatctcttgaggaaggttccataatctatatgggtgacagcataaccgatgtagagcctttgcagtatgcaagggacaatggtggtttatctgttagttttaacggtaacgagtatcctttgaatgtggcagagatagctgttatttcagacaatacaattgtaagctcaattcttattgatcttcattccagatttgataaggattatgtaattgattttgtgaaagcatatgctgaaaaaggtccagatgatgcattcaaggattttgaagttgattattcacttgttgaagagtttgaaaagatattttataataggcaggcccctataattgatataattacagatgagaatagggattatctgcttggattaagcaagaagatgagaaatggcattcggggtaaggatattggcggattaggataa

SEQ ID NO: 1393 - DNA, 114 bp, Methanobrevibacter ruminantium
  source 1..114: mol_type = genomic DNA
atgattcataaaaaatattatatgaaaaatgaattttatctgttaattaaagagattaatcaaaatatgatgtttatttattcaaaagagtattatccaaagacaggaagatag

SEQ ID NO: 1394 - DNA, 1452 bp, Methanobrevibacter ruminantium
  source 1..1452: mol_type = genomic DNA
atggtaactgtcaaccctataccaagaccattgcgtgatgttcatatagaatatgagattgataatgaaaagtgcataaattgcagtgataaaccttgcttaggcgtttgcccgattgatgcagtctatcaggatgaaaacaccaaattaatcaagttagatgagcactgctttggctgtgtattatgtagcaatgcatgcccttatgatgcaattcacataaagaagaccttatctgaacctatccgtgaaaatgttccaaacattaataaaaagctttgcagagcctgtggagcatgcgttaacgcatgcaagtctggagctatccatctcaagtccactggaggagaggagatgcacagtgaaatagatgagaataagtgtatccgctgcggatattgtttcagggcttgcccaactgatgcaatcaagtatggagagattcttccaaagacagttaaggaaggtaagactctctgcattgaccatgaccaatgcataggctgcatgacctgtacaaggatatgcccttccaagggagctataaatgtcggaaagaccaataagctgccgttcattgaccctgcctactgtgcaagatgtgaagaatgtatgcatgcctgccctacatatgcaatagactatgttgaaagggaggaggcatttgagtcattcaataaaatcaagacattggagatagcatctgagatattggatagggatataaataagatatccaaaggcataaccaatattgacaatgttttggtgaagctccttgatgacatctctaaggattatcatttcgatgactttgactatgaaaactcaatggacattcgagacgttccaaggggaatggagttttcagatgttgagatattcacatgcacaaactgcagatccattgtagttaatgttacagaatacctgaacgagcgtttgaatgcccagttgaataaggatttggatgttgtaaaggtattggaccttgtggaattcttcccgccttcattaggaattgaagtggtggaggaaaactgcataagctgcggattatgtatggatgtatgtccaaccaagtcaataagccttgacggacctaatccaattaagatagatacagacaattcatgcgtatactgcggattatgtgccgaggcctgtaattttgaggcaatcaagcttgccgaagagttctttacaaacagaaaccatgagatattctttattaaaagagaccttaggggaagaagaaacggaactgtagagataaatcattccgcttgccaattatgtgaggtctgcattaagaactgtccggttgatgcaatgtcagttgaagatgatatgataactgtaaatcatgatgaatgtatttcctgcagaaactgtgagggaatctgtccggtaaatgcagctagagtctctacaatatggcagttcttatag

SEQ ID NO: 1395 - DNA, 1035 bp, Methanobrevibacter ruminantium
  source 1..1035: mol_type = genomic DNA
atgtcctcaattatttggtatatttatgaatttgcaagaaagacttggatagatggcttctttgatgcaaaatccaaagaggacatagcccataagccagacagattcagagattttcctaatgtaatcaaggaaaactgcattggctgcggatcatgcacagcatcctgtccatctccaaatgcaatcaaattaatcagggattcagatacagaagacgcctttggcctaatctatcctgtaatcaataaggcatcctgcataagatgcgggttctgcgctgaagtatgcccatccactccaaagaccttggaatgcggagagaatcactttatccgtgaagagttcaatatcattccatctaagagaaaatacattgtagacgattacctatgcataagatgtcataagtgcatggacgcctgtgaagtgggagcaatcgaagagtttgatgatagggtttctgtaaatcagtccaaatgcatttcctgcggcaaatgcctagaggcatgtcctgttaaaggtgctatgagaggagtatttgtaaataacctggaagagcaaaagaaaatcatcaaccttgctgtaactactttagaggattatatagaatcaaagcaggatgatttgattcaattaggcactgacaagctatttttagatgaattaccttttaaacctatttttgataagtcactgaatatcctaaatgataaggaagtggttcacgaggttttagaggatgcaatcaacagattgaaaatcagaatcataacctgggacagtgagaactgtaaaaagtgtcaaatgtgcattccagactgtcctaccggagcaatctcctttgattatgacaaggacaccatagtgagggataaggaaaagtgcttaaggtgcagcatctgctatcagacctgtccgtttggagtaatcaagtatttcttagctaagtttaatctagataaaaacgataatgatgaagaggttattcacatctctgtaaaagcttctcaattagcggaaaggagggcttaa

SEQ ID NO: 1396 - DNA, 1128 bp, Methanobrevibacter ruminantium
  source 1..1128: mol_type = genomic DNA
atgatattaccaattggaccaattcatccaggcttaaaggaacctttaaggcttaagcttcaaactcaaggtgaaaaggttataaaagctgagattgattatggttatgttcataggggtattgaaaagattatggaaggaaagacttggcagaaatgtatttacttatctgaaagaatctgtggtatctgctcatatgaacacacacaaacatttgcagagactttagaaggaatctctggtgtacaagctcctcttagggcacaatatttacgtgtaatcacaaacgagatagacagaatccagtctcacctgcttgcaaattcaacattcttcaagacccttgaccatgagacattgttcatgcatgtacttgccttaagggaatatgcaatggactctcttgaactattaactggaaacagggtcaatctaggctggaatgttgttggaggggttagaatggatgccgatgagcgtcattttaacgctatccttgaaaacatgaagaaaatcgaagatggattcgacagacacgttgcattgtttgaagaggctcctatagttgccttaagggcaaaaggagtcggagtcatgactaaggaagaggccataaaaggccatgcagtaggtcctatcggaagggcttcaggcatcaagcatgacttaagagaggaacattatacttataaagatcattttgacttcaagcctatttggagaaaggagggagacaattatgcccgtactttaaataggctttatgaagtggagcaatccattgacttggtaaggcaggccattgaaaacatgccaaaaggagatataagaactcctgtagacatcccttcaggatatggggaatggagaaatgaggcccctcgtggagaggtaagatatatggctgaaaccaatggcgatttaatcaagaggatttcaattagaaccccaagtattatgaatattgattcatgtgcaagatatatgcttaaggacgttgctacagttgctgatgctgtttcaacctatgcatcatctgatccttgcattgcctgtactgaaagggtggctataactgatattgattctggcaaatataccactaaagacttttttgaggtgaaatag

SEQ ID NO: 1397 - DNA, 462 bp, Methanobrevibacter ruminantium
  source 1..462: mol_type = genomic DNA
atgcttaagaaacttaaagatattgtgagaaaaagttcaattcatgtctgtatagtaaactgcggaggatgcaatggctgtgatgtagagttagttgcacttttgtccccaagatacgaccttgaacagtatggaatctatgttcacaataatcctcgtgaagctgatgttcttttagtgactggtgcagttacagaacaatggagagacaatttaagaaggatctatgcaaaggctcctgaacctaagattgtggttgcagttggaaactgtcctcagtccggagatgtcttcgcacaggaagggggaagagttcttgctccggtttcagacttcattccagtggatgcagccattcctggatgtcctccaagaccaagtgaaattctagaggcagtcttgacagttgctcctggagctattgcagctaaaggaagagctcaagatgcaagaaaagattag

SEQ ID NO: 1398 - DNA, 384 bp, Methanobrevibacter ruminantium
  source 1..384: mol_type = genomic DNA
atgaatagtgaagaaaaatacgaaatgatgaaattaagagttcttcatagttttaaatgggaaaaggatcttaccattccattatctgaagaatttggaatttccaaagaggaatttgaagaaattcttatgaatcgttttgacatgagtgatttggaaaatatgcatgctacatttgaaatagcaaatagagaaaagataaaaagacagatgcatcttgatttaagactctattggctaagcgatgttgctaaattaatatctgaagaggatgcagatagaatttgccatcaattgacaaaggatgttattcagcatggcaaaaaatacgaagatgccttagatgaaggcagagctcaaatagttgaattattaagagaataa

SEQ ID NO: 1399 - DNA, 333 bp, Methanobrevibacter ruminantium
  source 1..333: mol_type = genomic DNA
atggaagaattatattatatgatttatattatagtttttatagtaggatcaattcttggcctattattaagctataagaagcatatggaaccttttataatatctgaaattgatgttttaaccttagttttagctatagtcggatggtttttattattaaaccatggcttgattggatttgttagttctgtaattcttctcaccatagcattcttctgcattggtcttgcaataggaagaaggccaggatatggtagaaaggaaactgcaatcggaattttggttgcagtaattgtctggattttaacatctggagtcatatttaaattttag

SEQ ID NO: 1400 - DNA, 156 bp, Methanobrevibacter ruminantium
  source 1..156: mol_type = genomic DNA
atgaatgatgaaaaaggaatgagagtattaactttcattagttgctttaggagtctttattgttgcaggtttagcagcatacttccaaagcattctagcatttcctatggctataataggtttaatattcgttccatttatattgatgcaaaatag

SEQ ID NO: 1401 - DNA, 861 bp, Methanobrevibacter ruminantium
  source 1..861: mol_type = genomic DNA
atgaatctaatggctcagattttaatcaatgtagtaatagctttccttgcaggtagtcttttattaggtttccatagaaaagtcatggcgagagtccaattaaggccaggacctcctattattcaatatctattgcattcattgaaatttttctttaaggaaacaagcttccctaaaactgcttcaatgccattttatgtgggaattacagtaatcctagcaggtatttgggttaccggagtaattgttggtccggtttgcaagggttccttaatgataatattcggtatctatgcaatccataagattgtagagcataatgcaggatcctcatcaggttccccttacggtaagctaagctgtgtaagggctgtattctcagcggcaggagaattgcctctctttgcagtaattgctgttgtcttccttctaactggaaccatggatattggtggaataatacaatatcaagcagcaaacggtcctttggcatttaaaatccctcttgcagcaatcatgttctttacattgatagttacaaaatccccttattctccttttgcaataacaaaaggaaaggaaatcattacaggatttgaaaccgagcatttcggtatgcttagaggatatataatgttttcagagtcaatcgcttggtatatcttgctatggctcttcttgacaatattctttgcaccgataggagtggtgggataccttataggaatgattttgatatgtgtgattacaggatttatcaatgctacaactcctatgttaaatccaaaccattctgtaatggctcaaatatccattgcagttatttgcgttgttggttcaattatcatgattattatttaa

SEQ ID NO: 1402 - DNA, 216 bp, Methanobrevibacter ruminantium
  source 1..216: mol_type = genomic DNA
atgaaaaaaatggaaatggctagttatattatcttaattgcatctgtattagctatactttatgcattaatatttaatccagctgattggatagtctatgctatagctattgtatgcataccatttttagttctttcatttggtctattaaccatgtctaaaccaataaaagaagaagaggaggaaagaagagaagaaccatttacaggttattaa

SEQ ID NO: 1403 - DNA, 669 bp, Methanobrevibacter ruminantium
  source 1..669: mol_type = genomic DNA
atgcttatagagaacttaggtggagactttttaggaacaatccctcttggagatattgttctatacttaaacccgctccatatattcctgtttgttactatacttctatttacagctctaatagcaatcagtcgtactgaaacacaagttgaagctatgtttggctcacttgatgagaataaggttgcagtgggactgaaggagtttaagcatagaagattcttagcgataatatgtggtatagcaacagcgggagctatgattacaggggacctttttaacttcaccctatttatggccttgattggtattgtcaatattggtatcgtttcagctgtaaagcaagtggaagtcttaaattcagcttatcagtatggattgattgccatgatgtgtggattgccattgtttggtggagcagctataatattggcagctacaggtaccttaagcttgtttgagcttgcaagcattccagcaaatcctatgatgatatttggagcacttgttatgctaattggagtctgcggtgaaagcggtatagctccattctttgcaagcaaggcagagatgtttagaactccaggatctccattcattttgattattcacttaagttcattgttccttatagttagatttattgaaatcctattgactatattgtaa

SEQ ID NO: 1404 - DNA, 678 bp, Methanobrevibacter ruminantium
  source 1..678: mol_type = genomic DNA
atggtagcaagcgtaatccctcaagttgttccggctttctatagctcaatgtataccacagccttatatggtggtttgattgtagcttttattggcttgattggagtggcaatggaaaagagagacattcagattcttattctaacagatatagttggattggctatgcttatcgtcgtagctgcagttggaactgacttgtctgaagcattgatccttccaggtctggtagttgaattggcagagatcatggcaatttcagagatattgatatctcgtgagatgagaaaggctgataaagatacctcatttagcccaatgcctttagatattgatatggagattatgacaactgctcctaacttcattgcattgcttctaatcggatacggcatattcctgtctggttttaccggcggtgcagtagctggcggaggtatcgtcatttatgtacttagtagaaaggttagaggattgccgatatttgttcttgatggcgtaggagcaatatcaggtatttcctggtgtttatggataatcggtttcatattcttcttcatccttccgcaatactggcttttaagcctattccttgcagctttaggacttttattaaaggttgcttcaaagatcggattgattggaatacttatgagagaggaatatggaagaaaataa

SEQ ID NO: 1405 - DNA, 600 bp, Methanobrevibacter ruminantium
  source 1..600: mol_type = genomic DNA
atgcctaaaattgcaaaattatggaataagctagcagatccaaagaacattcctaggctgtttgctgtaattttaggtctgcttctcattgccggattcctaatccctatgggattgaatacagatcaaatctacactcgtccggcacctcaaagtcagatggatgcaggacttcctcttgcgccatacgataggggaggagaggttttagagtctccaggcataacagaagcccaatatcctgaaaatgcagagaatcttggctggataaactcatatatgactccaatagcagagatgctcaagggaatatccccatactttggaacaagtatctgttcatctccaggtggtcttattgatgaaatcctttattatacaagaggtttcgatacaatccttgaatcctccattctcatgatggcattcataatcgcttcatggcttgcaatcaactttacaatggataggacaaaggatgaaagggatattgctgaagatgtaaaaagagccattgccagttctgacagactagccaatgaggttgaagaaagcaatagaaaggctcgtgaaaaacaagccaaaaaggagtttaggtga

SEQ ID NO: 1406 - DNA, 261 bp, Methanobrevibacter ruminantium
  source 1..261: mol_type = genomic DNA
atgtttaatctggctatttgggtttatttaggtttggcattagctatttttggaagcctcgcaactgtatggggtcctggagtaaaggatccagttattagaacaataaacacagaagttgcatccgtaggagtttcattaattttactttgttataattctacattggctcttttgacattgattgcaactacaatcattgttaccttaatcttgtttagagctatttctcgcttagaagagataggggctgatgtataa

SEQ ID NO: 1407 - DNA, 342 bp, Methanobrevibacter ruminantium
  source 1..342: mol_type = genomic DNA
atgttggaatttataaatatagaaacaatatcaatggccttaatgattataggtgccattggagttgttcttcttaaaaaaccattggataaaattattatggtttcagttctggaagcaggtctgtttttagctatcgttagctttaaataccttgatgtggccttcctaactgcagttctcgatccattatccatcattgtattcttacttgctttaattaaaatcaataaagtgcgcaagtctaaattagaggactattccactttagacaagcttaatataagcactgaaaatctagaagaaaaatcattagataaaaactctgaaggaggcaaataa

SEQ ID NO: 1408 - DNA, 279 bp, Methanobrevibacter ruminantium
  source 1..279: mol_type = genomic DNA
atgtatatagaaatcataggagttattacaattttaatggctttaagagcagtaataactaaaaacagagcagaaaagttactttacataaatgtaataggtttctgtgtatctgctatcattgcattatatattaaaactacatttggctttgtattagctgcagctttcttcatttcctctacaatcggttcaaatgcaattgcttatagcttaaaggatttggaagatgagataagctatgataaggatatggaagaaagggatgaagagaattaa

SEQ ID NO: 1409 - DNA, 501 bp, Methanobrevibacter ruminantium
  source 1..501: mol_type = genomic DNA
atggatatgatcattggaataatattagctgcagttatctcttggattaattttgtagttgttgacacattcctaggcttgcctgaggctccaggagttaagggtgcagagactgttggctattcaatcaaggaaaggaaaggagatttggctggaggtttcttccaaggaaacattttatgttctccagatgcttcagcaggaaccttgatagcagcaataggagtctatgctttaggaattcaaggagggcttattgcagcattgcttgtctatattggaaacaggctatgtgcagatccaggatatgccggaacctgcggagcattgaccatgacactattgatattcattttctcatttgttggaatcgaagttgagatgttcatttgcggaatggtgattgcaatatttacaattcaaggaattcatcatcctacaagttccagattgcttggaaagattgctaagtcctttggcaggtatactaaatatgaataa

SEQ ID NO: 1410 - DNA, 327 bp, Methanobrevibacter ruminantium
  source 1..327: mol_type = genomic DNA
atgattagtataggtgctaatggatttcaattgttgataaattatatagtggctatagtagttgcagtcattatcgcttttgccttaagattgccacttcttcccgaaaggccaatcaggttctcttggactactagcgcactgtttccaacccctatttttgctataggaatattggcaatattttattcattaaatgtttattggatttatgacggtctcatcttaagcgtgattgtcggattagcttccgctctctttgtaaagtatggatttgactacatattcccaaagcctcctcaaatcgaagacggggggaatgtctaa

SEQ ID NO: 1411 - DNA, 936 bp, Methanobrevibacter ruminantium
  source 1..936: mol_type = genomic DNA
atgaaggataaaaacgttgtagtaacaggagggcttggatttataggatcccacattgtagatgctcttatagatgacaataaagtcacaataatcgacaatctatcaagcggtaagatggaaaacctaaacaatccgaatcacgagaacttgacaatcatcaaagaggacttgatggacgcagacttagaaaagatattaaaggataaggactatgtcttccaccttgcagcacttgcaagcgttccaggaagcgtagcagagcctttaagatacaatcaaaacaatattgacgctagcttaaagctatttatagcctgcaaaaacaacaatatcaaaaaagtgatcttctcatcttcctctgcagtctatggggaaaatccaaacatgcctcttaaagagagcgaaaacttccttccttgctccccttatgcagcccaaaaggcaagctgcgaactatatttaaagtcattccatgaatcctacggattggattatgtagcattaaggtatttcaatgtcttcggtcctagacaagatgaaaactcaccttatgctgctgtaattcctaaattcatatctgcaatccttaacggagaaagtccagttatttatggtgacggcgagcaaagcagagactttatttatgttaaggaaatagctaaagcaaatatcctctcagcagaatcagactacaatggagtcatcaatgttgccctcggcaagtcaatgacaatcaacaggctatttgaaataatcagcgacgttctagaatcagacattgatgtaaaataccttgatgaacgtccaggagacattaagcattcccttgcagacattagcaatttggataagattagtttcaagccagatgaggacaagtttgaagaacaattgagggaaactgtaaaatggtttataagccagatggaataa

SEQ ID NO: 1412 - DNA, 1494 bp, Methanobrevibacter ruminantium
  source 1..1494: mol_type = genomic DNA
atgaaaatagaagtactggatacaacacttagagacggagagcaaacccctggaatatctctaaacactattaaaaagttaagaatagccacaaaactagatgagataggagtcaattcaatagaagcaggatctgcaataacctccgaaggggaaagggaagcaataaaggcaatcacctcccaaggactgaatgctgaaatcgtaagtttttcaagaaccctaataaaggatgtagattattgcttagaatgtgatgtggatgcagtcaacattgttgttccaacttctgacttgcaccttcaatacaaactaaaaaagacccaagatgaaatgcttgaagatgcagtgaaggtaacagaatacgctaaagaccatggagtcaaagtggagcttgcagctgaagactcaacaagaacagacatccaatacctaagaaaaatatttaaggcaacaatcgatgccggagcagacagaatctgcccatgcgacactttaggaatcctaacaccacttaagtcctttaacttctataagcaatttacagacttgggagttccagtaagcgcacattgccataatgactttggccttgcagttgcaaacaccttatccgctatcgatgggggagccagcagattccatgcaaccataaacggacttggggagagggctggaaacgccgcccttgaagaggttgtagtctcactatacacattatataaagacgaaagcaatgaaagaaaatacgaaacagacattaagatagatcagatttacagcacttccaaattggtttcaagattaagcaatgcatatcttgctccaaataaaccgattgtaggtgaaaatgcgtttgcacatgaatctggaatccatgcagacggagtcattaaaaacagcgcaacatatgaacctatcatgccagagcttgtaggacacagaagaaaatttgtaattggaaagcatgtgggaacaaaaggcttaaacaaccgactggaagagcttggccttgaagtaaacaagaagcaattaaatgatattttctataaggtaaaggaccttggagacaagggaaagaccgtaacagacacagatttggaagcgatagcagagcatgtcctaaacatagagcaggaaaagaaaatcaatcttgatgagctgaccatcgtatcaggtaacaagatcagaccaacagcctcaataaagttgaacattgaaaatgaagaggtaatagaggctgatgtaggtataggtcctgtagatgctgcaataaatgctgtgaataagggaattaaaagctttgcagacattcagcttgaagagtaccatgtagatgcagttacaggaggtacagatgcactcattgaagtaatcatcaagctcagcagcggagataagatcatatcagcaagagcaacagagccagatattattaatgcaagtgtagaggcttatatagatggtgttaataggttattggagaataaataa

SEQ ID NO: 1413 - DNA, 525 bp, Methanobrevibacter ruminantium
  source 1..525: mol_type = genomic DNA
atgaaatacaataaagaattagctaatttagacaatgtagaaatattaggctttaaaggaactatagaaagcattccaaaaacattggaagagatagacaatatcagaaatagctgttgtgatgttggaaccatccaacttatgaatgcagatgcaatagctgggcctaaacaccttgaacatggaacaatccatgcaatgaatgcatttgaaaggggagacaatctagctaatgatttaggaatagagatcttacttagaacatctgcccaaaggcaaatatccaaggcctttaagatacttggactgaaggaaggggaaatgaacatagccgttgtaatgatagattgtccagattactttatcgatgaattatctaatatatttataagagatgatagcgttttagaagccgacgaatcaaaattaatgaagatatatgatattcctgaaaaagaattaaagaccatacatcttagcgacatattaattgataaaacaagcaaattaatcattgcccaataa

SEQ ID NO: 1414 - DNA, 1443 bp, Methanobrevibacter ruminantium
  source 1..1443: mol_type = genomic DNA
ttgttcgctatagtaagcctatctgcagtcagcgcaagcgatgatttttcaagttcccttgctgatgactctgactctgatattcttgctattgacgatattgcacaaaaggacagttctcataaactgatggatgaagaggacattagtgttgaatttgaaattgatgatggggatgatgatactagctatgattcctactatgacgattctccaggtgatgactggtcaaactatgaggattacgaccctgaattaattagtgaagatgctatattaactaaaatagaagtcttgaatgtccctagccattatggtgatgacaacatttcatttagattaatcgatttgaatacaggccttccaatacctgatgttaatttaggccttcaggattcctatgattatgatgtctattcattcttcacagatgaggatggtgttgtagtatatcctatccctgttaaagttggagatttctctattgtcataggattttatgaggatatgatggttgttaatgaattggatgacatggtatgtaactttacaaaattaaatgtctcaattccaactgttccagcttcaataaagattacaaaaacaggcacttattataatgatacagtattaaaggtttctttggtcagttctgttaaggaagtcttatcaaatcaaaaaatcaatctcacattttcaaatggtaagaaagccacagtgaagactaattccaaaggaattgcaaactatgcccttaaatttgcacctggaaactattcagttacagcagctttggtttccgatggcattgttgaagccaataagtccagcttgaaaaacatcaagatcattaaggctccaggcacattaagccctactgcattgtcaaccacttatgcttctggaaagtatttccaaatcaaattgacaaattccaagacaaaaaaagccattggtggagttaagcttaacttgaaggtatatactggtaaaaagtataagacagttacagtaacaaccggatcaaatggaattgccaaattttccgcttccaccttatctgtaggaactcataaggtaattgtaaccgtaaaggatacaaaatatgtctctgcaagttcaaaaacaagttccattaagatttctaaagcaagcagggcgatttctgctccgaaagtcacagccaaatataagagcagctcaactttcaaggtaaccgtaaagaataaggcatctaaaaaaattcttagcggagttcaagttagcttaaaggtttatactggcaagaagtttaagacatacaatgtaaagacaaacagcaaaggagttgctagctttaataccaaatccctgactaaggcaaaccataaggttattgtgaatattaaggcaagtgcaaattataatgcagctagcgctactagctatattaatataaaataa

SEQ ID NO: 1415 - DNA, 1503 bp, Methanobrevibacter ruminantium
  source 1..1503: mol_type = genomic DNA
ttggaagagaatccaattgattttaaggataattcaatcaattctaaagccttaaaggatagcgattacgagcatgcctctgatgagttgtctcaagacttatacaatagaatcataaatgcaaaggaaaatgaaataatattaatcgagcctggaacctataagatacacaaggtccatcttacaaaaaacataactctgcaaggaactggcgacccaagagaagtgattatagacggtgagcaattaggaagtgtctttttcataaatgatataaatgtcacagctcaattttacaatttaactataataaatgggttatcagataattttggcggtggaatttgtattgaaaccggaaatacatatgttgataattgtatcttcataaataacactgctttgaatataaccaatggtggagctatctccaattatggaaatgaaaccaataggagttatttatttataaacaactcattatttattggaaaccatgcagatcatgatggaggtgccgttacaacatgctatgcaatttccgatatctataattctgtattcattaataattcagctgtaagggatggcggagcaatccgtgtaagcgtttatggctatgggaatgtccaggactgcatattcattggaaatcatgcagatgaatgggcaggtgcctattatagctgggctggaaattcaagcattgacagatgcatatttctaaacaacactgcaggaacaaatggcggtgctgtaatggtttccggaagccttaatcttaccaattccttaatcgtaaataacaccggaggcgaaacaggaggttccttctatattcagcagcctatgtttgatgcaaagacggtcataaatgtaaataacaacattattacaaataattcatctcctttaggaaaggaaatctttgtaaaatggaacgctacccaattattattccctaatttcaacaataacgattggggagacgaggaccctacaggccctgatgtggttgaccctaataatgtttcagataggataatccctgagcgaactaaaagaattacagttctttatgacaagttaaactggggtttattagatagatatactgatgttttagatgattattatggaaaatctagttcatccgactctaaagcaaattcagatacaaaaactaatagcagcggtttaaaatttgatactgagaacaagacaaatgacgattctaaagaagagcaaggtagtatattgaataattcaaatggatttgccttgttaaatcataataactcctcttcttccaattcaacagctggtggaggtttagagaaaaaagacaattcaacatttgtctctccaaaggattatcaaaagatggtggagctatttgaagacaatcctagtgcgtccaaatcaactgacattagatattttgcagttctagcatttatattgcttgtatttttagtgggtcttgctagaaagaggaaataa

SEQ ID NO: 1416 - DNA, 1014 bp, Methanobrevibacter ruminantium
  source 1..1014: mol_type = genomic DNA
atgaatcttaaatttaaaaaaccatcaagagaaagtcaaatggccatgtctaaagtggctattggtgaagataatattgattatcacaatatggccgaggaaaagctatccaatgccactaatcatcaatatgctaaattggtaaatagtggaaatgcagctattttaacagccatgaattctattgatggagcaattttaatacccgatcaaggagcctggaatggctttaagcagattgctaattttttaaataaggatttgataacagtcactacaaatcaatgcattattgatttggattatctgcaagaatccattaatcaaaatgacgacaatattgatttggatgatgaaaacaataagtctgccctatttttaacaagctttgcagcttatactgcagagcaggacataaaggaaattgcaaagttccttcacaaatacaatattctccttgcagaagatgcctcaggagccatttgtgatatgaaaggagatttggccaatggaaaatactcagacattatcattggatcaacaggctctccaaaaataatcaatgtcgaagatggtggatttattacaacaaatgataattctctcctagaaaagtcaagacttattttaaaaacttcaaaatgctcaaatatcacagcctgtggaatatctcatgaaatagaatatgcaaaggacaatttgaataaaacaattgatttcaccttaaatcttaaggaaaaattaaatgatagcactgattttgaagtatttcactcaaataaaagaggaatcaatcttattctaaagacaaacgaccctaaatcattatcatataagctaagacaggagtttgctctagacagccatggaatgattactaaatgtcctaattacaatagattgaaggaaaaggctgtagctattgagataaaaaatcttgatatttcctgcttaaatgagcataattctaatcaaatattcaacactattaaaaaatacgaagattttgcttaa

SEQ ID NO: 1417 - DNA, 1194 bp, Methanobrevibacter ruminantium
  source 1..1194: mol_type = genomic DNA
atgagaacatcaaaagctactaaaaatgcatatctggctaaattaactgaaaagatacagatgcagtcagttaatgtaggtcgcgaccttgacggaagcactcctccctcagtgttcatagggcgctggagctatcctaaggtatatgccggacctatgatggtagcccaaactggagatacagctattatggactctccagagagttggattggtcagaataaaacccaagaggatattattggctataggatgaatttagttagaggaaaacagctaatcagcattaaggatttggaaaatccttttgttgaaaagcttcaggacatttcccttgctgcaaagtcaattgacagcgaagcaacctttgggtcccggccaagcggtgcaatgttcaatgaggaaagcatgcctcatggccctagcgctgttatcgagaagtttgatatagatgcagttaaatgggacaggcaactggaaaaaagcttttatgacactgaccttaaggcaagggatgcggtgatgaatctccacaataaggatgttccattctctgccatgcaaaaggcattctctgtaggggcatttggtataaagaaaaacaggagacttgtacctacccgatggtcaatcacagcctgtgacagcaccattgcagatagccttttaaaggaagtgaggcattataatataatggactcatatagggtctatgagttttcaagccttaagaattattatgcaatcatcttaaccccaactgagtggcagtatgaatggtttgaggcattcattaagattcttggaaaggaagagatgatcttttcagattatgagacaaacactgataagagagagtatagctgtgttggaggatgctattacacagctaagatggctgtgctggataagctggccaagcttaagcttcagtcaggtgttatcattcttagggaagcatattcaggttatgtccctcttggagtgttcaatgtgagggaaaacattaaatatgcaatgaatggcgattataaggagtttgaatccttgaaggactctttagcttattgctcaacaaagcttaagatacctataagcaagtatgtaaagcagagcaatctcttaaatgagcttttgcattcacagcagactacattggatgcattctttaagaaatctccagatttgcaatag

SEQ ID NO: 1418 - DNA, 927 bp, Methanobrevibacter ruminantium
  source 1..927: mol_type = genomic DNA
atgttagaaccaaaagaatttatttctgatgcgattgcaaagatcaaagaggaaattggtgatgaaaaaaccattatcgctttatctggcggtgtagacagttcagtttgttctgtgcttacacaagaggctattggcgataacttaactgctgtctttgtaaatcatggattgcttagagaaggtgaagcagaacaggtttgcagtgttttcgaagaaaggttaaacttcaaatatatagatgcttccgatgagttcttaagcgaacttgcaggtgtagaagatcctgaagagaaaaggaaaatcatcggcagagtctttattgaagtattcgaaagagaagcacaagctgttgacgctaaatacttagttcaaggtaccattgctcctgactggattgaaactgaaggggaaatcaagacccaccacaacatggcattgccaagcggaatggtcttaaaggtagttgaacctgtcagagacttatataaagatgaagtaaggcttgtaggtactgaattaggtcttccagacagcattgtacaaagacaaccattcccaggtcctggtcttggtgtaagggttgtaggagaccttaccagagaaaacctggctgtctgcagagcagctgatgcaatcgtcagggaagaggttgaaaaggcaggcttggataaggaattatggcaatactttgctgtgcttaccgacactaaggttaccggtgtaaaaggagacgaaagagactttggctatcttgttatcattaggttgatcagttccattgatgcaatgactgcaaccgttcctgaaatgccttgggaagttattagaaccatctcaaaaagaatcacttctgaagtttctgaagtcactcatgttgccttatccattagtgataaaccaccaagcactattgaattctgttaa

SEQ ID NO: 1419 - DNA, 240 bp, Methanobrevibacter ruminantium
  source 1..240: mol_type = genomic DNA
atgtttgataatgcagatgacttcaaaaagaaagcactcgacaacaaagacgaattaaaaagagaatacatcaacattcctataggagaagacgaacaaagtttcagaatctctggaattggtgaaaaagctatcaaaattgaaaaatacgtaaaatatgatgacatggtagatgctgttgaatctggcaaggaagaaggtttagaagcagttatcatgaagtttgtagaagaatactaa

SEQ ID NO: 1420 - DNA, 567 bp, Methanobrevibacter ruminantium
  source 1..567: mol_type = genomic DNA
atgaaaattttagttattaataataaagggcagtacaatcacaggattcagagaactttacagaacttaaagattccatctgagcttgtaaaaaataaattatccatttcagagattgaagaaaaggagcctataggattgattctagggggaggaccttcaatcgatggtgtaggtaatgcagcagagtatataaaacattttgacattcctattttaggaatatgtttaggccatcagttaatagctaaaacttttggtggagaagttgccacttcagacactgaaagctatgctcaagtaaaaattaatattaatgaagaaaatccactttttaaaggtctcacatcacctatggatgtatggagttcacataaggatgaagttcattctcttccggaggactttgatatcattgcagagtcttctctttgcgatattgaagcaatgaagcataaagaaaaagagatttatggaattcagttccatcctgaggttcatcacactccaaaaggtgagtatatctttaaaaacttttatgaaatttgtcaaaattataatgagtaa

SEQ ID NO: 1421 - DNA, 147 bp, Methanobrevibacter ruminantium
  source 1..147: mol_type = genomic DNA
atggaaatcgatgaattaattacttacttaatcattattgcagttgttgcgattttaataaaaatattttcatggctcttgcctatctttgtaatattggctgtagcctatgtaatttatttatatattactgaaaacaatgcataa

SEQ ID NO: 1422 - DNA, 1446 bp, Methanobrevibacter ruminantium
  source 1..1446: mol_type = genomic DNA
atgaaaagaagatataaagttttatttctattggccatcttaactataataagcattaatgccatttcagctagcgaaattggcttagatgacaataatgcaatagatgagaatgatggatttaaaattaagcaagacataatgtctgaaaagataatctctgataatgaggatgcagattcaaataatgcaaatgatgtgaatacagactcatccgatgaagtaaatgaggataatgtaatagaacaaaatacagacactgatacagttgatgaggatgaagaagatccaatcattccagtagacactagattattcaatccagattctgttataaaaggaaacgatttaaacattgttctaaaagacatcgacaacaatcctcttgccaatcagacaatcaaatttaacataaatgacaaacagtaccaaagaactacggataaaactggaactgccaaattaaagattaacttaagcccaaagactcacactttctttatagagtatgacggatgcgatgaatactatccgaccaatttggtatttgacttaaaagtgataaagccagttcaaacaaaattaagcgtaaagtcaacaattgtgtataaaaacaataaattaatggtttatttaaaaaccagcgacaataaggcacttgcaaaccagaaaataaaaattggattgccgaaaaaaacatacacaagaacaactgacaagaacgggcttgcaagcttgaatataaatttaaatccaaaaacatacagcataaaccttagctatgacggcaaaggcaaatacctcccaacaagcaagaaaataaagattcatgtctttgaaaacgaattgcttggatccacatactatggaaaggtggaattgcttaagggaattggaaactcatcatcaaaggttaaaatagcttatgtggttggacttcatgttttggaacatcagatacacgatgaagtttacaatatcatgaagcagaagacttcaatgcattattcatataatgtctataagattaccttgacaaagaaatccggaaactacaatacagacaggatgagagggcaaatacttgccaaaaactatattgtgcctcatgttaacaagcaaaagtataatttggtcgttgacgttcattccacaactggagtctattataaaaaatcctacttcatacatgttcctcaaaacaggcataagccctccttaaacttggcgaataaagcaattaaaataataaacactcttgataagcaatcaaagattgtatattggtctccagactcacagacaagtccgccatatcttactttgcctatcatgaaagctggaactcctacatttgtctttgagaccttgacctcagagccagtctccagatcaaagtatagagcaaatattttaattaatgctgtggataagttatttggttaa

SEQ ID NO: 1423 - DNA, 948 bp, Methanobrevibacter ruminantium
  source 1..948: mol_type = genomic DNA
atgatttttatggaaaattatgatattataattgttggggcagggcctgcaggcctaactgctggcatgtatgccggtaggcagaattcaaaaaccctaataatcgataggggatttgctggaggcttaggtcttgaagtgcctttgatgcagaattatccaggttttgatttgatttctggaatggagctcattcaaaagatgaaggcacaaactgagaattattgtgaaataaaggaaaatgaaaccattcaatctatagaaaaaactgaagatggtttcctgcttaaaaccagaacttctccattattgatgtctgaagaaagtgatgaaataagggagtttaaagcaaaggcaatcattttagcaactggtgcctctcacagacacttgaatgttccaggggaagctgaatttttaggtcgtggagtggcctattgcgctacctgtgatggaatgttttttatagataggactgtattgatggttggcggaggaaacagtgcagctcaagaggcactttatctaaaaaaccttggatgcaatgtaaagctcgttcacagacgtgatcagttgagatgtgagcatcatcttcaaaaagctcttgaagaaaaggaaatagaggttatctggaatgcaactgtagaggaaatcaaaggagatatggtcgtagaatcagtaagacttaatagaaatggccaagaggaagattataagacagatggcgtctttattgcaatcggtgatgatccttccaatgagattgctaaggaattaggaatcgaccttgatgaggatggctatatcataaccgataagaggcaggcaacaagtgtggagcatgtttattccgcaggcgatataactggtggagtgaaacagtgggttgtagcttgtggagaaggtgctgtagctgctatatctgcttataatgatttgaatttgtaa

SEQ ID NO: 1424 - DNA, 1848 bp, Methanobrevibacter ruminantium
  source 1..1848: mol_type = genomic DNA
atgatgggtttagagattcaccagcaattgaatacaaaacacaagcttttctgtccatgttctaccgaacttaccgatgatgaatttgatgacggtatcatcagaaacctaaggcctacccaaagtgaattaggccaaatcgacagagctgctcttcaagagtctctaagacacatgacatttaagtacgaatcatttaacaatcacacctgtcttgttgagatggatgatgagcctccacatgcattaaacagggaagctcttgacatatgtatcacaatcgcttcacttttaaatatgaaaatggtggatgagttccatacgatgagaaagcaggttattgacggcagtaacactggaggattccaaagaacaggtcttgcagcaactgacggataccttgacactccatacggcagagtggctatagagtcattaggccttgaagaggatgcagcaagaagaatcgactcagatgatgagtttacccaatttaggcttgacagattgggaattccacttgcagaaatcactacagacccttccatgcaccatccggaacagattaaggaagttgcatatatgatcggacaggtcttaagaagcacaaatgttaaaagaggccttggaactatcagacaggatgttaacatcagtatcacaagaggtgcaagggttgaaatcaagggtgttcaggacttggaccttatgcctgagattgttgaaagagaggttcaaaggcaattggcacttgcagacattaaggatgagcttattgcaaggaatgctagcgttgatgatacaatctacgaccttgatgaggtctttaaggacacctcatctaagatattgtcaaaggccaactgcataaaaggtataattcttagaggctttgacggcctcattggaaaagaggtccagcctggaaggagattcggaacagagctctctagctatgctaaaaagatgggtgtttcaggtcttttccatacagatgaattgcctgcttatggaatcaaggcagatgaagtggatgctatgaaagagttccttaaaatcggccctcaagatgcaatcatcattgtagcccacgatgaggatatcgctataaatgccttaaatgaggtaatcagaagggcagagatggcatttgacggcgttgtagaggagacaagaaaggcattggatgatggaaacacagaatatatgaggccgcttccaactgcaaacaggatgtatcttgaaacagacattccattgttccagattactgatgatatggttgagccaattaaaaacaaccttccagagcttccagatgctaaaaaagaaagaataaaagcagagtataagctcagtgaagatttagctagccaaatagtcagaagacttttaggagacacttttgagtcattattggctagggttaaagtggatccaaccactgttgcttcagtccttgtatcagaccttagggatttaaagagggaaagatataatgttgatgtattgactgaagacaaacttgtagaagtgttctcccttttagaggcaaataaaatttctaaagatgctttaaaggacctgcttgtggaagtctgtaaaaatccagatgaaaatgttgaaaagatagctgaagatgctaaccttacccttttaagtgaggaagaggttagagcgataattcatgagatagctcaaaataatgaatccatgattaaagagcgtaatatgggtgctatgggtcctttaatgggcatgagcatgaaacagctaaaaggaaaagcagatggtagtttggttaataagatagttagagaagagattcagaatattttaaatggttaa

SEQ ID NO: 1425 - DNA, 1308 bp, Methanobrevibacter ruminantium
  source 1..1308: mol_type = genomic DNA
atgacttataaagaaatttctaaagagtttttggataaggcaaatgttaccattggtgatgttatcaaggtgacaaaggaagatatttcctatgaaggaatattgcttgacagatccgaagacgcaaaggacgcttatattgtaattaaacttgatagcggttacaatgttggagtaaacattgaatctgcaactattgaacttattgaaaagggagaccaacctaaaataggatttgaaggagatacaattgaaaaagacccaaacaaacagaacatatcaatcatctccactggaggtacagtctcttcaatcattgactataagacaggtgcggtacaccctaaattcacagcagaggaccttcttagagcaaaccctgagcttttagaccttgcaaactatgatgtgaaggcattatacaacatattatctgaaaacatgaagcctgaatactgggttaaggcagcagaatcaattgctgacgatataagcagtggggctgacggaattgtaattgcacatggaacagacactatgcattacacttcagctgcattgagctttatgatcaagactcctgttcctatagttgttacaggtgctcaaagaagttcagacagaccttcaacagatgcattcctcaacatctacaactcatgtggcgctgcattatcagacattgcagaggttacagtgcttatgcataactcattggatgacggagactgcgcacttcataagggtacaaaggtaaggaagatgcacacaagcagaagagacaccttcagaagcattgatagtgaaccaatagctcttttaagggatggaaaggtaaaatcagtcaatctcccatatgtcaaacgtggggaaaatgaattggaattgaatacagacattgaaagcaaggttgcacttatcaagtctttccctgggataagctctgatataattgactatcatatcgataagggatacaaaggattgctcattgaaggaacaggacttggacatgttccagattatatggttgattcattgcaaagggcaaatgacgaaggcattcctgttgtaatgacctcacaatgtctatatggtacaatcaatatgaacgtttacagtacaggaagactattgcaggatgctggtgttatttccggtgtggatatgactccagaatgcgcttatgttaaattggcttgggctcttggtcaaagcgatagtttagatgaagttaaaaagattattcaaaccaatattgctggagaattgaatgaaagttcttcacttaagtatttcttgaactag

SEQ ID NO: 1426 - DNA, 840 bp, Methanobrevibacter ruminantium
  source 1..840: mol_type = genomic DNA
atggaattaactagctacttaagtcaaataatcatttcagtgataatatttatcatcctatgcctcctagcaaatcaagtgaaaaaaataatagaaaagcattacggaatacatttaaatcctaatgattttcttcctattgaagagattaaatcattaatgcagctttattttttgctcataatactgcttatttacatatgcatcatgaacttcttttttaacaattttggaataagcggggaattgatctttatcaattcattaatagacattatcttatcagtatttctagtgacaatatattatgacggctctacaagaggcaagataattagcatattccttttgcctattgtatccatatcctatatcctctttggaggatcattaattagatattgggatttcatccgcatccctatactgctctatctggttgtgattttctataacaagtttatagattatacagaaagaaataaccttggaaaaacaattctaatcctattaagcattatctatacaggaattctcttaacaatagtcttagaaaaacaaaatcctatagatgcagtggcaatggttacaaatgcaattacaagcaatggatatgccgctttaggagacagcgaaggaggagtcttgactagcgtattcctagcttggggaggatatattatttcaggagtcgctacagccacattagctgcagatatcattcatagaaactctagaaagaaatttaggaatatggaaactaagatagacaatcttgagaataagattgataatctggaacggataattgttgaatctcaaaaggagaatgaagaataa

SEQ ID NO: 1427 - DNA, 429 bp, Methanobrevibacter ruminantium
  source 1..429: mol_type = genomic DNA
atggcagacaagtttagcaaagagaagaggagttatatcatgtcaaggattagaggcaaggacaccaagcctgagatccttgttagaagctacctgttctctaaagggcttcgctttagaaagaatgacaagcgatatcctggcagtccagatgttgttctgcctaaatacaatactgttgtctttgttcatggctgcttctggcatctccatgagggatgcaagcatgctaagattccaaagtcaaatgttgagtactgggaaaagaagctttatggaaacagggatcgtgataagcgcaataagaaggagcttgaagatatggggtggaatgtgattacagtttgggaatgcaatctgaaaaaggataagcgtgaaaagactctttttgagctctacaatcagataatctctgaggatgaggactga

SEQ ID NO: 1428 - DNA, 615 bp, Methanobrevibacter ruminantium
  source 1..615: mol_type = genomic DNA
gtggtggcagccttatgcacagaggcacttggaaaggacagggttatcggagtccttatgcctaatggagtgcaatcagacattgactatgcaaagcttcttgtaagtcatttagacataaagcattacataataaatataagggatgctgtagatggtgtattaagtcaaatgaccaaatctggcattgaaatatccgaacagacaagaatcaaccttcctccaaggattagaatgtccaccttatatgccataagccagtctaacaacggaagggtggcaaacaactgcaatctttcagaagattgggtgggatatgccacaagatatggggatggtgccggtgacttcagcccactttcaaacctgacagtaagtgaagttaaggaaattggaagaagccttaatttaccgagtgagatagtggataaggtaccgattgatggactctctgaccaatctgatgaagagaagcttggatttacttatgatgtgttggataagtatatacgaactggcgaaattgaggacaaaactacaaaagaaagaatcgattacctccatgatttgaataagttcaagttggagcttatgccaagctttgaatataagtga

SEQ ID NO: 1429 - DNA, 1494 bp, Methanobrevibacter ruminantium
  source 1..1494: mol_type = genomic DNA
atgactgatattaaggtagataaaaacgtagaaaaggcaaaatctagccaagtagaagaaagagttattaaaaagccagaatccttatatgattccttcccaagaaagggaaatgacatttacaatacccactactgcgcaggatgcggtcacggtattttacacaagctaattgcagaagtcatggatgagctcaatatacaagatagatgcgtcatgatttctcctgtaggatgttcagtattcggatactactatttcaactgcggaaatgtgcagactgctcacggtagagctccagcagttgctacaggcatatctagagctgaagacaatgcaattgtaatgagctatcagggagatggagacttagcatccatcggtcttaatgaaacattgcaggcagctaaccgtggagaaaagattgctgttttctttgtaaacaatacagtttacggaatgacagggggccaaatggcacctaccacacttgtgggagagagaacagtgacttgccaaaacggaagggaccctcattatgcaggatatccattacatatgtgtgagcttgtagacaatcttaaggcacctgtatttattgaaagggtgtctcttgcaaaccctaagcttattagaaaggcaaagatagctattaaaaaagcccttatgattcaaaaggaaggaaaaggatactcatttgttgaagtattgtctccatgcccaaccaatataagaagggatgtaaaaggagttgaagacttcctaatcaatgagatgggtaaagagtttccagtaaagagattcagagacctatctaaggaaagggctcctgttgaaaggaatgtgagtgacttctctattgaatcattggataaggcatttggcgtagacagaacaaaagaaatcgctgaagttgaagatgactttgaagactgcaaggtaaagatagtcggtttcggaggccaaggagtcttaagcacaggtcttacccttgctcaagctgcatgcagtgagggaaaagaagtgtcttggtatccaagctacggtccggagcaaaggggaggaacttccaactgttctgtaacaatctcagcaaagactatcggatctcctgttgtagaggaatgtgacgttctaattgcaatgaacaagccatcccttgaaaagtattcaatcgatgtaaaagagggcggaaccattctttatgattcaagagcaggaaactacacaaatgacaatcttgatgttaaggataacgtaaagattatttccattccagcaagagagatagcaactgaaataggcaatgccaaggctatgaacactgccattttaggtgctcttatggagcttggaaaggacagccctatactatctcaagatgcctttgccgaaggtattaaggaaacctttgcagctaagccaaagcttattgatataaatctaaaggtattggatgcaggggctaaatggttgagagaaaacattaattaa

SEQ ID NO: 1430 - DNA, 1167 bp, Methanobrevibacter ruminantium
  source 1..1167: mol_type = genomic DNA
atgtctaatcaaatagttaaaggaaacactgctgtaatcatcggtgcattgtatgctggctgtgattgcttcttcggttatccgatcacccctgcaagcgaaatcctccacgaggcttccaaatactttccaatgcttggaagaaaattcgtccaggctgaaagtgaagaggcatctgtcaatatgatatatggcggagcttccacaggtcacagggtaatgagcgcttcatcaggtcctggaataagccttatgcaagaaggattcacctatttagctggtgctgagcttcctgcagttatcgttgacgttatgagagcaggtcctggtcttggaaacatcggccctgaacaaggggactacaaccagatagtcaaaggtggaggccatggaaactacaaaaacattgtccttgcaccaaacagcgtacaggaaatgtgtgacttgacaatgaaggcatttgagctttcaaacaaatacagaaaccctgtagttgtccttgctgacgctgttcttggacagatggcagagccattgaaattcccagaggaagctgttgaacctgtaattgacaattcctggtctgtaaggggaagcaaggaaaccatgaataaccttgtaacttcaatctttttagacttcaatcaactagaggactttaatttccaaattcaggaaaagtatgaaaaaatcagagagaatgaagttgtctatgaagagtatatgcttgatgatgcagaatatgtaatcgtttcctatggtacaagcagcagattatccagaactgctgttgacattgcaagagaaaagggaattaagttgggattacttagaccaatcacattattcccattcccagaaaaaagaatcaaggaattagcagatgaaggtgtccaattcatctctgttgaaatgagtaacggtcaattaagagaagatattaaggcagctgcaaattacgacgaggtccatttggtaaacagaatgggcggaaacgttatagagcttaaggacattctaaatgaaatataccaaatggtaggaagcgatgaacgccataaggttgacagtgaagacaaggaatttgacaaatcctacctctcagataaggactataaggaagaattggataatgacaactatcacaatcacaggatggtagattag

SEQ ID NO: 1431 - DNA, 255 bp, Methanobrevibacter ruminantium
  source 1..255: mol_type = genomic DNA
atgaaagtaaatcaaatcaaaccataccctatcattagcaaaaacaactgtaaggcatgcttaagatgcataactgcatgtaaggaaggctgccttaagttaagtgaagagattaatgatagcggatatcaatatgcagaatatacaggagaaggctgtatcggttgcggggactgttattacacctgcccggaaccattagccattgaagttcatattcctaaaagattaagaaaatcagcaggtgatgcctaa

SEQ ID NO: 1432 - DNA, 1665 bp, Methanobrevibacter ruminantium
  source 1..1665: mol_type = genomic DNA
atgacatctttaataggaaactttgtaaacagagttgattttaaatcctataaggatttttacgataattttgaatttaatgtaccaaaggacttcaactttggttttgatgtagtggatgagtatgcaagaatagatccggataaaaaagcattaatctggtgtgacgattatgaaaaaagggtttttacctttttagatatgaagaaattatccaatcagactgcaaacttctttaagtctcaaggaatcaataagggagatgcagtgcttcttacacttaaaaacagatatgaattctggatctgtatggttgcacttcataagataggtgctatagctatcccaactactcatatggtaaagcttcatgatatagtctaccgtgttgaaagcgcaagcataaagatggtggttacagttgaagaggaccaattgcttcctgattttgagcagtgcgaaaaagaattggacatagagcttaagaaagtcttagtgaatagctttagggatggctggtttaattttgataatgaaatcgctaaaatgagcgaggagtttgaaaggccaactggagatgaggcaacccatgaggatgagacattccttatctatttctcaagcggaaccactggaaaccctaaaatggttgcacatgctcatacctatgcaatcggacacctcataactgcaaaatactggcataatgtcgttgaagacggtgtccaccatacctctgccgatacaggttggggaaaggctgtttggggtaacctttatggacaatggattgcaggcgctgcaatatttatctatgactatgtaaggttcaatggtttggatttaatggaaaagatcattgaaaacaaggtaaataccttctgtgcacctccgacaatctataggttcctcattaaggaggacttgtcccaatttgacttttcagacattcaatatgcaactaccgctggagagccattgcctccagaggtatttaaaagatttaaagagttcactggccttgaaatcaaggaaggattcggtcagacagagaccactctctcccttgcaaccttcatttggatggaatccaaaacaggttgtgtaggcaagccttcaccggcattcaagataggccttttagatgaggaaggaaatcctgtggatattggttctgaaggagaaatatcatttgatgtatctggaggaagacctgtaggtctgtttaaggagtattatagaaaccaagaaaagaccgatgaagcttggtacaatggatattaccactgtggagacactgcatatgtggatgaagacggatattacacctttgttggtagaaatgatgacattatcaagtcttcaggttatcgtatcggaccatatgaagtggaaaatgcagtaatttcccgcccttcagtcttggaatgcgccataaccggtgttgatgatgaattaagaggccagattgttaaggcaacaatcgttcttgcaaaaggatacaagccaagtgaagagcttaaaaaagaaatccaagatcatgtaaagcatgagaccgctccttataaatatccaagaatggtagaatttgtcgaagagcttcctaaaaccataagcggtaaaattcaaagaaaaataatcagaactaggaaatcaatttattaa

SEQ ID NO: 1433 - DNA, 561 bp, Methanobrevibacter ruminantium
  source 1..561: mol_type = genomic DNA
gtgattgaaatgagtgacgtaaacaaagatatcggtatgagaattagagaattaagagaattatccgatattacaacagaagatatggctaatgaacttgatgtagatgaagaaacttatatttcctatgaggacggtattattgacattccagctagtttcttataccaaattgcacatatttttaaagttgatttagctttgattcttactggtgaagaaactcgcatgacttattttgatgtaacaagagcagataagggttttgctgttgacagaaggaaagaatataagtatgaaaacttatgcaagaaattcgttcataaaaaagctgaaatgtttattgtaactgttgatcctaaagaagatgctatgccttccttaaattcacatgccggacaggaattcaactatatccttgaaggaactgtgaagattttcattaaggacaatgaaattattttaaacgaaggagattctattttcttcgatgcaacttgtgaacatgctatggttgctttaaatgatgaaaccgctaaatttttagctgttattatgtaa

SEQ ID NO: 1434 - DNA, 369 bp, Methanobrevibacter ruminantium
  source 1..369: mol_type = genomic DNA
atggtaaatagagaagactgtgttatctttaaacaggaatacggtaatgaattattagtaaaccaacaatatgttaaaatcagagctaaggaagaaggattcatgtcttttaaccttagagtccctaaagaagatatggaaggtattgaaaacttctttaaagggtttaaaatcccagaaccaattcttatagacattgcatgtacaggcaatattcattgttactttaaaggaatttcaccaatcataaataagccggagtattcctttatttccgttagcgttcaggaattgaaaaaggaaattgttgaagaggaacaagagattggcatccctgcacatgaatgtgttggctgtgggcttcactaa

SEQ ID NO: 1435 - DNA, 1098 bp, Methanobrevibacter ruminantium
  source 1..1098: mol_type = genomic DNA
atgtcatttttaacattaatattaaaaaatccttttaggagcaaaagccgagccatacttgcaatcatagggattggaatcggtatagccacaatcatcgcattgggagcaattaccgacggaatgattgcaagtgcagatgacacactgcatgccggaggatgtgattttacagtaagcggaaagatagagagcacatcatcacaaatggctacattcggtacaagcaccattgatgaggattatatagataagatagccaatgtaacgggtgtaaaagatgctataggaatgtatatgaccgtccttatgacaacaaattccccatattttgctgttgtaggattggatccagaagactatcaggtttccgacttgacaattacagaaggacggatgtataaaaacgacactaacgagatagtgattggaaagattgcatctgaaaatgaagagaagggagttggagacacaatcacacttgatgacaagaaattcaagattgtgggaatctatgagtcaggtaacacccttcaggaccaaggaggatttacagccattaaaaactcccaaaaactctcaaaggatgaaggcaagatcagttccatctatatcaaggtaaatgatggagaggatgttgataaggtcagagatagaatcaccgacaaatatggagacaatctgacaacaataagctcattatccgacttggaaatgactaagaacatgatagacatgttgaacggagcaagcttagccatatccctcttggcaatcataattggagctgtcggaatcataaacactatgcttacaagtgtatttgaaaggacaagggagcttggtgtcttaaaggcagttggatggtctgacgaaaagattctattaatgattgtaggtgaatcaatagtcattacaattgttgccggcataatcgggtccattgtaggagtcattggagtggaactccttgcagcgtctaagataatgcagcttctaaaccctgtatattcagttgacatatttgtaaaggcatttgcaattgcactctttgttggaataataggaggaatctatcctgcattaaaaagccactaa

SEQ ID NO: 1436 - DNA, 717 bp, Methanobrevibacter ruminantium
  source 1..717: mol_type = genomic DNA
atggcaaatataatagagattaaaaaccttgtgaaatcttatgaaaatggtaacatcaaggctttaaatggcatagacttgacaatagaggaaggagagtttgtatcaataatcggaccttcagggtctggaaaatccacattattaaatatgctaggggctttagacatagcagatagcggaagcataaatgtggcaggctatgacttgacagtcaacaagaatctaaacaagttcaggggagagaagataggatttatcttccagcttcacaatctcattccaaacatcagtgttgttgaaaatattgagattcctatgtactctcaaggaaaatcatctaaagaaatgagaaaaaaggctcttgagctattggatatggttgacttaaaggacaaggccaatatgaaaccaaataagttatctggtggagaacgtcaaagggtggctattgcaaggtctttggcaaatgacccttcaatcattttagcagatgaacctacagggtctcttgattctaaaacaagcacaaagatactcgaacaaattcataagttgcataaggagaagaatattactttaatcattgttactcatgacatgactgtggctaagttagcagatagggtaattgaagtgcttgacggtaaaatacttaatgctgaagaaagtactctcttggataataagatagagataaaagttaatttgttttaa

SEQ ID NO: 1437 - DNA, 1380 bp, Methanobrevibacter ruminantium
  source 1..1380: mol_type = genomic DNA
atgcaaaccaataaaaacatcgaatcaatcataggagaccctaaaaaggccataaatagattgacctatcccacaatcctttccatgcttttaatgtttgcaaataacttaatagacagcatgtgggttagcggactgggagctgaacctcttgcagctctaggattcatgtctccattgtatctggtgattattggctttggaagtggagttggagcaggcgcaaattcacttatatcccgtttgattggtgctaagcgttatgatgagtctaacaatgctgcaatccatagtattataatagctcttatcgtttcaatcatcatttccattattggaatgttcttcttagatgacttgcttgttctttttggagcggggtctgttttggattatgcaatggactatggtatgataatctttctatcaagcatcataatactatttccagccattgtttcaagtcttttcagggcagaaggggacattagaagggccacagtgcctttagtggttaatgcaatcctaaacattatctttgatcctattttcatttatatttttaattggggagtcaaaggggctgctatcgctacagtattgtccacacttgtcaatctgcttatgatgctatattggtatctggtaaagagggatacattcataaaattgagtttggagtactttcatagcaaaatggaaatttataaggagattctttttgtaagcatccctgcaagcttggaagagcttatctattctattgtagctatctgctttaattatctaatcatgattactgcaggaaccatggaagttgctgttttcactgtggtgtggcgatttgtgtcaatcgcttttcttccatgcatttccattggaatctctacaataacagttgcaggcatagcttacggggctagaaactatgagaattttaagacaacaatcaattattcgactttcctaagctttacaattacattgataatatgcataatattctttgtatttgcctatccgatttctgaaacctttaatttcatatctggggatgctgaaatgattagtagaactgctgaggtccttaggataatggttttctataatattgtaattccatttggaggaactgcagtttatgtctatcaagctattggctctggctttaagtcattggccataacaattttaagggaattgatcttaagtgtattccttgcttatctatttggcattgtattaaaaatgggcatatttggtgtctatttaggtgcgatagtaggaatggctataggttgctttattggttttacatgtataaaaatctatcaaggtaagtttaaaaaagaatgcgagagtcttaatcagcccgtttaa

SEQ ID NO: 1438 - DNA, 1035 bp, Methanobrevibacter ruminantium
  source 1..1035: mol_type = genomic DNA
atggatttattattaatcttatcacaagaacatgataaactgccattggctgaattaagagctgtcttggaaacagaagaaatagaaactgaacttgaaatggtatgccctggcttggttttattaaaagagcttgaggaagatgtttttgatgattattatagattgcttgttagaagattaggatatactcatgaagtccatcaattgattaagacagtagactgctctgatttggaatctgaagttaaatcaatcgattggtctgagtttattgatgagaactttgctgttagggtaaaaaggttcaatagtgaaatagacactgtagacactgagagaaaaataggaggatatatcttaacaagtactgacaatatctctgtaaacctatcaaatccaaaatcttttattagggttgtagcttataagaacactatctatttatgttatggcaaatatcaattgaataaaaagtattttgaagagatgaaacctcataagaggccatttttccatccaggatgtatgagtcctaaattagctagatgcatggtaaatctctcaagagtcaaggaaggagatttggtcttagatccattctgtggaactgggggaatccttatagaagcaggtctcataggagcaaaggttgttggctgtgacattgactggagaatgaaaaatggaactgcaactaaccttgaatatgctggaataaccgattataaaactcatgtggtggatattcgtgaaatggaaatgtatgaagaggctgatgcagttgtaaccgacccaccatatggaatttctacaaccacttgtggagaaggtgcttctggaatatttaaagaatttttagaatccattgaacacagcatgaaagaggatgcacttttagtgatggctagtcctgattcattagacatagattccctatttaaggatgtaggctttgttttattggaaaggtatgcgattaaaatgcatagaagcctgactcgtatcatttctgtgatagctaaaattgattaa

SEQ ID NO: 1439 - DNA, 1299 bp, Methanobrevibacter ruminantium
  source 1..1299: mol_type = genomic DNA
atgagttttgattatgatgtagcaattgttggtgcaggacctataggctctagtttagcttatgaacttgctcaaaacggtttaaaagtttgcttaatagataaaaagaaacgtataggtttgcctttgcaatgtgcaggaattgtaaataaaagaatttcttcattatgtgatattccaaaagaattaatattaaatgaagctaaaggtgctttcatacattctaaaaatcattcattaactgtttctaaaaaggaatctcaagcctatgttttagatagggttgcatttgatcagtacttatttaatcgagcaagggagcatctggacacttatctatcttcaaaggtagtggatattgatacagagcttgggattgtccaattcaaattcgattgtgagattaaaacaatccgctccaagattattgtaggtgcagacggtccattatcactttcagctaaaaaggtcaattctaagttaaattattttaatgcaagccaatatcttgttaaggttgataagattgatgaaatgtcctttgtagatttatatgcttggggagatctctttccgggatttatctgggcaattccagtttatagtaatatttataggattggattgtttagcgaagatgactataaaagccaatccaagatgctggatgactatctggaaaatgaatttagatatgatgaatatgaagttttagagaaatataagggtaaaatacctatttatgataaaagtaataaattatttaagaataggcttattttaataggggatgctgcttctcaagtcaaaccaaccacaggaggcggaattctaattggattagagtctgttcaatttgcaaaagatgctattttaaatgctttaaatactttagactttgataaaattgattttgatttagttggtggttctgattcaaatgaggatgattctgatttaaatgatgctaattataaagaagaattaaataatttcttagatgaattgtctaagattttagaaaactatcagaatgattttgaaaatagattttcaaaagagtttgaaattcaatttaaagtccaaaaatcattatctaccttatctaatgatgatttggattatgtattaactaaattaaaagaaaaagatgctgataaattaatatctgaatatggagatatggacaatcaatccaagttagttaaggaattcttaaaaagaggcttgattttttcattggctcctaagattcataaaaaggaattggctaagatttggttgttaaataaagattaa

SEQ ID NO: 1440 - DNA, 1911 bp, Methanobrevibacter ruminantium
  source 1..1911: mol_type = genomic DNA
atgtttggtaaagataaaaaagagaactctaatgaaaaagtgttgtatgaagggcaaccaaatttgatagtttattcaaagagcatattcattgcagtgattttacttggatttctatttttcctctattcaactggaattcaatatattggaaacatgcaagtctatatgatagaatcaaccaaattgccattgactcgctattttgcaattgcagtctttgttataataatggttgtaatcctatatatcataataaaattcctttcttggacttcaataaagtatacaattactgaaagcagagttatcgttgaaaagggcattatatttaataagaagaattacatgccttttaacactattcaggatgtaagtcgttctcaaagcattttaggaaaagcattctcagtaggcacaattaccttatacagtgcctatgacggcaaggacatgtcattaaaggatgtctcaaaccctaaaaagattgaagatttaatttttgagaatatgaggacaactcatctaaggtcacataacttatatgacgattcctatggcaatccatataataacagttataataaccataacaaccattggggatatgacaattatggtgattcctatcaaaatagggactttaagccaataaggcctaactctgatgaaaaggttcattataatcgtatggaagatcttgatgaccttgaattggttgatgtaaaggagagaaaacgaaatcttagagaaataaggcgaaaagctaagaattccagaggaaataattataataatcagccgattgatggtccgagtaacaattataatagaaattccaattatgaccctaactataacaggaactctaattataagcagaatcctaattataataatcgcaacaactatgatgattttggctatgatgattatgaatctggctataatcaaagatccaaaagagcccctcaaggcaataggggctattcaaaaaggaatgcaaatcaatacagagacgattcaagagcaaatcatcaacatagagaaacaattagagaatcctatcaaagaaatccaaataagtattttgcacaaaattatgagaaattccatcaagataatctagaagctcaaaataggggtggagaaagttttaatgaaatgaaccctcttgattctaatgattattatggtatggatgacgattttatctccgatgaggaatttgatagcactataaataaggctatggaaaatattggagacaatattaaatttaagcccaacaatcactctagagtagtcaattctcatgaagattttgattccagagtagttaactctcatgaagactttgattctagaatgaatgattcttatgatgattttgcttctggctctagacataatactgattatgctaattctaatcagaataggcattataattctaattatcctgatgataggcaatttaggtctaatcagtcttatgaaggtgattatagacaatctagatctaatcagccttatgaaggtgattatagacaatcaagacctaatcggtcctatgatgatggttatggtcattctggatctaatccaaactataataactcttatgatcaatccaattatggctatgatgattatagacaatcaaacaatcctccaagattaaataaacagtcttcaagtgataattatcataaatccaataatagaaacaggtcatctaattatagaaatagaagctataacaatcaggaaaattataactcctataatgatatggaagataattctaataattatgaagagtcagataaaaagggcaagaaaaagaaaaagaataaagattccaatgacttgcttgaaaagcattcaaggaaatttagaaggtcttaa

SEQ ID NO: 1441 - DNA, 297 bp, Methanobrevibacter ruminantium
  source 1..297: mol_type = genomic DNA
atgatatttgttttagcaaaagcaatacctaaagatgaagaagcttgtgaaaaaattgtagaatttgcacaagacttgattgaaaattcaagaaaagaagatggaaacatcgactataacttatattccaacacttgtgatggaaccttgttgtttgttgaacaatgggaatccaaagaaatattaggagctcatttacaaactgaacatttcctcacctttggaaaaaatatagcagatttagttgcagctgaacttgacattgctgtttacgaagcggaagcaactgatctttaa

SEQ ID NO: 1442 - DNA, 684 bp, Methanobrevibacter ruminantium
  source 1..684: mol_type = genomic DNA
atgaaagtagcggttattggtggaactggtccacaaggtttaggaattgcaaaaagattcgctattgaaggtgttgaagttattgtaggctctcgtaaggaagaaaaagctttaacaatagtggaagaaacaattgaagaacttaaagattatgatttaaatattgtaggtatggctaatgaagatgcagcaaaagaaggagatattttaattttaactgtaccattagcagcacaaaaacctactcttgaaggaattaaggaattttgtactgataaaattgtattggatgcaaccgtccctcttgaaacagctattggtggcaaaccattccgtttcattgacttaatggaaggttcagcagcagaaagaactgcaaaaatattggatggaacaggtgcaaaggtaatctgtgcattctgtaacattagtaattctcatttatccaatattccaaatgaaatcgattgtgactgtttaattgcaggagatgataaagaagcaaaagaaatcgctaccgaacttattaataaacttcctggagttaaagcaatcgacactggaattttagaaaaatcaagaattattgaaaagatcactccattattaatcggattaaacattaagtatagatcccattatggtggtctcagaattactggaattcctcaatttgaagattaa

SEQ ID NO: 1443 - DNA, 1077 bp, Methanobrevibacter ruminantium
  source 1..1077: mol_type = genomic DNA
atggcaacttttaaaggatttgcaatgaaaagactcaatgaaatcggttgggtagaaaaagaagtacctgaatgtggacctatggacgctattattaaaccaacttgtgtatctccatgtacttccgatattcacacagtatgggaaggtgcaatcggtgacagaagagacatgatcttaggtcacgaagctgttggtgaagtagttgaagtaggtagcatggtcaaaaaattcaaacctggcgaccgtgtaattgttccagctatcacccctgactgggacgatgaagcagctcaaagaggattcccttcacaaacaaccgaacctctcggtggttggaagttctccaacttcaaagacggggtattcggtgaaagattccacgtaaacatggctgacgcaaacttaaccttcatccctgacggattatccgacgaaggtgcatgtatgttaaccgacatgtggtccactggtatgatgggatccgaaaacgctaacattccattaggtggaactgtacttgttattggtattggtgcagtaggtctttctgctattgctggtgctaaatgtttaggtgcaggtagattattcgctgcaggtacccgtcctatttctgtcgaagttgctaaaaaatacggtgcaaccgacataatcaactacaaaaacggacctatcgatgaacaagtaagagaacttaccgatggtgcaggtgtagactctgtagttattgcaggtggtaacttagaaaacacatgggctgaagcaattaaatctgcaaaagcaggaggaactgtatccaatgtaaactacttaagtggtgctgacaatgtattaatcccacgtgtagaatggggttgcggtatgtcaaacatcaacattacaaacggattatgtcctggtggagcagtaagaatggaaagacttgctgatcttgcattatgcggcagacaagaccctgaattattagttacccacaaattcaaaggtcttgaaaaaatcgaagatgcattgctcttgatgaaagacaaacctaaagacttaattaaacctgttgtaatgttagacatcgactaa

SEQ ID NO: 1444 - DNA, 825 bp, Methanobrevibacter ruminantium
  source 1..825: mol_type = genomic DNA
atgattattagtgaagaactttttgaaggaatttgcgatttggacgattttaacctattgaaatttgttatcagctctgagctacgattgaaaatattgtttagcctatatgaatccagcaaatcaattaaggagctggagtctgagattaatagaaaatccggcaatatttccagaggtttaaatgaattaaaatcctgtaaattaattacaaagcttccaaataaattgtttgccatatcatctactggatttttggttgcaaagaatctggaaaatctaatggataatatgggatctattgagtctaatggagaattttgggaaaatcattccatcaaatcaattcctaacaaatttctaaaggaattatccatctttaataactctacattagttaaatcaaccattacagattttgccaagcctattaatctatacttggaaaacattaaaaagtctacatatatctgcatgatattgcctgtattttctaaaatcttcaatgatgccgttaatgacgctataatcgaacatgatggctatttggatttggtgactacaaagaacatttatgatttgtcaattaaatcagactctgacaataagattaagtccttggtgagagataagaagatcaagttttatattgtggatgaccttccaaatatcttctttacagtttcagatcagtttgcttcattataccttttctttgatgatgttgtatttgacaattctgaaatgcttttattggaagacgatttaaatttaaatgatgcctatagattctataggttctttaagaatgaaattttaaaataa

SEQ ID NO: 1445 - DNA, 861 bp, Methanobrevibacter ruminantium
  source 1..861: mol_type = genomic DNA
ttgacaaatcgatttgaagaagaaaattttcttgaacttcaagaggatataaagtttcttattaactctgaaattcgtttaaaaattttaggctgcttgtataattcctctgcttcaataaaacagatagaagcaattacaaattatagttacagttcaattcttgacaatatcaataagctggagcaaaaaaagtttatttatagcatagaggataaattttatttatataataaaacaaggctgaaattaaacagcattctctattttaacaaatcagccacatttttaagagagaattctgatttcttaaatcagtctcttatagatattaactctgaagctataaaggatttatctgctcttgaaggctctagactaattgaatctaataatattgatttatttaaatctactgaaatctttcaacgttctttaatgggatttaaatttttaaaaggtatcttcccttatttccatccacgacatgatgatattattagctattggatagacaatgattgcactgttgaattaatacttcctgatgaggtttcagaggctgtaaagaatttcattattgattatgttccaaaaagccctggaattaagaatagatttgtcaaattaaaacctaacgaccataacattcaattggcttttacagtgtctgataagtgttttgttttggctttatatactaaatctggccagtttaatcaaaatgcagtgctggtttcaactaatcctgaagctatcacctttggattaaagctttttgaggaatatgaagaattatgcggagattatgtttcactagagaatcttatttatcctaatggaagggaggatgattattag

SEQ ID NO: 1446 - DNA, 1275 bp, Methanobrevibacter ruminantium
  source 1..1275: mol_type = genomic DNA
atggatgattctccaaatgaagttcctgaattaaatcgcccaactaaaatagataatatagaagagcctaaaacagttgacgagcttcaaaaggaacttgatttacttaaagctgaaaaccaaaaaaccaaacgcaatcttatgtggaaggttaggaaacttgaaaaagacaagattctaactgaaaatgaaaaaatacgtttggaaagagagttaaaatcattaagaggtgaagttgaaagattcagatcaccgcctcttgttatcgcaactatcactgaaatcattgacgattccagaatgactgtaaaaagcagtaccggacctagtttcctaatcaattattctaaattccttgatgaagacctattgaagccaggttcaagggttgcacttaatcaacagacctttggcgttgtggaagttttgccttccgaaaaggatgcaaatgtatctggtatggaaattgaagccaaacctgatgttacctatgatatgatcggtggtttggatgaacagattatagaagttaaggaaactgttgaattacctttaaaacatccagaattattcgaaaaggttggtatcgacccaccgaaaggtatcttattatacggaccacctggaaccggtaagaccttgcttgctaaggcagtagctaatgagacaaacgcaactttcattaaggttgtcgcttctgaattcgttaagaagtacattggtgaaggggcaagaatggttagggaagtgtttgagcttgcaaaggaaaaggctccaagtatcatcttcattgacgagcttgatgcagttgcagcacaaaggcttaaaagttccacaagtggtgatagggaagttcaaagaactcttatgcagcttttggctgaattggacggttttgaatcacgtggagatattggaatcattggtgcaaccaacaggccggatatcttagaccctgctttgcttagacctggaagatttgacagattcattgaagttccagctccaaatgaagatggaagacgtgaaatccttaagatccatactaaaaagatgaatatagatcctgaagttagaatgagtgagttggttgagcttaccgaaggattatctggtgcagatttaaaggctatctgtacagaggcaggtatgtttgctatccgtgaggaaagagaccatatcattaaggcagactttgaggatgctatcaataagattatgggtaaaaacaagacaggtaccttagatgataatggcggagtaatgtttggatag

SEQ ID NO: 1447 - DNA, 504 bp, Methanobrevibacter ruminantium
  source 1..504: mol_type = genomic DNA
atgaactgtgaaatttgtggtaaagaaatcgaaggaaaacctttaagaactaaaattgatggttcagttttattagtttgtaacgattgtgcaaaattcggtagggtccaaagggacactccccttgagagaaaatttgtaactcgtgataagaaaggtagaaaagaagcaaatgctaaaactaggcctaaaaagacttatactaggaatgaagaacctatggatgagcttgtagaggattttaaccttgttgttaggcaagctcgtgaagctaaaggttggaaaagagaagagttagctgccaaaatctatgaaaaggcttctgtaatcaacagaatcgaatcagggaagattttacctgatttaaaattggcacgtaaacttgaaaagaccttaaacattaagctaattgaaaaatatgatgatatggatttagaagcctataagagttcttctgctggtcctaatactttaggaagtattgttaaaattaaaaggaaataa

SEQ ID NO: 1448 - DNA, 423 bp, Methanobrevibacter ruminantium
  source 1..423: mol_type = genomic DNA
atggctttgatattaattagaggagaaaacaacgcaaagatattaaatgcaattgccgatgtagaaaggcatgcaaatctgactttagaaacaaaaccgaaaaaagtggatcctaaatttgcagacaaactagttgaaaatgttttaaaatcacctttaagaactaaatctaaggttgcaaccgcttttcgtgtaaaggaagacactactatagctattcttcaagttaaaaagatacatccacctgcacatattgttgtggtaagcaatacctatgatggctatagggaattaagcaaaatcataaatgaaggcaaggtctttaaaggatattattccaataaatcaagttctggaacccgaatgaaagattataaattaactaagacctcgactaatgagggtttaaatatttatatgtaa

SEQ ID NO: 1449 - DNA, 1227 bp, Methanobrevibacter ruminantium
  source 1..1227: mol_type = genomic DNA
atgctcttttcagtaattgctactgtatctgctacttgtaacgtaatcgttattactgatcctagtggagaagatcctaacggtgctgcagcaggaagtatgtcctttgcaaataacatgttccagtcttcattcatcatgtctaaagatgatggatacgccatgctttcagggggtgaaggtaatggtacagaaaggaactatgcgattattgcagcgcttgcagctatgcagcatggagccactccagcatctgctgccgctttggcaagtggatttaagggtatccgtcttgttattggaggcccttcaatgggtgcagctatcggtggagactataacgcttatcttgttgttgtcgacgatgccggaaccattaaggtcacccaccacacaggaggagttgttcaattgcctcaaggttccaaaggagctatcattcacttgagaaacagtgcaggtaaccctatgtatggtactgcagaaagagtccgaagagagactgcagttaatataggaaaaatgattagggatggttatcctgccacttatattgtcggtaaggccatgaaagaggttgccgaggattcaggtgaaaaatacggtgggggtgcagtaaaccttgtttccagtatcagtacgggagacatgtttgtgccggatcaggtaaacaccaccggttatccgatggatgagaactattccaaatcctgtgaaaaatgtggatgggctacaggttttccagatgctgagcgatataacgtttgcccatactgtggcagtgaactgacagtgaactctgctacagatgttctaattgactcaatcacagtttctaaagattctgtttctgtttccgtttatggaagtgatagattaggactctcagacattacaagagaggtcgtcaaggcgtcagttaagaaatatggttataatgcttcaaccattgcaggttcacttaacaaaggtattaacaatggtttaatcgttggtgttgactatgtagagccaagcgacttaaacgttaagccggatgttcgtgctgtaggtgtttattataatccattgcctaatggcagaagttcacctgcttggaacttgcctatcaattcaatggttctaactattttaggtaccattcaaacggctattggttttgttctgattatgttggtaatctttaggacacggctgttaaaatcctttaaagatcgtgtttcataa

SEQ ID NO: 1450 - DNA, 498 bp, Methanobrevibacter ruminantium
  source 1..498: mol_type = genomic DNA
atgtttattaaaattagaagagacactttaataatattattattggcttttattttaattctatgcggtagattaattatctatgtagcttatgcatcctctgctcaagtcgaagaaggcgtacctattgcaggtattatcgttaagggaaacgacatagttcctattgacaatataagatataatgttgaaaattcaggtttaagagaaggcagttatattgatggagacatccttaagacctctatacgggagctgcctgtgactgaagccgaggcaaatgcagagaagtttgtaaaaaggtcaacaattccaggtaccactatcgctccaattgcaggagctgacgttaatgtaaacaagcaaactggtatcgtaaccgttactgttattgaagatttctcaactattaatattacaggaaacagtaccacatctactgatttcacagaaaacgaaccatcaaaaagtgtttataattatagcttagcaggttag

SEQ ID NO: 1451 - DNA, 1125 bp, Methanobrevibacter ruminantium
  source 1..1125: mol_type = genomic DNA
atgattatacctactttaggttgcccttccaactgttcatattgttggggctctgaggacaatgcagaattaatggatatcgatgtaattaagcaaattgttgaatggctagctgattttagggatgagccggttcacttcaccttccatggaggagaacctttacttgcaggctatgatttttataaggaagctcttcctcttttaaatgatgcagagacccatgaaactgaaggtttttcattgcaaagtaatttatggcttttagatgaggaaatggttgaattattctctaaatataatatagcaataagcacaagcattgacggccctaaggagatcaatgactatcaaaggggcgaaggctactatgacaagacaatgaaatcagttaagttagctacagaccataacattcaaattaattttgtatgtaccttcacatcctactctaaagatttttcagatgagatatatgatttctttaaggcaaatggattgaatttaaaaatccatgctgcacttccatcccttcgtggaaataatgcagatccatgggctcttcctcaggatgagcatggaaaattgcttattgattggctggataaatatctctatgacttggataagtttgtaattatggatttggaccatatcgctaaaagcagcttaagaagggttggaaccctatgtacatttaatgattgcatgggaactacattggctgttggccatgatggttcaatctatccttgctatcgttttgtcggaatggatgagtatataatgggcaatgtttatgacaagccatctatggagactttagagcaatctgaagcttgggaaaagcttatggaatttaagaatttcgtagatgaggactgtgcagactgtaaattcattaaattctgcagaggaggatgtccgtataatggaatagtggctacacaatctccaagggcggtggaccctcaatgtgaagcttataagatgatctttggtgaagtctcaagaagagcaaatgaagactttaagaaaaatgcaatggcggcatttggtggtgccccaagggttagaaaagaaggagatcctttttcaataatggatttgatgactaaaatgtaa

SEQ ID NO: 1452 - DNA, 219 bp, Methanobrevibacter ruminantium
  source 1..219: mol_type = genomic DNA
atgaaatttgaagatttaatggcaaaatgtccaaaatgcggttctcaagataaaactgctgttagaagatttattgacaatcatcatgctcatgctgaattaaaagagtttaaatgtgataactgcggttttgtttatgaaactggaaaagattatgaggataatgaagacgaaacaattaaaaaaggcttaatcaaagaattaaataaaacaatgtaa

SEQ ID NO: 1453 - DNA, 1047 bp, Methanobrevibacter ruminantium
  source 1..1047: mol_type = genomic DNA
atggattattccattaaaagtggcatatttggccttgttgtagcagatgcattaggagttccttatgaatttaaagacaagcattactgtgatatgaatcctatgactgatatgattggtcatggaacctataatcaggaagctggaacatggtctgatgacagctctatcgctttagctacattagatggattaactgactatgaatttggcgaagatgatgttgaaggcatgaggattaagaattttgccgaaatcattgattatgattcaattgcccataaattcgcagattggctaattaataagaaatacactcctcatggagatgtatttgatgttggaaacacaacaagccatgcaatctattccttttatgcaggtaaggtcgatgcattgcatgcaagtggcgcaggtaaaaaggatgctggaaacggatctttaatgagaatattgcctgtctcattccttatttacttcttatcattgaaatatgactttgatgaggaaggtgaaatggaagcaatccataatctgtcttcaattactcataggactttaagatgtcagatggcttgtggaatctatataaaaatcgctattgaactcttaaagaattattttgactctgaagatgattcaaacttgttggaattagttaataatggtataaattcagcaaaagaatattatgaaactaaagaggagtttgctcatgaattaagtatttatgaggacgtattctcccttgagattcaagattttgatagggatgatataaaaggttccggatatgttgtagaagctcttaaggcagcattatggtgtcttttaaataatgatgattataaggacacagctttggcagctgttaatttaggtcatgatactgatacaactgcagctattgctggtggattggctggaatttattatggatatgacaatatcccatctaattggttagataagatagcaaaatctgattatattggagaattgtgcaataatctttctgattatctttttgagattttggaggattaa

SEQ ID NO: 1454 - DNA, 780 bp, Methanobrevibacter ruminantium
  source 1..780: mol_type = genomic DNA
atgtcgttagaaattctaaaaaaaggcacaagtgaaaactttttgctaaagcagatcattaggaaaaattttacaagcaaatataaggattctgttttaggcatactttggagttttttcaatcctttaatcacaatggccctattgacagcgattttttcatcagtctttgcaagaaacattgaaaatttccctgtttacttcttaacaggccgttgcgttattgattttttcaatagcggaactaaaatagctatgacctcacttaaaaagaacagcggtattttaaataagatatttgttccaagatatgtatttgcattgggaggaatcttttctgaattcattaactttttaatgagtatgatagtgcttattgtgattatgattgtaactagggcgcctttccatttatatgctattttttcagtcattccaatagccatcctattcatactgattttaggagttggactgacactttccatactctgtaccaaatttacagacattgaatatttatataagatatttaccagcttattagtatatgcttgtgcgatattttatccaatagacattgttccacaacctatcagacagtatatggaattaaatccgatttatggtattatagctcaattcagagagtttgtcatgtatggaagattcccatcaacaaagttgatgctgataacctttttaacttcaatagtaatctttataattggagtaatcatatttaagaaataccaaaacagaattacattagagttataa

SEQ ID NO: 1455 - DNA, 1230 bp, Methanobrevibacter ruminantium
  source 1..1230: mol_type = genomic DNA
atggataataagaatgaaaatagcaataagatcaaaacccaattaataccatctattcataatactgtatctctccaagcacacctcactacaaaagatggagagcctattgtaggagaggaagtcgtatacaaattatattccatagacaaaagttttcttacccaatattctcgtataacaaatgaagaaggcttagttcaccttacattaaacataaagcataaggtctatattgaaatctgctatgagggcagtgaaaaatacgaatcaaacaatgtaatgacctttaggacaaagccttcagatgatgagaaaaacgttaaaacaaaacatccccttcaagttcaaagagaagaaaagttggaacaaaagaaaattgaagagaaaaagaaaaatctattggatttccaacaaaaacaaaaagatttggaaagtgtggatgaggacaacatagccatagagctaaagaatgtcaatttaagttttacaatcggatccgataagatagacaacttaaaggaatatgtaatccgtaccatcaaaagaacaaaagaaaagaaaacaatattcaaggctacagatgatgtgtcctttaagatatataaaggggaaaaggtcggcttaatcggctttaatggagctggaaaaagcacattgcttaagatcatatcaggtgtctacactccagatgacggagaggttatagtcaatggaaaaatagcgcctttattatccttaggggcaggatttgataagaattatacaggaagagaaaacattttcctgaatggagcgattttaggatacaatgaagagttcttaaactcaaaatacgatgaaatccttgaattttcagagcttggacaattcatcaaccttccagttaaaaactactcctctggaatgctttcaaaattaggattttcaatagccaccatagtggaaccggacattctaattcttgatgaggtattgggagtgggagacgttaatttcaaacgaaaaagtagagaaaaacttaattcattgattgaatccaatattaccgttttgcttgtttcacatacaatcagtgagataagaaatatctgtgaaaaggccatctggcttgaaaacggtaaaatcagagaaattggagaagtcaatgacatttgtgataagtatttggaagaagctaaaaaggtaagcgatgataagactaaaaaattaaagcctaaacggttttaa

SEQ ID NO: 1456 - DNA, 681 bp, Methanobrevibacter ruminantium
  source 1..681: mol_type = genomic DNA
atggcaagcatagtggctattatacctgcatacaatgaagaggaagctttggctgatgtgatagcaaagacttcaaagtatgtggatagagttattattgttaatgatggcagtgctgataggactgcagatgtggctattgaagccggtgcagagctaatcaatcatccgactaatttaggaaaaggagaggcattaaaatcaggttttgaggctattactgatgattcaatcattgtcacaatcgatggggacggccagcataatcctgatgagattccaattattcttaagcctatcattgaagatggagttgaccttgtaaatggcagcagatatttgtatggtcatgaggagaacactcctgcctataggagagttggacaaagggttttagacattgccactaatatctctgcaggaatcaaggttacagactctcaaagtggttttagagcattctctccaaaggctaggaattgctttaggtttaaagacactggttttggtatagagagtgaaatgctagtggatgcagcagaagccggtttaaaaatagttgaagtccctataactgttcgatatgatgttgatggctctactaaagatccggtaacccatggtgttggtgtattgcttaaaataatgaaagataaagccgttaggacttttaaaaaatag

SEQ ID NO: 1457 - DNA, 972 bp, Methanobrevibacter ruminantium
  source 1..972: mol_type = genomic DNA
atggaaactcaaaggattatggtaactggcggaagtggatttataggaacaaaccttgtaaatgaacttagatctagaggacatgaagtattgtctgttgaccttttgcatcatgaggatgaggctgatttgtattcagactcttacagtgattatgtaaggggagacattcgtaactatcgtcaaatggaacgcatcttcgatgacaatgacaaatttgactatgtttacaatttggcagcagaatacggcagatggaacggtgaaggatattatgaaaacctttgggaaaccaatgtaatcggtttgaagaatatgatccgtcttcaagagaaattaggatttagaatgatttcattctcctctgctgaagtttatggtgactatgaaggaataatgagtgaagatgtaatggaaaacaggccaataaaggacacttatcaaatgaatgactatgcaatctccaaatgggctggagagcttatgtgcatgaactctgcaaccatgtttggaactgaaactgtaagggttcgtcctgttaactgttatggtcctcatgaagcttactctccttataaaggattcattccaatctttatttataaggcacttcatggattgccttattcagttcataagggacataaaagaattattgattatgtggaagacactgcaaatacctttgcaaatattgtagataatttcattccaggtgaagtctataatgttggaagcaaacaggaatgggaaatgaccattgaagagtattctgaccttgtgcttgaagctgtaggtatagatgattccttagtgacctacactcctgctgaagactttactacaaaagttaagaccattgacttttctaaggctattcgtgatttaaaacacgatcctaaagtctctcctaaggaaggaattaaaagaacagtcgaatggatgaaatggtattacagaattgaagattag

SEQ ID NO: 1458 - DNA, 543 bp, Methanobrevibacter ruminantium
  source 1..543: mol_type = genomic DNA
atgactaataaaagtcctgaagaagagatagaagaattaaaggctcagctttctaaatatagaaaggaaaaccgtattcttaaagagagatgtgcctcctatgaagataggattgaacattttgctatagagcgaaaagagctgtctagagccatcacccaattcgaatcattggaattggagcttcgacaatatgatttggaggagctgattcaaaacacccgcaagttaaatcatagaatcgatattcttcgaagatatcttcaaacagagcgagaggacaatgagaaattaaatgaattgattaataagctaacaaaggaattggatgatgcaaattatgaaatatctcgattgactactgaatttcataagcttagggttcgcaaaaatcaaagaacctattttttagaaaatcgtttggatattgcatataccaaattggctcaattgaaatacaccttaaatgaatttgaggaacttggattctgggataggcttagaggcaaaaaacctgaaagttatgatgatattgacatttga

SEQ ID NO: 1459 - DNA, 846 bp, Methanobrevibacter ruminantium
  source 1..846: mol_type = genomic DNA
atgaaagcagtcattcctgcagcagggcttggaacaagattccttcctgctactaaagctcaaccaaaagagatgttgccggtttatgacaagccgaccattcaatatgtaatagaagagtctgtaaattccggtgtagatgatattctaatcgtaactggtaagggtaaaagatcaattgaagaccattttgacaggtccttcgaattggaacaccatttgaaaaccaaaggaaaagaagatttcctaaaggaaattgaatatatttcagatttggcagatattcattttataagacagaaaaagcaaaaaggtcttggagatgctatatattgtgctaaaaagcatgtcggcaatgatccttttgttgtcatgttaggggataccattacaaaggatacagttccgtgcacaaagcaattgattgacatctatgaaaagtatgaaaaatctgttatcgcccttgaagaggttccggatgaaaaggttgaaagatatggtataataggcggtgaagagatagaggattcaatctataagattgataagttagtggaaaagccacctcttagagtagcaccaagtaatttggctattatgggaagatatgtccttacacctgacatttttgattgcattgaaaatgtggagcctggatacggtggagaaatccaattgactgatgccttaagcaagcttgatgagatttatggccaggtatttaagggagagtcatatgatattggaaaccgtattgattggctaaagacttccttaaggtttgcattggaagatgacagtgcaagagatgatatattggaattcattaaagaagagattatttaa

SEQ ID NO: 1460 - DNA, 414 bp, Methanobrevibacter ruminantium
  source 1..414: mol_type = genomic DNA
atgaattttaaaattaaggcaaagggacataagaacgttttatccctacataaatccacttttgaaataaccaaagacaaggatctctccttatctggggattgcattattggtttggacattgataagtgcatgttggactttcctaaggaatttaaggaaaaattagcaaatgatgagactatagtgactgtgaaattaaaaagcccaaatgcttatgatgagatagtgggatatggccatcatgacttgactttagaccatccgacagatattgtatgcagaaaaagtgattttatatgctcaagaactttaatgattaaatctgataaggcagctattgatttaaatagagatttaatcgaggatttggctaatggtgaatcattagatgtggaaatcattttaagctaa

SEQ ID NO: 1461 - DNA, 939 bp, Methanobrevibacter ruminantium
  source 1..939: mol_type = genomic DNA
atgataataaatactggtttaagaacagacatccctggattttttagcaaatggttctataatagaattgaagaggaatatgtctacgtcagaaacccatactacaaaagccaagtatttcattacaagcttaatcctgaactggttgactgtataatattctgcactaaaaatccaaagcctatgctatcaaatctagacaagatatctgaatttaatcaattctggtttgttacaataactccctacaaaaaggaaatagaacctaatgttccatcagtaaacaaagtcataaaaagttttaaggaactttctagtcaaactggaaaagaaagcgtatccttaagatatgaccctattttaataaacgataaatacactttagattatcatattgaggcatttgaaaaaattgcaagctccctatcagaccatacaagcgaaataataatcagcttcattgacctatatgaaaagaccaaaagaaacttcccacaagcaagagaagtttctaaagaagaaagactaattataggcaaagagttttcaaatatagcaagagaaaacaatcttatcttaaagacatgcgttgaaggaaaggaattagataaatttggaatagattcttcaggatgcatgactaaagaagttatagaaagagcgatacataataagctcgatgtaagagttaaaaaatcaagaaacagaccatgtgactgtcttttaaacaatgatattggagaatacaacacttgcaatcatggttgtctctattgctatgcaaattcaaacaagcaattggttaagcgaaactttaaaagacacgacccagattctcctatattgattggaaatataagagaagaggatgaaattaaagaaatcaatcaggaaagttttttaattcatgaagatacagttcagacaaaattattttaa

SEQ ID NO: 1462 - DNA, 459 bp, Methanobrevibacter ruminantium
  source 1..459: mol_type = genomic DNA
atgaaaggaacatattgtttaataatatctatgaaaaaatcggataaaatcaaaataggcaatctatatccagaagcttataaattcaagaaaggatattatgtctacatcggctctgcaatgaattcacttatctcacgcctaaatagacacttatctgatgataaaaagatgcattggcatatagattatctcctaacaagcgaatatagcgaaattcgagagatactttttacagactctgaaaaaagaatcgaatgtgatctagcaaacgaaatagctgaagacggattggaaattgaaggatttggctgttctgattgcaattgcaattcccatttaatattcttcaatagaaaaagagatgctttaagaagggttaaggacgcttatgaatcattaggtattgaatattatgatttaaaatattttagaaccatagataataaaaaggattag

SEQ ID NO: 1463 - DNA, 2883 bp, Methanobrevibacter ruminantium
  source 1..2883: mol_type = genomic DNA
atgaaaataatatttaaacgttgtttagttttaatttctttaatttttattttaattttaactttaggacttgtatcagcttcaaataatattaatcaaattaatgatatgaattgtagtgtatatgaagattatagtgaaaatattatcacagcagatctaaattcaaattctaatgagcttaattcagattttgcttatggtgattcagattctgaagaaatcttagatgaaccctctcaaaagcttaaaacaggttctgataattctgattttaaagacatacaaaatttaatcgataatgctaaggaaaatgatgtaattgagcttagcggaacctatacaggtgattctctaattgtagtaaacaaatcattaacattaaagtcttcttcaagtgcaacacttgatggagaatttctaaatgaattaatggctataaatgctccaaatgttatattggacaacatcaactttataaatgcaaattacactggtcttagtgtaaataacaattatgtaaccattcaaaattgtaattttgacggctgtatcaatggagagttaggatgtgccttaataatccatgggaataatgtaaatgtattaaactctaattttacaaataatgttgcaaataagtccagctgtcatcatacggatggggcagcaatttatcttattggaaacgattgccaaatcgataattgcagttttataaataattggggttataattttgaaacatcctcatcaggaggagccatttggataaagggaaataatattgtaattaacaattcatatttctttaataattcagctaccgctgaagttggatggacattccatggagaggagataacctatttggcagatggatatggcggagcagcctttttagttggaaaaaatgtaaaaataatcaattccctttttgatagtagcctttcccatgcacaagggggagcattgtattataagtctgcatatgattgttcaataatcaattcaacctttttaaattcattttctgttggagagggaggcgtaatctatttaggtcagaatattgatgggctaatgatagattcttgtaattttataaacaacactgcagacggattggatggagttttagtcaaatacaccgatttaggcagtgttttatatgcttcaaagttcgctgaaaatgtagtgatcactaattcaagtcttttaaacaataaaggaacctctgcagtctactttttaggaaataacttaaatatttcaaattcaatcatagaaaataataatctatcaactgcagtaatttatatgaatggaagtatgaatgacaatttctggtctaagaactttgattctgcagatgagtttaagaatgattgcttcattattcgagataatgagtctcaagttcctgatacttggtttaacttagtttgtgatggcttggatagtttaaaggcgaagggtgtatatgattataatatgtcctttgtcttaaaggatgcttctttagataatcatgcctcaaaaatttcattaacaaataatcttcctaattatcatattaacttaaaaaacagtgcaaagaataagattaatccaaatgaacttgtgattgttgacaatcaggcagacttcacttatgattatattgagtctgctaaggattccattgatgtttatgatgattataataacttgatcttatcaaagaaggttttatctggaataacttatattaatgatagtggaaatgatacaaaagaccttcaggatgcaattgatagtgccagttctggttctttaatctcattatccaataagacttatgttcttgatacaatattaataaataaggatattcacatatctggagaagaaaatacaactgtcatgctttcaaatagttcagattatatatttaaaatctctaattgttctgctgcaaactattctgattatggcatagccatttcaaacattaattttattttagataatggagatattgttgccttagctgaagctgtaaatgggtctggctcattatctattgatgttgcttcaataaagataacagacaactcatttacatctcgtgaaggtgtagtgagggaatcaattactattcttgagcttgatagccaaagggctgtcttagcacctacaagaaatatttctatttctaataattccttggaaattggaatgaatccatttgattttaatgtaaagtctgtcataaatggctctgatgttagagtggatgtagggggcaatttagccagcaaaaaagccagtcagatcatttgtaaagatatggtcactaaagccattgcaagcaatgtagattcccgctctggagaatactttaatgtaagcttaaaggatagccaaggcaaaccattgcaaaataagtttgttcagataggttttaatggtgctgtttataatagaaccactaatgaaagcggagaacttagattacagataaatcttgcttataaaggagtttatacatttgccatatcctatttgggtgatgatgagtgcaacggttcatttgaagttgctaagataactgtaaatcctcaaagtcctattttaatggccaataatgcaaaatataaggtatcatctactaaaaccctttctgctagttttaaatcaatgaaaggaagtcctatttctggcaagacaatcaaattcactgtagatggcaagacttatagtggaaagactaattctaatggtattgctagtgtgaaagttagtttaaataagaagggaacttataaattcactgccaagtttgcaggagataatacttttgcagcggtgactaagtctgctaaggtggttattagttaa

SEQ ID NO: 1464 - DNA, 804 bp, Methanobrevibacter ruminantium
  source 1..804: mol_type = genomic DNA
atgaaaagacagaaaaaaatagctatctatggaaaaggtggtataggtaaaagtactacagtagctaatattgcagcagcttacagtgaagacaataagaaagtcatggttattggctgcgatcccaagtcagatacaacaagaacattatgcggtaagagaatacctaccatagttcataccttaaaggacaataagaagccagagcttgacgatttggttttcgaaggatttaataaaatcaaatgtgttgaaagcggagggccagagccgggggtaggctgtgcaggtcgtggtgtcattgttgctatgaaacgtttggagaacttaaatgcctttgaagaggaatttgatgtaatcttatatgatgttcttggagatgtggtctgcggaggattttcagttcctctaagggaggattatgctgatgaggtctttatagtatcctctggagagtatatgtcattatatgctgcaaataatatatcaagaggaattaaaaaactaaaaggaaatcttggaggcattatctgtaactgcaaaggtatagacaatgaggaagagattgttaattcttttgcaaaggagattggcactcaagtgattggagtgattggcagaagcaatctcattcaaaggagcgagttggatgcaaagactgtagttgagtatgctcctgaatcaatagagtctgatgcttatagaaagcttgcaaaggacatttttgataatgataattattcaactccacagccgatggaagatgaagacttcgagaatttctttaaatcatttattgattaa

SEQ ID NO: 1465 - DNA, 1260 bp, Methanobrevibacter ruminantium
  source 1..1260: mol_type = genomic DNA
atggtagagttattggctccagcaggaaattttatttcattaagcagtgcattaaagaatggtgctgatgcagtttatattggtcttgaagaccttaatatgagagttaatgcaagcaatttctctttagaggatattaaaaaggccagtgaaatgacaaaggaatatggggctaaattatacgtatgcacaaatacaataatgaaagataaggacattgaaatgctaaaagatcaattgccatatattaaggaatatggagctgacggtatcatattgtcagatatttcactgattgaattggcttctcaaaatggccttgaagcccacgttagcgttcaggaaaataccactaatttttatgcccttaagacccttgaaagattaggtgcaaaaagagccatcctatctcgagaattatccttagatgaaataaaggaaatcactagaaaactaaaggagtcagattccactattgaaactgaggtttttattcatggtgcaatgtgcatggcgatttcagggcgctgctttttaagctatggcctttatggcagaagcgccaattgcggagattgtctccagccttgcagaaaggaatggaaattaagctttgaggaaaatgaagatgatgatgtaatcaatttctcagactgtgatgacgaatccttcataatatcccaatcatatgacgattcctataggacaaatttcttctctccaaaggatatggcattgattgaacatattccggagcttattgaagcgggaatcgattcatttaagatagaagggagagcaagatctcctgattatgttgccgctgcagtttccgtttataggcaggccattgatttgtattatgatgacccagataattggcaatttaatcctgaatggatggaagagcttatgaaagtcttcaatagaggctatgacacaggattttattttgacactccttatgagatcagcgaaaacaatcaatccaagttcattaaaagggatattggaaaggttgttaattattataataagattagggttgcagagcttaagatatgggatgatctggctcttggtgaagagataatgattcagggacctactacaggttcaatcacacatgtgatagagtctatgcaaattgatggaaaaagtatagaaaaggcagaaaaaggttccaatgtggccattgccattgatgaaaaattaagggaaagcgattttgtttataagttagttcctcgcgaggagtaa

SEQ ID NO: 1466 - DNA, 1443 bp, Methanobrevibacter ruminantium
  source 1..1443: mol_type = genomic DNA
ttgaaagataaatgtggtatagttgggattcactccaaagactcctctaaggatgtttctcacttaatttattatggtttatatgctttacagcataggggacaagaatctgcaggaatagctacttataatattaattatggcttgaatttccattgtggaatgggattggtaactgatgtttttaataactccctaatcaatagcctaagcggaaatgtaggtattggtcatgttagatattccactacaggccaatcaaaaatagagaattcacagccatttttcacagaattggatgatggatttatcgctatggctcacaatggagacattgtaaactcaggttctttaagagacgaattaactaaaaaaggataccaattcaagtcaggcactgattctgaggttgtctgttatttaattaaagaggcatatgaaaaagataaggatattctcaatgttattgatgctgtttcccaaaagctaattggttcttattccttagttattttaatcaatgatgaattatatgttttaagagatcctatggcaatgaaacctttgattttaggccaaaccaatgatcattttgttgtagcatctgaatctgttgcatttgatgtcatagatgctgaaatcatccgtgacatggcgcctggggaattgctatactttaagaataatgagattaattcctatatcttgccatctgcaaaaggttccagaagagcccattgtatgtttgaatatgtttacttcgctcgtccagacagtgtcatagatgatagaagcgtttataatacaaggcttagaatcggtgaagcattgtttaaggaaaaccctattgatgcagatttagttttacctgttcctgactcctctattcctgctgctatcggctattcaagagcttcagggattccatatggtgagggattaattaaaaacagatatgttggaagaacattcattatgcctactcaagaagagcgtgaaattgctgttaggctcaaattgaatcctttaaaacatgaattggttggaaaacgtgttgttgtaatagatgacagtattgtaagaggaacaacttccgaatctttagttagaatccttaaggctgctggagctaaggaagttcatatgctaatcggttgccctccggtaatcgctccatgttactatggggttgctttggcaactaaagatgaattgattgcagctaatttggaaattgaagaaatcagaaagcagttaggtgctgatacattaggttatataagcattgaatctcttatcgaagccattggcatagatggggacagcttatgtttaggttgtattactgaagactatcctactgaaatacctgaggatttagaggctgaatcctattatgattactatcaagacctaaaggatgctgttgaagaagatgaatag

SEQ ID NO: 1467 - DNA, 1413 bp, Methanobrevibacter ruminantium
  source 1..1413: mol_type = genomic DNA
atgaataatgattttgaatctgatgaatttaattctaatgacaataacaataatgattttgaatctaaattggtagatattcgaattgttttaactgatttaaattatattgaagcgatttctaaagcagtaagtaactttgatttatctaattttaatgtaaacatttcatctatcattccaagctcagatattgaaattgcaaaaaacactatcattggtgctgatttggttttaatcgccacaagttctgattttgaaggaaaagaattatactcaaactttaaaagggctttaaagacggattataattttgttgaatatttgaaattgccttctttagatgaattggaggattacgattatgattatgacgaggacaatacctttgaagatgagatagccaattccataattcgtgcaggattatacagcatttctaacttgtcatcaatcaataaatctaaaaaagcttattataatgttaaaaaggattttgatgatagccgtttaagatttgaaaagattacaaaggaaaatgatatattattgaatgaatcaaagcaaattagagagaaaaacgaaaagcttcgtgaagaggtaaaaatacttcagaaagatttagataacattaaatcagattattcagatttaaaatcaagatttgaaagcattcactctaaaaactctttggaagtcttctctttaatggaattatggcaagatctctttaatgaaacttttacagaggagatttataggtttattctaattagcacagacaatttccgccctaagaatcttatgattggacaaggtgcaatttgtgctgaatcaaaggaagatgcaatggattggttaaagattattaaaacagcttttattctctcagacacaaataagcaagagttgaattttaataatttcaatagcaattttaaatttgaagacttggattccaatatttcaagcagtcagaatttggattccaatatttctaacaccagatatgatttggattctaatgattctaatcttttttctagtttagattctaatatttttaatgcgcataattcagattcttcagatgaatttatttataatgaaagatttgaaggaaataataattcccaagaggaatttagacaattagattttgatgatgctttcgatttaaatgacaatgaaggtcaagaatcatttaatcaaaatgatttagataattcctataattctaaagatgacccttcagatgagataaatgttttcaatctaaagtctcttaaaggatttagagaggaatctgatgaagatgaatccgatgaaaatggggattactcttatgatgaggatgatgatttagatgaggctgatgacttgtttaatccattctcaaatatttgggattaa

SEQ ID NO: 1468 - DNA, 975 bp, Methanobrevibacter ruminantium
  source 1..975: mol_type = genomic DNA
atgattttaattactggtggagcaggctatattggctcccatattaataaattattaaataaatccggttatgagactattgttttagacaatttgtctaaaggacacaaaaaagctgttaaatggggcagtcttgtaaatgcagatttaagtgacagtgataaattaagagagatctttcaaaataatgatatagaggcagtaatgcactttgctgctttttcatctgttgcagaatctgtagaagagcctgaaaagtattttaaaaataattttgaaaatacagctaatcttttaaggattatgaaggagtttagagtaagaaaattcatattctcctcaactgcagctttatatggtattccaaaggagattcctataagcgaatcagctgaattaaagccaatcaatccctatggagagtctaaattaatggttgaaaacctattaaaggacgaatctgactttggaggattgaaatatgtctcgctacgttatttcaatgcagcaggtgcagatttggattgtgagattggcgaagatcataatccagagtctcatttgattcctttggtcttggatgcagcaattggaagaagaaacagcatttccatttttggtgatgactatgacactccagacggaacatgcataagggattatattcatgttcaagacttggctgatgctcatttaaaggcattgcaatacttagaagagccttttaatgacagcaatatatttaaccttggaaacggcaatggattttctgtaaaggaagtcattgacacttgtaaaaaggttacaggaatagactttgaagtgaaggtggaagggcgcagacctggagacccagatatcttaattgcagattccaaaaaagcagaagaagtcttaaaatggaaaccagagtatccagatttggaagacattgttgaatctgcttggaattggcataagaaacttcacggataa

SEQ ID NO: 1469 - DNA, 1191 bp, Methanobrevibacter ruminantium
  source 1..1191: mol_type = genomic DNA
atgattaaaactgatgtattggttattggtgctggacctgctggttcttcagctgctagatttgcagctaaaggcggcgtagatgttattcttatggataagaaatccgaaataggcgctcctaaaagatgtgctgaaggtgtatccaaaaagacttttgataagttagaccttgaaatggatcctcattgggttacccaagaaattgcaggggtcagattagtcgctcctgacggaactgatgtatggcttgatgaagatgttattgacttgcctgaagcaggatatatcctagagagaaaagtctttgataagcatatggctatggaagcaggaagagaaggagctcaaattaaaatcaaaacccaagctaaaggcttgaaaagagaagaagatggaagcttcactgtaacttgcgaatccatgggtgaaacctttgacattaatgctaaaataattatcggtgcagacggtcctgaaagccatgttgcaagatgggctggcttgaaggcatacaccaaacctaaacacatggaagctggagttcagtttgaaatgtgtaacgcaaaaatggaaaagagcaatgttcttgaattctactttggaagcgtagctcctggaggatacttctggcttttccctaaaggagatgacattgtaaatgcaggacttgctatcattccagatatggctggagataaatccgcttacgaatacttagttgatgctgtaaacaactgttatgctactaaagacgctcagcctgttgaattgaatgtagggggagaccctgtaggcgggcttgttaaggaaatgtacggcgacaatatcatgctttgtggagatgcagcaagccaagtaaacccattgactggtggaggaatcaccaatggtatgatgggcggaagatttgctggtgaagtggctgctgaagctattaaagcaggggactgctctaaagacttccttaaaaagtatgaagatttagttaaagaagaaatgggtcatgaaatgcaaaaatacactaaagtctgtgattacttatggactttagatgatgatgacttaaacagcatcgctcatgctttccaagatatggaatttactaaaataagtacaactgagcttgttaaggctgttattaaggttcaaccaaaagcagctttgaagttaggtaagttgttcttataa

SEQ ID NO: 1470 - DNA, 165 bp, Methanobrevibacter ruminantium
  source 1..165: mol_type = genomic DNA
atgattgtaaaagactggtgttcatactgtggctgctgtgcaggagtatgtgcaagaaactgcatagaagttaaagaaactgctttagtcatctctgatgactgtaatgattgtggaatttgtgtaaaagcttgtcctttagcggcattggaattagaagaatag

SEQ ID NO: 1471 - DNA, 606 bp, Methanobrevibacter ruminantium
  source 1..606: mol_type = genomic DNA
atgcctagttttttaaatatacgtggaaataatcatgaccctaaagaccctcaattaattagagacggtattaaattgggagtaaactataaaagattctctaaagagccagtattaggtaaaaatatcttgcttagatcaaatactgttatctataatgatgttatcataggggatgactttaaaactggacataatgttgttgtaagggaccataccaccattggtgatgatgtgttgataggtacaaacactgtcattgaaggtggatgtaagatcggaagtaatgtaagcatccaatccaatgtatacattccacgaaacagtataattgaagataatgtatttgtaggtccttgtgcctgttttaccaatgacagatatcctgttagagttgaatatgatttgaaaggccctcagcttagaaaaggatgttctgttggtggaaatacaacattcttatctaatattgaagttggagaaggagctattgtagctgcaggtgcagttgtaacacgtagtgtgcctccttattatttggctataggtactcctgctaagattaagccgttgccaacttctttaagagttccgaatatgatttaa

SEQ ID NO: 1472 - DNA, 312 bp, Methanobrevibacter ruminantium
  source 1..312: mol_type = genomic DNA
atgacaaaacatgtatgtcctcgttgtggttcaactaatgttgagtggattattccacaaaactggtctaaatgggaatgcagggactgttcatacacaggacctattatagacgcagatgatgatttaattgctgaaattaaagcagattgggaagaaaataaagaaaaatacatagaagaagagtatgctcgtgctgaacagatggcctcaggtgaagatgaacgtcttgatgaagagatggaaattgcagaagaggacgagctttcagacgaggaattggataaaaaactggaagaattggatttatga

SEQ ID NO: 1473 - DNA, 1161 bp, Methanobrevibacter ruminantium
  source 1..1161: mol_type = genomic DNA
atggtttatgatgttagtgctcttttaagtcatattaatcgaataaggcgtgagataggtcatgaagaggttaatatagaaatcaaagaggttttatataatattgaaactaatgagatgtggataatcaccaatgaccgtccggataagtctgcagttattggaaaaggaggatgggttgttggaagacttagagaagagcttcaaataaatagcattcatgtggaaagctattcagactttttgacaaaggaatataggatgggactgtccttaaataagctaaaaagctttgtcacaacagaagatttaagcgatgatgttaagctttcattatacaatctaatcgatttattaactatcaaatcggataatttgtattcatttgactttaagtcctattttgatgatttggaaaatggcccttattcgtatttcgaagcagagaaacctgttgcaattgtagccttatctggagggacagatagtagcttttcattgatacttgcaaaaaaattaggatttaatcctatagctgttactgtagatcctggaactatcgtgcttccaaatcaattcaaatataatattgacaagttaacaagcaagctggatgtaaagcatgaatatattccagtggcttatgatgatataattgaagattcacttgcagggagattccatccttgcggaaggtgttcaaaaagaatagaggaaactttatttaaatatgctgtagataatgatattcctatggttatatttggagatatgctgtcaactggcagtcaatgcataactgagcagttttatggtgaaaactctgaagattcagtttctcaagatttagaagattcagtttcttcagatttagaagattcattcaatactgaattagaagattccatcaatcataaacttattagacttaatctaccggctgcactagctgtttccaaattggagaataaagctctaacaagccattatgaattaaataaatttaagggattcggatgccctttattgtatgaggttcataagaagtttccacatatgaagaagtattccattcaaagaatcctaagggaaactcgttcaagtgctttagagcctggtgaagctttagatttaatttggagtttttataaaactgattag

SEQ ID NO: 1474 - DNA, 1419 bp, Methanobrevibacter ruminantium
  source 1..1419: mol_type = genomic DNA
ttgaaaattagaactggaagacttgaaaaggaaatgactgatgaagctgcggtatacacatcttcattggaatttgacagatttatctttgatgcagacattcgctgcaattacgctcatacatccatgcttaaagctcaaggaatcattgatagcgaaatagctgataagattcttgatgcattggataagcttagtgaagagggctttgatgcccttgaatttgaccattccgttgaagacgttcatatggctgttgaaaactatgttacaaagcttgtaggtcctgaagctggctttatgcacactgcaaaaagcagaaacgatcaggtggctacagacataaggcttcttttaagggatagaatcagcgaaatacaaattgcaatacttgaattcattgaaggaatactggagcttgcaaaggaacataaggaaactgtaatgatcggatacacccatttgcagcatgctcagccaattacattggcccatcaccttatggcgcatgctcaggccttaaaaagggactaccaaagattggatgacacctataaaagggtcaatctaaatcctctcggctcagctgcaatggcaaccacaagttttccaatagacagagaacttacaacaaggctcttaggctttgatgattatcttgaaaactccatggatggtgtatcatcaagagaccatattgcagaggccgttttcgaccttactgcactgtgcacaaccctatcaaagatatgtgaagagcttgtcctttggagcacatatgagtttggaatagtctcaatggctgatgaatactcatcaacttcctcaatcatgcctcaaaagaaaaatccggacgttgctgaagttgcaagatccaaatgtgcaatagtaaacggagagcttatgacaatcctaaccattcttaaggccatcccatacacttataatagggatttgcaggaaatcactcctcatttatggaatgcctgtgatgtggcctatgatacattaaaaatcacaaatcatatgcttttaactgtcacattcaatactgaaagatgcttagagcttgcaggtgcaaactttgcaacagcaacagacttagcagacattatggttagggaaaggaagataccattcaggacagcacataagattgtgggaagaattgtaaatgaggcagttgctgaaggattgaatccaagtgaaatcgatggagcttatgttgacaatgtggcagatgagcttggatttgataaattgaatttagatgatgatttgattcacaatgccttaaatccaattgaaaacgttaagataagaaatgttcctggaggaccttctcctgaaatggttcaattggctattgacaatatgaatatatttttagatgtggagtttgaaaaacaaggcatctga

SEQ ID NO: 1475 - DNA, 159 bp, Methanobrevibacter ruminantium
  source 1..159: mol_type = genomic DNA
atggctactaaaaaagaattatacactgtagaaggggacaaaatcgtaagaaaaaacccattctgtcctcgttgctctgaaggcgtattcatggctgaccacggtgacagatacgcttgtggtaaatgtggatacactgaaatgaaaactaaagaatag

SEQ ID NO: 1476 - DNA, 315 bp, Methanobrevibacter ruminantium
  source 1..315: mol_type = genomic DNA
atggaaattgaaattactgaaaagaaagaaaatattttatttgacagaacagaagttaaatttaactgcttatatgaaggagaagcaactcctaaacttttagatgttaaaagcaaattagttgctttacttgacactaaaaaagaattaatcgtagtagacaatattcaaccaggatatggtgaacctaaagcaacaggatacgctaaagtatacggaagagaagcatccttattagatgtggaaaaaccaagcgtaattgctaaaaacaaagaaccagaagctcctgctgaagaagaagatgaagcggaatag

SEQ ID NO: 1477 - DNA, 501 bp, Methanobrevibacter ruminantium
  source 1..501: mol_type = genomic DNA
ttgtttagaatagatgagaattcaatagatgaatttaaaaaaccattaggagtactgtatcctgattttgaagatgcaattcctatgataaaggaggctagttttctaatctctgttggtgatcagactattaaaaatcttcttgataacgatttatatcctaatttagggattattgacaatcgtattcaacgtaaagatcataatcatgatattattcgtacagaaaacattctaaaggcggacaatcctgcaggtaccattactgaagacctatgggaaaccatagagttagctatttcttcaatacttgaagatgaggacactcgcattattgaagttaaaggggaagaagatcttgcagttcttccatgcttattaatcgcacctgaggatgctgttatattatacggccagccaaacgaaggcttggtctttgttaatgtttttgaagctaaagacaaggctaccagactcatgactttcttcaataaggaatag

SEQ ID NO: 1478 - DNA, 831 bp, Methanobrevibacter ruminantium
  source 1..831: mol_type = genomic DNA
atgggatatttaacagatttatttaaggaagctttggtttatcctctcagcaatatagttacattaattattcttggagtattgctaacaataagcaagtttccaaatgttctatcaagttttggagtagatgtcgattttcagttaataattatctttgcattgatttcttttgtagtttcattattcatggacggctattcattggctgtaattaaggatgcagttgacttcaatgtatcaatgcctgcttttgacattatgaaaaatttcattgacggcgttaaggtatgggtattgaaaatactttactatattattcctacaataattacaatttttgttgctttattgactggaggagttgacgcaatacttaatatctttaggtttatcggtgaaaatcaggagcttttatccaatctaaatacaccagcagaattgataaatgcaattcctcaggaatatattgcaactttccttactagcttattcattactgcaattgttgcaattattttatacattatatttggtcttctttacaacattggcctttgcagattagctaaatatgacagcttcaatgaaggaataaacttcaaggcaatcatcaacgacattaaggcaatcggtttgggaacttatattctatggtatattatattgttccttatcatatttgccatatccattgttatgggcttgattgcagctattccatatattggaattatattgcttaatttgctttttgctccatttattttcttgttggtaaacaggtcacttggtttattgtatactaaagcagaaggatataatggatag

SEQ ID NO: 1479 - DNA, 183 bp, Methanobrevibacter ruminantium
  source 1..183: mol_type = genomic DNA
atggctttacaagcttgtacacattgcaatttattaactgaaaagcaacaatgtcctgagtgtaagaatcctacttctacaaattggagtgggcttttaatcattacagatcctgaaaattcagacattgctcgcgagttaggtataaaaaaagcaggagaatatgcattaagagtaagataa

SEQ ID NO: 1480 - DNA, 570 bp, Methanobrevibacter ruminantium
  source 1..570: mol_type = genomic DNA
atgacaactattgagggaactgtaagaattccaccacacagatttggtgaacctcttgaagatgtagctattgaaactttaaatgagtcctacaacggtcagcttgataagaatttaggtttaatagtcggtgttaccagcattgaagaaatgggtgaaggagttctcattatgggtgatggagctgcttaccacaatgttatctttaacgctatcttctttaagcctgaacaacaggaagtcgttgaaggagaagttattgatatagctgaatttggtgcatttgtaagaatcggacctatggatggtcttgttcatgtatcacaagtaactgatgattatataaattatgatcctagaaacgcttctcttatagctaaggaatctaaaaagatccttactgaaggagacagagtcagagctagaatcgttactttaagtcttaaaggaaaaaccgttcaagaatctaagattggtcttacaatgagacagcctaatttaggtaagtttgaatggattgaaaaggaaaaggcaaaagctcttgaaaagaaaatggctaaggtggaataa

SEQ ID NO: 1481 - DNA, 402 bp, Methanobrevibacter ruminantium
  source 1..402: mol_type = genomic DNA
atgaaatctgaatcaagagaagtttttattgatactaactttttcatgattcctttccaattcaatgtggacatcattgaagaatttaaaagggtattgcctaattataaattggtgacaaccacatttgttattgatgagcttaagggcttaaaaaataacaataaaggaaaagtcagattagcagcaggtttgggattaagaatagcccaatctgatgagatagaaattaggaatgtttctttaaatgatggagaatctgtagatgatgctttaattagaatttctaaggtattggctacaaatgacatagtcttaaagaaaaaagctaaaaagaatggaatcgctttggtctttttaagacaaaagaaatatcttgctgtagatggttatttggcttga

SEQ ID NO: 1482 - DNA, 1224 bp, Methanobrevibacter ruminantium
  source 1..1224: mol_type = genomic DNA
gtgaaagtacaatctgatgttaacataggactggtgggccatgtcgatcacggtaaaacaactcttactaaagcattgtctggtgtatggacagatactcacagtgaagaaacaaaaagaggaatatccattcgtttaggatatgctgatattgaatttagaaaatgtccaaattgtgaagaacctttatgctacactactaaagaagtctgtgaacattgtggcagcgaaacagagcttattaaaaaagtatcatttgtagacgctccaggacacgaaaccttaatggctactatgttatctggtgctgcaattatggatggtgctgttttagttattgctgctaatgaagagtgcccacagccacaaacaaaagagcatctaatggctcttgacgttattggcgtaaaagatgtagttgtagttcaaaataaggttgatattgttcctagagaaagggctattgaaagttacaaagaaattaaggaatttgtaaaaggcacttgtgctgaagatgcaccgattattccagtttcagctcagcaaggagcaaatattgatattcttattaaggctattgatgaaacaatcgtcactcctgaaaaggacttagataaacctgcaaggatgcatgtggccagatcttttgacattaataagcctggttcccatccagataagattaaaggtggagtaatcggaggtagtttgactcaaggtactcttaaaattggggacaccattgaaatcaggcctggaatcaatgttaaggaaaacaagcagaataagtggatcagcttaagttctgaaatcattggtcttcaagcaggaggagaggctgtagaggaagtgggacctggaggtctcattggagttgctaccaagcttgaccctgcattgactaaggcagattcattatccggttctgttgcaggtatggaaggcaccttgcctgacgtattgcatagctttgatatgaaaacagaacttttggaacgtgttgtcggtactaaggaagaaagggatgttgacccaatcaagcttaaggagcttttaatgattaactgtggtacaacaaccactgttggtattgttaccagtgttaaaaagaacattagcgttgatttgaaattgcctgtctgtgcagacaagggtgatagggttgctttatcccgtagggtcggcgcacgttggagattgattggttttggtatcattcaatag

SEQ ID NO: 1483 - DNA, 390 bp, Methanobrevibacter ruminantium
  source 1..390: mol_type = genomic DNA
ttggcatttaaaattgttgtatctgaaaaagaattaagctatcaattagaagttgaagaagctaaacaattaaacggtttaaccattggcgaagaatttgatggtcaaattgtaggattagatggctatactttaaaaatcactggtggtagtgacaaaaacggttttgctatgaaaagagacgttgatggtcctagaagaatcaaaagtcttttaactggtggagtcggctacaaccctaaagttgatggtgttaaaagaagaaaaactgtcagaggaaacactatttccgaagacatcgttcaaatcaacactattgttaccaaagcaggtagcaaatccatacctgaaatcttaaatcctgaagaagaagaggaagcagaagaataa

SEQ ID NO: 1484 - DNA, 1791 bp, Methanobrevibacter ruminantium
  source 1..1791: mol_type = genomic DNA
atgaagattagatcaccaattgtatctgttttaggccatgtagaccatggtaagaccacattattagattatattagaggtagtactgtagctgatagggaagctggtggtattactcagcatattggagctactgaaatacctattgatacaattaacgaaatatgtggagaatttatttcaaaactagcaattaaagatacaattccgggattgttttttgtagatactcctggacatgctgcattcacctcacttcgtaagagaggaggagcattggctgatttggccattttgattgttgacatcaatgagggcttcaagcctcaaacatatgaggcaatcaatatcctaaagatgtataagactccattcattgttgttgcaaataagattgacaggctctttggttgggaaactcatgaaggagcttcctttatggaaagctataataaacaggctccaagaatcaagtctgatttggacttgaagatttatgagcttatgggcaagcttcatgaggaaggtttccaatctgaaagattcgaccacgtaactgactttgcaagccagatatccattgtgccaatctgtgcaaaatcaggtgagggagtcattgagcttatagcattattgcttggtcttgctcagcaataccttacacagcaattggaaataagcgaagatgcccctgcaaaaggaactgttttggaagttaaggaagaagtgggacttggaattacagttgacagcattatctatgacggagtaatccgcgatggtgatgagattgcattgatggatgcaaacaatgttgtcacaactaaaatccgttctatcttaaggcctttgcctcttgaagagatgagagattccaaaaacaagtttaaaaaggtcgatgaagtcgttgcagctgcaggtattaagattgcagctccaaaccttgatgatgttgtttccggctctccccttagggtattaagcgaccaggaggatgtggaagctgaactcttgaaggaattggaagacatcactgtcgacactgacgatgagggaatacttgtcaaggctgataccttaggttcccttgaagcggttgttcatttgcttaaggagatggacttgccaatcagatctgctgaaatcggagacatcagcaagagggatgtcatcaacgcatcaatcgcaatggatgaaaatgaggaatatggcgtaataatcgcattcaatgtaaaggttcatccaaaggctgaggatgacctgaagaattctggcgtaaagctctttgccggcgatgttatctatcagataacagaggattatgaggcttggatagaggaacgtaaggaagctcagaaaaagcaatggctcgatgcaatcatcaagcctgctaagatcatgattcttccaaagcttatattccgtcaaagcaagcctgccatatgtggtattgaagtggaagccggtacaatcaagactggatattcattgatggatgcaaatggcgactatgttggtgttgttgcaagtatggaagataagggtgaaaccttacaggcaatgccaagaggtcaaagggttgctatggccataaacgatgcagtggcgggtaaggactttgaagagggagactcattatatgtggacattccagaaaagcactttaaggtcctagaacgtgaatttaaagacaagctaactgaggatgaatttttagccctagatgagatcgttgaaatcaagcgcaagcgagatagtgattggggtaaattaggtcttttcgagtattaa

SEQ ID NO: 1485 - DNA, 453 bp, Methanobrevibacter ruminantium
  source 1..453: mol_type = genomic DNA
atgattgaaagaagctttgttatgatgaaacctgatgcggtatctagacgtttgatgggtcaaattttaagccgttttgaagataaaggtctcaaaatcgttgctatgaaattaagacaaattgatgaagatttagctaaagaacatcatggtgaacacaaggaaaaaccattctttggcggtttagttgaatatatcacttcttctccagctttaaccatggttattgaaggagacgacgctatttctgtaatcagaaaaatggtaggagcaactaatcctaaggaagcagatatcggcaccattagaggagacttcggtatggatactggaagaaacattatccacgcatccgacgcacctgaatctgctgcaagagaaatcgcactcttctttgatgaagaagaaatttgtgattattctatgtctgataacgcttggatttatgaataa

SEQ ID NO: 1486 - DNA, 162 bp, Methanobrevibacter ruminantium
  source 1..162: mol_type = genomic DNA
atgagaacttgttcattctgtggtaaagaaatagaagaaggtactggaaagatgtatgtgaaaagagatggtacaatctatttcttctgtagtagtaaatgtgaaaagaatatgataaaacttggcagagtaccaagaaaagtaaaatgggttaaacaatga

SEQ ID NO: 1487 - DNA, 207 bp, Methanobrevibacter ruminantium
  source 1..207: mol_type = genomic DNA
atggaagaaggaagtccagctgaagttatagaagttctacacagaactggtatgactggagaaatcatgcaagtaaaatgcaggattctcgaaggaagagacaaaggaagaattttaacaagaaatatcatgggccctgtacgtgaaggcgatattttaatgttactcgacacaattagagaagctaaggagattagaactccttaa

SEQ ID NO: 1488 - DNA, 408 bp, Methanobrevibacter ruminantium
  source 1..408: mol_type = genomic DNA
atggatggcaaaagccagatgaaaaaggaggtaaattatatggcaaacatttatgtaaaatttgacacacctgaagaaatcgctaacaaagcagaagaagctttagaagtagcacaaaatactggtaaagtagcaaaaggaactaacgaagtaaccaaatttatcgaaagaggaaacgcagctttagtcgttatcgcagaagatgtagatcctgctgaaatcgttgctcacattcctgttcttgcagaagaaaaagaaattccttacgtatacttagctaccaaagataaagttggtgcagctgctggtttaagtgttggaactgcttccgcttgtattgtcgatgctggagacgctgctgacttagtagaagaagttgttgaaaaagtagcagaacttaaagaataa

SEQ ID NO: 1489 - DNA, 198 bp, Methanobrevibacter ruminantium
  source 1..198: mol_type = genomic DNA
atggaattaccaatcgctcctataggaagaatattaaaaaacgctggtgctgaaagagtagctgacgcagctaaagaagaattagctgaagcaattgaagaatacggtaacgaaattgctcaaaaagcagttaacttcgcacgccacgctggtagaaaaactgtaaaagctgaagacatcaaattagctattaaatag

SEQ ID NO: 1490 - DNA, 1197 bp, Methanobrevibacter ruminantium
  source 1..1197: mol_type = genomic DNA
atgattagatgtgtgtcttgtggagaagaatacgaagatgatgaagttatctacaactgtaaaaaatgcgggtctgttttagaagtggaaatggaagtcgatgttcctaaatccacctttgaaggcagaagagataacttatggaaatataaagaatgcttgcctgttgatgcagataaaagggtttccttagatgaaggaggaactccattctgcagatgtgaaaaattaggcaaggaacttggcattgacttatatgttaaagtggaaggatccaaccctaccggcagttttaaggacagaggaatgactatcggtatgactaaagcaatgatgcttggtgtggatactgtaggttgcgcttccactggaaacacctcagcttcccttgctgcttatgctgcaagagcgggacttagatgtgctgtatttttacctgcaggtaaagtggctcttggtaaattggcacaggctatgttccacggtgcagaagtgttctctatcaatggaaactttgatgaggctttggaagctatgactcagcttgcccgtgaaaaatacttatacttactcaattcaatcaacccattcagattagaaggtcaaaagaccatcggttatgaaatcgtacatgatttaggttgggaatctcctgataggattgtattgcctgttggaaatgcaggaaacatttcagctatctggaaaggaataaccgaattccataatgcaggattcatggatgacgttccaatgatgactggtattcaagctgaaggagcttgtcctattgctaacgcttatagggataatactatggatatggttcctgttgaaaaccctgaaaccattgcaactgctatccgtattggagctcctgtaagtgctgttaaggctttaagagcaatctatgattccaatggtatggctgaaaccgtaactgatgaagaaatcttggctgcacagaaattgcttgcaaggactgaaggcgtaggtgtggaacctgcttctgctgcttccattgcaggtcttaaaaagctagttgaacaaggagatgtcgataagggagaaagagttgtatgtgtcgtaaccggacacttgcttaaagaccctaacactgcaatcgatgcatgtgttgatcctgttcaagtggatgcagacattgataagattaaggagattttgcttaataaatag

SEQ ID NO: 1491 - DNA, 702 bp, Methanobrevibacter ruminantium
  source 1..702: mol_type = genomic DNA
atggaagactttaaatattacaagaataagattaaagaggagattaaactagcatttgctcataataaatactttttaatcgtttctgctcttattttcattattcctatgtttgtaggatatttctattcagatcagataactccatacattcagcctatggttgatacctttgaggaaaacattagaaatggaactgtgactttatcaacaaagtccctatttgcaaataatgttgaagtggctataattctatatgcattatctgcccttggggctattttaggaattgtcgttttagcaaacaatggattatttattggattttatggtgcaaactttgaattgacacgctatgttcttttaactcttcctcatggaatatttgagatttcagcaatcattattgcaacaacaggaggatttgtgattctatcatttgtgctgaacttcttgtataatgtgatatatcctgattactcctatactgatatatttgatccttactttagcgatgctaaaataactgtgggacaaagatttaaatcctcttttaaaaagcatggtcatagaattaaggaatcttttatattgctttgcgtatctgtaattcttcttataattgcagcattcattgaggcaaatattaccattccttttgcatattggatttgctccttgtttgggataagcctgatttaa

SEQ ID NO: 1492 - DNA, 1092 bp, Methanobrevibacter ruminantium
  source 1..1092: mol_type = genomic DNA
ttgattgatccatgggcatcattttcactagattatgataaattagtaaatcaattcggtataaaaaaatttgaagaagttttggatagcattgaagatcctgcaaggcttatgaaaaggggagttatctttggacatcgtgattttgacaagttagttcctttaatcaatggaggcaaggattttgcagttatgactggtatgatgccaagtggccaaatgcatataggtcataagatggttatagaccagctcaattggtattttaaaaaaggagcaagcttatccttatcaattgcagatatggaatcatatgctgcaaggggaataagcttcaatcaggcaaaggacattgcaataaatgaatatttaaaaaattacattgcattgggccttgacttgactgcagataatgtgaatgtctatctacagtcacaaaacaagacattgaatgacttgacatttaagttggctaaaaaggttaatttcaataatatgcatgccatctatggatttaatgaaagcacaaacattgcacacttatatgttcctttagtgcaggttgcagacattttgcttcctcagactgaagagtttggaggtcctaagcaggttgttgtacctgtaggtgttgaccaggatcctcatcttaggcttacaagggacattgctgctaagatgaatgaggaatatggatttttagctccagcttccacttatcacaggttcctaactggccttacaggagataagatgtcaagcagcaagccgaatactgcaatttacttgaatgaaactccaaagcaggcagagaaaaaggtcaaatcttctaagaccggaggaagagagacacttgatgaacagaaggaattaggcggaaggcctgatgaatgtgttatctatgagatgcttgtctatcatctgattgatgatgataaggagttggataagattagggaagaatgcataaatggagaattgatgtgtggacattgtaaggttcatacagcagagcttatgaaagacttctttgaagacttgaaggttaaacaagaagagtctttagatattgctgaatctctattggattaa

SEQ ID NO: 1493 - DNA, 516 bp, Methanobrevibacter ruminantium
  source 1..516: mol_type = genomic DNA
atgcgtggagatttatctgatggaatagttacagtcaaaattggagaaggaaacgaaagagctatttcacttaatcaaaaaagccagttcggtaaactgtctgaagactgtttagagctttctcttatggaagcttcctatctaatggaaagcggacgtttggatatttatgaagatgatgaaaaatgtcaattggattatatcattgacatgataaaagaccaagatctttatggaaaatacttggtttatagggatttaaaaaatagaggctatattataaagacaggatttaaatacggctctgaattcagattatatgaaaggggaaccggccctggcaaatcacactctgattttcttgtaaaggtcttgtatgaggcaaatgaagtaaatgtcttagactttgcaagctatgtaagggtttcacatggagtcaataagaaattattgcttgcagttgtagatgatgactttgatgtgacttattataatattgaatggacacgtccgtaa

SEQ ID NO: 1494 - DNA, 654 bp, Methanobrevibacter ruminantium
  source 1..654: mol_type = genomic DNA
atggctcgtgaaattagtgaaaatattgaagaatatttagaaactctctacaaatttggaagtaaagattcatatgtatccactaccactttatcaaaggaattaggaatagctccaggtagtgttactcaaatgcttaagaaattagaggatataggatatattgactatgtcccttataagggagcttttttaactgctgaaggtaataagattgctcaaaagattacaagaaaacacagaatccttgaaaagttcttgaaggatgtcttaaacattaaggatgagaacctccatgctcaggcatgcgctatggaacattcattatctgatgaggctgaaagggctatctgccatatgctggagcatccagacacttgtccagatgataatatcatccctgcatgtgactttaactttgaaagctgtgaagattgcttgaatgaccaccttgattttgatgacattgaagagagggactttaatcttttctcaatttcacaattgtctaaaggagatgagggtgaggtattgtttataagaggcagtgatgatgctttagcccaatgtgttagagtgggcatcaccgttggtagcaaagttaaaatagaggaatctgaaagccctaattttttattctatcacagtaaatga

SEQ ID NO: 1495 - DNA, 1449 bp, Methanobrevibacter ruminantium
  source 1..1449: mol_type = genomic DNA
ttgagttctaatagtttaagttctaatgaattaaattccaatcaattaaattccaatcaattaaattctaattctatttcaaattctaattctaattctaatcaaaaagccaattcaaaagattctcgtctgattttgctcaatgataaaaacttaaaagtaaacggaactgaagaaaaatattttataaagcttgttgatggcaacggaaatcctataccttatgttgatcttatttttaacatagattcttcaattgaattcgttggaggtaccgttcgaactgatgaaaatggaatcgcttatatttttatggatttctcatatcctggtccatatactgtttatgcttcatttgaaggtgatggaaatcataatccttccagcactttatcttctacagtatccgtttataaagacactgaaatcagctcattacagtcatatggctatcttggagagaacttttcatttaagattacaagttgcggggagcctgtatccaatcagaaggttcttataagcattgataataagaattatactgcaacaacagattcagagggtattgcaaaggtaaaactaccaaatcagcaaaagacctattcaatatcctgtaatttttcaaatcgtgtatattactatggatctagcttaagcaagaatattcctgtttataaaagggctttcacccagccaaattgctatgcccttttaagaaaatcaacattcacagttaccttaaagggagctgatggaaagattctatcaaatcgcaccctaagatttattgtggatggaaaggaatataataaaacaactaattccaaaggtgcagcttccataaatattgatttggaaaggggagaatatagaataaattattatttcaacaccgatggggtttatggtccagtaagcaattacactgatttgaatgttgtagatccttcaggccaatacaaaaggcttttgaatgtaaaaagctctgcttcagctaagatatatctcactggcggaggatatgccacagtcaccagcctaataaagagcactgcaaaatccatcactaaaaagtacaagaccaattttgaaaaggcagtggccatctataattatgtaagggataatttggattatcaatattattacaatacaagaaagggagccactaaaacattaaagacaaagtctgggaactgctgtgatcatgctaatctggtggttgctctttgcagggcatctggaattccagcaagatattccaattcaaagtactgtgtttttggttcaggtcttcgttcagggcatgtatgggctcagatttatgtgggaggcacttggtactctgcagatgccacaagcagcaggaataccctaggccatattgaaaattgggatacaaaaactaataagaaagattataacttccgcaatctgccattctag

SEQ ID NO: 1496 - DNA, 348 bp, Methanobrevibacter ruminantium
  source 1..348: mol_type = genomic DNA
atgtctagaacttggagtttttataaatcttttaagaatttgatagttggtgttaatattagaactaaacttttatttttatcagcattattgatattattattgtctatatcttctgtttcagcagacagttctatagatgattctaatttagatattgattctaatttaggtattgattctaatttagatttaaatgcagatttatatgcagatttaaataattttgatgattttaataatctaaataattatgattattccaataattatgttgattatagtgatattttagaaggggattccttaatctggaaattgaaaagaataatcattttaataaattaa

SEQ ID NO: 1497 - DNA, 3033 bp, Methanobrevibacter ruminantium
  source 1..3033: mol_type = genomic DNA
ttgcttttagcagttttattaatgggatttgtattaatatcctctgtatctgctattgatattgatgaagcaagttcttcaagtgacttatcagattctagcatttcaaatgattatttagtagcaaactctggagatgattctgtagctagttcaagtgcatctagttcaattgctgcagatgattcagatctttctaacaatgctagttcaagtaatgttaatttcgaaaatgaagttttaagtactaataataatgaagatacagaatccgaaattgtaaaggattctaaaaatcaattgtcttcatcttctcttcaagctagtactaaaactaaaaccactcttaaaggcagtggaagctccgtctataggggcaatccatattatgttactttaactgatagtaatggtaaggttttagctagtcagaaagtgacttttaacatccttggcaaaaattacactaggaccaccgattctaaaggtgtggcttccattaacattaatttagccaaaggaaagtataacatagcttgcttatatgcaggcactgaaaactatgcttcatcaaagctatctgtagctttgacagttaatttaatgtccactaaaatcaatacaggtggatcaaccgttaaaaaaggaaatgcttattcagtgaccttgactgatggaaatggaaaggcattatccagtcagaaggtgaccttaaatatccttggaaagaattataccagaaccaccgattctaaaggtgtggcttcaattgcaatcaatttggctgcaggtaagaaatttaccttgactgcatcctatgctggctctgcaaattatctctcttccaaggtatcagcaactgttactgttcaaaaaggagatacaagcataaagcctagcggaacttcaatcgttaagggaaatagctattcatttaccttggttgatggaagcggcaagggattggcaaaccaaaaggtcgccataaagatatcaggcaagtcctacagcagaaccacaaactcaaatggtgtggcttcaattgcaatcaatttagctgcagggaaaaaatattcaatagtctgctcttatgccggctcttccaattataaggcttcaagctcaacagtaagtctctctgttacaaatccaagtacaaacagcaagactttctccattgcaaaaatagaagctgccgccactaacctaaaggcttatgtaaataagaataaggcagtgcctacaactgtaagcgttggcggaactaacttgaaaatctcagagttttcatacttgatgtcaaaagccattgtaaatcttaattccaataatactaatgccataactcttccaagcggcatctataatggggcatcagcttccaattcattaaacgctacagtctataaggcccaatatgtggacttatccaaaagggtctataactatatagacaagaataaggttcctgctgcttatggtactgtttataatgccaatggcgcttccttaggaaatgcaggatttaacctttacacatttgcatttgcaaagattttggatttccataagaccaataagtatttacctaattactgcagctttgacagttctgtattcaaggcgtccaatggttcaagctcaagcaatagctccagttccactaacagttcaagctccactaacagttcaagcggatcttcaaactccagcggatctggaagttcaactcctgcagttaccgttaaggctacaagccttaaggcagcaagcacttccgttataagaggagatgactattcagttactttaactgatagcagcggtaatgctttggctaaccagaagattacatttgccctttcaagttccagctacactaggaccactaattcaaagggtgttgcttcattgaccctcaatttagcaggtggcaaatattccataactacttcatatgcaggcacatcagcctataaggcgtcaaagcttacaaacacagtaactatttcaaacagctcttccagattcttcttgaatgacattgaaacagctgctgagaatgtcaagacttatgtcacaaagaataaggcgttgcctaataccgttacagttgcaggcacccaattgaccctttcacaattctcctatgtcatggctaaggccattcataatataaatgcaagcaactctaattatatctcccttaaaagcgttgcaagcagcaattctactggagattatttggacactacagtctatagggctcaatatatgaacctaaccaatagggtcatttcatttgtggaatctgataagattactccaactttcgctacagtctacaacagcaatggaaaatctgtaggaaaggctgaattcaagctttacacctttgcatttgcaaagattctagctttctataagaccaataattatttgcctacctattgtactttccaaagctcagctatcggtgttgttccagatgttgcaactaatgtgacaatcaacagcaagatcaatgctaatatgaaccaattcaaggttggattgaatgagaagaacactgtcagcaacctttcagcctatttggtaggtactggccagtcaacaatcacaacaaacattaagaatgttgctgctcagctaaccaaaggattgaattcaactgcaaccaaggctcttgcaatatataattttgtaagggatgacatttcatacagctattattcagacagtaggaaaggtgcagacggtaccttaagctctggatctggtaattgtgtggaccaagccagtttggttgttgctctttgtagggcagcaggcattcctgcaaggtattcacatgctcaaggatgtaccttctccagcggattggttacaggacacgtatgggctcaaatccttgttgatggcgtatggtattcagcagatgccactagcgtaagaaatagtttaggaaatattgtaaattggaatacaaattcctatcatagtatgaagcagtatgctgctgttcctttctag

SEQ ID NO: 1498 - DNA, 3897 bp, Methanobrevibacter ruminantium
  source 1..3897: mol_type = genomic DNA
atggaggataatcttttgaaaaatagaaaactaattttgataagtatcttccttgttagtctgcttgcaatttctgctgtaagcgcaaatgaggatgtggataatggacttatcgattcagatgattctatcttgcagtcagctgaagtctctgattctgccattggatcagattctatcttgcagtcagctgaagtctctgattccactatagaatcagactctattgaactggaagataagggtaatgttttaaagtcaagtgataatgcttcttttgaactagatgataaaaataatataggatcagcagattctgaattggaagacgattatttagaacctaaagaaaagaatgttctttcaatggatgagaatgcatggttttataattatattgtgtggtatgatggtgatgatggagattgggtttcccttgattttgtagatgatttaaaaaatcctgaaaacatcaccatacgattaaacagttatgacactccatttgacggtgtggatttggctgttataaatgattatgactattcaatcactaaattaaccactgatgataatgggactgtagtttataatgttccatatgaggttgatgaattatctgtctttgtaggcttttggtatgatggggattttgtggccacttatggaaattgggaaagttacacaatctgcgcagtgaattggggcacttggtatagggacccttctaaacggacttacgacttttatgtctctgtgtctgatatggacacttatgaaagtccaattggcgcacaggtggtttttacaagcgattccaatcaatatgtcggaacaatagatgagaatgaaagagcaatcataccaaaggtcagctatggcacttatgatgtgaaggtcatatatgacggctattgcattcttaatctttcagattctagcgccattgagttctatgacgaccatcatacagaccctgattcacttggtgatgaaaggatagattatatgtatgtagatagtagtggagtagtttatcttgacctttgttatgatggttctctaaaagtgccagacaactccacttatgagccttatggtgatgacaacccatccggtggcggttcaggcaatcaatctggtggaactgttgctaatggcacattcacttcattgcaaagtctgtttaaccgtgctgcagcaaattcaacaatatccttaacaagggattatgtctatgatgatggattcgacatcaaaggaatagtaattaacaaggatctgacaatcaacggtaatgcccacacacttgatgccctaggcaaatccagaatattctatgttaacaatagcactgtcaaatttaacaatatcctatttgccaatggtaatgccactcttggaggtgccatttataatggaagtgccgtaaattgtctttttattaataatactgctcaagatggtggtgccatttattatggaagcgctttagtatgtgattttataaacaattccgcatctaggaatgggggcgctatctatagtggcggtgccgtaaactgtagctttataaataactcagccaatttaggaggcgctgcaatttatgattccttgtttgctgtgaattctacttttgtgggtaatacattggcttctagcaatcctacaggaggaagcgctacaacagatgtaagtgtggtgtcatttaatccaataactacctatatacctagccctccatccatgacaggttcaattggttggggaggtgccgtacttgactttacaaggcctgttatctatacggattataatgaaacattttacttgttgactaacttcactcttcagcaagatggctttaacaattacggcaatgttcaattgactggcagggatttggtcttcaagtcattatatccttactctggaaactattcaatggctcttatcatctctggacaaatctttactcctacatatgtccttggggaaaatgatacttatgaagcccattttaaactgaatggtctttctttagggctacatatggtttatgcatatgttgatttcggatatccggaatattatagctatagaataggtggaggctatatggatagggttgcttacgatagaactgcggagataatattccctattctcattaataagacagtagaaatctcatcttccaatctgaacaagtattacggtggaaccggaaagtatactgtcactcttacagatggcggaaatcctatagccaatgcaaatctcaatgtctctctagctggcaagacatatcctttaaagacaaatgcaaatggtcaggcaagcatggatataaaccttactcctggaacttatgaggcagtctgcacttatgatggagtttctcaaagatcaaatatcattgttcgctcaactataaatcttcaaaacctcactggcatttatcagaacgctaaagtaaatgccacattcttgaatgctgcaggcagtcctttagcaaacactaaagtcagttttagagtaggttccaagacttacagtgcaacaacaaatgcaaatgggcttgctacagccaatgttgatttagctgcaggcacttatgatgtgattgcaataaatccggtaaataatgagcaaaagacaagcaagctcactatttccaaagctaagtcttctataagtttaagctctacaagcaataatgataaggttaccttaacagcaagcttatccccttcaactgcaagtggaaatgtgacatttaatttaaacaataagaactacactgcaaagataagctctggaaaggcaagccaaaccattactggattgaatgaaggaaactacactgcaaatgcatattactctggagacagtaatcttaactcttcaagcgcaagcactaaagttgttgttaaaatagtcattccaactaaaataatctacaaaaatatgaccactggacctgtagcaaaatcagatggcaggataggaaattatttctgtgtaaaacttgtggatggcagcaataatgcattaacaggccttccaatcaagataggcttcaatggaaaaatctatgacagaacaacagactcaaacggcgaagcaagactgcagataaaccttgctaatgcggacatatacacctttgcaatctgctaccttggagacgatgatcatcaagcatcctttgaagtggctaagattgatgtaaacaagaagtatccaaagccaaacagtgcaaatggaaactccaatggtgtgcctgcccaagagacaataagcaatacaaagcttaagacctatatccaatacagcaatatgaccaccaaatcagtccttaaatcagacggaagggtgggagactactttgaagtcaaattgctggacaataacaaaaaggcaatggcaaatgttccaatcaagataggtttcaatggaaaaatctatgacagaacaacagactcaaacggcggtgcaaagctacagataaacctcttaaagccaacaacatacacatttgcaatcgcatacctaggcgatagcaaatatcaggcttcatttgaggtagcaaagatagttgtaaaagcccaaagccctaaactgactgctcctaaaaagacatttaaggcaaatgcaaagaccaagtctgtctcagcaactctaatctccgagagaggaaagcctatggccagtcagagccttaagtttacaataaacggcaagacatacacagccaaaaccaattccaatggtgttgcaacagtcaatatcagcctaaacaagaaaggaacctattcctgcacagtcaagtttgccggagtgactggagcaaatgcaaagaccactaaaacaacaataaaaattagttaa

SEQ ID NO: 1499 - DNA, 1650 bp, Methanobrevibacter ruminantium
  source 1..1650: mol_type = genomic DNA
atggcacaaattaatcaacctatgtatattttacgtgatgacactgaaagatttcaaggaagacaagccttaagaatgaatatttttgcaagtcagcttttagcaagcattgtaagaaccactcttggtccaaaaggaatggacaagatgttggtggataagatgggagatgtagttgtaacaaacgatggtgcaaccatcttgcaggaaatggacattgctcaccctgcagctaaaatgctagttgaaattgcaagaaaacaggaaaatgtagttggagacggaactacaactgttgtaatcattgctggagaattgcttaagaaagcacaggaattaatggaagatggaactccagtacctaccattcttatgggatacagattagctgttgctaaggcaatggaaatcttgtttgacatttcttttgatgcaagggataaggacaccttatttggaattgcaaagactgcaatgaccggtaaaggttctgactatgctaaagatgaacttgcagaattacttgttcaagctgtaaagaaagtcgaagagggagaagaggtagataagaccttaattaaaatccacagaatcaacggaggaagcgtagaggattccaagattgttgacggaatcttcatcgaccaaggaagggcaaacgaaaccatgcctaaggaaatccatgatgcaaagatagctcttatgaaatatcctttagagctaaaggacctcgaaaacgctaaagttgactttaccgacccattacaaatgcaaatatttttagacaatgagcaagagatgcttaaggaaatcgctgataagatcatagactccggatgtaatgtattgttctgtcaaaagggaatcgatgatgtagtgcaacactacttatccaaagaaggcatcatggcctttaagagagtcaagaacactgatgttaaaagaatcatgaaggcaaccggtgcagagcttatcacaaacattgaagacttaactccagatgttttaggaaaagcagattacatccaccaagaaagagtatttgaccaaattctaaccttcattgaaggctgcgatgaacctaaagcaagctccatcttaattagaggaagcacaaggcatatctcttctgaaatagaaagggctatggaagatgcattaggtgtggtagcagctacaatcgaagaaggaaaggttgtaagcggtggaggatctcctgaaattgaaattgcaagacaattaagattatatgctaattcaattggcggaagggagcaattagctatcattgcatttgctgacgctttagagattgttccaagaaccttatctgaaaatgcaggtcttaacacaatcgatttgcttgtagagcttagggcagctcacgaggacaatccttatatgggacttgatgtatttgaaggaaaagtggtggacatgaaggaagctggtgtaattgaacctcaaaaggtcaagaaacaagcaattcaatctgcacaagaagcttgtgaaatgattttaagaattgatgacttggtagcagcagccggagccctccaaaagccagaccctgatgagaacttagataatagtggaatgcctcctgcacctggaatgggtggtatgggcggtatgcctcctatgatgtag

SEQ ID NO: 1500 - DNA, 780 bp, Methanobrevibacter ruminantium
  source 1..780: mol_type = genomic DNA
atgaatttagaaggtgtagaaaaaacaatgctcttgaccttatacacaaaggcaaagcattcacaaaagccaaatcataaattttttgattatatggcaatagatataatctctgaaatcgattatgacttttccatagctgataaggacagatccatgcaaatgggagtaatatcaagaacaatcgtcttggatgatatggtatctgaatatatacgctcacatccaaagtgcacaatagtcaatattgcctctggaatggatactcgattcaacaggttggataatgggataatcaagtggtataatgtggatttggaaaattcagctaatttcagattgaattacattaaggatacagaaagggtaaagaccttagcctattctgccatggatccttcttgggcagaggaaatagaagcaagcggggatgttttatttatcattgagggtttaacaatgtatcttactgaggtcgagaataagcagattctggatatcattgatgaaaacttcaagtcatgcactatatttactgaaatcatgcctcctgtttccgttgagaatgtcaaggagaaatccgttgaggaaatggatgccaagtttatttggggagttcaagatggctttgagctaaggagattaaaccctagattcaattgggtaaaggatgtaaatctttttgatggaatgaatgtctataagcccattaccaaattgttcacttggattccttttataaggcgcagaatggattttatagctgttttagaaaaatag

SEQ ID NO: 1501 - DNA, 438 bp, Methanobrevibacter ruminantium
  source 1..438: mol_type = genomic DNA
atgaacagaaataaaataattgttttgcttgtattattgatagcagttgttggctttacaatggggccagcttgtgcagccagcactacaataaaagtaggcaattacaaggatgttggaaagggagataggatttcaacattcaatgtgcctaaggatgcacagtatttaaaaggagtttatgctgtaatattctatcacggcaagaatggtgacgatttcaggccacatacctatgtattgtctaagataaaggtatattataagaataaaaaaggcaaaatcgtaacaaggtcttctacagctaagaatctcagcggacttagcatactttccactaaacaggtaagtggttacactccttataagatggatgtaagttataggaagatgactaatgctgagaaaaagaaaatttgtggcagtttagtttattag

SEQ ID NO: 1502 - DNA, 975 bp, Methanobrevibacter ruminantium
  source 1..975: mol_type = genomic DNA
atgatgaggaagaatgatagaagttcaatcaatccatttacaggcaaggagcactatgacactgtagacgatgacaagttcttggaaggctgctttcaagggtactatcaggaactgcagcgctcccagttattagacaacactccagaaggccaatttatcgttcaagtggcagttaaactgatcaatacagttaatgaattccttacaaagataggaaggcaggattatgttgagggatattatgaatgggatgttcatttggttgcaaacaatagcgtaaatgcctgctgcatgcctggaggaaagattatcgtatattcaggtatcttttcaattgcaaacactgaagagagaatggcattcatcctggctcacgagatggctcatgcattgcttgaccacggaaggacaagggcaagcgcccaaagcacaaagaacactgctgcttctgttgcatgggtgggaagctttgcattggacatggtaggattaggcggtcttggatctcttgcaagggcagccaccaatattgcaagtgtcgggtcccaatacttccttcttcagccttggggaagggaccatgagtttgaggccgataagcttggaatgattatctgtcaccttgcaggctatgacatccgtgaagttcctaaattctggaaggaatttgcaggagacaaggcaagcaattttgatttcttttcaacacacccttcagatgccaagaggatagaggtaatggaagcctctgaaatagagattctaaacaccactgacttttacagcaagccagtattgcctgagacacctaaggcaactggagaaaggaagaatactaatgccaagccccaagaacctcaagctaaagccgttgctgataacaaatcgactcatttctgtacaaattgcggcagtgaggtagctccagatgataatttctgtacaaattgcggagcaaagataggaaaatag

SEQ ID NO: 1503 - DNA, 201 bp, Methanobrevibacter ruminantium
  source 1..201: mol_type = genomic DNA
atgattgaagagcataatcaaaaatcagttgaagaactggttgaaaacttttcttatgtttatgtttattttgctgatggaagatcaattagaatctctaaggaaaaaaagtttgaatttaaggacaataagttttatatttatgataaggatatagaagttaatatagttgatatagagttaattgagtttactgattga

SEQ ID NO: 1504 - DNA, 858 bp, Methanobrevibacter ruminantium
  source 1..858: mol_type = genomic DNA
atgaaaaaatcagtttttaaaattctaattgctttagctttaattttattggctgtatcaattgtttcatctaatgatctctctgattctaatgtttcaagtgatttaactgttgattcagactctataagctctgatgatacaggatctagcgatacaagttcagatgattcaaatcaggatgatgtatctcaggataagactaatgataaaaaactgtctgattcccagtcagattcatcaaaagatactcaagatactgatgataataatacagataatggttctgataaatgtaatttgattatcacaaaaaagggcaatgagaaagtcaaagttggagatactgtagagtggacaatagaggtaaaaaactctttaaacactgcagaaaacatctctgttgatgagttcctccctcaaaactttgagtttaagtctgctaaggcaagcaaaggaaactatgcagttgagatagcaaattgggacattggaaatttaaaggaaaatgaatctgctaccttagtgattaaggctcaagcattaaaggctggaaatttcaccaatgtggcaaatctcactacagattccgataatatcaatggaaaggtccttagcgctaaggcagatgtggaagtgctttccgagaataaaaagaatgagactcctgtaggacctaagaagaacaaagataataattctacagtcaaaaagattcataaattaattaaaaatcagacaaataatacaaatatgactccaatagattttaagaaatctggaaattcattgtttgctgttataatagctgctttggctgttcttggaatatttttaggacgaagaagaataaattag

SEQ ID NO: 1505 - DNA, 1221 bp, Methanobrevibacter ruminantium
  source 1..1221: mol_type = genomic DNA
atgaaagctgatgcatacaaaatagttgataatgtttactgggtaggtgttttagactgggatattcgtgactaccacggatacaccttggatggaactacctacaactgttaccttgtatttggtgaagataaagtggctttgattgacaatgtctatcctggaaagtctgaacagttctggggaagaatcaaagatgcctttgaaaaagaaggaagggaattcaaaatcgatgtagtcgttcaaaaccacattgaaaacgaccacagcggctctcttggtgaagttgttgccaaattcccagatgttgaagtttactgctctaaaaaagcagaacctggacttaaaaaccacttgccagagcttgaagactttgaattcaacactgtaaaaaccggcgacactcttgacattggaggcaagaccttccaatttgtaaacgctcctatgcttcactggcctgacagcatgtttacaatgttgatggaagatggaatattattctccaatgatgcattcggtcagcacatctgtgtatctgaaagattggacactgatgtggatcctgttatcctaaccgatgctgctagaaaatactatgctaacttgattactctcgcttctccaatggttggaagaaaaatcgatgagcttgctgaattaggcattgtagataatcttaagatgattgctccatgtcacggtcagatctttacaaaccctgaattcatcattgacctttaccaaaaatggtctaccggaagctatgaaggaaataagatcaccttcatctatgataccatgcaccattcaacccaaaggatggctcatgcaatggctgaaggggtcatgagcgaaggggtaaaggtaaagatgtacttcatgcatgatgatgacaagtctgacgcagtgacagatgtccttgactctaaggcaatcttcgttggagcccctaccatgatgaacaatccattcccgggaataggagatgtcatgtactacttgaactgtcttagctttggtaacattgaaaagaaaaaggcagttgtattcggttctaaaggttgggctggaggctctgcaagaatcttagctgctaaccttgaaggcgctggatttgaagtggtcgagcaaatggaaatcgacttcaagcctaatgaagaaatccttgaagaatgttatgaattaggtaagaaagttgctcaattgattaaggaataa

SEQ ID NO: 1506 - DNA, 843 bp, Methanobrevibacter ruminantium
  source 1..843: mol_type = genomic DNA
atgagtttgaaatactttaataatttaacttatgaagagattggagaatataatgacaaaatagtcctatttttacatcctaagctattatcacattggatttggaaaaaacaaatagaagaatatgataaatactttaataattatcactgtatctttattgacctgcctcaccatggagagagcaaatttgatggaaaattttccatagaagagtcctcagatatactcattgaatttataaagcatttattgaacaataaaaaaagtgaatcaataaatattgtagccataggccttggagcttcaatagccattgaaatactcaataaagaaactcacctaattaatcacatcattctatctggccttgaaatcgcccagattagagaaaaagaagaagagacaatcataaagagacttgctaaaacaaaagcagaatatctgaatatgaagcctgatcagtttatcattaaggcttatctaagatactatggaataaggaaagaatattatgatgatttagaaaaaagcctagacattcctattagaaaagaagaggaaatagcatataagtccttaaattatataatccccgatttctctaaagaaaccatagaaaaagacaatatactattggtctatggaaataaggacaatttcaatagcacaaaatctgccataaagcttaagaaattgttcttcaatgccaaattaattgaaattgaaaagggaaatcatctttggaacataattgattatgaactctttaatcaagtcattattaactttatacaaaaggaaattatctttaatgatgaaaggataaaagaaattgattga

SEQ ID NO: 1507 - DNA, 915 bp, Methanobrevibacter ruminantium
  source 1..915: mol_type = genomic DNA
atgaaaataggcgtaattggttatggaaatatgggttccatgatagcaaataacattctcgaattgaatttgctcttggccgatgaggaacttatagtttcaaacagacatattgaaaaaatcgaagaattaattgaaagatatccagatggaaaagttcagattactgacgataacactgaattggccaagtcatgtgaaaagatcattatttccgtaaccacccctaatttcaaggaagtgctcgatgagataaccccttttattaatgaaaagacccatataatctatacctgtgccggacttgactttgaacacatcagctctttttacgacggcaaattaagcttagtcattccaagcttggcatcaactgtaacttcaaacaatgccataagctcaataggaaggagaaaaggaattacccttataaagcataatgagaaggtagacattcaagacagctatttcttagaggatctctttaatgaattcagttatgtgagaacattaaaggaccataatttcttttttgaagaaaatggaaacttagcttcaaacaatccaaaattggaaatatgcaccatccttacaagttgcagccctgcatttatagccttgatgattgataattttgcagaaaggataagcaatatttcagacttaagcaaagatgaggcagaggatatgatcttaaaaaccgtcattggaaccgctatcctaaaggaagataaaaaaatatccaatagcgaaattatagaaaaggtagctaccgaaggcggaataactgcagaaggtattgacctattggataaaagattaaattccatttataagaaactcattaacacccttttaaatagatatgaagaagttagtaaagaaatggacgagctttatttaaaagataattaa

SEQ ID NO: 1508 - DNA, 1941 bp, Methanobrevibacter ruminantium
  source 1..1941: mol_type = genomic DNA
atggctaagagaaattttagtgaaagcttaggcaagatagtcacacttttaaaaaaggattttactgatgtatttaccaaaaatccagttgtgcctattgtattgcttgctattataattttaccttctttatatgctcttataaacatccaagcatgttgggatccatacgataatacaggaaatattgagattgcagttgcaaacttggataatggaaccacttttgaaggagaatcattaaatgttggtaatgagatagaggatgagctgaagggaaatgatgatttctattgggtctttgtaaatgaaacggaactgcgagagggggttaaaaatggaacctattattccggaataatcattccaaagaatttcagtaaaagcattaagtcaatcactactgatgaccctcattctgctgaattggaatatattgtcaatagaaaatccaatcctatggcatctaagttaagcgattccgctgcaaaggcggtctataataagatcaatgctaagattgtacagtttattaatgtggtggcctattcaaagttaggcgagcttcagtctgcattgtctcaaggtgcaggtcagatgtcatctggtgctgtccaattgtcttccggatccgctcaggtcaattctggcgcttctcaagtgaagtcaggctcaaatcaggtgaaatccgctgcaaatcaagttcaatcaggtggtgctgaagttcaatcaggcagtgaggagataaagtcccatgcatctgaggtcaagtcaggggcaaatcaggtctctcaaggctcttcccagatacaaagttcatcccagcagattcaagcaggttcctctcaagtgcaaagttctgctaagcagttggattcctctgttgatgttgacaaattgccgagtgatgacttgaagcatgttgtaaacagttccaagcaattggctaatgcaagttccaatctggcgggatcttcaagtcaactggcaaacggttctgtccagcttgcaaatggctctgtccagcttgctgacggttctgtacaattggctgatggttctgttcgattggctgatggttctgtaaggttagcaaacggttctgtacaattggcagatggctctgtccagttagctgaaggttccttaagccttgctgcaggctctcaattgcttgcaaattcagcagcttatgcattgtttgcagcttccagctcactttcaggtgctgcaagttctctttcaagcataactggcgttgacgagaatcaaatcggaagttatatctattctccagttactttaaatgagatagaattaaatcctgtagacaattatggttctgaagttgctccattctatttggttttatcaatgtgggttggagcattgattacctgtgtaatgcttagaacaggacaatccaccggaaccgaatacagcccttcagagatgtactttggtaaactgctcatatttatggtaatggctgttttggaaactacagtaactctcattggagcatcaattttaggaattgaaatgtcgaatccggtcttgtttgtattatcggcctatttcattgcccttgtgtttatgctgatttgttactcattgacttctgctttaggtcagcttggaaaaggaatagctgtcatttggcttgtgttccagatttcaggaactggaggtatctatcctattcaattgatgggtcctattcttcaggcagtaagtccatatatgccaatgactcatggtataacccttcttagagaagctgctttgggacttgtatggtctaattatatccattcattccttatcttgatagctatgggtttaatcacattgattttagctttaattattaaggtatttgcagataagagagctcattggtttgaagagaaattgaatgaaactgatttattccattaa

SEQ ID NO: 1509 - DNA, 339 bp, Methanobrevibacter ruminantium
  source 1..339: mol_type = genomic DNA
atgaatcctaaacaacttaaaaagatggaaagacaaatgaaaaagatgggtatggacatgaaaagcatcgatgatgttgaagaggtcattatccgttgcgctgataaggaaatcatcattactaatgctgatgtaagtgctatgaatgtaatgggacaagaaacttatcaagttacaggaactgctgtagaggttgaaagagaagttgagcttgtcattccagatgaggatattgaaatggttgcaagcactgctggtgtaagtgttgaagctgctgaagaggctttaagagaatgcggtggagacctagcagaagcaatcatgaaattaagtaattaa

SEQ ID NO: 1510 - DNA, 2001 bp, Methanobrevibacter ruminantium
  source 1..2001: mol_type = genomic DNA
atgtttgaaattaaagcaaaagatatgagaggacgtgtaggtgttttaaaaactaatcatggagagattaagactccaaacctaatgcccgttattcatccaagaaaacagacagttgatgtaaaggaatatggggcagacattgtaattacaaatgcttatttaatttataaggatgaagagttaagtaaaaaggctttggatgtgggcttgcatgagctaatcaactttgatggtcctatcatgacagattcaggctcattccaattatctgtctatggtgatgtagacattacaaacaaggaggtcattgagttccaggaagctatcggaactgatatcggaacttcactagatattccaactggaccatatgtggatagagaaaaggctgaagaagacctcgaaatcaccattgaacgtgcaaaagaggcaataagttatgtaaaggacaatgattacgagatgaagataaattctgttgttcaaggttccacttatccagatttgagagaatactgtgcaactgagcttacaaagcttgatgcagacttatatcctatcggcgcagttgtgcctcttatggagatgtatcactaccgagatcttgtggatgcagtgatgcattcagtcaaatgcttgccagactcaaaggcacgccacttgatgggggctggacatcctatgatatttgcactttgcgttgcaatgggatgcgacttgtttgattcagcagcttatattctatatgctgaagcagaccgtctattgactacccgaggaactgtaaagcttgaaaatcttaatgaaatgccatgttcctgtgaggtatgctgtaagtacactcctgatgacttaagggctatggataaggaggaaagggtgcagcttatagcacagcacaatctccatgtcagctttgcagagcttaggctcattcgccaagccatttatgaaggaagtcttatggaacttgtagaggagcgctgcagggctcatccaatgttgcttgatggtcttaggcatcttggagagtatagctttgacttggaaaaatacgacccaagaagcaagaagtctgcatttttctatacaggtcctgaatccttgaaaagagctgaagtgacaaggcatttaaacaaattaaatgaaatggataagaggaaaaatcttgttgtcctgccaacttatacaaagccatacacaaaacatttaacaaacagcttcaatgagttatttgtttatgcaaaggatgaatcattatctgaagatgcagagtgtaaaatagagaatggtgaaactgactttatggttttagacactccattctgtctcattccacttgaattggatgaagtttatccgttaagccaatcagatgcgcctagaatacgtgataagatggctattgaatttgcaagggactttttaatagactttgctgaagactatgacaatgtcctcatacatcctaatgttttagaggagcttgagcttgactatatagaagaatacaattatccggaggaaatcaagttcgaaaaagatgatattaagaagttaaaggcaattgcagattaccagtttggaaatggagcaggagatgcattattcactggaaaaatcaagatagaaaaaagcaaaaagactggtaagattagacatgtctatgataagaatcagattattgtaaatatgagagcctctgacagctttttgattctatctaaattaggtgcaaaaaggcttgctgcaattgaaggtatgagaaataaggtcatgattgacaatagcgtagaatcatttgcaagggatggaaaaagcgtatttgccaagtttataaaagactgtgatgaaaacatcagatcaaatgatgaagttcttattgtaaatgagcaaggtgagctattggcattcggcaaggctcttttgaattatagtgaaatgctggactttaatacaggtcaagcaataaagactagaaaaggatttaaggattaa

SEQ ID NO: 1511 - DNA, 1854 bp, Methanobrevibacter ruminantium
  source 1..1854: mol_type = genomic DNA
ttgaaaattaattcatttagagttttattatttattataataatcagtttatctttcattggtttttctactatttctgctgtggatttgtctgattcttgttgtgatactcttatttcagatggttctgatggtattattttaggtggatctgatgatattagtcttagcgatgaaaataataatttaaattttgatttaaatgataatccggattttaatttagattatgatagtaattcttatcctaatttaaatttatcttctaattcaaattccaagtccagttccaatacatatggtaatgattttactttatccagattcaaatccgttttaacttcttcatataacttgaatggaggcagctttgaagatattcaatctgccattaaccatgctgctgatggggatgatataatcctcaatggcacttttacaactactggctcagttattgtaataaataagacattaactatcattggaagtccaaatgctgttttggatgctaaaaacatatcaaagatttttcttgttgaagcagatggggtgaaccttaagaatctaactttcatcaatgggaaatcaaggaacgaaagtgataatgggccttatcaaggaacagttaactggcaggggagcaacggaactatcgttaattgcagttttattaacaatagcggtgatgagaaaagttatggcgcctctattctttggaaaggatcctatgggaaaataagcgattccatttttaaaaacagttattctggagctaatgggggagcaatatttgctttaggagaaaatttaaccatcaataattcagagttcatcaataaccatggaaaggaaggtggagcaatctatttcggaggttcttcagctatgtggattataaattccattttcattaacaactctgcagattctggtggcgcccttgcagcttgcgctatgaataggcaagtgattaactctaaattcattggcaactctgcaaataatggagggtccatttcatggtgcggttctaatggattgattagcaattccactttcattaataattcagctgatcaaaaaggaggatcaattttatttacagggactaataatttagtcaagggctctgtttttattaattcttcagcgaacattggaggggccattaattctctcaatagattgaattatattaatgacttaagatttgaaaacaataatgcaagccttggagaggattgctatggagatttggaatttaagagattttcaacatctattgcttccgaggatatggttacatctgccattgatgctaatctcgatggcagaaatggcgaatactttaatgtaagcttaaaggatgagtatggcaatccgttgataaataaggatattaaaataggattcaatggcagaatatataataggacaacagattccaatggccaggcaagcttgcaaatcaatttaaagtattctatggtttatacctttgcaatttgcttcttaggtaatgatgacttttatggaagttttacagtttcaaaaatcactgttaagactcaaaagcctaatttggaagtaaataactttaaatataaatcttcaactaagtctaaagtaattaaagcaacattgaaatcatcaagaaacaatccaattcaaggaaaaacaattagttttactgtgaataataaggtttatacagcaaaaaccgattcaaaaggtattgccagtgttaatgtgagcctgtcttctaaaaagacttatgctttcactgtaaagtatgctggtgatgacacttattcttcagtttctaaatctgctaatattttagtttattag

SEQ ID NO: 1512 - DNA, 1224 bp, Methanobrevibacter ruminantium
  source 1..1224: mol_type = genomic DNA
atgacttatatcgaagaagctacagtgattgatgatacaatatatgacttaataaatgaagctttcgaaaatgaaagaaaatacaatgaccctgtgtatagaaactccatatttaaaggtcataaggaatactttgtaaagacagatgatgggtcatacagcatcaaatcaaaagaaatcaataacaaggtggaaacactccacacctctactggagccataagcgaatcatttgaaaagttcataaagccattgaaactggattacagccaggacattgctatcttagacatttgtgcagggctaggatacaatacttctgcagcaattgacgattttatgaaaaattcaaccgaagatgcaaacctccagatagaccttctggaaatatccaagccaacccttgcagcaggattgatggttccatctcctataaaggcacatgacattacaaaaaaggcaatagaggatgcccttatagcggaagattatgcatcactctccttagaggaagaaagcataccagataatataaatttaaatatattcattgacgatgcaaggaaagtcatacaaaaactggaggacaatgtctatgatgccatatttttggatccttttagtcaaaatatggcgcccgagttagtatccgtggacttttttagggaatttagaagggttattaaagataatggaatagtctgtacatatacttcatcagcgcctgtaaggatggcatttattgaagcagatttttatgtatcattaggcccaatcttcggacggtttcaaggaggaacattggcatcaccctctccaaaaaatttgaccaagtcccttccaaagaatgatgagataaagatggcattatctgatgtggggattccattcagggatccaaatctaaacctatcatcaaaggaaatattagacaacagaactgaggagcgccataatgcgcggcataacactaaaatatcttcagcggtaaagacacctatattcctagcacaggagatggatgatgagccattgaagagaagagttgagcgaaaccttagaaaaatgaacattcccggagtattatcagaggaagctttttatcttgtggggcctgaggaaaactatagtgaggattatgcagaagataacaattcaagaactcgtgttattgaaatggctaaacgattggatgagattaaaaacaataaagtaattttttaa

SEQ ID NO: 1513 - DNA, 474 bp, Methanobrevibacter ruminantium
  source 1..474: mol_type = genomic DNA
atggacgtaaaaatcaaagagaaattggataatcttttcaattatatttctaatgcattaagttcaatttactcaagaaaagatgaaaaggattatcatgattttatttcttccataaatggcagattgatttgtatggctgatattctagacgaatctgaagaatttgaaagagaatattacacatttcttaaaatcaaaaagatgatttattatgtcttagagaatattgaatctataaaccgtgaagattgtttaagagtatttgactccttctctaaatttaatcttttaatcttgttaaaattcaattatttggatggtggaatatctcaagaagagtatcaaacaaaatttgatgatttcacattgtatttgagggaatttagggaatatttctatttgaatgtctatgaaaaagatggaagattcgatgctttgataaatgaagtatcatatatttttgtaaattag

SEQ ID NO: 1514 - DNA, 378 bp, Methanobrevibacter ruminantium
  source 1..378: mol_type = genomic DNA
atggataaaaaaataaatttgattaattttttttgggaagaaatactttttggactttttaaagaaaaatcggaattcctttcctgttttgtcaaatgctcaaatgaagttccttcgaaattcgaaataaataaagattatttgttaaataaactacaactttataattgcggtttaaataattttagaaaatattgtgatttatggcattctttagaaaatttaggcattcatgaggaggatcgtaaaattattttagatgctcatgattttgcaaaagatcagtttacaatatttgtgactgttgatgaagaattttataatgctgtcaaatctttttccaaattaaatattgacaaatataaattattgaattaa

SEQ ID NO: 1515 - DNA, 291 bp, Methanobrevibacter ruminantium
  source 1..291: mol_type = genomic DNA
atggattttattgatacaaatattgcgattgcatatacatttttcccagataagtattttaaaacagttgacgattttattgtaaattccactgaattctactgctcaaacaatgtttgtgaggaatataagcgaaaatataaatctattttcacatcatttgaatatttttttgatgaaattattctagctttagaaaataataatcgcatatttcttaataaatgttcttttgaacaatttgtattgtcacaaacaagtgatataatctggatatggataaaaaaataa

SEQ ID NO: 1516 - DNA, 522 bp, Methanobrevibacter ruminantium
  source 1..522: mol_type = genomic DNA
atgtacaatatcaatgaaaaaatcactttaccaaggattgaaatcaaaatggacgtaaaaatcaaagagatattgaagaattttcttaataatatttcaaacacattaacatcattaaataacaaaaatgatgaagagaaatctttagagttaatttcttcaatgaaagaatatttgttggattttgctatgtttttaaaagaattaaaagaatttcaaaaagaattttctttttttctagtaattagaagaatgttaaattatgttttagacaattatggttctctatgctcttctaaaagatctgtcatatttgattcattatttaaattttttgaattattaagaatcaaacttagctttttagaaggtatttattccaaatcatcatatttaagttattttaataaatttgatacatatttggatgaagtaaaaacggaatattatttaaatatatatcaaagaactggcgaatttgatgatgttatacctagaatatctcaaattatacttgattag

SEQ ID NO: 1517 - DNA, 2034 bp, Methanobrevibacter ruminantium
  source 1..2034: mol_type = genomic DNA
atgggtctatttgataacattaaaaagattcgaaataaggaaagtgcaaacagctcatctgccatattggcttccacatacaataagataaaccgcagatttggggttggaacagatgcaagcagctacattgccaaaaacatgcacaagttctatataacaagctccaagttttcaaaaggggtccaaatcaagaaccttctaagaaagctagacatcacaatccatcctgaaggattcatatacttcctagacgaatttagaaatcttgactatcatggccaaataataaacagtcctatcgactactcacttattctagactattccatctatgacctcaacgaattttacttcaaccctaaggaaggtccaggcttcagaaaccagtcctccgactacaatagggaaatgctcgctatccttgatggaattgagcttctcatatatgaaataaacaaggcattggcaaagtcctcccgtgatgacaagtcaaagtacatccgcatctttgaggacataatcgacaagaaggctagccattttgaagaggcccttcaaagaatacttttccttaatcaactcctatatcagacaggccacagcctaaacagcctaggccgtcttgaccgtatccttgaagactattactacaacgacctgaatgatggatacataactaacaaggaggcattggaactgattaaggatttcctaaaggccctcgattcatactcctggtataagaccgatgacgagtcaggactggcaagccagctaatcacccttggaggaaagtacatcgatgagttcggcgaatactatttctacaatgacctcacctatatcttccttgaggcaatcggccaggtcaatccaaaggatgttaagatagcactcagactaagctataagactccagacgaccttatccaccttgcattagattgccttaacgaaaacacaatatacattgaagagggtgtcgctgtaagttttatcattgacaatcggatatttacagctgacggagccaccattgaggccaatatagattcaaacatagtcttctcaaatgatgaggcaatcatcccaaggcttctcgacttcggatactcaagcgatgacgcatataattatattctatcagcccatcttgaacctacattcatatcctgccttgatgaaggcaacctatcatctatctctcttttaaagccattgaatgacatatttgaagacaagaatgagttaagattcataataaacttagactaccttatggagctttataagaacaatctaaaaaaggaaatcgaagaaaaaataagcgccctagatcaaatacaatggaaccaagaccctttcttatcattattctcagctgaatcatatgaaaaccaactggacatatcccaaggaggctccagaaacaatcattttggaattagattctatgggctccaaaacactgtaaacagcttatataaccttaagaaaatagtctttgaggacaagaccatagaccttatagaattggataagatgagaaaaaacaacttcaaaaggggcaaataccaagaaacattcctcctccttaagaacaatccagtaagattcccacaaaacaaccctgagatagcaaacatctccaacgaaataatagcattcataggcgactcaataaaagactacaaaaacagcctcgacggaaagctcaagtttggattaagcgccccaaggtacatgataaagaatgataagagagcatcttttgacgccacattaaaggacatcccgccagcaagacttttaatatcaagccaaaagacaaactcagatatattcatcttcaattcaagcttagactacaaaagctcagcaataaacggaaaccttatagagctaaatataaacacaaacgacaaacaactaaccaatatccttgtagaagcaatcggatacggtttcgaccagctccaaataaacttaatcagagaagagataatcaccaaagaggatactgaagaatag

SEQ ID NO: 1518 - DNA, 636 bp, Methanobrevibacter ruminantium
  source 1..636: mol_type = genomic DNA
ttgaattctgataagaagattacaaaggaatcctcaattttagatattggatgtggaaatgggaattttttatctcaattaaaaagaggaggatataaaaatctcacaggaatagacttatttattgaagaagagaatattttagaggggattaatttaattcaaacttccttagaagattataaaccttcagaaaaatttgatttaattgtttcgaatcatgcttttgaacatatggataatcaattagctaatctaaaatgttttgaaaatcttattaaagatgatgggttaattttattaagaattccgattaaatctgagccaatttggaaaagatatggagtaaattggtttcaaattgatgcacctagacactttttcttacatactctaaaaagttttgaaatattatgtgataaaaccgaccttaaaattttagatgtgatttttgatagtggatatgcccaatttgttttcagtgaaaattatcaaaacgatattgcttggggagaagatggatggactgattttaggtctaataaaaaattaatcaaaaaatataaaaaagagaccaattttttaaattcccaaggacaaggggatcaatgcatgtttgttcttaaaaaaatttaa

SEQ ID NO: 1519 - DNA, 327 bp, Methanobrevibacter ruminantium
  source 1..327: mol_type = genomic DNA
atgagaatattaaacggtgaaaatatgaaatgtccaatatgtgaaaatgaggagaataatttaactttcataattaaagaaatgcaaataggccttagagaagaatttgagtatattgaatgttcaaattgtggttgtctttttattaaggagatccctaaagatattgacaaatattatgatacagattatgcccctcatttaaaacctaaaagttttaatgaaataatttttgataaaggttctgcaataattttatctaattcaatcctatctaatttaatcccaaaagaatttgtcccccccccatttaaaattaataaataa

SEQ ID NO: 1520 - DNA, 201 bp, Methanobrevibacter ruminantium
  source 1..201: mol_type = genomic DNA
ttgaccgtttccttcctatttgtcaatggagcagcatctgttttgctgaatgcaattgataaggaaaaggcagtaacaaaaatctatattatggcagttatatttaacgtatgtcttaatttggttcttattccaatgtttagttatgatggagaggcaatatccactgtattaagtgtgaaatatttattatcattttaa

SEQ ID NO: 1521 - DNA, 114 bp, Methanobrevibacter ruminantium
  source 1..114: mol_type = genomic DNA
atgattattattccacttagcataggtattttcttctatgcaaggcttatcattgactttatttacagcaaccaatactctcttgcatcaactcttattcaaataattgtttga

SEQ ID NO: 1522 - DNA, 1428 bp, Methanobrevibacter ruminantium
  source 1..1428: mol_type = genomic DNA
atgaatcaaattaaatccatttttaaaaatactggttggttatctgtttcacaagtgataacaagcatttgtgcattcctatggaccataatcatagcccgatacctgggagtatctgattatggcattgtctcatttgcagtttctttcactggccttatgggaatagtgatggatttgggaataagcacatacatcactcgtgaaattgcgaaacataaagatttagtaaggaaatattttaacaatatctttttatttaagcttatattagccattatcttatttattttaagtggattgattttgtatgtcatgggatactctcatttaactataatagttactttggtttttacaatagaacttatcttcatgtctatgactacttttttaaatggagttttccaggcctttgaaaaagtaaaatatcaagccataggagctatattaaatagcagttttttattaataggcattctaataacattagggtttgatttgggcgttatatccattgcctttgcctacactgttgcatattcaatatatttttcatatatgtttttatcatatgttaaaacattcagccgacctcatttagaattggatacaaatttcataagggaagtaataatcaaatccattccttttggacttacaaacttcttctattctatttatttttcaattgacattgtaatgttgtcctatttggctggagattatgcaacaggactttataagtctgcatacaacataataaatgttttcacaacattttttgtagtttaccaaagcgtaatattccctgttatgagcaaattcttcaaagaaagccaaaatctaatcaaagttagctatgagctttctgtaaaatatttgttgttaattattattcctatcagcataggcattttcttctatgcaagaccagtggtggatcttatttacagcaaccaatactcacttgcctcaactccagtccaaatacttatctggacagtttcattcctatttgtcaatggagcagcggcagttttactaaatgcaatcgataaggagaaaactgtaacaaaaatctatattatagcagcaatatttaatgtgtgccttaatttaatacttattccaaggtttagctatgatggtgcagcaatagctacagtacttagtgaaatattgattactattattacactttatcatatattcaaaacagactacaaaccagatttaggactattgaagaatgttataaaactaatcgtttgtggaataatcctttttgtagcattatattacttaaatctctccctatggtttgcaatacctgtaggatttatagtttatctaatatccctatttataacaaaatctattgatgataatgatagatatgtaattagagaattaataaacagataa

SEQ ID NO: 1523 - DNA, 777 bp, Methanobrevibacter ruminantium
  source 1..777: mol_type = genomic DNA
atgctaatgtctataatctgtgtttataatgatgaagaggttttagaaaaatatttgttagaatcattaaaaacacaaaatgaagaatatgaattaatattaattgataatagaaatcatgaatttaattccgcagcttcagccctaaattatggtggaaaaaaagcaaaaggagaaatattgctttttgttcatcaagatgtggaattttatgaaaataacttaaaagatataaaatattactttgaaaattgtcaaaatctaggaattgctggagttcaaggagtttctgaggaaaactatgggagaattactacaaatatcgtctctgggattccaaaatcaacagtgtcagattatagtattacagatataaccgaaacccaaacccttgacgaactattgcttataattcccaaagaggtattcggaaaatatcaatttgatgaagaaacctgttatgattggcacttatatggagcagattattgtttaaacattaaacaaaaaggatattctgtagttttattcccaataacattatatcatgtatctgaaggaggttcaatgtctttagaatactttaaaacattgaaaaaagttttaaataaatataaatatgattataatcgcatatacacaaattgtttattaagtcatgaaccgaataatcagttaaagttggatatcctttactattctgaaattttacatataaggaatcccataactaattttttatcaaattttaactttctaaaaaaaatcttaaaataa

SEQ ID NO: 1524 - DNA, 1002 bp, Methanobrevibacter ruminantium
  source 1..1002: mol_type = genomic DNA
atgcaaactgttggaatgattctttgtggcggttttggaaaaagacttaggccagttactgaaaaagtgccaaagccgttagtggaaattaaagaagattatgcaatacttgataaacaattatttgattttaaaaatgctggaataaacgaggtttatctattagcaggatttttacacgaaaaaatccaagaacgctatggtgacgaatataaaggcataaaaatcaattatgtcattgaagacgaacctttaggaacacttaatgcaatcagattaggtatggaagcacttggagaagataaacaagttgttattagaaatggagatatagttgcagacattaaccttaaaaagatgatagaatatggcgaaagatcagattactttgttacaatgtttgtcaccaaaatgacttctccatatggaattgtagacataagtggagataaaatcactgcttttaaagaaaaaccactattggattactatataaacggaggaatttacttcaccaaagggttattggacttcggagaatttaaaacaggtgatatagaaaaaacattattcccagtgcttgctaaagaaaacaaacttggatactacagggaagatgatctcttttggatggcaatcgacacatcaaaagaattggaatctgttcaaaaggagtatgaaaacaaaacagacaagccttggggatatgagaaggtcctcatttatactgacaagtaccttacaaaagagctttacttaaaagaaggatttcagacttctttccactatcacaatgataaggatgaaaccatgtacataatgtccggtgcaggatacatcgagtttgaagacaggaaagaatactttggaaaaaacgattccattcgtattaaacctggtgttgtccattctattattgcaactgaaaatacaacattacatgaggtttctacaccatttttagatgatacaatcagagtaaaagattattatactcgttaa

SEQ ID NO: 1525 - DNA, 1008 bp, Methanobrevibacter ruminantium
  source 1..1008: mol_type = genomic DNA
atgagtgaaaagaaaaaaattaaagtaaaatttgttgattttcaagatagtctaaaagagaatgataatttctttatagacagtctaaaaaagaattttgatgttgaggtttcagatgacccggattatctcttttttggcgcttatggttacaaacacttagattatgactgtataagaatcatgtggactattgaaaattatgttcctgacttcaatatctgtgattatgcattagcttatgatatcattgaatttggggacagatatcttcgttttccatttttcttaaatcgtcctgaaattgaaaacgttagaaaaacaatagaaagaaaaccaattgacacaagcgttaaaactgatttttgcagttttgtagtttccaatgaatggggagacgattatagaatccgtctgttccatgaattaagcaaatacaagaaagtggactctggaggaaggtctctcaataatattggtggacctatcggcatgggccttgataagaagtttgaatttgatgtaactcataaattttcatttgctcttgaaaatgctcaaaacaggggctatactactgaaaaaatatttgatgcttttgctgcaggctgcattccaatctattggggagatcctaatattgaagaggaattcaaccctaaatcctttataaattgtaatgatttgactgtagaggaagccgtggaaaaaattaaagaagtcgaccaaaacgatgaactttatcatgccatgctaaatgaacctacttttttaggtgatttggacaaatatcttcaggattttgatgacttcttgtttaatatctgcaatcagcctttagagaaagcctaccgtagggataggataatgaaaggaaaaactcaagagcatcagtacaaattgattaacagattttattataaaccttattttttcttaattaaggtagcacagaaattacacattgaatttatcggaagaaagatttatcacttcattagagactaa

SEQ ID NO: 1526 - DNA, 801 bp, Methanobrevibacter ruminantium
  source 1..801: mol_type = genomic DNA
atgtcaagtcaaaatatccagatttatgttgtatcccatagtgaagaggatatcaaaaatattgattctaacgacatttacactcctctttttgttggacgtgcaggcaaggacaatttaggctttgtaagtgacgatactggagataacatatccaataaaaactcttcctactgtgaactaacaggactttactggatgtggaaaaacagccctgcagacataattggtcttgtccattatagaagatactttgcaaactggagacttggaaaaaggttagaacgagaagatattgaaaaaatattctctgaatatgatattattcttcctaaaaagacaactgctcttttaggctcagtatatgaagactacgaccattggaactatgctaaagacttggacctctgtgaagaggttataggcgaacaatgtcctgaatatcttgatagttataaacgagttgtggaaggaaaagatctctactattacaacatgttcatagcccctaaggaagtcattgctccttattgtgactgggtatttcctattcttgcagaggtagaaaaaagagtggacatgactggatatgatgattatcaaaaaagaatctatggattcttaacagaacgtctctttgatgtttggatggacaaacaaaacttgagagtaaaggaatgtgaactaaaagtcaatggacttaggcttaatgtccatatgtggattgtaaaaagaaagattgtaagatgggcttatgtccatatttatatgggcttgcttcataaggatatgagacgttaa

SEQ ID NO: 1527 - DNA, 1098 bp, Methanobrevibacter ruminantium
  source 1..1098: mol_type = genomic DNA
atgaaatacgattatctaatagtagggtccggccttttcggatccgtatttgcttatgaaatgaacaggagaggcaagagttgccttgtaatagaaaagagaagccatattggaggcaatgtttacacagaggaaaagcacaatataaatgtccataagtatggtgcgcatatattccacaccaacaataaagaggtatggaattatatcaatcaatttgcggagtttaaccgctacacaaactcacctgttgccaactacaagggcgaattatacaaccttcctttcaatatgaacaccttctaccagatgtggggagtgaaaactccagaggaggccaaggcaaagattaagcagcaaaaagctgaggcaaatattgatgagcctcaaaaccttgaggagcaggcaatctcccttattggccgagacatatacgaaaaattagttaagggatataccgaaaagcagtggggaagggattgcacagatcttccatccttcattatcaaaaggcttccggtaaggttcacctttgacaacaactatttcaacgacctctatcaaggaattccaatggggggatatactaaaataattgaaaagatgcttgatggaattgacgttgagctaaacactgattttcttgaggataaggataaatggatggctatggcagatagggtcttatttacagggatgatcgatgagtattatgactactgctttggagagcttgaatacagaggccttgactttgagtttgagaccttggatatggaaaactatcagggaaacgctgtaattaattatacagatagagaaaccccttatacaaggataattgagcataagcactttgagaatgcagtctctgataagaccgtgattactagggagtatccaaaggcttgggaaaagggccaagaggcatactatcctatgaatgatgagagaaacactgagctatttaataggtataatgacttggcagataaagaaggcaatgtaatctttggcggaaggcttgggatgtataggtactttgacatgtggcaggtcattgatgaggcattgaagttagttaaatctttagaatag

SEQ ID NO: 1528 - DNA, 183 bp, Methanobrevibacter ruminantium
  source 1..183: mol_type = genomic DNA
atggagattcaatatttattaaatcaagccctggaaaatgaaaacataagagaaatagagattgttgtaaaaatattaaaagagtttgaaaaaatcacccaaattaaatttgaattattgcataaagagttaatggaaaagccaaaaaagggcttaaagcaaagcaaattttcgataatatga

SEQ ID NO: 1529 - DNA, 156 bp, Methanobrevibacter ruminantium
  source 1..156: mol_type = genomic DNA
atgaatcaaaactcaaaaaaagaatttgaaaaaagatatgaggagttctctaatttcttttttaaatgcgaaatagaatatcatacattaaaaggcaaaacaaaacatttgatggcgaaaaaatatttaagtctttttgatatggaatatctgtaa

SEQ ID NO: 1530 - DNA, 582 bp, Methanobrevibacter ruminantium
  source 1..582: mol_type = genomic DNA
atgtatatgaatacaccaagccagaaaaacattgatattaaaaactatgaaagaattttcaaagaaaagattaattttgtagttgaaaaaatctcaaggttttttaaaggaacttcacaagaagattcttttttaaacgaaaaactactcgatttatctgatccctttattaaatcccgaataaaagaaattaaagaaacaactgaatctattgcagaatatttaaaaatagaatacatcaactatgatgaatattatgattttagagaaattcaaagcatgatgaaccaaactcttgattatggaagtatcgaagagttaaaaatcatattaaagatttttaatgaattcaaaaatttaacagaatttaaatttgaactattaagcaataaatcccactctaagagcattagctttaaagatattgatgaagaatcaaaagaaatctttgaaaaaagatacggagaatttagtaagttctttttcaatcgtaaacgagagtattatgcaatttttgaaggagaatgtgaagaggacgtaagtgaattctttgaattgatgaaaaagcatgcattaaagtag

SEQ ID NO: 1531 - DNA, 684 bp, Methanobrevibacter ruminantium
  source 1..684: mol_type = genomic DNA
atgaaattattcatagatagcaatgtaattattggttactgcatagaaatagattattggcattattatgctgaaaacctaatgaaaaatgaaaatatatactggtcaactacagtaaaaggagaatctgaatataaacttgaaaaattaattaaaacttattcaaacttttttaatcaaattaaagaagatttagacaaagagattattagtaaaactgaattcattaaattagtgaaatctatagaatatattaataacaaaaaagtacctttcgaacaagaaaatttagcaaatttagtttggacaaaaggtggatggttagatgatgtaaactctatagaacttaatgaaaatctaaatttaatttcacaaggactaaagaaaaagatgtatagaaattataactactgtgatgaaatgttaaatttatacgaaagacaattcaaagcagaatatattcagttagtcaaaagattagaagagcttaaaagaggaaacagagaaatacattctccagatagtgaaatacttgtagattgtcatgatttgtcactttcacaaaatctagatatgggctttattacttctgatggagatatagtctattttaaaaaggaaattaaaaaaatgaccaatataaaagacattatttatttaaaaaatgttcataggtacacttaa

SEQ ID NO: 1532 - DNA, 828 bp, Methanobrevibacter ruminantium
  source 1..828: mol_type = genomic DNA
atgaccataagtcccaagagaatattatatttagatgaagttcgctcacttgcaatcatgctcgtagtcattgggcatttggcaaggctgttttcatataactacaatagttggctgttctgcagcggagtattttccctaactcgtataggcgttcctctcttttttacagtaagcggatctcttcttttaactagaaaatatgaggtaaaaaagtttttagaaaagcgattcaaacgtgtatgtctgcctttcttctcttggataataatatatatagttgccggagtgctgatttggcattatgaccttacattcgaatatgtggtaaacactgcatttggtgttggagactattctgcactgttctggtttatttggtcacttattggagtttatctattaataccagtcatcagcagctttatacgtgaagagggaaattggggagcagaatatctgattttaattacaataatactgtccctattatacacattcggattctttgactatcctcaaatgaaatataactttagagtcatctttaacttcttcccagttctcggatacttcattatggggtcttacattcacaataagaagtttaagtattcagataagaagatgtttgctatcggatgcgtcttgtttatagtcggaatctgcggacactttgcaaaaatctatcttaagggtcttggaggactttcccttgcaccgatagacttctttgacatatgtgtaataatggaaacaatagggctattcattgcatttaagtatgcaagcaccaaatgggataaaaggaaagatgcaagaaattga

SEQ ID NO: 1533 - DNA, 258 bp, Methanobrevibacter ruminantium
  source 1..258: mol_type = genomic DNA
atgcaagaaattgaatttagggaaaccaaattaggtgaagtgattgttctatttgcatcatgcagctttggaatctatttctcacattatattcttatgagatatattatgtataatggatttttagctccaataagaaaaacacatgcactgttttggcttcctgtaagctcaataatcataataggattaagttggcttttaatatacgtaatgagcaagattccatatgtaagaatagctagtggggttaaatag

SEQ ID NO: 1534 - DNA, 1785 bp, Methanobrevibacter ruminantium
  source 1..1785: mol_type = genomic DNA
atgtgtgggattgtaggatgtgtactaaaagaaggcaaagtagcccctatcttatttgactctatatctaaacttgaataccgtggatatgattctatcggcatagcttgtgcagatgaagacaaaataaatcttaaaaaggattcaggaaaaattgcagaagtcgatgcaaagcttgacttatgtgatttggaaggcaaatatggaattgcccatgtaaggtgggcaactcacggagatccaagtaaaatcaattcacaccctcatctcaatggcgacggcaccattgcagttgttcacaatggaatcattgaaaattatctctcaatcaaggaagagcttgaaggggaaggttaccagtttgtctctgataccgacactgaagtgattcctcatcttattgacaaatatatgaaaacaggccttgatttgacccaatcagttcgcaaggtaatcggtgtcattgaaggggcatatgcacttgcagcaatatcctccgctgagcctaaccgcatagttgcaacaagaaaggacagtccccttatcgttggaataggagatagcgagttctttgttgcatccgactatcctgctatcttaaagtatacaaacaacatcgcattccttgaaaagggagaaattgtcattttagatgaggatggagtgaagttccttgatgaaaatgaccaagagatgactaaggagattgaagtcattgaatggtcccctgaaatggctgaaaagggtggttatgatcacttcatgattaaggaaatcaatgaacagtccacagccattaaaaacaccttgaatgaaaaggataaggtaaaggaaatcgttgatgaggtcaagggaacaatcaatagggttgtctttgtggcatgcggaacctcctatcatgcgtccctcactggaaaatatcttatcgagtcattggtgggaataccaactgaggtattgctggcttctgaattcaagtactctgcaaaggccttaaatgacaagacccttgtaatattcatatcacagtctggagagactgcagacaccttaaaggcacttgatgttgccaatgaaacttcaaagaccttggcaattgttaatgtgaggggatcatctgcaacaagaagggcagactatgttattcaaactcaagcaggtcctgaaattggtgttgcagctactaaaacctatgtaagtcaattggtggctatctacttattctcagcacttcttggtgaggatcatgagcttcttaagagattggaaaaggttccggattacattgaagaggtcctccaaaagcgagatgagattaaggaaatctctaaaaagtataagagggacaaggatgccttctttattggaagaggattctcctatcctattgcattggaaggagcacttaaattaaaggaaatctcatacatacatgctgaaggatatgctgcaggagagctaaagcatggtcctattgcccttattgacagaaacattccagtagttgtggttatacctccgggccaagaccataagaagatcatgagcaatctccaagaggtcaaggcaagaggcgctgatgtattgggaatcggtgcagttggcgatgaggacttgatttcagagtctgatgatacattccttataaactgtgatgttgatgatataattgctccacttgtttatatagttcctcttcagcttttaagctatcatgtttctgtaattagagagcttgatccggacaagccaaagaatttggctaagtgtgtaactgtggaataa

SEQ ID NO: 1535 - DNA, 708 bp, Methanobrevibacter ruminantium
  source 1..708: mol_type = genomic DNA
atggaaaatgctcctaataaagaagacattaaaaagattgcaggagacgatctctctaaggcagaattaaaaaagagaattatagaattatatgattctggccaaacaatgatggatattgcagattctgtaaatagaagtaaaatttatgtaagcaatgtcattcatggattttacgatgaggatgagattaaggtccgtcaatatgacaaattaagagggaaagcaaaacttgatttttcaagatatagaagttctacaggtatttatagggttagttatgtagaaaacaaaagaagcggaaatgattattggtcatatcagtactatgacgatggcagattgaaaagaatcgtttctgtcaatttatacaagcttaaaactgttgtaactgaaaaaggattggactggtttgaatttactgaagaagctaaagagatggttttaaaagataaggaaaactttgatgaaagctctcttaagagaacaaacaagactggattctacagggttacaaagcgaaaaaccaatacaaagcaaggatacacttgggcttattcatttaaggagaacaatcatctttattttgtaagttccatcagcatttcaaagcttaaggaaaaggtcttaagcaatggctgggaatgggaagaattaactgaggaagccactagattggtagaagaggattctaaaaagcgaatttaa

SEQ ID NO: 1536 - DNA, 750 bp, Methanobrevibacter ruminantium
  source 1..750: mol_type = genomic DNA
atgattgaaatggattctaaaaaattactttatgaaggaaaggcaaaaagtgtttttcaaggtgaaaatgctgatgaagtcataatcgactttagagacgacatgactgcaggagatggagcaagaaaagaaagcatgggaaaaaagggttatttcaactcaattatctgtgcaaaaatctttgagactcttgaagaggcaggagttgaaacacagcttatcgaactaaccgagccatgtgtcatgaaagctcgcaaattggatatgatccctatagaggtcattgtaagaaacatagctacaggaagcatcataagaaaattcccatttgaggataagagcccatttaatcctcctctcatacagatggactttaaggctgacgaatttcatgaccctatgttaaatgatgcaatagctatcgcccttggaattgcctctcaagaggaccttgataaattaagggagcttgccttaaaggtcaacgaagtaatgagcaaaatgtttaaggagattggaatcatccttgttgactttaaaatcgaattcggtaaggattcccaaggaaatatcatattaggtgatgagataagcccagatagctgcagactatgggatgccgaaacccttgatatgcttgataaggaactctttagacaaggaaaagatgacgaggtcattgatgcctatgaagaagtctttaacagactcttaaccgaagaagataaggcaaaatggaatattaaatag

SEQ ID NO: 1537 - DNA, 273 bp, Methanobrevibacter ruminantium
  source 1..273: mol_type = genomic DNA
atgatgtatgatatcgaagttaaagtttccctaaaagcaggaatgttaaatccagaagcaactaccattcaaaggtcattatcccttttaggatacgaagtaaaaggaaccaagacaaaagagattatcagctttgtaatggaagcggaatccgaagatgatgcaagggcaaaagtggatgacatgtgtcaaaagctattatgcaatccgatcattcacaactacactataaaaatcatcaaaatggactttacctgtgcaagctgcgaataa

SEQ ID NO: 1538 - DNA, 654 bp, Methanobrevibacter ruminantium
  source 1..654: mol_type = genomic DNA
atggcaattggaattataagattccctggaactaactgtgaccgcgacgtttataaggctatagatcttgctggcggagaggcagaatatatctggtggaacaatgaagacttgactgattatgatggaatcgttatacctggaggattttcctacggagactacttgcgtgcaggggcaatagcttccaacacacctgttgtggaaggggttaaggcacttgtaaaggaagaaaagccagttcttggaatatgcaatggagcccagattcttggagagattggacttgttccaggattgttcattacaaatgaagtccctaagttcaattgtgaatggagcagacttaaggtggcaaacaataagacaccgtttacaaagaactttgatttaggccaaatcattgacataccaatagctcatgcagaaggcagattctacactaaggatattgatttattgaaagaccaagaccaaatcgtgcttcagtttgcagaagagaaccctaacggatctatggaagctatcactggagtaagcgatgagtctggacttgttgttgcaatgatgccacacccagaaagagccacaaccaaattattaggctcagatgacggtcttgaattctttaaagggatgttagatagtatttaa

SEQ ID NO: 1539 - DNA, 714 bp, Methanobrevibacter ruminantium
  source 1..714: mol_type = genomic DNA
atgccagtatatttaataggtgcaggtccgggagaccctgatttaataactttaaaagctgtaaaagcattgaataaagcagatgttgttttatatgactatttagccaatgatgaaatattaaaacatgccccagatacagcaaagcgcatttatgtaggaaaaaaagctggagagcattataagacccaagatgagatcaatcaattgattatagaagaggctaaagaaaatgaaaatgtagtcaggctcaaaggaggagacccatttgtattcggcagaggtggagaagagcttttagcccttgcagaagagggaatcgactttgaagtcattccaggagtcacctcagcaatcggtgcacctacaagcatggcatttcctataacccatagagctgttgcaacatcctttacagttgtaacaggtcatgaagaccctacaaaagaaaacaagcaagtaaaatgggattatactgcagacaccctaattatcctcatgggaattggaaacataaaagaaaacactgcagaaattatgaaatacagagatccagacactcctgcctgtgcaatcgaaagcggaacactccctaacgaaagggttgtctttggaactcttgcaacaatagcggataaggaaatcaatacccctgcaatacttgtgattggaaaggtcattgatgtattcaagcaaataaagggaattgaataa

SEQ ID NO: 1540 - DNA, 720 bp, Methanobrevibacter ruminantium
  source 1..720: mol_type = genomic DNA
atggaaatcggagaaattattactgattctttaaagtatcctattaataacattaaagctttaataatttacatagtcctcggtatcgttgcaggtcttgtactcgtattaaccggcgttggcgtcggagcaggtgcaatagcaaatagcgcagcagccactggaattgttggaattattggaattattatattcttccttatatacttattaatcttaggatacgaattagatgttataaactttggtattgaaagaagagatgacgctcctgaaatcgacttcgctagacaaataactaatggtattaaatggtacattacttgcttcatttacatgttaatcccaactatcattatgataattttatcatacctcaatcaaactttaggtttaattgtaggaataatattatttatcatagcagcattcgctttattaatggctcaatgcagattagctcacacagacagcttaggtgaagcattaaatattccagaagcaattaaagatattacaaaagtgggaattataaaaataatagcagtattccttattttagttatcctaggccttgtcgtatcatttattttaggtttatttagtgtattaggcgatgtaggcacatatattggagctattttatctggtattttcacaatctacctagcctttgtagtcttcagagctagtggattattatactcagatgcagtttaa

SEQ ID NO: 1541 - DNA, 1512 bp, Methanobrevibacter ruminantium
  source 1..1512: mol_type = genomic DNA
atgaaaattctattcttaaacttaccatatgaattcaatataagcagggctagcagatggcctgaaaagaccaaatcaggtaccttatattatccttactggcttgcatactgtgttggggtatgcgaacgtgagggatacgactgcaaattggttgattgcattacaaaggcatatacaaccgaagatacagttgaagaggttaaaaactaccaacctgattatatcatggctgaaataacaacccctacttgcgcttatgattatacagttataaatgccattaaagaggcttatcctaaggcaaaaatacttattggaggaactcatgcaacaatattgcctgatgcagtcttaaaagagtgtttaggcatcgattatcttcttcgccaagagtatgactatactgtaggggagcttatatcctctgatgatgttgcatcagtgaagggagtctcctatagggtaaactctgatggtgtggacatcgcatctttaggtatcaatctattgactgaaccagttgactttgaagtaaggcataccgaagacagagagcctcttgaggacttggatagccttccatatgtttcaaaggtttaccagaagtatctaaacttcgatgactatgcatatgccttcgctcaaaagccaatgattcagattgtatcatcaaggggatgccctaaccagtgcaatttctgcagctatccatctacaatgggcggaagaatttataggacaagatcagtcactgaccttgcagatgagtttgaatacatcttgaaggagcttccagagattaaggaaatctttattgaggatgacacattcactgttaatcagccaagggttattgagttttgtgatgagattataaaaagaggcctaaagcctatctggtcctgcaatacaagggttgacttaacctatgagacaatgaaaaagatgaaggatgccggttgcagattacttgtttgcggatatgagtctggtaatcaggacgttttaaatgagactaaaaagggaataacccttgaacagtcaagagcatttgcagagaatgccagaaagttagacattaaagtatttggctgctttatgatagggttgactggtgacagccttgagacaatcgatgagacttataagtttgctcaatctgtttatccggacatgtgcttcttccagcaagcggtaccattcccaggtactggattttatgattgggctaaagagaatggctatctcattacagaggactattccaaatggctgaatgaggatcggtatcttaattgtctggtggactatccttatgcagatcataaggagatagagaagttaagagacagtcttatgagcaagtattatttctcatttgcatatattgtaaagactttcttagctaaccttgattgggttgaattcaagagagtcatgcgaggaggaactcagtatattacttttagacttaaaaaagctttaaataagtctgataatttggattaa

SEQ ID NO: 1542 - DNA, 777 bp, Methanobrevibacter ruminantium
  source 1..777: mol_type = genomic DNA
atgaaaaagaaaatagcaatcacaagacctcaagaacggtcaaaagccgcaaaggagtttatagaaaactatggatccgaagcaatcatagtcccaacacttgaattgaaactggaaaataccgaatcactaaagaacctgatggaaaaatccaatgagctagactggttgatatttacatcagtaagttcaatcgaatcaatctttgaattctatccggacttcttggacaagttgaatccagagtgtaaaattgcaaccataggtactaaaactgcagaacttggtataaaaaaaggactccctatagacatcatacctaaagattatactgctgaaggactgcttgaagaatttgaaagaatcgacttaaataataaaaatgttggcgtccctaggacattttctgcaaggactattttacctgaaggacttaaaaatatgggggcaaatgtgatcttggctgaaagttataaatcagtcattccagaggacacaagcaagatagaaaaactgattcaatgcatcttagatgaaaagattgacggaatcacatttacaagtcctttaactgtatcaaacctttttgaaatagctaaagatgaagataaggataatctagttgaaaagttatctacaacaacccttactgtagctattggaccaattacaggtaatatattgaaccaattaggagtaaatcacatctatccaaaaaggtatactgtaaaagacatgattgacttgatgtttagggagttaaacaatagggaataa

SEQ ID NO: 1543 - DNA, 906 bp, Methanobrevibacter ruminantium
  source 1..906: mol_type = genomic DNA
gtgaatggagaatatctgatgtttattgattcagatgacacatatccaaaagacgcttgtgagattctcttaaataaaatagaggaatatggatgcgacattgcctttggaagatatcttaggcattatccggaagagaatttcataagaaaatcctacactccctatatcgacacccttgatgaaccatatcttagctatttagatgatttagtaaagggatccaactttaagggaatagtagggagcctttggaaaaacatattcagcaagttcttctatggtagctccatagatatgaataagttcaattcaaaggaatctgataattcccacccaaaggaactggataaaaattataaaaataataaagagatattcataagaaatattaaggatgaaaataaagaggaaatagctatcttaaagattttaccttcattttggactaaaatctatagaagcgaacttataagcaaaaacaatatcaatttccccgaatgtgtctctgcagaggatttgaactttctattggaagcatactttaaaagcgaaaatggaattttgtttttgaatgacaagattgtctataattattttatgcgtttagaggttgtagataagtcagttacaaaaaatatcaatttcagattggtttatgattcaattaaagcatatagattgtcttcagagctttgtgacaatttcaatataaagaataaggacctgttcctaaacccttatctattaaactggataagcttatggctaagcagaaaaaatacaaaagaggaaaataagatatttttagaggaatttgataagttagataagactaaaaagtatggtttgaagtataaattgattttaaagaccacaaaattattattaaaaataaaatcataa

SEQ ID NO: 1544 - DNA, 324 bp, Methanobrevibacter ruminantium
  source 1..324: mol_type = genomic DNA
atgaaagaagtaatgatatggccaatttatttagatgcagacaaatctctaaatgaaggcagaaagatatcacaggaatatgctatttcagaaccaagaataaaagagattgaaaaggctgctcaaaaattaaaatacaaatatactgttgaagaggataagtcctatcctggagaatggtataataaatctggaagaatcataattgaaactgatgattcaaaaaaagaaattcttatgaatttgtcaaatagcattaaagatattagagaagctagaaagaactataagcctactaaaaaaggtaaaaaaggaaaaaaatag

SEQ ID NO: 1545 - DNA, 1443 bp, Methanobrevibacter ruminantium
  source 1..1443: mol_type = genomic DNA
atgatagaaacattaccaccagacatgaaacagaaatatgaagaggcaaaggaacttatagagtcctcagaagacattaaaatatatagccatacagattgtgatggaatatcttcaggagccatcctatccactattttaaaaagaataggaaaagactatgaaatagagatagtaaatcttgatgtcttggaagatttggaaatagaacatgaactaaccatcttttcagaccttggatcaggacagcctgtagacaaacatgccaaaaaagattcaaaaatactgatattggatcaccaccctccacttagggaaatggactatccagacagtgtggaatatacttatctcgagataaatccaatgtttcacgatatagacggttcacaggaaatctgtggaggaggactatgctatctccttgctaaggaattcggctatagggacctcagttggataggagttcttgctgccattggagatatgcaaaacactaaaaccggaaagcttcaagggatgaacaaaacaattcttcaagatgccaaagaagaagggctagtcagctccgatactgacctgtcattatatggcagacaaacaaggcccttatttgtagcattatcctatttcagtgatgttaaattgcctattaccaacaataagaatgaaacaattgcgcttttacaaagattaggaatacctagaagaattaaagatgaaagcgttccttcaggagaaagggcaaccaccctcagtgacttgaatgacgctcaaaaaagggcattgactagcgaattgataaggatgatatcaaacgaaattcctccaagatatagcatttatgttcctaaattggtaatagctgacacttacgaattcttagccgaagaagacggcacattcctaagggatgcatctgaattttccactgcaatgaatgcatgcgttagaaataatgaagaggtcgttgctttaaaaatcctagaaggaaatagagctgaggcattagatgcacttgaaatcatttctaaagaccatagaggttatttggccgagaacattcaaagcattgaggatgagcataagattattcaaatgaaaaacctgcaatactttgacggctcaggaatcagaagcaatgtagtaggtacaattgcaggaatggttcttagctatggagattggagaaagcccatgattgcatttactcaagtaagtgatgagaatcaagatttaaaaatatctttacgctgctcaagacttttggcatatgatggaattcactttggaaacattataagagaagttgcacaaagcttaggaggaaatggaggaggccataatgttgcttgtggtgcatatattcctaaagataaaaaagatgaatttttaaatttgatgaatgaaaaactagaaggaaaattagctcttgaagactaa

SEQ ID NO: 1546 - DNA, 828 bp, Methanobrevibacter ruminantium
  source 1..828: mol_type = genomic DNA
atggagattttacaaaaaagaggagctttaactcattttcaaatattaggtgaaatatctaagcaagaaccaaacttaaaacaaaaagatttggctgaacgtttaggaattactatccaagcagtttccgaaaacataaaaacattaaccgaacttgaatacattacttcaaaagacggaagagcaccatataaaataactcaaaaaggaattgcaaaggttaaaaaagatgcaatcatccttagaaaatatactgacagtgttcttgaaaccatgacatattataaatccacttggcctgcaattgcaaaagaagacttgaaagaaggagacgaagtaggtttatatatggaaaatggaagattatatgcatcaataaacgcccaaacttcagcatatgcagatgtgatattagacactaaaaaaggctttgatgttgctctaacaaatctcaaaggaacaattgaaatcaaagacagcaagattttaatagtcacattgcctccaatcaaagatggaggatcacgttctgctgatttggacttggttaaaggaatctatgaaggaaactatgaaaattatggattaagttccattgataaggttgcagcaatcggcaccacttcacatgcagtagccaataatttaggcattccaatagacattgaatttggagtaagcgaagcttcccaatctgcagttagaaaaggacttaatgttatgattctttccattggagacatgagcaagaatattagtaaagatttagaggatgctaatattcaatatcaagtcatagatgctaagaagtctgtaaaaactgcctaa

SEQ ID NO: 1547 - DNA, 696 bp, Methanobrevibacter ruminantium
  source 1..696: mol_type = genomic DNA
atggaaaataagcttataagacaagacactagcgatttagatattgtaaatcatccagagattaagggtttacagattattgaaggaaaaataaattttccaatcagttggttaaatcagcaagggtactgtgaatacacattatatctgcaatacctaaaaggcattaaaacaatgccaactcaggctatgaccacaggcactaaggaacatttaaagttagaggaagaatttaagcaaactgcaaccccatcaagttttgatgatgcatttaaggaatctaaggaaaaggaaatactgtctcgtgaaatgtttgttatagattctgaagagggggttcgaggttttattgatgagatttggatgactccagatgagattgtgataattgatgataaaccgggcaatagggcttatccatcatctatgaatcaagttcgtgcatattgtttggcctttaaaaacatgattggcgatgataatcgtataatcagaggcgctttaagacaaagaggcactgacaatatattttggagtgaaatctttgatgagaaggttgaagagaatatattatatttaattcaccgtatgcatggtctatttgaaggcactaaacctttcatacctactaaaaatggaaataaatgtagagcatgcagatatcaatcctattgtgaacacaaagttgatatttag

SEQ ID NO: 1548 - DNA, 441 bp, Methanobrevibacter ruminantium
  source 1..441: mol_type = genomic DNA
atggatttatttgtaaaaagaatcattgcttacattcttgatttctttgtagtttcagcatttatgtggattttctcatatttagcttatttctttattaattatttaaatatgttccaaatctaccattatttcatttttatacttccaatattaattttagtttactttacattcttggaaaagaatataggggcaactgttggcaagaaattaatgtttatagaagtgaaatctactgttgctaaaagaagtagaaatggaaggaattataatttaacttatgggcaagcatttattagatctttatctaaaatctactggttccctataatcattgatgtgattcttggtaaaattgctggaaaaaccagattactcgatggattttctaaaaccactgtagttgaagaaagagtagacagatatctttattattaa

SEQ ID NO: 1549 - DNA, 1011 bp, Methanobrevibacter ruminantium
  source 1..1011: mol_type = genomic DNA
atgaaaataggtatgtcacatggagctggtggagaagttatgggtaatctaatttcagaaaccattcttaataatttatcaaaaaaagctgttgaaggaggtttaggcctagatgctttagatgacggagcaactatacctttaggcgattatgaaattgtatttacaactgatggtcacacagtaaatcctttattcttccctggaggagatattggaagaatttcagcagcaggaaccattaatgatgtttcagttatgggcgcaaagcctttagcaatttccaatgcaatgatcttgcaggaaggctttccaatagaggatttggataaaatcatcaagtccatgagtgccacttgtgaggaggctgatgttgcagttatcacaggagacactaaagtcatggaacaggataagcttgaaggaattgtcattgtaaccacaggtattggaatagcaaaaaaaggagaggtaatcaaggattccacattaagcgttggagataagataataatttccggaagtgttggtgaccatggaatgagtttgatgtcctttagagaaggctttggatttgaaacagagttgaaatctgatgtggctcctatgtggggaattatttcaaaggctcttgaagttggaggtgtcactgcaatgaaagaccctacccgtggaggtcttgcaaattgcataaacgagatggctcgcaaatctggtgttggagtattgcttcaagatgaagccattccagtgaagcaagaagtcagagcggcatctgaaatgttaggaattgacccttatgaagttgctaatgaaggtaaggttttaatgggcgtaaaggctgaaaaggcagaggaaattctagaagccattaagactgataagtatggtgccgatgcagctatcattggtgaggttattgatgatgataaggttttaattgaaacgggaattggaggcataaggattttagagactcctattgcagatccggttccaagagtatgttaa

SEQ ID NO: 1550 - DNA, 378 bp, Methanobrevibacter ruminantium
  source 1..378: mol_type = genomic DNA
atggcaatttgtcaaggaaaatcaactagaacaccttctggtgctagaagagttgcaaatcgtggaaaaagaaaatctgaattaggtagagaatctgcagaaactaaattaggggacaaaaatttaagaaaaatcagaacccgtggtggaaacgtaaaaaacagattagctagagacaataagattaatgtagttgatgcagaaggtaaagctcaaactgtagaaattttcggtgtaatcgaaaacactgctaacccaaactacgtaagaaggaacatcattactaaaggtgctattgtagaaactgcagctggaaaagctaaagttacttctagacctggccaagatggtgttattaacggagttttaatcgaataa

SEQ ID NO: 1551 - DNA, 681 bp, Methanobrevibacter ruminantium
  source 1..681: mol_type = genomic DNA
atgccagaatccccagagcaattagctattgaaaaagaaattcaaatccaaaaggacaagtttttaaacttctttaatggagagttaccagatacaatggaacttgaatttgagggattctacagaagaggtttttttgtaagcaaaaaaagatatgcagtaattgaaaatgagaaaatcatagcaaaaggtttagagcttgtaagaagagattgggcaccaatagctaaaaaaacccaagaggaaatattgatggccatcctaaaagagggggatgttaaaaaggctgaaaagatcattagcaaagtccttaggaaaatcaaatcaggagacattgcaactaaagatctaatcatacatacccaaatcactaaaaatcttgatgactataagcaaataggacctcatgtgattgctgcgcgtgaaattgaagcacatggaattaaagtaggtaaaggaacaattgtacaatatataatcagtaaaggaaaaggttctattagccaaagggcagtcccttatgaatatagtgaaggagttgaatatgataaagaatattatattgaaaatcaactgattccagcagtttcaagaatgatggaacctttaggatatgataaaaatagattgagagaattggcatcaaccgaaagacagcaaagtttagatgcattcttttag

SEQ ID NO: 1552 - DNA, 681 bp, Methanobrevibacter ruminantium
  source 1..681: mol_type = genomic DNA
atgactaaagctgtgttctttgatatagatgatactcttttagacacttctagctttgcagatcttgcaagacatgcggctattgaaagtatgtgcaacaacggtttacctttagaacctgatgaagcatatgacctattaaaagatattattaaagaaaaaggttcaaactattcaaaacactttaacatattgacaaaagaagttttaggtaaggaagatcctcttttagtggcaatcggcatgaccacttaccataacgttaaatttgcacttttaagaccattccctagaacaagtgccattttaatctacttaaaaagtaacggctataaattaggggcaataacaaatggaatcacaataaaacaatgggagaaacttgtcagattaaatttatatcatttctttgacattgtaattacatcagaggaagtgggagttgaaaagccagaccctgaaatctatcttgaagcatgcagaagaatggcatgtgatgttaaaaaaagtgttatggtagggaataaactagatattgattgtatgggtgcagttaatgctggaatgagtgcaatacttgtaaattccactttagatgaagaggaaaaagaaagagttaataatgaagacattgatataatagttttagacagcatttccgatgttgatactgttttataa

SEQ ID NO: 1553 - DNA, 789 bp, Methanobrevibacter ruminantium
  source 1..789: mol_type = genomic DNA
atggcgcaaatcaaatgcccagactgtggcaaagaacaagaagatacaaataaattctgtaaaaattgtggagctaatctatcaaatgtaaaagcagaagaagtaaaattagacctagacgctgctccaactgaagagaaaatagacttaaacactgctccaactgaagaaaaattagatacagatgcttctgaagttaaagaaactcctaaagctcctgtggaaaataaaaagatatgcagcaaatgtggacatgaattgaataatgaaaagttctgtccaagatgcggacaatccacagcatccatagttccatatgaagccaagactgaaagccaaggtgaaaataatgacaaaacctgtccatcctgtggaactaaagtaactacagaaaagttctgtccaaattgcggaagtaaaatagaagagaaaaaaccagttcaaacacaaaacgctccacagaaatattgtagaaattgtggaaatccgattgatcctaaagctgaaatatgtccaaaatgtggcgtaagacaattgactgttgttaaaaaagaacctttattctctcttattctatcacttatattcccaggccttgggcaattctataataatcaaactcataaaggaatctttttaattattggagcaatcgtatccatcgttttaacaatttttgtaattggagtcttattatacatgcttgtatggctttacggtatgtacgatgcatatagcactacaattgctttaaataatggagagtatgttgaagataaactcttctaa

SEQ ID NO: 1554 - DNA, 273 bp, Methanobrevibacter ruminantium
  source 1..273: mol_type = genomic DNA
atgagtgattttgaggaagtaatgactgaatacatcaaaatctcaaaacaccgcgaaaaagtatttaaaacattgaaagatggttctaaaaaacctagtgacattgcaagagaaacaaatttaaacatcaacagtgttagtttatctcttaaacagttaactgaaaaagaattggtttatttattaaatcctgacgacaagaaaggacgtttatataaattaaccgaaataggcgaaacaataatcaaggaatttgatgaaaaaaccgaataa

SEQ ID NO: 1555 - DNA, 777 bp, Methanobrevibacter ruminantium
  source 1..777: mol_type = genomic DNA
atgacaaaaattagacttatctcatggaatgtaaatggcattagagcaattcataaaaagggctttctagactggtttaatgaagagaaagcagatattgtaaacttacaggaaaccaaagctaaaatagagcagttaccaaaaaaattaatcaatgttccaggctataccagctatttccactcagctgaaaggggaggatatagcggagtggccacttacacttcaatagagccaaatgaagttattaatggaatgggaattgagaaatttgatattgaaggaagattaatcagattggattttgatgactttactctcttaaacatctattatcctaatggaggtcgcgacgaagagagattgcaatataaattagacttctatgatgcatttcttgattatgctaacgatttaagagaccaaggaaaaaatcttgttatctgcggtgacttaaatactgcacataaggaaatagatcttgcaagacctaagcaaaatgaggatgtatcaggttttcttcctatagaaagagaatgggtaagcaaatttctagacaatggctatgtagatacctttagaatgctacatgaaaatgaaaaagaaaaatatacatggtggagttataggactagagcgagagaacgcaatgtagggtggcgtttagattacttcttcgtaaacgaagaatttaaagacaatgtaagagcatcttacattatctctgaagtgatgggttctgatcactgccctatagctttagaaattgaaatttaa

SEQ ID NO: 1556 - DNA, 1548 bp, Methanobrevibacter ruminantium
  source 1..1548: mol_type = genomic DNA
atgagtgaagttatagataaaatcattaatgaattacatatttatgaaaaaaaattacttaaagagttagaaaagaacgaagatcttagtcctgatgagatagctcaagatacaggcttaaacattaagtctgtaatgagcgcagcaggaattctcgcttccaaaggaatcatcactgttaaaaaagatgttgaagagaagttcagcttaactaaatatggtaagaagtatgctgaaatcggtcttcctgaaagaagaatccttaatgagcttcaagagaaaaaagaattgcatatgaaagatttggctaaaatagacagtcttgaaaagaaggaaatcaatattgcaattggctggttagttcgtaaaggctgggctaagataaacaaaggtgtagtgactatcactgaagttggagaatcttctaaagataaattaggtgatgatgaagttttacttaatcttttaaatgaaaagggaagtttatctcaagatgaacttgatgaagatatggctaatggtttagcagcacttaaagataggaaaaaattaattgcaagtgaaaaaaccacttcccatagcttccagctaaatgacttggcttatgagattttagataagggctttgacttaactgaagaggctacccaattgactcatgagcaattgaaagacggcagttgggctaaactaaaatacaggccttatgatattaatgctgaatatcctattttcttcccaggtaaggaacatccattaagaagaatcattcaggaaattagggaaatcttccttaaccttggctttacagaagcaaaaggagaatatttggagtctgcattttggaatttcgactcattgttccagcctcaagatcacgctgcaagggagatgcaggatacattttatgtaaagaatccattgacttgcgacttgccagatgatgaccttgttgaaagggtagctaaaacccatgaagatggtggaaataccaattctgaaggttggcattatgattgggatgcagatattgctcgccaatctgttcttagaacccatacaactggaatttctacacaagcactagcaaattgggagcttcctattaaaatgttttcagtaggcagagtatttagaagagaaacctttgactataagcatttgcctgagttccatcaagtggaaggattggttgcagctcctggaatcaattatcaaaatctcctcggaacattaaaggaattctataagaaattaggctttgaagttagattcagacctgcatatttcccttacacttatctttcaactgaatgtgaaatctatttggaagagaaggaaagctggatagagcttggcggatgtggaatgtttagacctgaagttttagaacctttaggtgttaaagttccagccttagcatttggtttaggtattgaacgtttagctatgattagatatgacttatctgatattagaatgctttataagagtgatatcagttggttaagggaagttcctttagaagaaggcattaactttgaataa

SEQ ID NO: 1557 - DNA, 900 bp, Methanobrevibacter ruminantium
  source 1..900: mol_type = genomic DNA
atggaagcaaaccaaatagcaaaattggcacaaattgcatcagcgttagaagttagtggttatccaaaacctggaaatgttcataggactcgtaattatgatgatatggtctttgaagactttataatcagtggagttgttattggagataccattcgagaattggctaatcacacccaatccattgatgatttgtctgatgcaaatttaggcaaatatattttagaggcagttgctgaaacaaataaatggattgcaaataataccaatctgggcattatgatgatgtgtgttcctattgcagctgctgcttcaataagtgatgattttagccaaattcaagaaaatgtaggtaaattgatggatgcaactactgttgaagatgctgtagatttatatgatgcaattaatttagctgatgctggaggaatgggggatcaggatgagtttgatgtaaccagcgagaaggctaaggatgaattgcgtgcaaacaatcaaaccatgtttgatgttttaaagatatctgctccttgggatagattggcatctgagcttacttctaaaatgcctgtttcctttgaaatcggttatccgacattcactggtttctgcaattcatgtgaggatgttgataaaatcaataaggctactgtactcactttcatgacacttttatcagagattccagacactctcatttcaagaaaatatggtgatgaggttgctaaagatgtgtctctaaaggcaaaagagcttttagaatttaaagatgatgatgactttgtagaaaagcttttagaattcgatgactatctctatgaaaataaatataatcccggcactactgctgatttaactgcagcatctatatttattagctatttggataaagaattctaa

SEQ ID NO: 1558 - DNA, 996 bp, Methanobrevibacter ruminantium
  source 1..996: mol_type = genomic DNA
atggattttccaaatactagaatgagaagatatagaaaaaactctaaaataagagatatagttcgtgaaaccaaattaaataaagaggatttgatttatccaatctttgtaaaagaggatttaaaggatgatgaaaaggaagagatttctacaatgcctggagaattccgattttctataaatggtgctgtggaatatgcaaaaacattggaggctaaaggattaagatcaatcatcatattcggtattccaagtgatagcgaaaaagatgaaatcgcaagccctgcttattctccaacaggaatagttcaaaagaccgttcgcaaattaaaggctgaaactgatttagttgttataactgatgtttgtctttgtgaatacacttctcatggtcattgtggaatattgaaggaaaatgaagatactgattttggatatgaaatattaaatgacgaatccttaaagttcttggcaaagactgcggtatctcatgcagaggctggtgctgatattgtagctccttctgatatgatggatggtagagttgcagcaatcagagaggctcttgatgaggcaggatattataatacaatgattatgtcttattctgttaagttcgcctcttctttttatgctccatttagggaagcggcatgctcttctccatctgttggaaataggaaatcctatcaaatggatccagctaatgctcgtgaggctattcgtgaggcagagcttgatgttactgaaggaactgactttttaatggttaaacccgctttaccttatttagacattattaaaacagtaaaagatgaatttaatctgcctttggtaacttataatgtaagtggcgaattttcaatgattatggcaggaatagaaaatggctatttgactgaagactctattatggaatccttattatgcattaaaagagcaggtgcagacttgattattagcaatttcgctccatatgctttagatcatttataa

SEQ ID NO: 1559 - DNA, 1101 bp, Methanobrevibacter ruminantium
  source 1..1101: mol_type = genomic DNA
atgacaaatacaattggaaaaatctttagaattactagttttggttctagtcatggaaaagcacttggagctattgtagacggatgtccagctaatctagaacttagtgaagaagatatacaaattgaattaaataaacgcagaccaggaaccagtgctttaacaactgcaagaaaagaacaggaccaagtggaaatattatcaggagtatttgaaggaaaaacagatggaactccaataactggagttgtatacaatacaaatcaaaaatctaaagattattcatcacttaagaacactccaagaccaggacatggagattactgctggatagaaagatacggaaactacgactataacggaggaggtcgtggaagcggtagaattaccataggccatgtaatcggcggagctatagcaaaaaagcttcttagtgcaaaaggaataaaaataatctcccatgttgtgcaaatcggagatataagagcaaaggaagcaaatattgaatcacttgaagaaaacatcacaaagaataatgtaagatgtggagaccttgaagtggccaagcttatggaagatttgattttatctaaaaaggaagaaggaaactctgtagggggagttgttgaaacaattgctttaggagttccagcaggacttggagaacctgtttttggaaaaatagatggagatttagcaaaagtcctaatgaacatcaatgctgttaaaggagtggaaatagggttaggatttggtgttgcgaccaaaacagcaaaagaaatcaatgatgaattctattacgaaagagatgatgttaaaactaaaacaaacaattctggaggaattcttggaggaatgacaaatggaatgccaattgtatcaagaattgcaattaagcctactccttcaatttctcaaattcaagaaaccattgatttaaataaaaaggaaaacactacaattgaaattaaaggtagacatgatccatgcatctgtccaagagttactgcagtggctgaatcagcaactgcaatagttttagcagaccatatgattcgttcaggatttatccatcctacaaatttagaaaaaagagtttaa

SEQ ID NO: 1560 - DNA, 942 bp, Methanobrevibacter ruminantium
  source 1..942: mol_type = genomic DNA
atgaaaataacatttttaggttctggtggaggaagatttaccaccattagtcaaaaaagaatgactgggggattcaggcttgataatttcggtggaaagaattatcatatcgacccaggtccaggtgcccttgtcaggtcttaccaatttggtgtaaacccaactaaaattgatggaatttatatttcccattcacacactgatcattatggtgatgcagagattcttattgaagcgatgactcgtggaatgacaaagaataatgggattattatggggagcaggtctgtttttgaaaagtataagcgttggggtcctgcaatttctaattaccatagaagcaattccaagaatctgattttggttccaaataaaatcaaacgtttccctgatttttcaataaagggaactgacaccattcatggagatcctacaggtgtgggctttcagatggaagcaaataacttaaaggtttcctacacttccgatacaagatattttgaggaattgaagaaatatcataagggtgcagatatattgataggaagcgttttaagacatgatgatgatgctatcaagggacatatgtgtactgatgactttataaatttggttggtgacgttaagccaaaattagctataatgactcattttggatttaagatgattgctgccaatccggttgaacaggcaataaaggtttcaaagaacacaggtgttagaactcttgctgcatttgatggaatgttggtggatgttaatgaaaaatatcctcaaaagtctcgtatgttaagacttaaggacagatttgcagctcatatgaaacaagaagacgtttattcaactaattttaaagttaaatcaaataaaagaaataaaatgagaaataagaagaaatattataataataatgattctaataattcttttagctctaaataa

SEQ ID NO: 1561 - DNA, 927 bp, Methanobrevibacter ruminantium
  source 1..927: mol_type = genomic DNA
atgagtttaattattgcttatgtaggaaaaaaaggatgtgtaatggcggcggataagcgtagaattgcttatttcggtttaaaagaacaacgtgaaattttagaacaagaaatttactctggtgaaattcataatgatgaagaattatatgctagggctgaagagttagatgttaatttaaaagttacagataatgcatgtaaagtaaaaagcattgaaaatgttgctattggtgaagtaagctctagaggaacaatggaaactaaaaggaaaagaatttatggtacaagcaatggttttaaaatcattgaactttccggttctcatgtattaaactctaaaagaggagtctcttcaataatcgtatttggtaataaagttactaaatcattagctaataaaatgattcaggaaagatggaagcctagtttcagtttaaaatatatgggagagatatttggagagattctaaaggacattgctgaaatcactccttctgtaggtaaggattatgatgtgataattgaaaaaaataatttggcaaagagccaagttcaagattatatagatgaagtcgctgaaagggacgttaaagttttagctaaattcagggcacaacttagagagcagttgatggaacagaatgaaaatataaaattggcttcaactattattgaagagggatccgttggcgaaatcgttataattgatgataccttaattgaagtgaagttaaatcctgatgttagggcatttgatgttaattggaaggtccttgcaggtcctggtgaaaatgttttaatggttgtggacgactctgaaggtcttgataagggcgatgagatagtaattgaagacgaagtcttatgcgttaagaagaataaggctaatttgaaatgtgatataattttatgtcatcttgaataa

SEQ ID NO: 1562 - DNA, 381 bp, Methanobrevibacter ruminantium
  source 1..381: mol_type = genomic DNA
atggtaaaaattaatgaaatttacagatgcaaccactgcggaaatataatcgaaggaatcgttgaaggtgccggagaacttgtatgctgtggagaacctatggaactcttagaacctagacaattagaggaaggtggagtaaaacacatccctgtagttactaaagaagatggaaaaattgtagttaaaatgggagaagttgaacaccctatgttagaagaacactacattaactttgtccaattaaccattggagatcaagtcttccgtgctaacttaaaaccaggagaagaaccaaaagcagtatttgacattaacgctgaaattgaagacataaaagcaatcgaatattgtaacatccacggcttatggcatgcataa

SEQ ID NO: 1563 - DNA, 510 bp, Methanobrevibacter ruminantium
  source 1..510: mol_type = genomic DNA
atgaaaaagaatatttttttaattgcaataatactaattgcagttgttgcagttagtggatgtataaatagccctatggataatatcaataacaatatgaaggaattgaacactgatattaccgaaggagacaccgattataattctgctatcaattatatcaataataaggactttattagtggaactgacaacatccaaattgcaaaagacaaatttaatgatgctgatgagaagctttcaaatattgagcaatataaatctagcctaaacgagagcatttatcttgattatttatatttgattaaagaggaagtttccattaaaagacaagccagcgatgaactttatttggctttacaatattatacaaacaatgatttcagctctggaaattcatatgcccaatcagcaaattcattaatgaatcaggctaaagttttacaagatgaaagaaaccaaattgttgaaaacaatcctgatctatttaaaaaagcaggaataatctga

SEQ ID NO: 1564 - DNA, 2343 bp, Methanobrevibacter ruminantium
  source 1..2343: mol_type = genomic DNA
atgaaagaagcatgccctaaatgtaacggaactggtttagtagcagtggatacaaagatatgcgatgcatgtgatggaacaggatatgaagacacttttgaaatgaaaaaccatttcaaaggagttaccagcaatgcaagagcaaaatttgatttggatgcagatcaagacattccatgtgaagtatgcaatggaaaaggtgttgtggatgtttttgaagactgtccctactgtaagggaacaggccaaatcaacgtatgcaacagctgtggaaaggcaattccagatgataaggattactgtgacgaatgcaatgaaaagcagcttgaagaaaagatgaataaagtaaaggaaagactggaaaatcctaaaaagcttaaagtcgagtcagacattgaaggaaaggaaatcgtatacgaattagacggactatgtgatatgagtgacttggaaatcaattcactttacaaaggaaaagtcacccgtgtagaaagatacggtgtttttgtaagccttaacaatcaggtttggggattgatgagaaccagcaaccctcacaataaggtcggagacaccatctttgttaggatttcacagattaaagagagaaaacgtgaagttgatatggttccggcacatgtctttaaaggagaatatgtagtcaagaaactatccaagaacattggaagaaccaaaatcgaaacccttgatgaaagctctcttaaaagcattgttaaagtatacggagaagtcatacaaatccaacagacatcagggccaaccatctttacaatcactgacgagacttcaatcacttgggctgctgcctttaatgagcctggagttagaatgtatcctgaaattgaagtgggagacattgttgaggtcattggagaagtcaatcagcacaatggagaaatacaaatcgaatctgaatccatctccaaattagatagtgatgaagctgaagcaatgaaagaattgattgacattgctttagataaaaaagcagaacctgatgatgttgatttcttaattgaaagccctgttcttgaaagattaaagccaaaaatgagagaggctgcaaaagtcattagaagagcagtgctggatggaagatccatacttgtaaggcaccataacgatgcagacggaatctgttcaggtgtggcaatagaaaaagcagtaattccatatttaaaggaaaacaatccagacaatgatgcagaataccactactttaaaaggtctccgagcaaagccccattctatgaattggaagatgttgtaaaggacttgtcctttgcacttgaggaccttgacaggcatgggcaaaaactgcctcttattgttcttttagataacgggtctacagaagaggatattgttgcattgatgcaagctaaaatatatgacattgaaatcgtggttattgaccaccactccccaggaaatctaattacaaaaaccttaaggaacggagaaacagtctcaggagatgtggaatctgctccagaagacattatgggaggaactgtagcagttgacgaatatgtggacacacatgttaacccatatcttgtcggaggagactcgcagattacagcaggcgcattggcaactgaagtggctcatttcatcaatccagaaattgaagacttaatcaagcaccttccaggaattgcagcattaggtgaccatgcagaatcagatgaagcagaacagtatgtggaacttgcagcaagtaaaggctactcaagagacagattaaagcagattgctgagtgcattgactttgaagcttacttcttaagattcatgaacggaagaggcataatcgataccatcttaggtgttgacaatattgacaaacatcctaaaatggttgatgcattgtataaagagtatttaagacgtgttgacactcaaatgaaagcagcgttgccgaatataaaaagagtgaaattagacaatggcatctactttaatgttttagatgttgaaaaatacgcacataagtttactttcccagcaccaggaaaaacctgcggatttgtccatgacaagattgtaaaggaaatcggcgatgacaagcctatcatcacattaggacatggcccagactttggtgttttaagagcaacagacacagtacaccagctctttggatttaatgtgaataatattgtaatcagtcttgcagataagatacctcaagcaggtattgatggaggaggccacgaatgtgcaggatccattaaatatattgagggtcttggcaaacaggtattgactgaacttctcaatgaagtcagtgaaatgactgacagttctaagaattaa

SEQ ID NO: 1565 - DNA, 375 bp, Methanobrevibacter ruminantium
  source 1..375: mol_type = genomic DNA
atgtacagtgataaagttatggatcattttgcaaatccaagaaactctggcgaaattgaaaatgcaagtggtgaaggtactgttggaaatcctacttgtggagatttaatgacaatctatatagatgttgatgatgatgaagtaattcaggatattaagtttaaaacattcggctgtggtgctgcaattgcaacaagcagtatgataactgaaattgcaaaaggaatggctgttgatgaagctttaaaaatcactagaaatgatgtagcagatgctttagatggtcttccgccaattaagatgcactgttccaacttagctgctgatgctttagctgaagcaattaaggattataaggaaaagcaagaagaataa

SEQ ID NO: 1566 - DNA, 1209 bp, Methanobrevibacter ruminantium
  source 1..1209: mol_type = genomic DNA
atgatttatatggacaattctgcaacttctccagttaaagaagaagttttcaatgcaatggttccttacttaaaggaagaattcggaaatccttctgccttttattcattaggtagaagtgcaaaaaaagcagttgaaactgcacgtgaaaatgtggctaaattaatcaatgctgagacaagagaaatcatctttacaagtgggggtactgaatccgacaatatggctataaagggcatagcctttaaattggaagataaaggaaagcatatcattacaacagtaatcgagcatcctgcagtacttaggacctgcgaatacctagaaacaaaaggctttgaagtgacttatcttccagttaaggaaaatggtattcttgatattgaagacttaaaggaagcaatcagagacgataccatcttaatttcagtaatgcatgcaaataatgaaattggaactatccagcctattgaagaggtcggtggaattgcaaaggaaaaaggcatcactttccatgtggatgctgttcaatctgttggaaaaatccctgttgatgtaaaaaaagcaaatattgacttattatccatctcttcccataagctttatggtccaaagggagtaggtgcgctattcattagaaaaggagtaaggattgaaaccttgattcatgggggaggccaagaaaacaatctcagatcaggtactgaaaacgttccaggaattgttggattcggtaaggctgcagagattgcttataataatttggatgcaaatattgaaaagcttcaagaaatcagagaccttcttataggagaggtattggataaggtcccagaggcatatttgaatggtgatagagaggagagactccctaacaatgcaagcttcagatttgcagcgattgaaggtgaagggctaatcctaagattggatgcgaaaggaattaatggggcaacaggttctgcttgttcttctaaaaacctaaaggcatcttatgttttaagcgctcttggattggaggatgctgaaattcacggctcattaagattatccttaggagtagagaattcaatcgaagatgttgaagttgtatcagatgccattgcagatgtggttggaagcttaagacagatgtctcctttatgggacaatgagaaaaacgaatccttagaattggatgaatccaaatttacagatgtggatcattag

SEQ ID NO: 1567 - DNA, 1320 bp, Methanobrevibacter ruminantium
  source 1..1320: mol_type = genomic DNA
atgacaaataaaaattatggattaagtactttaggattacacgcaggacaagaagaaccagacccagcaaccggtgcaagagccgttccaatctatcagacttcgtcttatgtattcagcaatacggatgaggcagctaacagatttgcacttcaggaatttggtcaaatctacagcagattaactaaccctacttcagatgcatttgaagcaagaatcgctgctattgaaggaggaaattccgctatctctgctgcaagtggtttggctgcaatcagttatgctttgttaaacattacaccgcctggtgatgagatcgtatctgcaaacaacctttatggtggaacataccaattgtttgattacactttcaaggatttggcacgtaatgttatctttgtagattcccaggattatgatgcctttgaagctgcaattaccgataagaccaaggcaatttatgcagaatcattaggaaaccctaagttggatgttcctgactttgaaagattagctgaaattgcacattctcatgacattcctttaatcatcgataacaccgctgcagtagggcttgtaagacctttagaacatggtgctgatgtcattgcagcatctgcaactaagtttgtaggcggacatggtactgcagtaggaggatatattgtagacagcggaaaattcaattggggaaacggcaagttccctacaatatctgagccagatccaagttaccatggaataaactattgggaaatattcggagatttcccaggtcttggaaacattgcatataccttacgtatcagggcaagattattaagggatttaggtgcaacccttgcgccagttcatagcttcatattcttgcaaggattggaaaccttaacaatcagaatggaaaaacattctgaaaatgctttaaaagtagctcaattcttggataatcatcctgcagtcagttgggtaaactatccaggtcttgaacatcatccaagccatgaaactgctaaaaaatatttaggtgacaaattcggtgctctcattgctttcggtattaaaggaggtcttgaagctggtaaggagtttattgataatgttgaattattatccttgcttgcaaatattggagacgctaaaagtttggttatccacccggcttccactactcaccagcaattaactccagaagaacaggaaagcactggtgttactcaagatttaatccgtttatccattggtttagaggatgttgacgacattattgctgatatagatcaagcattagcaaaagtaagtgaaaaattcggtgatgattaa

SEQ ID NO: 1568 - DNA, 2100 bp, Methanobrevibacter ruminantium
  source 1..2100: mol_type = genomic DNA
atgactgatcttaataagatgtttaatccagactctgttgctattgttggagcttccaactctgaaggaaaagttggttatattattgtaaataatatgatcaatgatggttttaaaggaaatatatatccaattaaccctaaagatgatgaaattcaaggattaaaagcatataaaaatgtatctgacttaccagaggtacccgaccttgtaattgtttccattcctagtgttttagtaaaccctgtcgttgaagaatgtggtgaattcggcgttaaaaacatggtagtcatcactgcaggatttaaggaaattggcggagacggtgtggaaagagaaaaccagcttgtagctttaggagaaaaatatggcataaatattattggtcctaacagtttaggtatcaccgattcacacactccattaaatgcttcattttcacagatcatgcctcctgaaggaaatattgcattcatttcccaaagtggagctatgatggtagctattatcgattggagcgtaacttccggaattggtttcagtaagattatcagtttaggaaacaaggctggaacaaccgaaatcgagcttatcgaatacttatcatatgacgatgagactgcggtggttatctgttacttagaatcaatcactgaagatgacgacttcgttagaaccttaagaaaagtgtcctataagaaaccggtcattatcttgaaatccggttccagttctgctggtgctgaagctgcatcctcacataccggtgcattggcaggtagtgacattgcgtttgacacagcattcaagcaatctggtgtatttagagtaacaactatggatgaattgtttgatgtcggtttggcattctccaaatgtccattgcctactggacgtaaccttgccatcattacaaatgcaggtggtggaggagtattgtctgtagatgctatggaaagatataatttggatttagttaaatttgatgagaagaccaatgcaagacttaaagaggcagttcctgaagagggaagtattaaaaaccctattgatgttttaggtgacgctcctgttataagatataaggaatctttagaagctgttttagattctgatgatgttgacggattggttgtcatggtatgtcctactgcatctgcagatgctgatggaattgccgatgcacttgttgaaggtgcaagtggatttgacaagccggtcattgctgttaacatgggtggacctatatttgaaaatgctaacgatgtcttaagggataatggaattcctacctatgtattccctgaaactgctgtaaaggtatttgactaccttgcaagatttgctgcagttcaagatagaaattatgatgatcctgtaggagagcttgatgacgttgataaggaagctgttgaagaaatattcgctaaagtaaaagctgaagaaagagacactttgcttggtagtgaagcttatgctgtagctgaagcttatggaattgaagcagctcctataaagcttgcaacttccgctgaagaggcaggtcaattggctgaagagatggaattccctgttgtgcttaagattgcatctgataagatcttgcacaaatcagacattggcggtgtaaaggtaggcatccaatccaaagaggaagcagaagaagtcttcgaagagatcatggctaatgctaagaaagctcacccagatattgttccaaacggtgtggaagttcaaaagatgatggattccggtatagaagttcttgttggaatggttagggattcacaatttggtcctatgattgcatttggtatgggtggagttcttgtaaaccttttagaggatgtttcatttaaattggctaaaggcttgaccactgatgagattgccgaacagatggaaagcactaaagttatgggacttcttaaaggtttcagaggagaggctcctggagatattgaagcagttaaatccgcaatcattagaattgcaaaactcactttagacttccctgaaatctctgaacttgatataaaccctatctttgtatatgagaaaggatcaagtgctttggatattaagattaagttggcttaa

SEQ ID NO: 1569 - DNA, 1443 bp, Methanobrevibacter ruminantium
  source 1..1443: mol_type = genomic DNA
atgacaagggaaaaaggagagttgaacacattattcgcagataagatcaaactctttgtatgtggccctacagtttatgatgatgctcatataggtcatggaaggacctacatatcctttgatacaatcaagaggtatcttgaatttaagggatattcagtattctacttgcaaaacattacagatattgatgataagattattaatcgtgcaaaagaaagcggcatagattctaaatacttagctgagaagtttgaaaagagatttatagaagatatggctgcattaaatgttacaagcgtaaactattttgcaagggcaactgaccacatagaagaaatcttagatcagatccaaaggcttatagataagggatatgcttatgttactgaaactggagtctactttgaagttgccaagtttgaagattatggaaaattgtccaatcgtaaattggaagatttagaaacccataggatagatattgacagttccaagaaaagtccacatgactttgccttatggaaaaatagggaagctccagaatatgcaggagaacctgtttgggattccccttggggtaaaggaagacctggctggcatattgaagatactgcaatcactgaaaagtactttggccctcaatatgacattcatggaggaggacttgaccttattttccctcaccatgactctgagattgctcaaatggaagctgtctctggcaaggagcctcttgttcaatattggatgcatacaggattcttaaatgtttcaggagaaaagatgtctaagtctcttggtaatttcattacaatcagagaattattgaaggaatactctggagacacttttaggctatttgttcttttaacccattataggagcccaattgacttcagtgaagtaagcttgcatcaggctgaaaggaatgtctctagaatcaagaattatcttgaaaatcttgatgagaaaataaatgacatatttgaaaagggaaatctctctgaagaccttcttaaattagcagaattggaagaaaatgaatttgatgaagaattaatcaattttgattatttcaaatcaaattaccctgccttaaaagaaggagtaaatgagtttttcacaagtatggatgatgatttcagcactccaaaggcaattgctgcaattttctcatttataaagcaatcaaataaggacttagaagaagatgatttgattatagatgatcttttagcaattaaacactggtttaaggacattagccaaattttaggtatcgatttctttgtttataaggacgaaaccagtggaaatgaagcggaattgttagatataattgctgatgttcgtttaaaattaagagctgaaaagaagtatgatttgtctgatgaaattagagataagcttatatcattaggcattgaagtaagtgattaa

SEQ ID NO: 1570 - DNA, 381 bp, Methanobrevibacter ruminantium
  source 1..381: mol_type = genomic DNA
atgaaaccaccttgtgaaatggtagtatggtatatcataccagccataagatctgaattagctaaagacttattaaaattaggcatgaaacagaaaaagatatctgaattaatggatattactcaaccagctgtatcccagtatttaactgataaaagaggcagcggaattgggtttaatgatgatgttaaggcattgattcaagaatttgctaatgacttaaatgatggtaccgcaaccaaatttgatataattccacgtacctgttatatatgtaaaagaatcaaaacagaagacgtaatctgtcaaatccataaggaaaaaggacatatgcctgcagattgccaagcatgtttaggttcagaggcacatttattataa

SEQ ID NO: 1571 - DNA, 741 bp, Methanobrevibacter ruminantium
  source 1..741: mol_type = genomic DNA
atgtttgatgatttaaaagatgatctgcaagctgcaaaagcaagagaccctgctgcaagaagtagcttagagattctttgctgttatcctggaatatgggctattcttttgcacagatggaatcattggctttggactcataatttgccattttggggaagattcttctcacagatttcaagattcctcacaggaattgaaatccaccctggtgctcaaataggaaaaagagtgtttattgatcatggaatgggaattgtaatcggtgagacaactattgttggtgatgatgttttgatttaccaaggagtcgttcttggtggaacaagtttaagcaaaggaaaaagacaccctactgttgaagatgctgttgtaataggctccggagcaaaggttttaggaaacattacattaggatgttcctctaaaattggagctggagcagtcgtattgcaggatgttccaaggggagctacagcagttggtgttccaagcagaatcattcatgaagaccgtaaatgtgttttggatttagagcacgaattcccagaccctgtctcatcagctattgatttgcttttcgaacgtcaggaagagcttgaaaaaagaatcaatattctaagccactttcacgatatcgatcatgttgaatttagtcatgaccctaaagttgaagaggtatttaagggcgctgatgaaaagtctttttataagttgaataatattattgaagatgaatga

SEQ ID NO: 1572 - DNA, 957 bp, Methanobrevibacter ruminantium
  source 1..957: mol_type = genomic DNA
atggtgaatattccagaactaaaaagaggcatagctaacgatatgactgaagctattggaaacactcctcttgtaagattaaacagattaacagaaggattagaagcagaagtgcttgtaaaagtagaatcttttaatcctgtaagtagtattaaagatcgtatagcagtaaacttaattgaaactgcagagaaagacggattgcttaaggaagattcagtaattattgaacctaccagcggtaacactggtattggtctttcctttgtagcagctgcaaaaggctataaattaattttaaccatgcctgagaccatgtctattgaaagaagaaagcttttagcagtcttcggtgctgaaattgtcctcactccaggtagtgaaggtatgggcggagctattgctaaggctaaagagttggctgaaagcactccaaattcatttatgccacagcagtttgaaaacaaggcaaactctgaaatacacagattgactacaggtcctgaaatctggagggacactgatggtgaagtggatattgtcgtatctgcagctggaaccggcggaactgtaacaggtattgctcaatacattaagcctttaaaggctgaatttaaggcagttgctgtagagcctgcaagttctcagactttaggaaaaggagaaaaaggacctcataaaatccaaggtatcggaccaggtttcgttccagatgtattggatgtggacctaattgatgaggtcgttccagttaaggatgaagacgctggaaacactcttcttagacttgcaagagaagaaggtatctttacaggtatatcttcaggtgcagctacttgggccggattagagcttgctaaacgtcctgaaaacaaaggaaaaactattgtagttatcttgccagacactggtgagagatacttgtctactgaatgggtctttggagacttattctaa

SEQ ID NO: 1573 - DNA, 606 bp, Methanobrevibacter ruminantium
  source 1..606: mol_type = genomic DNA
atgactctctttaaatacattataacttcaagccctattggagaaataacaatcatttggaggaaaaaaccacaattccaaattgaagaaattattatttccaatccaaatcagacatcatcacaaatagctaaagaaaaatacgaaaaagaaggagaattagctattaataaaaagtcaaaacaattaaataaggtcttaagggaaatggagaattactttaatgaaaaggactataaattctcccttaaatatcttaatctagataaattaaaaccatttcaaagagctgtgcttgaagctgaattcaagactgaaaaaggaactgtaaatacctataaagaccttgcaaaggaaattggaagtcctaaagcatatagggcagttggaagtgcacttgctaaaaatccatttccaatcatcattccatgccatagaacagtaaaaggagataggacaattggaggattcagcggatttgcaggaggtcttgaatctaagaaaacacttcttgaattggatggtttaatgattcaaggcaaaaaaatagttggagatagtcctataatttcactggataagacttctcaaacaaaactggtttaa

SEQ ID NO: 1574 - DNA, 648 bp, Methanobrevibacter ruminantium
  source 1..648: mol_type = genomic DNA
atgagaggatttaaaatgaatgatgaagagaaaataagagagatctttaggagattaaatgaagtttatactatccgtacttttcatgaccatgacccatacaaggtattgattagaacaattttatctcaaaggacaagggatgaaaatacagatcaagctgcaaacgctttatttgaagtttatccagatatttacgcagttgctgatgctcctgttgagcatgttcaagagctaatcaagcctgcaggattttatagggtaaaggcagctcgtattttagaggtttcaaggatattgatagaccaatatggcggggaagttccaagagaaatggatgagatgctaaagcttccaggtgtagggagaaaaacagctaattgtgtgattgtttttgcattccaggatgcagctattcctgttgatactcatgttcatagaatatccaacaggtggggaattgctgatacaaaggatccagaggaaaccgaacaggttttaatggaaaaggttccaaaggacttatgggttgacttgaatgatttgatggttcagtttggtcagactatctgcaggcctattggccctcaatgtgataaatgtcctattagtgatctttgtgactatgatgtgagtaaattagaatag

SEQ ID NO: 1575 - DNA, 1368 bp, Methanobrevibacter ruminantium
  source 1..1368: mol_type = genomic DNA
atgaatcttaaaataaaaaacttttctaaaatcaatggaactgttaaagcgccatcctctaaaagctatagtcatagggcagttattcttgcctctttatctgaaggcaaatccaagctctttgatgtattgtactctgaagatgtcctatcaaccattagggcatgtgaagcccttggggcaaggatagataaaaagaaagaaatcatcttaaagggagataaaagtcagacagttgactatttggaagtttatggaactgggggtaaattgcataatgttagtgacgacccttcttctgacatgattgatcttgcaaactctggaaccacacttagaatcatgacaagcgtagcagccttatctgacaatgaagtgatatttacaggtgacgattcacttaagacaaggcctatgggtgcattgattgatgcattggagactttaggtgttaagatagagtcattgaatgaaaacaataaggctcctcttaagatttatccaggatatgaaggaggacagacagacattttgggaagcatcagctctcaatttatctcttccattcttatttctgctcctttatctgagaatggtgtggagcttgaggtttatcctgaatttgtatcaaagccttatgttgacatgaccatttccattttggaaaaattcggaatatccgttgaagaggaagagtatcaattccatgaaacctgcaagaaagaacatactgattgtttgggggttaaattcattgtaaagcctcaaaaatacattgcaagtgattatattgttgaaggagatttctcatctgcatcttatttgcttgcagcaacagctattgcaggtggatatataagagttcaaaacttattcgctgattccaagcagggagataagttaattctggatattttagaggaaatgggtgcaaatgtcactgtttttgatgattatgtttctttaaggtctgatggaaacttaaagggaattgatgtaaacctatcaaatgctccagacttactccttactgtagcggttcttggagcacttgcagaaggaaaaacaaccatatctggagtaaagcatggcagattaaaggaaaccgataggatagatactacatgcagggaacttgaaaaattaggatgcaaacttgaggaatttgaagatggaatgactatctacggaaatacaatttcagatggaattgtagagtctcatggagaccatagattggctatggcattttcattgattggattgaaacatgatgttgaagtggaaaatggcgaatgctttgatgtttcattccctaattttatagaggctatggcagagattggaatagatttggagcttaaataa

SEQ ID NO: 1576 - DNA, 1620 bp, Methanobrevibacter ruminantium
  source 1..1620: mol_type = genomic DNA
atgcaaagaaagacattatcacgttttgatgaaattgtaaaaattcttaggaaatatgatatggataaggttttaggccaaaccacccgtaataggataagcccatttagaagtggatcagaaaataaagaattattaaaggaagactttccagaaagattaagattgacattgcaagagcttggaaccacatttatcaaatttggccaattgttaagcacaaggcctgatttggttggagagagaatcagcgaagaactttcacagctccatgatgataatcctcctattgactttgaggaaattaaggtaattatcgaagaggatcttggaggaaatctaaaagatttttttacagagttttccgatacagcccttgctacagcttcaatcgctcaagtccatgaggctaaactgcatagtggcgaaagggtagcggttaaggtacaaaaaaccaatgttcaagaaatcgttgaaactgacttgaatataatgaaattccttgctaatgaatcagacagattcaataccacctttaagcatcttaatcttcccgctgtcgttaaggaatttgacaggtccattcataaggaaatggattttgacaatgaactgatgaacatcagacatttaagagacaatttcattcataatgataagatcattgttccaactatttatccagactattcctctgaaagagtcttgactatggaatatgttgatggggtcaaattatctgaagttattgcaggggatgatccaaaatataataagatactcattgcagataggatggttcgtgcttattttaaacaaattttccttgacggatttttccatgcagaccctcatcctggaaatattttcattacagatgacaattccatatgtttcattgattttggaatgatgggagttcttgatgaaaacttcagacaagatttggctgaattgatgatttgtttctcaaatcgtgacattgatgggctaatcaatcagttaatttatatgaatattctaaatgttaaaacagacattagcattttaaaaggtgaccttaacgacttatttgcaaagtattatggggtagagctcagtcgttttaatggtgttattgaggatttgctctttttaatgcaaaaatatgatgtgatgttgccaaatgagtttgttctaatggcaagaggattgtcaatggttgaaaatattggtttgagtttagatccagatattgatattgtagaaatcattaagccatttgcccgcaagcttatgattcaaaagtataatcctaagaaaatggttcataatgctaggaacacctttttcactgttgagcatatgctaagagcattgccaagccttgtttcaaaaaccttctataaggttgatgaaggggagctgactataaatattgaagtcaagcagataagtgagataactaaccagatttcccttgctatcattattgctgctcttgttataggttcttcattggcaatgatggttgaggcagggccaaagctctttggactgcctttgcttggttttgtaggatttacaataagtttggcgcttggagtctttactgttgttaggtattttatggatttttaa

SEQ ID NO: 1577 - DNA, 411 bp, Methanobrevibacter ruminantium
  source 1..411: mol_type = genomic DNA
atgagtcttgataggtttatagaagcacaaaaagaagattatgacatggcttttagagaaatcaacaatggtagaaagagaaatcactatatgtggtatatatttcctcaaatcaaaggcttaggccatagttccacttccagatattatggaattgacggtcttgaagaagcaaaggaatatatggaaaatgagtatttaagcaataatctaataaaaatttctcaaaaattattggatttggagactgatgaccctatagagatatttgggtctactgacagcaagaagctaaagagttccatgactttatttgaattggttagtgataatgaggtcttttctttggttttagaaaagtattttgatggaaatagggatgagaggactttagatttagcaaataaataa

SEQ ID NO: 1578 - DNA, 786 bp, Methanobrevibacter ruminantium
  source 1..786: mol_type = genomic DNA
atgaaaggaatcataggagcaattgccggagacataattggatctactcacgagtttcatccaattaaaactaaagacttttctctttttaataaaaaatctcattttacagacgatactgtcatgactttagcgattgcagattggttaattgaagataagaattcaagagatgtattaattcaaaaattaaagttttatggtcagaaatatcctaatgcaggatatggaagaatgtttatgcagtgggtgctgtcagagaatccattgccttatggaagctggggaaatggctctgccatgagagtatctcctgttgcatgggctggagagagcctggaggaagttcaacaattggctaggctgtcttctgaggttactcataatcatcctgaaggaatcaaaggagctcttgccactgcagatgccatttatttggcaaggataggttcatctaaggaagaaattaaggagcatattgaaataagatatgattatgacttggatagaacagttgatgagataaggccaggctataagtttgatgtttcctgtgcaggatgtgttccagaatcaatcatctgctttttagaggccgatgactttgaagacaccattagaaacactgtttctttaggaggagatgcagatacaatggctgctattgcaggacctattgcagctgcatactgggaagttcctaggaatattgcatataaatcaattcataggttggattataggcttttgaatgttttaattaaatttgaagacaagtttttatag

SEQ ID NO: 1579 - DNA, 729 bp, Methanobrevibacter ruminantium
  source 1..729: mol_type = genomic DNA
atgtctaaaagaatcatttttattttgatgttgattgccttacttggcttatctgctgttgcagcagttgacgctgacccattaactgataatcaacttaatccaactattttttatcttgattttaatcatggcgctttaaatgatggttttaaaaaagaatttgatctctttgagtatgttccaacatttgatagcgtagacctttacaacgatggagaaaatgtctctgtaagcttttatagtttaaatcctaccattgatgtggataacttaaatgatgagattatagattatacatttgaggttatggaagatcctaaagccaatataactacattaaaggatggaataaggaacatatgctctgagtatggtgcagatgatgtcaagattaatgtggattctgtaattggagaggatgaaattccagttatttttacaactgaaggagattccatgcttcctaccataaaaagtggagataaggtcttggtgaataagagtcataatattcacgttggaaaccttgtttcagcaaactcttcagagtatggccctatctgtaaaagggttgctgatatagatggagattcagtttatcttgtcagtgacaataagaaggttactcgcgagtattatgatgattattatgtggaatataagggaatcactacatgggttaatattgatgatattgatggtgtgattattgacattatgaattaa

SEQ ID NO: 1580 - DNA, 222 bp, Methanobrevibacter ruminantium
  source 1..222: mol_type = genomic DNA
atggttgaaattactagcaaaacaaaatatatggatctcttaaatgaatatcctttgcttaaaacagatttggttaagaaaaatcctaagtttggatttttggtaactccaatgggtaaaattagcttatgggaatctgacctttccgaagtcagtgaacgtgctgaaatgactgttgaagatactgtaaatttatttattgaattagtaaactcttattaa

SEQ ID NO: 1581 - DNA, 1059 bp, Methanobrevibacter ruminantium
  source 1..1059: mol_type = genomic DNA
atgaagcatagattaaatttagataataaagacccaaattatattttgttgaaagaaatatttaaaattatggattctagaaaatccaaaagtatattagcatcctatggatttaaaaacttaaatagaacaatatttacttttaaaattatatttataagtatgttctttggaattgacattccattcattttaaacgagcttaaatccaaaaaagaacttcgcaaatactttaatatttctgaagttttgactgcagatcaagtttataaaattttttcagaaataaactctgaaaaacttataaaatgtttaaacagaatcttaaactcaaggaatatggttaaaagaataggaaaaaagacttttattgttgatgcgaccccagtggacgtagatattaatttccacagaaataaaaagactaaagaacatctggaaaaaattaatctcaaatggagttattcatcctctaaaggttattatattggatttaaagcaactgttgtattagattatgattctatgaatcctgtttgtattttagtccactctggagctccaaacgatgcaaaacttttcgaagaaattttagaaaaccttcaaaaaagacgaataatcagaaaaggagacacattaatctttgataaaggatattacacctataaaaactaccaaatcggaatcagcaaatacaaaatcattcctttcatttttccaaaagaaaaattcagcagaacccgattggatgacattttaacttatccactagccgtatttaacaaaacaaagagaataatgaaagaaaaaagattatacaacagtttaaaaatggaattaatgaaaaaaatagattcatgggaaaaatttaaaccaataaggggcaaaatagaagattttttcaaattattaaaacaaggcttgaatatgagagaaatccacaaatatactccaaaatcagtagaaaaaaccgtttatctaaatgtatttttgggagcactgattatatcacaaggattttactcaaaaacgaccatacaacaattatctgaaaactaa

SEQ ID NO: 1582 - DNA, 2820 bp, Methanobrevibacter ruminantium
  source 1..2820: mol_type = genomic DNA
atgaatgcatttttaactttaattatttttattattcattttatttggaggaatattttgacaaataaagaaattcctaaagattatgaccataagagcgaagaaaaatggcagaaaaaatgggaaggagatgagatttacaaattcataggtgatggcacaagaccaagatacattatagacaccccgccgccttatccaactggacttcttcatatgggccacatcttaaattgggcttatatggatttcaatgcaagatacagaagagaaaaaggcatggatgttttattcccgcaaggttgggactgtcatggtcttccaactgaggttaaagtggaagagacacataatatcaagaaaaatgatgttacaagggcagaatttagggacatgtgtactgaattgacctcacataacattgagcttatgagaggacagatgcgctcagtaggtttctcacaagactggagcagggaatacattaccatgactccagagtacagaaaaagaacccaattgtcctttttaaagatgtatgatcagggattgatctatcagggaattcaccctgtaaactggtgtcctagatgtgagacagctatcgcttttgctgaggtggaatacagcgaaaacaccaccttcctaaactatgtcaatttcccgccagcagacgttccagaggaagtattggctaatgttgaaggcaattcatatgtaagatatgcagattgtccagacaatgctgatgcaagcgtaccaggtgtattgattgcaaccacccgtcctgagcttatgtctgcttgtgtggctgtagtggttcaccctgatgatgaaaggtacaaccaattgctcggaaaatatgtggaagttcctttatctggccaaaaagttaaaatcattgcagatgaagaggtagatatggaatacggtaccggtgcggtaatgatctgtacatttggggataagactgacgtcgcttgggtaaataaatatgatttggatgtcattgaagcaatctctgaacaaggtatcttaactgctgctgcaggcagatacgaaggaatggaacttcaggatgcaaagaaacagaccatcgaagacttaaaatctgaaggataccttacaaagcaagaggaagtggaccagaatgtaggccaatgctggagatgcaagacccctattgagattcttgtcaaaaagcaatggtttgttggcgtaaccaaattgattgaagaaagcaaaaaggcttcaaatgaaatgcgttgggttccagaacatatggaaagccgtttattaaactgggcagatgctatggaatgggattggtgtatttcaaggcaaaggttatttgcaacccctattcctgtctggtattgtaaggactgtggaaaggttatacttccaaaagaggagcaattgccaattgatcctacaatagacaagccacttgaaccttgccagtgcggatgcaacgaattcatccctgaggaagacgtattggatacatggatggacagttccatatctccattatctgttgctgactggccaaatcctggctgggaagagattttcccatcaagcattcgtccgcaaggacacgatatcatcagaacttgggcattctacacaacccttagatgcttggccctcactggccagaagccatttgatgacattgtaatcaatggtatggtattcggtgaagacggatataagatgagcaaatcccgtggaaatgtaacaggtcctgaagaggtaattgctgaatatggtgcagatcctttaagattatgggctgcaaacagtgttccaggctctgacgttgcatttgactggaaaaacatcaagcatggatacaagttcatcagaaaattctggaatgcattcagattcatcagcatgcacatctttgatgaagagtctgaaaaggccttaagcggagacatcgaatcaatcaaagcaaagctaaacccaatggacacatggatttttgcaaaattgaacaaggtaaataagatagttgatacagcattctatgactataactatgctactgcaataaatacaatcgaacagttcatttggcatgatttctgtgatgaatacattgaagctgtaaagtacagattatacaatgatgacattagtgaagagtcaaggattgcagcaaaatacactctcagaactgtaattgaagattcattaaaacttcttgctccaattgctccattctttgcagaagaggtttatcaatactttgatgaggataaaagcattcacagcactctctggccagagattgaccctaacttagactccactcaagtggaagaagacggtgatttggctattgaactaattggagaggttagaagattcaagtctgcttccaaaatcccattgaatgcagatgttgaaagcactactgtctacatcaatgagaaaacagagaaccttaaggatgtatttgaatactttgcagacgacattaaaggcactttaaagattcaagactttaaggtcacctcaggtaagcctgaagttcatgaaaaggttattgaaattgagccagacatgagtaagataggccctacctttaagaagaatgcaggtcaggtcattggattcattaaatcaaccgatccgaatgagatagctaaacagctagaggaagatggcgagatagctattgcagacggcgtcatcactgaagatttcttaaagatgaaaaaggaaattgtaggtgcaagcggtaagaaggttgacattttgcaatctgaaaaacttggcgtaattgtagaagtagttagataa

SEQ ID NO: 1583 - DNA, 357 bp, Methanobrevibacter ruminantium
  source 1..357: mol_type = genomic DNA
atgcacttattatggttttatgtagctatcgtacttgccataagtgatgaaatccatagcagaatagtatggggctatgtcagagacttttacatagtttttggcggaatcataagcagttctctagattctgtaatggaaacttggattgtccatgaaggattagaagcattattccatatgatattcgtatcaatagtcttcttttcattaaaaataggatttttagcggctttaatccatttcctattagatgtaagtcattcaatcgtcataagacatatgccatggttacctcatagagcattgcactttgttattgaatgtttattctttatagccgtatttggattatag

SEQ ID NO: 1584 - DNA, 1656 bp, Methanobrevibacter ruminantium
  source 1..1656: mol_type = genomic DNA
atgcctgttattacatttaaatatcaagatttaaaagatttaggtattgatatggaaaaagacgaacttatcaatactttgccaatgatggcaagcgatatagaggattacgatgatgaggaaataaaagtggaattcttcccaaatcgtccggacaacctttctgttgaaggggttgcaagatcatttaaaggttttttaggattggaaactggaataccaaaatatgaaatagttccatcaggtgaaaaagtcacagtaagtccggaagttgcagaaatacgtccatttatcaagtttgcaaagattgaaaatgtggacttctctggagataagatcaaatacatcatggactttcaggaaaaccttcactgggtaatcggaagggacagaaagaaagtagctatcggagttcacaatgcagatgtcattagcggaccatacaaatacatagcaactccaaaagacgaaaatgcctttgttgcccttgaaatggaagaggaaatgactccaggagaaatattgacccaacataagaaaggggaaaagtatgctcacttgattgataagtttgacaaataccctcttattctcgataaggacaatcaagtattatcaatgcctccaatcatcaatggagaacttacaaagctcacagaagacactaaaaacatcattgtggatgttactggaactgatgaaattgcagttacacaggctttagatattttatgcgcatcattcgctgaagtgggaggccaagtcaaatccatggaagtggaatatgaagatagaaccgtcataagccctgactttactccaaaagtcaagacagttcatgttgacttgacaaacgagcttatcggaggaactgacttaagccctgaagatattaagaagctccttgaaaaggctagatttgatgctaatatccttaatgagaatgaattggaagtattcatcccaccgtacagagtggatatcctccatgaagtggacattgtagaaaacattacaatccaatatcatatcaatgcagttgaagccaaattgcctgatataaccactgtagcaaatgaacataattggtttaaatctgaaaagacaatcagagagcttatggtaggacttggattccaggaaatcatgagcctaatgcttaccagcgaagaaagccaatatgaaaaaatgaatgctgaggaaatcgaccatgttcaagtctcaaagccaataacaatcagcggaacaatgattagaacaagtcttttaaatagcctaatggaatttttagaagacaacaagcatcaggaccttcctcaaaagatatttgaaataggagatgtcctatatatggatgagtcaaaagaaaacaagacaaaatccgcgaaaaaactagctggaatgatttgtcatagctctgcaaactttacagaaataaaatcaactgtttcaagcgtgctttccaatttaggatacactatggaaatatccaactcaacaaatggtagttttattccaggaagagcagctgatgtgattggtgaatctaaaagtggtaaagtggttggattctttggagaaatctctccagaggttattcgtaactttgaattagagtatccagttactgcatttgaaatagagttcaaactttaa

SEQ ID NO: 1585 - DNA, 699 bp, Methanobrevibacter ruminantium
  source 1..699: mol_type = genomic DNA
atggctcaagtctttaattatcattgcagatcttgtgatttttattttacaattcataactatcgattttgctttgatgataaaatggattgcattgaagagtatatggctttattcactgattctgattatggtaatgattccttaatcaaaggtcgtgtaattgaaaagtactgttcaagttgccagaagactgtaagaatctatcagttcactcctgactctagcatttacactacagacgcttcttttgactttttaaaattctatattcctaaaaagcatgattttcttttagaatccattgattttcataaggaattgattgaattaatagagaataatgagaatttgaaaaagattagttcttttatagaggataatcatgtttataatatttatgaattaaatttaaatcattatttgaatactaaaaggtccggattcaattcaaatcaattgataaaggatattgggctttatttagatgccattaatgataatctagatagatttgatgattttattatttgcatgaattcgactgaggataattataatttggatttggagggaaagatgtttgatatggatgtctgtcctgagtgcggagaggagttttatccaatcagtctaaagaatccttgtcctatctgtggtaaaaatacgatggaaaggtctagagaaatgattgattaa

SEQ ID NO: 1586 - DNA, 1668 bp, Methanobrevibacter ruminantium
  source 1..1668: mol_type = genomic DNA
atgcttttaaatgataaatctgaactattaaaatcattatctattttatttttgctaatagttctaattacaagttttaattcagtttatgcaaattcagataattttgatagtgctaaaagttcagatttaattttcagtgattctaataatgtttatatagaaaatattgattgttcggattctattttaattaatgtctattctaataaaaaggattctaatttaggttcctattttgtaggttctagttcagattcctatttaaaggattctaattcagattctgcatttgtagtttctaattcagaagattcctatttggaagactctaatttgaaccattctaagaattatctctctagccaatcattatcagcttctagcaagtcaaaggttattttgaccacaagcaatctaagtgctagctataagacaaagaatttcacagctaaactcactgatttaaacaaaaatccaattgcaggtgcaaaactgtcatttgtcattttatcaaagacatattacagaacaacagataaggatggcctagctagtctaatgattaatctggctccggggaaatataatatcagcactaaatttgaaggagatagcaattattcatctgctgtggttaaaaactccattacaatcagcaaaaagaagctttcaatatcaagctctgacttgtcaaagaaatatggggattcaaatagctttcaagtaaagataactgataacggcaatcctatttctgatataaaggtggctttaaagctttcagcaaagacatattataggacaagcgataagaatggcttagtgagcctgccaataaatcttataattggaaaatatattataaactcatctgtatatgataataagttttattatagcaatacaaattccaataatattattgtaagctctcaaaatccttataatctctctgtcttaaaatggggaacaaagggaaacattaaaaagaattctgttcttatgaataatattccaaaatcaagcttaaccaatgctataatctctgcttgtaataatggaactcctttaattcaatttggtaatggcagcggcaagaaggtatttattaatgcgggagttcatggacatgagctttcctctcaagcggcagcatttaaactcatcaataatatttataattcaaagaaaaagataaatggtactgtctatatagtgcctgtcttatgccctaagatgactgaacagaatgcaagatatttcaataatgtaaatttaaacagtgttgcaaataagaatggaacagtttcaaacaaactggttaatcttgctttgtctttaaaggtggatgttctcggcgatttccattgtacaaggccaaatggagatccaggtaaaaatgttgctatgggaacctcttctccaatggcatcaagtgcaactcttgctaaatatatttccaagacaacaggatattcctctttgatttataaaaaggcaggtgaagagtatcctggagctgttgaggacgtttgtaatttaaaaggaataacttcagtgacttgtgaggctctcactcctcatggtaagatagcaagtggcagtgttggaaagtcttataatatgatgatagcccttttaaagtattatgggattacaatttaa

SEQ ID NO: 1587 - DNA, 429 bp, Methanobrevibacter ruminantium
  source 1..429: mol_type = genomic DNA
atgataataaataaatctttaaaaattaattctaactctaattttcaaataattgacatcacaaatgagattagtagaatccttgatgaaataaagtttaatgaacctaattcgatttccaatggcattttaacaattttcactaaacattccacaagtgccattgttgtaaatgagaatgaaagaggactcttatctgattttgagtttattttagatgaattagtcgccgataagaataattatgctcatgatcggattgacaacaatgcctcttctcatcttaagtcatttttgctcggttcatctgagacaattccgattgtagatgggaaaatcgatttgggaacttggcaatctatcttttttgttgaattggatggtcctagaagaaataggactattgatttggtttttattggtgaataa

SEQ ID NO: 1588 - DNA, 123 bp, Methanobrevibacter ruminantium
  source 1..123: mol_type = genomic DNA
atgattacttgtaatgtttgtggccatttaaatcctccatctgctctagtctgtgaaaactgcggttctgatttgtcagacagcccagacttaggcggcggatttgatgatgacgaccggtaa

SEQ ID NO: 1589 - DNA, 519 bp, Methanobrevibacter ruminantium
  source 1..519: mol_type = genomic DNA
atgagtgaaaatcaggaagatgaaacacgaaaaaccaataattatgaatttgacaactctggatttaaggctaaggattatgatgatgcagaggagtttgaaatttgggacttggagcaaatctttaaggacagagtaaaaatattgcaggatttaaacaatgaattttgggaagcctatgaaggatccaaaacagaggcctctggcagaagaaaagacaaaaaagaaagattggaaccattaagcgtaagggtaaagccacataccaaaaggttcctaaaggaagactctatactttcagcaagggaaatcctagaaatttatgaggaattttataatggtcgtgatgattatatcaaatccttaaaaagggatgaaattcaattaaaggaagaattgtctgaaattgaagaaaaattaaagaacgctcaggaattcactgaaaaattaaatgaaatcaagattcaaaaggatcaagaaaaagaaagagctaaaaagattaagattaatattgaatag

SEQ ID NO: 1590 - DNA, 144 bp, Methanobrevibacter ruminantium
  source 1..144: mol_type = genomic DNA
atgtatagatatgagaatgatagattggcatctcatgaaatagaccccactactccttcaaagtatgtatattggaatgctaaaagacttcttgaggtcttaaaggaagtggaagctactaaaaagcaaaatcaagataaataa

SEQ ID NO: 1591 - DNA, 633 bp, Methanobrevibacter ruminantium
  source 1..633: mol_type = genomic DNA
atgtcagacaaagtaaaagcagaagaagtaaaaagtgaagaaactcaagtaaaagatgtagatttagtctttttacttgataaaagtggatccatgtatggtgtggttagagacactatcggaggattcaattcatttattgaaagagaaagagagaaaaatccgaacactcatgtgactcttgtgctttttgacactgaatataatgtattatacactagaaagccaattgctgaagtggaagaactcactaaaaatgaatactatgcagatggatgcactgcacttttagatgcaattggaacaactatcaatcgccttgataggcaagtcaacaatgatgttttatttgtaattacaactgatggattggaaaactcttcaagggaattttcaaagtccgacattaaaaacatgattgctaatcataactgggagttcttattcatcggtgcagatattgactcttatggagaggcattaactcttggaattgacgaatcccatgcagctaattatgaaaaaacttctgcaggattaggtgctttgtttgattctgttggagatgctcacgaggaaatcagtcgtggaggatctttagatgacatgagttggaaaagaagattaggttaa

SEQ ID NO: 1592 - DNA, 1614 bp, Methanobrevibacter ruminantium
  source 1..1614: mol_type = genomic DNA
atgactttggattatcaactatctgaaatcaaagaattggaaaatcaagaggaattaataagcatcattcaaaatcctaatttagatgatttaaggcgcagtgctgctgcttctaattataacttaaataataaggattttttaaaagaactggcttcaaacattaatttaaactataagatacgtcgtggtgccataaaaaatcttaatttagatgatcaatcattatttattgatattggcttaaatgatgagaatattcaaattcgccgtgcagccattaaaagaatcaccgatcaggatactctcacaattatcgctcgagaaagccttgattttgcctctcgcttgattgcagtggaaaagatttcagatattgctgtaagattggatattgcagtaaaggattcaaatgatttggtttcatttaaggcagttgatttatatccttttttaagcactttaaactctttattttacaactttaattgcagtggacgctatgttgataatgcattaaaattaattgactttattgacttgtgtctatctaaagattttaataaggaaagccatgatgctttaaataaatttaaagattatttaaatgatttaattaatattaagctttcagacttaaaggaagttccatatcatttagaaaaatcattctctcgtcgcgtattaactaatatggccatattgacatgggatttggcctttgccataattgattatacagaagatgattatgaactgttaaagatattcaatgttcaaaatgatataagaattcgcctagctgctcttaaaaagataaaatccgagcattttttaattgatattgtttcaaatttccgaacaggacactctttatatgacgataccctaggtagtttgcaaaggagattttcttacgatcttgatgaatgcctgtcaatccataagttcactcaagaagagcttattgatttggcagtatattccggatttaaaaagacccgtagaatagtggttaagtatataggggatatggaattattggaatactgggctttaaacgattcatatactggatttcgaagggaaattgtaagtttgccaaactttaataataaggagcttttatctaagctggtttttgaagatgattgtgacagagttcgcttatatgcagttcgaaaaataaatgaccaggaaattttatctaaattagctgtagatgattcctattgggctgtaagagaggaggcggtttctaaaattagagacgaatccattttaatagatcgagctttaaacgatccaaacgttatgattatcatagccgctttaaagaatcctaatctcaatgatagacaaaccataaataagataggcagttatccaaacttttgggttactaaaatcattgcagagcatcctcttacagatgatgagactttaattgacattgcactcaataatccatggaactatcctcgtgaaaaggcaatagagcgcatttatgataaagatgttttaaaatatattgcagaaaacgataaagacccttggatatctcttatctcagaatccagattaagaaaattggatgaaaatgaaaatgtgtga

SEQ ID NO: 1593 - DNA, 306 bp, Methanobrevibacter ruminantium
  source 1..306: mol_type = genomic DNA
atgacaaatcaagtaatcgaagatatggctgaagtatgtcatgatgaatgggtaaaatggagcaagaacatttctgaggaattggctcttgcaattgatgtattgaaaaaggacattgagtttgctcacgaaaagggcgttgaaaataaggaagctattgaactggttgaaaaatttgaatcccgtcttgaacgatggggtgctttatggattccatatgaggatttaactgaagaaatgaaggactctgatagaaaatatgcaattaagatgtttgacattgctgaggaagctttaaaagaataa

SEQ ID NO: 1594 - DNA, 240 bp, Methanobrevibacter ruminantium
  source 1..240: mol_type = genomic DNA
atgatagtggagaaagtttctaaaaatgaccagtgggaagattacttcataaaaagcaaatcatccaataaggaatacattatcactatagatcttttagaaggcactgtaagctgtgactgtgaagactttaagtatagaaaggaaaacttaaggtttggaggagtccgtctaagtgataaggccaatcactgcaagcacataaaaaagatcttagagattagggacgatttggactag

SEQ ID NO: 1595 - DNA, 891 bp, Methanobrevibacter ruminantium
  source 1..891: mol_type = genomic DNA
atgaaaaagatatatcttattttcccaatccttgctggaataatgtttggatctacaggaatattcgttagaacattgactgaaaacggaatagattctacaacattgcttttcttgcgtttttcaattgcaataatttatatgctaattgcaattgtcttaactgataaaagcctaataaaagtgtctaaggaagatattccactatttctaatatgtggattatgcatacttggattaaacctatgctataataattcaataaatacggtgccactgtcccttgctgcagttctcttaagcactgcccctgtatttgtagtgatatttgcatatttcatattcaatgagaagattagctccgctaaagtaatttccataattctagtgattatcggatgcatattgacaaccggactacttgaagagagcatgattccgattacaagcattggactgattagcggaatcggatctgcaatattttgggcaatctatacaatagcctctcgaaaatcaatcgataggggaaagcatacatttacaatattattctattcattgattataattacaatcgttacaataccgtttacaaactttggacaaatcgaaagctttgttttggcaaatccggccaataatataatctttttattattgcattcattgatttcatttgctctgccgtatattcttattacaatatccttaaaccatttggatgcaggaactgtggtgattctatcctctggagagcctgtagctgccctcgtctttggtgcaatagtttataatgagattccaagcccattgatgttttgtggaataattataacaattattgcattgataagcttgagtagaaaaatagagatgaaaagtgaataa

SEQ ID NO: 1596 - DNA, 513 bp, Methanobrevibacter ruminantium
  source 1..513: mol_type = genomic DNA
atgaacaataaatactttttaggaataattataataataattgcagttttagcagtgatatttgctttttcactagattatcaaacaaattatttgaatggaagttccaatggatctgtaaatactaatgaaaatagttcatttaatcaatcaaataatggtcttcaaacaaatgtccaattgacaatatctgccgaacagtcattcccaatggaaaaaatagctgaggaaattaaaacacaccctgcttatgaaggctacgatgaagatacactaaaatggctagaaacctttaatggaagcattatgtttacatcaaaggattattttgtagttatggataaaaatgatgcagaaaatctacctacaagctttgttaatgatgcatttatttatgatgacttcacatgcgatataattgaaaaacgttccttaggaaaggatttaaaagatataatatatgttaaaaatgttaaatttgaaaatcaaaggatagtgcctatgattttttaa

SEQ ID NO: 1597 - DNA, 216 bp, Methanobrevibacter ruminantium
  source 1..216: mol_type = genomic DNA
atgtttgaaaaacaaggatttatagaaaggagaatctttaaaaataaagaatcttttatgtataaggggttcttttcgcataaagaagattttattaataaaggagattttatagaaaaggaaaagagtttaaaaaagcaaaattttataaaaggcaaatatgcaaacttgatttttaaaatggatgatgattgtattattttaaaaggaggctaa

SEQ ID NO: 1598 - DNA, 1032 bp, Methanobrevibacter ruminantium
  source 1..1032: mol_type = genomic DNA
atgaaaaccactttagataataaaagcgttaaaaacaattcaagaaacagcaaaaatgtaaggagcaacttaagagacaacagaagcatgagaaccaatttaagagctagcagaaacatgaaaactggcttaggggatgttaacatccaaagcaatgatgaagctactaaaaaatgtccctcttgcggatctgttgatttcgaaatcgactacgctcgttctgaggtctcttgtaagtcttgcggtttggttcttgaagaaaacatcattgattttagccctagcggaaccgcaataaacagggacggtcaaaatctcactcaaaacggagcaccatgcagtattactaaacacgataaaggtttagctactgattttaaattagaaaaccttaaacatgacagggctcgttgggcacgtattagaagattacaaaaacaatctagagtcagcggcagtcgtgaaagaaatttagcaagggcattcagtgaattgtccttattaatttccaatctgtcccttcctagagacgttaataaagaagcggcttcaatctacagaagagctcttgaaaaggatttggtaagaggcagaagcattagcttattaatctctgcttctttatacgctgcatgcagagtatgcagagttccacgtaccttcgatgaaatcgctgaagtttcaactggcagcaaaaaatccatagctaaaaactacaggtttttaaatagagaattggctttaaaaataaggcctgcatctccagttgattacattcctagatttgcctctatgttagagttatctagcccagtagtggttaaatctattgaaataattaatgagcttaatgaaaagggattaattgcaggtaaaacccctgctggtgtagctgcagctgctttatactactcttctcgcgtgcttggagaacgcagaactcaaaaggagattgctagcgttgtaggtgtaactgaggtaacaatcaggacccgatataaggaaatgactaaaggattaaatttaaattaa

SEQ ID NO: 1599 - DNA, 285 bp, Methanobrevibacter ruminantium
  source 1..285: mol_type = genomic DNA
atgagtcaagcaagaaatttagaaaaggatgtatccagtagtaaagcttattttaaaggtgaaaatgagttaagtattaacagtaatattaatgaaaccaagttcaatgaaatgactgatagcgattctaatttctttggaacgcggttcattctgaatctaagtcttatattaaagttaatattgaaaaaacaaatgaaggtgatatcgcaaatagaaataatctcaaacaatcaaaagacgtcaaaacagtttcaatacaaaatcatacaaaaaacattatag

SEQ ID NO: 1600 - DNA, 528 bp, Methanobrevibacter ruminantium
  source 1..528: mol_type = genomic DNA
gtgactattttagatggtattttagaagataataagaaatttgtagaaagctttgaaggagaagaaatgtctcaccatgcacagaaaaaattagctattttaacttgtatggactgcagattgattgactttttcgaacctgctttaggacttgaaagaggagatgcaaagattgtaagaaatgctggaaactccattgtaggagaagacgcaatcagatccattggcgcagcattatacaatttaggcgctgaagaagtattggttgtcggccacactgaatgtggtatggcaggtgctgacgctgaagcattaaaggaaaaaatgcttgcaagaggcatcaaagaagaagacatcgccaaatacgatatcgctgaatggattggtggatttgacgatgaggaagaaaacgtcctcaatgttgtagaaaagattaaaaaccacccattaattcctgaagttccagtgcatggtcttataattgatattgtaactggtgaattaaaagtattaaaagaagattattag

SEQ ID NO: 1601 - DNA, 837 bp, Methanobrevibacter ruminantium
  source 1..837: mol_type = genomic DNA
atggcgaataatggacatggacatcatggagctgcaaatttaactccagaacaacagaaaaagatgatagagcaagagatgaagctctttgaacatatgaaaaacatcaaatacaaaattgctgttatgagcggtaaaggcggtgtaggaaaatctacagtagctgctaatctagctgaggcattccagaaaaaaggattgctgacaggtattcttgacgctgacattcacggacctaatattcctaaaatgttggatgtcgaaggagaggatgtaatcatctcaaatggggaaatgattcctgtcatgagcagaaacgggatcaaggtaatgtctatgggatttttaattgactctcaagacactcctatcatttggagagggcctcaaaagtcaggttccattaagcagtttatggcagataccgcttggggagatcttgatgttctcatcatagacaaccctcctggaactggagacgagccattgacagtgcttcagtccttgcctgaagtcgatgcagtaattatggtcacaacacctaacagcctatcccatgaggatgttttaaaatgtgtgggaatggttaagatgctccatattgataagattgggcttattgagaatatgtcttattatgtatgtcctcactgtggtgaaaagactaatatatttggtgaaagccaaggggaggactttgcaaatgagatgggagttaaatatttaggaaaccttccactaactgagcaagttccagaatctgccaataaggacagcactatggtaaatgcctatgcagagtctgaagttgccactaagttttttagaaatgattga

SEQ ID NO: 1602 - DNA, 2997 bp, Methanobrevibacter ruminantium
  source 1..2997: mol_type = genomic DNA
ttgcttttagttctaatggctttgcttattcttgcaatgtcatgtgtgtctgcaagcaatgcaagtgataatttggatgatttaaccatttcagacagtaattcactagatcttgtatctacatcaaattcagatattttatcttctgatagtggtgttagttctgatgatagttcaaatgatgcttctggtgatgttcttggttctgatgtatcaagcaatgaatcaaataatcagtctcaatctactttggattctaataatcaatctcaatctggtttagattctgataattcaacattattagattcacagtcaaataatcaatccaattcagaatcaagtgattcctctgatagttcagaaactgtcatcaaaaatgcaaccagcatatcagtttcttctaaaactgttgttagaggaaattctctcaatattactttaaaggataatgctagcaccttattatctaataagacagtcacatttaccttcaatggtaaaacttataataaaaccacaaatgctaaaggaattgctagcttaactcttacagcgactcctaaaaagtacttggtgaaaattgcctttgttggtgatgagctttatgaggcctcttcaaaatcagtgaatgtcactctaagcaagactccaaccagcatttcaaactcaggcaagtcaatagtcaggggcaaattatataagcttacattaaaggatgctaaaggaaaggccttatccggcaagaaaatcagcattagctttaatggaaagaaatataccaagactacaaattcaaatggccaagtcaacctaaccataaatgtaaatgtaggtaaaacttataaaatgacctataagtttgcaggagattccaattatctctcaagttcaggctctgtaagcattaaggtcaagatgggcacttccataatcggttccggatcaagcatcgtcaagggaaagtcctatacagtcaccctaaagaatgccaatggtgctgttttgtctaatcaaaagatagcctttactttaagcggcaagacttacaacagaactacaaatgcaaaaggtcaagcaagcctaaagataggtttaagctctggaaagacctataatttgacttataagtatgccggcaattcatattatggaggatcttccggcaaggtttccctctttgtcaagactccaaccactatgaagaactctggcaagaccattgtgagcggagagacttataaggtcactttaaaggatgctgatggaaaatctttggctaataagaaagtttccataactttcaataataagacctatgccaaaacaaccaattccaacggtcaagccagcttaacaatcaaagggacctttggaaggtcatatcctttaagctataagtttgcaggagacagcaaatacggacctagctccggttcattatgtcttagggtcaagaaggcaacaagccttaagggttccgcatctagcattgttcaaggaaaatcctatactgtaactttgaaggattccaatagcactcctttagctaatcagactatcgtattcactttagatactaagaaatataacagaactacaaatgctaaaggtcaagcaagcctaaaaatcggattggctgcaggaaagacttataatttggcttataagtactcaggtacttcatattataatggctcttcaggatctgtaaaattaaaagtcaagttcccaacaagtcttacaaactctggtaagtctgtaatgaatggaactggctataatattgtcttgaaggattctaaatccaatttagtctccaataagacaatatcaattggattcaatggaaagacctatgatgaaataactgatgcaaacggaacagtcactctattgattgatgcaaacgttcctaaaacatataagatgacttataagttcgctggagacagcgattatggagcatcctctggaactgtcaatctaactgttaaattcaagaacgccttcaccatctctcagattatatcagcgtcttcaagcttaaagtcatatgtattgaagaataagaaggttccagctacagttagtgtgaatggagtctcccttaacttaacaagctttacatatcttatggctaaggcaacaataagcattaattcaaataagacctctggaagcatattgttagttcctgtagattctaattatacaaataacggcagccgtatcaacgctaatctctataaggcaaattatattgatttggctaaaaaggtaataagctctgctgaggcaaataaactcgttccaaatagcgtttccactaatataggtcttgtttcccatgacctctatagctttggccttgctaaggcattggtcttctttaacagcgatcattacctgccaaactacttgattttaagcagtgacgatgttggcgagaaacattcaactgtaatccctagcaatgcaaggggaaatgcatcccaattcaaggcaggattgaatgaggcagagaccttgactgctgctcagattgcaaaataccttgttgcttcaggccatgatgctacaaactctgaaattaaagcattggcagctaagttggtttcaggaaagacttccctttgggataaggcaaatgcaatatttacttttgcaagagacaacattacctatagttattatgcggattccaaaaaaggcgcagcagggactttgagttcaaagagcggaaactgttgtgatcactccaatttgattgtatccctctgcagagcagctaatataactgcaagattctcacatgcacaaggatgtactttctcaagcggtttggttgcaggtcatgtatgggctcagatatacattgatggtgtttggtacactgcagatgctacaagccgaagaaacagcttgggaaatattgtaaattggaataccaatcattataatactttaaaacagtatgatcacttatctttctag

SEQ ID NO: 1603 - DNA, 2478 bp, Methanobrevibacter ruminantium
  source 1..2478: mol_type = genomic DNA
atgataaatagactaagaaaagactttggaagaataataaaactcataatcttccttatattggaagtaattcttttctttgcaatcacccaaacatttggcgggatcataatccccgacttaaagactgcatttgcaataatcatcgctttatcaatattaaacgccctactttggccaactatcacttacctatccctaagattcatagtcttgaccttaggatttggaacctttttaatagacggagtccttctttatataataagcttattcatacctggagtgtccattaacggaatagcattattttcaattcccctgcttatcggactaatatcctctatgctttcaataatcctaaacattgatgacgactatacctactatcgatacatcttggaaaaggagatgaaggtgatacataggaacatccccaaaaaggagggattcctattcctggaaatagatggattatcttatagaatcataaaagaagccctagacaacggagatatgcctaccctcaaatcatggattgacaaaggcagccacagattgatctcttgggaaaccgatctttcaagccagacaagctcatcccaagcaggaattctccatggaaacaataacaacatacctgcattccgatgggttgaaaaggatcatgaaaacagaatcatctcctcaaacggaaggacagattcgaaattgattgaaaaaagaatatccaatggaaaaggcttattgtcattaaatggagcaagcagaagcaatctgttctcaggagatgccaaggaccatcttttaacattcagcagattcagcgattcagaaagcatcaattcaaacagctggttttatctttattcaactccctatgtaattgcaagaatattggttctcttcatctttgacatgattatggaactgttatcaagagtcaggcatctgttcaagaacattcagcctcgcctcaaatggagaggattgaagtattttgtagcacgtgcaggaaccaatgttgttctaagggaagcaacaacattcacattaatcggagacgtctttgcaggagagcacaatgtaatctatgcaacatatatgggctatgatgagattgcacatcactcagggatagaggactttgactcattctatagcctaaggcaaatcgacaagcaattcaagcatatagaaaatgcgataaacaattcaaatagggactataagataattgtgctctcagatcatggtcaatcaaatggtccaagctttaaacagaagtttgatattagcttaaatgacttgttaagtgaattcctacctgaaaacattacagtacatagtattttgcattcaaatgatgaccacttcagcaaagagttttccataaatcaccttggctcagaaaaccttgaaaaattagataaaagagtggaaaatactaaggaaaagctggatatcaagatagacaatacaaaagaaaaactagaccacagaatagacaacacaaaagaaaaactagaccacagaatagacaacacaaaagaaaaactagaccacagaatagacaacacaaaagaaaaaatagacaccacaaaagaaaaactagaccacagaatagacaacacaaaagaaaaaatagacaccacaaaagaaaaactagaccacagaatagacaatacaaaagaaaggatagattccaacttggactacactaaagaaaagatcaacaccagttttgatggagaattaataaatacatgggataaattaatcaaatttaaaaacaaatcatccaataaggcctttttagacaaattaagaaagaaaagaactttaatcaataacgatgagccaataatagataggataaacaatgtttcagaggacctctctgaggatttggaagttaatatagagctttccaaagagaagataacaagtgacaaggcggctcagacaattgttctatcttcaggaaatcttggattgatttattttacagactggtccaatagaatgagctatgaacagatagaggatgcatttcctggactcatcaatcaacttgcttcacatgatggaataggttttgtaatggttaaatcagatatatatggcacattggttttctccaatgacaatttattttatcttgaaagcgaagagtatgtgggagagaactttttagacaagtttggtaaaaatacagtacaaaaacttaaaagaactgataaattcgctcatgttccggacatacttgtaaacagcgaatacaatatggagacaaatgaggtctatgcatttgaagaattgattggaagccatggaggcattggaggaacacaacaatatccattcatattatgtccaagcaattgggaaagcgaagagatctttggtgctgaaaatgtatataaattctttatgaaagagataaataaatcatggaatcaaagcaagaataaatag

SEQ ID NO: 1604 - DNA, 489 bp, Methanobrevibacter ruminantium
  source 1..489: mol_type = genomic DNA
ttggaaactaaaaagatgtttttggttatattattatttgcatttattgttataggaggatcttattcggtatttgctattgtttcaaatggcggaggcaataattctctctcttgggacaatattacaattgcaggtccttctggaaatgtaagcgatgatggcaataatagtgatgatggtttattaggcatttttaattccggcgattcttcagattcaagttcaagcaattcaaatactggttccagttctagtcagtctagttcttcccctgcgcgtagttcaagttcttctagttctagttctagtcagtctagttcaagtcaatctagttctagtcagtctagttcctctagttcaagttcaagttctagttctagccagtccagttctggttctagctatgattcaggctctggaggcagcgttgttgaatctggcggacattattatgatgtaaactctggtgatgagctcgattggtaa

SEQ ID NO: 1605 - DNA, 507 bp, Methanobrevibacter ruminantium
  source 1..507: mol_type = genomic DNA
atggaaacagaaaatttaattattgtaattcttttagttttaatagctatggccggaattttctgtgcatttttatacacattcggtacaggaggcaatgatttagctcctgttgagccaaatctcacagctaatcaaactaatgttacaaacatgactaatgatactgctaacgctacaacagttgatgctcctttaaataatggggcttatggatccagttccatagacagttctagttctaatggcttgagtggatctaactcttataatggtggctctaacacctataatggcggttcaaatactaataatggcggttctaacaccaataatggtggatcttcctcttctgattctggtaatggcggttctgtcgctcctgattctggtaatggtggttcatcagattctggtaatggtggttctgtcgctcctgattctggtgggggcggttcatccagtggtggttctgaacctgcagccagtggcgaatcttcaaattaa

SEQ ID NO: 1606 - DNA, 1497 bp, Methanobrevibacter ruminantium; identical to SEQ ID NO: 119
  source 1..1497: mol_type = genomic DNA

SEQ ID NO: 1607 - DNA, 612 bp, Methanobrevibacter ruminantium
  source 1..612: mol_type = genomic DNA
atgaaagtattattaattaacggaagccctcataaggaaggatgtacctttacagctttaagcgaaataaaaaaccaattagaaaaggaagatatcgatagtgagattttttggataggaacaaagcctgtaagaggttgcattgcttgtaagaaatgcggacataaggaaggaaaatgtgcctttgatgatgaccctgcaaatgagataatcgataaactaattgaggctgacggggtaattgtcggatctcctgtttattatgcagggcctaacggtgcattatgcgctgtgcttgatagggttttctatgcatcaggtggcagatttgcatttaagcctgcagcatccgttgtaagcggccgcagaggtggagcaagcgctagctttgacagattgaataagtatttcacaatttcaaatatgccaatcatatcctcacagtattggaatatggttcatggaaacactccagaggaagtaagacaagacttggaagggcttcaaacaatgagaaccttggcaaagaatatggcttggatgcttaaatccattgaaaacagtgatttgcctaatcttgaagataaaatagccactaactttgtgagatag

SEQ ID NO: 1608 - DNA, 795 bp, Methanobrevibacter ruminantium
  source 1..795: mol_type = genomic DNA
atgaaagaaagattagataagtatttggtaaacaacaatcttatcgctagcagaacaaaatcaaaggaaatgattaaatccaagaacgttaaggtaaacgataaaattatcaccaaagcaagctatacagtcagagatggagataaggtggaaataatcaacgacgaatccttaagatatgtctccagaggcggattgaagcttgaaggagcgatagattcattcaatctcaactttaatgaaaaatccattatggacattggatcttcaacaggaggatttaccgactgtgggctgcaacatggagcaaagagagtggtggctatagatgtaggaacagacataatgacaaccagccttagggatgatgatagagtcgacttatatgaacaaatgaatttcaaaaatgctccaagttcattatttaaagatatagacattatcgtttcagatgtgtcttttatttcattaaagcacattattgatagaattgcccaagaagatgatgactttgaattggtgtttctcataaaaccgcaattcgagtgtggaaaagaaatagccgaccaatttaagggaataattacagataaggaagtccataaggatgttattttagagataaaagaatattttaaaacaaaaggatattatctaatagatttagatgtgtctaaaataaaaggcaaaagtggaaacattgaatatttaggccattttaaagcaaatgaaaaagttagagaaatagatatagaagaagtaatcgatagggcctttatagatgaagaaaattaa

SEQ ID NO: 1609 - DNA, 393 bp, Methanobrevibacter ruminantium
  source 1..393: mol_type = genomic DNA
atggaattagactcagaacaagttgtaaaaagaatagaagaactcagaaaagattacagttgttcacaagcaacccttatgggaatttgtgaagttggaggcatgcctactgaggaattggcccttcttgcaaaaggattctctggtggtattggcggaaccttctctgaaggaacctgtggtgctgtaaccggtgctgtaatggctttaggatttttaggtgctgatgaaaaacagattatttcagcttctaaaaagttatttaatgaatttaaagataagtatgagtctgtaacttgtggatacatctcaaaagatggtgatgacaagtctccatgtgttgaagtatgtttatttgcaggtgaaaaggtctgtgaatacttaaaagaataa

SEQ ID NO: 1610 - DNA, 2094 bp, Methanobrevibacter ruminantium
  source 1..2094: mol_type = genomic DNA
atgataaagaaggtgacaaatgtgattgatgaaataaccgatttcctatttggcttaaagatgactattatttcagggatatttctcttgattgctgttatttttatgatttttggaatagacactccgatttatctaaatcctgcatggggtacagtaataattagcggaattccaatgcttcttcttgccatgacaagattgattcgcgaaaaatgggtttcctctgctcttcttattgcaatagccatggtggcatcactattgattggcgaaatctttgcagcaggtgaagttgcatggattatggcattaggtgctcttctagaggattggactgtagagcgagctaagaaaggattgagaaatcttatcaatttaactccacagactggaagaagaatcgttggagatagcgaagaagtgatttctgttgatgagataaggattggcgatgtcttaagaatccttcctggtgaaagcgttcccgttgatggtgaaatcataaagggcagttcctctcttgatcaatctatcatgactggggaatcattacctattgataaggaagttggcgatgaagtattttgcggtaccatgaatatgtatggtgccattgacattaaggcaacaagcttaggtgaaaactcctctcttcaaaaattgattgaccttgtaaaggcagctgatgaaaagcaggctccgactcaaaggattgcagacaaatgggccacttggcttgttccagttgcattggccattgcaatcgtagcttggctagttacaggtaatattgaaaggggagtgactgttcttgtagtcttctgtccatgtgcattgatacttgccacacccactgcgattatggcagccattggccaagcgacaaaatatggagtcttaatcaagtctggtgaggcgcttgaaacattaggtgcattgaacactcttgtatttgataagactggtacattaacttatggtaatttagcagtttcagatattatctccttaaaggatgatttagacgaaatggatgtattaaggattgttgcatcttgtgagaaattaagcgaacatccattggctaaagctattgtaaattatgcaaatgaagctaaagttgatattgaagagccagaagactttaagatgtatcctggcaaaggggtatattgtaagaattcctatggccatatatgtgcaggtaactccaaatttttaaatgaaaataatattgattttaatattggttctaaggatgacttggacgttgattccatattaaatcatttaaaacaagaaggaaaggcttcaattatagttgcattaaatggtgagatcatagctttaatcggattgtctgatgtaatgcgtgaggattctaaagccatgattgagagcttgcatgacttaggaaccgaaacagtattgcttacaggagataatactgaaactgcaaattattttgcttcacgtcttggaattggaaaggtatatggcaatctccttcctcaggaaaagcttgattggattgaaaggtttaaggatgaaggcaagaaggtctgcatgattggagatggggtgaatgacgcacctgctcttaagactgccgatgtaagcgtggcaatgggttcagttggaagtgatgttgcaatcgaggcagcagacattgcacttttaggtgatgacattggcaagattccatatcttaagaagctttcaaattcaactttatttacaattaaggcaaatattataatttccatgacaataaatgctgtagctattgtttgctctgttttaggactcttgaatccagtgactggtgccatagtccataatgcaggatcttgtcttgtagtgctcaatgcagcattgctttatgataggaaatttgatgattcaatcaaaagaatcgacactgaaaatgtggagcactcccattatcatttccataatgacggagaacattcccattctcatgaaggcattaggataattgatgaaatcaagacagataatggaataaagcatatgcatattcataagcatgcattaaatcggcagagttgtgaggcttatcacaactag

SEQ ID NO: 1611 - DNA, 822 bp, Methanobrevibacter ruminantium
  source 1..822: mol_type = genomic DNA
atgagttgttataaatactggggaaaaattgaagaaatcgcaaacaaactttcaagctatggtgatttggataatgaaggcctttctgcattggatggtactgatattgatgagattacaaagattttagatgagattgaagtcatagcccacgataaggaaatcgattttgactctgcaaagcacattctagacgatgaaaagatgaacaaggcattgcaattgattcgtaagttctatgtctatataggagcaaggctagagagggaaaatgcattgacaatattggaggccgatgatcctaaggtcgctttggattcattccacttttatgatagatacataggccttatagataatgaaaggcaattagctaatttcaatgaaaacaagacctttgtattcttgggaagcgggccattgcctcttacaattatcatgtttaatatggtgacaggctgcaagtgcataggcattgaacaggaccctgatgttgcagacctttctagaaaagtattaaagcgtttagatcttgatgaaggaattgaaatcgtaacaggtaatgaaaagacaattgcagaattagattatgacattctaatgattgctgcatttgcagagcctaaagacagagtatttgcaaatgtctgggacattgtagatgaagacactcctgtgctttataggacttatacaggtatgagagctattctttattctcctgtaactgaaaaggacacaagaggattccataaggaagtcatgttgcttcctagaggaaaaacaaataatacttctgttttaattagaaaaattagttaa

SEQ ID NO: 1612 - DNA, 612 bp, Methanobrevibacter ruminantium
  source 1..612: mol_type = genomic DNA
atggaattaactggtaaaaacatatcctttaaatacagttccggatccagacaaatcttaaaggatgttaacataaccgttgacaacaagaagattttaggattgtttggagacagcggaagcggaaaatcaagcttatgcaagattcttgcaggacatatcaaaagatatgaaggtgaggtaaggctagatggacaggagattccaaagggcttcgatcctattcaattgatttaccaacacccggaaaaggttatgaatcctaaatggaagatgcatgatgttttaggagaatcctgggaagttcctgatgacttgttggaagactttggtattcaaaagtcttggcttaacagatggcctgcagagctttccggtggtgaattgcaaagattctctgtcttaagagcattaaaccctaataccaagttcttaatagctgatgagatgactactatgctggacgccattacacaggttcagatattcgaatcagttttaaagatagttaaagagcgcaatatgggtttattggttgtaagccacgatagggacttaatggatattatctgtgatgaagtcatttaccttgatgacattaataatatttaa

SEQ ID NO: 1613 - DNA, 1065 bp, Methanobrevibacter ruminantium
  source 1..1065: mol_type = genomic DNA
atgagtgatttaattaatgtttcaaatatttccatttcatttacacaatatgtaaaaggccttaaccaaagggaattgaaggttatcaccgacttgaccttagacattaaggaaggggaaatcgtagctgtcttaggttcaagcgggtcaggtaagagtttgcttgcacatgcaatacttggaatattgccacataacgcaaacctttcaggtacaatggtctataagggagaagtcttgacagaagagctaaaggaaaaattgcgtggtgatgagattgcacttattccacagtctgtcaatttcctagacccattgatgaaggtttcagatcaggtaatcggcgaatgtaaggatgaagcagaggaaaaggaaaaaagagccaagcaaagagctatctttgaaaagtacaatctctctgaggaagtggatgacatgtacccattccagctttctggtggtatggcaaggagggttcttgtatcaaccgctcttctaacaaatcctaagcttgtaattgcagatgagcctactcctgggcttgatgaggagtctgtagaggaaaccttgaaccatttaaggcagatggctgcagacaatgtgggagtattgctcattacccacgatattgatgctgcattgaaggttgcaaacaggattgcgattttctattcaggctatgtaattgaaattgccaatgcagaggatttcagtggcgaaggtgagaacttgctccatccatataccaagtctctctttaaggcattgcctcttaacggatttgaacttacaaagggacatcagccattgcatggtgagattccggtaggctgtccatattatgacagatgccctcataaaatggatgattgtgataagacaagacctcatttaatccctattgatgagaataaaagggttagatgctttaagtatgagggagagataaaggacagttctgaggagcaggttgtggatagttctgaggagcaggttgtggatagttctgaggagcaggttatggacagttctgaggatcagataaaggatggctctgaggagtag

SEQ ID NO: 1614 - DNA, 861 bp, Methanobrevibacter ruminantium
  source 1..861: mol_type = genomic DNA
atggatgagtcagctaataagatgaataagtttgacgttttaggaagcatgaacttaagaaccaagaccctgcttgcaataggactctctgccttcatattgattgtagtggttcttgtcagtttcttcattgaccctacaagcatcacaaccgattggtccattatgaatcagccaccttcccttgagcacctattcggtactgactggatgggaagagatatgttcacacgtacaatcaagggtttaggattaagtgttcagataggattcttcgcttccatattaagtagcatcattgctgttgctttagctttcctttcaagcttcaacaaatatttagacagctttgtatcttggcttatagatgtgttcctctctattccgcatattttgcttatcattcttatttccatcgctctcggtggaggagcattcggtgtattggttggtgtggcattcactcactggacatctcttgctagggtccttagggctgaaatcaaacgtatcaagacttcagagtttgtaacaatctctgaaagattaggaaaatccaagttctggattgcaagaaagcaaatcttgccattggtaatcagccaagttatcgttggtacaatattgattttccctcacgcaatcatgcacgaagctagtgtaacattcttaggtttcggtttatctccacacgaaccggctatcggtatcattctttccgaatccatgaaatatcttgcaactggtaattggtggttggctttattccctggtttagcattattgattcttgtattgctctttgatattgcaggagaaaacatcaagaagatgctagatccggcaagcgcaaatgattag

SEQ ID NO: 1615 - DNA, 993 bp, Methanobrevibacter ruminantium
  source 1..993: mol_type = genomic DNA
ttgttagacaaacagaaaatacttaagtttttaggttataaactcgttcgttttgctattttattaatagttgtaatattattaagttttatattaattgacatgtctcctattaatccggttaacgcttatatttccaatatggttgtaagccctgaaaagattgctaaactagaagcatattggggtgtaaatcagccgattactgaaaaactgatcaattggttaggaaatattatcactggtgattttggaacttccttaatatacagaactcctgtattgcaggtaattgctgaaaagttcacagcatcccttatcttgatgctaaccagttgggtgatttctggaatattgggctttgctttaggagttcttgcaggatttaaaagagacacttggattgatagggttgtaaaggtatactgttacgtattgcaatctgcacctaccttctggattgctttgcttgttgtaatggtattcagtatttatctgggatggttcccagtaagcgggggcgttccgattggggcgctgagtcaggatgtgtccttcttcgattggttgaagcacctgatattgccggcatttacgctgagcattttaggagttgcatcaattgcactctatactcgtgacaagcttattgaagtaatgacaaccgattacttcctctttgcaaaggcaagaggggaatccggatggaccttgattaaaaggcacggtataagaaacattctactacctgcaatcaccttgcagttcttatcattcagtgaactcttcggtggaaccgttcttgtcgaacaggtattcatgtatcctggaatcggtcaggcagccgtttcagcaggtttgagaagcgacgtacctctgctgttgggaatcgttatcttcagtgcgatattcgtttattgcggtaacctgattgcagatattctctataactttgtagatccaagaataagagaaggtgaggaaaatggatga

SEQ ID NO: 1616 - DNA, 1614 bp, Methanobrevibacter ruminantium
  source 1..1614: mol_type = genomic DNA
atggataaaaaaattattatcggtgcagttgttgcacttcttgttataattgttggtgctgctgtcctcatgggaggaggcactactgaaagaggtcctggagaaatcgtagttgcagcttacagtcacggaggagaaccagaagctggtttcgatccaattgcaggttggaactattatgctgagccactcattcaaagtaccttattgaaaatgacccctaacggtacttacgcaaaagatttggctacagactatgagattagcgatgattataagacatacactgtagacttaagaaaagatgtcaaattcactgacggttctgacttgactgctgaagatgtagcattcacatacaacgcagctaaagaatctggcgcaagcttagacttatccgctttagataaggctgaagctcaaggtgattacaaagtcaaattcaccttaaacaaatcagattccactttcttagataagatggcttacattggtattgttccttccgattcttataacaacgaatcatatggtgaaaacccaatcggttctggaccatacaaattcgtacaatgggacaaaggtcaacaagttatcttagagaaaaaccctgattactatggtaaacaacctgaaatcgaaaagataaccattctctttgctcaaaacgaagctgcgttcaacttagctaaaaacggagaagctgatatcgtagctgtacctctcgaatatggtaaagaaaaacttgacggttacacaatgtacttacaagacaccatcgacgttcgtggtgtatctttacctagtgtacctgataccggagaattatctccagatgacaactacacaatcggtaacaatgtaacctgcgatattgcaatcagaaaagcattgaactatggtattaacagaactgctttagctgaaggagcattaaacggattaggttatccttcctatgacggtattgctcaccaattaccatgggctaacaaagaagcagcaattgaagacggtgacgttgcatacgcaaacaaaaccttagaagaagctggttgggttgactctgacggagatggaatcagagagaaaaacggaaccaaagcttcatttaagatctactactctgcaagtgcacctgaaagacaagctttagctgtcggtgctgctgaacaagctaaacaattcggtattgaaatcgaacctgtaggtgctgaatgggacgaaatctatcctaacgaattctcacaaggagttctctggggatacggttccacagatccatctgacatgtatggagaatactacagttcctctgacttcaaccctgcaagagtaaacaacagtgctgttgacaaacacatggatgacgcatttgctgaatcccgtgaagactcttacaaagattggtctgcagtatcctgggacggttctaccggtatttcccctaaaggtgacgcaaactggttatggttaggtgaaatcaaatatggttacttcgtaaacgacagagtggacatttccaatgacaccgctctcttacaacctcacggaggagacttattcagtaacgtatatgattggaccatgactaacgctactgcagaaaaataa

SEQ ID NO: 1617 - DNA, 966 bp, Methanobrevibacter ruminantium
  source 1..966: mol_type = genomic DNA
atggttagtgtcaatttagaagctaaaaaaactgtagatgtaatgattgaaaaggctgacgatcttaacattgctgtttccaaattagaaaacggcgcaactgtcattgactgtggtgtaaatgtcgcaggtagtttcaaagcaggtgaattatatactaaagtatgtcttggaggattagctgatgtaggcatttccattcctggagacttatctgaaaaattcgcattgccttctgtaaaaataaaaacagacttcccagctatttccaccttaggtgcacaaaaagcaggttggtccgtcagtgtaggagacttctttgcattaggttccggtccagctagagcattatccttaaaaccagctgaaacctatgaagaaattgattacaaagatgaagctgatcttgcaattctaactttagaagctgacgtattgcctggtgaagatgtagctcaatacattgcagatgaatgtggcgtagatgttgcaaacgtattcttgcttgtagctcctaccgcttccttagttggatccattcaaattgcaggaagagtcgttgaaaacggtacctacaaaatgttagaattcttaaagttcgatgttaaaaaggttgtacatgcagcaggtattgcaccaatcgctcctatcgacccagacggattaaaggctatgggtaaaaccaacgatgcagtgctctttggcggaagaacttactattatgtcaaatcagaagaaggagatgacattgcagcagttgcagctcaattaccatcctcagcagctgacggatacggcaaaccattctttgacgtatttaaagatgcaggatttgacttctaccaaatcgacaaaggaatgtttgcaccagctgaagttgttatcaacgatttaaccactggtaaattatacaaagaaggtttcgttaacgctgaattgcttaaaaaatcctttggtatagaataa

SEQ ID NO: 1618 - DNA, 957 bp, Methanobrevibacter ruminantium
  source 1..957: mol_type = genomic DNA
ttgattacaactgttgtaggtagttttggaattgacttaaaggagcctaagactctaggcgaaaagataaagtcttcaattggaatgtacgacccatataagatagcaatcgaagaggctgtcaaactgcagcttgactgtggcatagacatcataggggacggtcagccaaggggagatatggtaggctcttttgtaaagcatattccaggattctcttatgaaatgaactcttcagtcattgtatctaagataagggctcctcaagtggatataatgataaaggatttaaaatatgctaaaaaggttcttgaagcggaaataaaagcaagaaacatgagtggggatgaggccaatagaaaaggagtaaagcttatgctgacaggaccttcaaccattgtacactcttcaaggttagaatctttctataaggagcgtaatccggcaatcattgattgtgcctatgcattaaggcgtgaggtcgagtcagcagagaaggcaggagccagttatgtacaaatcgatgatccatttttatccactggaatggttgacttaaaggttgcaaaggaatccattggaatccttacagatggaatcgaaatgcctatggcaatgcatgtctgtggtaatcttgatggctgctttaaggagattgccaagtttccaattgatattttggactgtgagtttgctggaaacaatgtgaatattggaattctagaagaaaacgctagcttgctttcaggtaagaaattaggattcggctgtgtggattctgctatgaatgcagttgacgataaggaagaggtaagagcactcgttcaaagaggaatcgatgcggtaggcaaggaaaacatgcttcttgatccggactgcggacttagaaaagtggatattccaatagctatggaaaagttaaaaatactctctgatttagctcgtgagtttaattag

SEQ ID NO: 1619 - DNA, 309 bp, Methanobrevibacter ruminantium
  source 1..309: mol_type = genomic DNA
atgtctttctgtttagaaacttatttgcaacaaaatgatgattataaaatacttatacaacgttctggggtcaagcaatgctataagctcattgaagataatgcaaaagagattattcatgtaaaccctggagataaagtattaggtgctagattgattggacttcctccaatacctgttggaataaacgaagaggaagggaccattttgattacttataccaagccatgccatggaactgcagctattgagattccaatctctcaggaagagattcaaaacgttagggacatggatattggtgcttaa

SEQ ID NO: 1620 - DNA, 462 bp, Methanobrevibacter ruminantium
  source 1..462: mol_type = genomic DNA
atgaaagcattagttttactcggatgtcctgaagctccttcacagacccccattggattgtatgcttcttataagctaggccaaatgggatatgacgttacagtatcaagcaaccctgcagcgggaaagatattggacatttcagatcctgaaggggtttatgtaaagaagagggtagatattgaaaagtgtttggatgaaatcgaagagggagattatgacctcttggtcggttgtgttcacaaggatgctgcagccaccttctttataacttattatcatatattaaaatgcaaggctcttgcccttgtcttctcaagagatgcagaagaggttgcagagtttgctgatatggttgaatcctctaccgatgcagatatcattgctgtaagggctttccataatccgaatccgatcaaggtaagatttgacaaatatttaaagactttagaggaagaataa

SEQ ID NO: 1621 - DNA, 510 bp, Methanobrevibacter ruminantium
  source 1..510: mol_type = genomic DNA
atgggattaatatcagacacacatataagtgaaaagagaggaaaattgtccaatcaaatattggaatcttttaaaggagtcgatttgatacttcatgcaggagatataagttcacaaaccgttttggataaattgaattcgatagcaccaaccatagcagttgaaggaaataatgacagagctcgaaaaacccttgatttaaatccctctgaaattatagagatcgatgggataagaatacttttaattcatggcgataagcttccaagcagagattttgataaatactgcaaatttgcacttaaagagaatgcagacattctaataagtggacatagccacagaccacatcttgaaagacaagaagatattcttatgattaatcctgggagccctaacagaccaataaaaagcgacgcatcaatagccattttaacaattgatgaagaaaaagagcataaaaataaattagataaggttaaagtagaatttataaaaatagaaaaataa

SEQ ID NO: 1622 - DNA, 117 bp, Methanobrevibacter ruminantium
  source 1..117: mol_type = genomic DNA
atgcttatatgtcctatatgtggctatccattggatagcgatggccgttgttggaactgtggctattgggttgagactcatccattagatccattccagccaggctctggctattaa

SEQ ID NO: 1623 - DNA, 129 bp, Methanobrevibacter ruminantium
  source 1..129: mol_type = genomic DNA
atgttagattgtcctgtttgtggaagtgaattagacgaaaagggtcaatgttgggtttgcggatacaacatggctccatgtgaccatccggatgattatgattatgacgacttcgaaccgcaattgtaa

SEQ ID NO: 1624 - DNA, 504 bp, Methanobrevibacter ruminantium
  source 1..504: mol_type = genomic DNA
atgacttttaaaaaagagaaattcatcaagcttttaatgtttatcatcagcaggtcttcagacaattataatgtaggaaaaacggtcttatcgaacatgctatattttatagactttaattactttgaaacatatggagaatcattaacaaatgaaatatatattaaatcctatttgggagcagttccaagccattttgatgagattgttcgtgaattgatttattataacaagatatacagaagaagggagccatactattaccatcatatcaataaatattatctgacaagccttcacaatattgatttggattataaggaattgattgttgtaggtggtgtcttggataatcttatgggattcagtgcagttgagatagttgattatataagtggagacgcaccatttaagattgcaggctttgatgagcctttggattatagttttgtattctatagggattttgattattctgttaggaatcttgattattattggtga

SEQ ID NO: 1625 - DNA, 1809 bp, Methanobrevibacter ruminantium
  source 1..1809: mol_type = genomic DNA
atgaaaaacataagacaaacactaagcacaataggaaaaatgctcagtcctctaaaaaagagcataccttccatatttctcatcttcatattcctgcttatagacgtttactgtaaccttaccctcccatcatacactgcagacattgtagatgtgggaatacagaatacagacttcaactacataataagcgttggaacaatgatgatgaccatggtattgataggagttctagcaacaatagcgctatcctatttttcaagcaaggtatcagcagcatatggaagggacttaagggaaataagctatgaaaagatacttaaattctccaacttcgaacttaacaagatatcaagatcatccctcataacacgtaatacaaacgatgtataccaaatacagatattcttaggcctgctttttacaaccatcctatttgcacctatattaggaataggaagcatcatcaaggcaatggaacttggaacagacctcctatggattattgtagtgacattcgcctcagttgcaatactcctcggaataatattcataagaacagttccctactttaaggtgatgcaggaacttattgacaagatcaaccagacatcaagggaaatactgatgggaatgccagtaatcaaggcattcataaggcaggattacgaagaggaaaggtttgaaaagacaaatgaggagttcaaggaagtaaatctccatgtattcaaaaccctcttcctaatgattcctgcaatgacaatgatattgaatgtgatgatagtccttatcctatactttggggcatatgatgcaatcaatggaaagatactgactggaaccatcatagcattcatccaatactccacacagattgtaatctcattcctgatgcttggaggatttacaatcatgattccaagaatcctggtatctggaagaagggttggagaagtcctgaatacagagatatcaattagtgacggaccaatagataagatagatgagaatcccacaatagaatttaaaaatgtaggctacagctatccaggaagtgaaaaggaaaccttaaaagacattagctttaagttggaaaagggaaagaccacagcaataatcggaggaaccggaagcggaaaatccacaatcctaaatcttattcctcgccttcaggatgtgacagagggccaaatcctagtaaacgacaaaaacataaaggaatataagctaagcacacttagagagcgaatatcatacactcctcaaaaggcaattcttttccaaggtaccgtaaggtcaaacatgcaagtgggaaaggaagatgcaacagatgaggaaatagaaaaagcactgaatatagcacaagtggactttatagaaagcttggatgacgaggtcacacaaggagcaagcaacttctcaggaggccaaaagcaacgtctttcaattgcaaggtcaataatggacaagcgtgacttttacctatttgatgactgcttctcagcgctggacatgaatacagaggcaaaggttaaggaaaaccttaaggacttgaaggaaagctcttcaatccttataatttcacaaagaatctcaacaatcatggatgcagatgaaataatcgttcttgatgaaggaaagattattgataaaggcggtcatgattatctttataaaaactgtgatatctataaagagattgtatcttcccaaatagaaagatcagaagacttaatctatgataatgaagagactgcaagctttaccatagatagcagttcaattaaaaaagcagcaggaggcaaataa

SEQ ID NO: 1626 - DNA, 1788 bp, Methanobrevibacter ruminantium
  source 1..1788: mol_type = genomic DNA
atggcaccaagaccaagaagattgcctccggaaaagccaacaaatgtaaaggaagccatcaaaaacatatttggactcctaatgggatacaagctaaagctaagcataacagtcatttgcggtatcctatcaactgtattctctgtaataagccctctcttgattggactagctacaactgcaatattcgatggaataaactctggaaacatgaatctggaatatataataaaccttctaatcacagttgtgattctatacatcataagtgcagtcttctcctatctccaaagctatttcctcttggagataacaacagacatcagctataacctaagaaaagagttgattgaaaaaatcacccacctatccatgggagagatggataaaaacacaagaggagacatcttatcaaggataacaaacgatgtagactcactacagacaggacttaatcagacattcaaccaattgctctctggagtgattacaatagttggagtcacaataatgatgctttccatcaatatctggctgacacttgcaacaattgtgcttataccaattgcatttttaatcataacatttgtcacaaagcattctcaagactattatacaaagcagctaacctataggggaagcctgaacggacagattgaagagtcatttacaggccatgaaatcattcgttcatacaatcaggaagagcagtccatggaaacatttagggaagacaatgaaaactggtatgagcaggaatggaaatccaagttctattcaagcctctccgcccctctgatgaacttcatctcaaacttccaatatgtgataattgcagttcttggagcggtattcgtgcttcagaatgcaatagctgttggagacatattggcctttatccaatactctaaaaacttcacaactcctattcagcagataacaagggttatgaacatggtccagactgcaatggcagcaagtgagagaatatttggatttttagagatagaaaacgaagagaacccttcaaaagaaaagatagagaagataaatgactcaatcacctttgaaaatgtcactttcggatatacaaaagatgaacctgtaatcaagaacttgacatttacagctaaaaagggcgaaaagatagccattgtaggtgaaacaggagctggaaagacaaccatcgtaaagcttcttatgagattctatgatgtggatgatggagagataaaaatcgacggagtcaatataaacagctacgataagcacagcgtcagatcccttgtaggaatggtgcttcaagacacttggctctttaatgacacaatctacaacaatatcaaatacggaaagcttgatgccacagaggaagaaatcataagcgcttcaaaggaagctcatgcagaccatttcataaggcaaatacctgaaggataccaaagcgagcttaatgaggatgtggacaatatctcccacggacaaaagcagcttttgacaattgcaagaacaatcatatcaaacaagcaaatcctaatccttgatgaggcaacatcttcagtggatacaagaaccgagaagataattcaaaaggccatggataagctgatggaaaagagaacaagcttcgtcatagcccataggctttcaacagtcagggatgcagacaagataattgtaattgaagatggaagaatcatagagcaaggaagccatgaagaattgctggaacaaaaaggatattactataataccttaaacactcaaagaagggagaatattgtatga

SEQ ID NO: 1627 - DNA, 603 bp, Methanobrevibacter ruminantium
  source 1..603: mol_type = genomic DNA
atgaatggtggaaataacttagataataattgtaaaaaccttggcaatatccttaatcccactgaagtgaacaatcagctattgttccataagttcataatgataaatgagattctggataagcgaaacaagaagcaaaatccagaaatgaaaagcattacaaagggccagggaagattgattgttcttttaaagagaaaggacaaactatccaccaaagagctctctgaaatattgaatgtcagtgtaagctcccttaatgaaactctaaacaagctggagcaaaagaacttcattaaaaaggttccttccgaaaaggacaaaaggattcttcttgtggaattaactgaagagggaagacaactcgaatttaaaaaccatgaagacattgacatctttgacttcttaagcaaagaagaaaaggaaaaccttaacgactatttaaatcaattgacactatcccttcatgagaaattcaaaagggaagaccctgaaaagtatgcaaagatagttaaaaacagaaaggaaatctttgataaatactttaaagatgaaaataacaatgaaacctgctttgaattcattgattgcagtaaaaaatag

SEQ ID NO: 1628 - DNA, 738 bp, Methanobrevibacter ruminantium
  source 1..738: mol_type = genomic DNA
atggcaaatgcaattattactggtggatccagaggaattggtaaagctatggctttaaagttaggtgaattaggttacaatgtagttattaactatcgcagtgactcatccaaacaattaactgaagatgtaatcgcagaaatcaaagataaatatggtgtagaggccattgccgtacaggctgatgtaagtaaatttgaagattgtaaaaaattggttgaagctgctgttgatgcattcggcgaagaaatcgatgcccttgtaaacaatgcaggaattaccaacaactctaacttcattgacttagagcctgaaagatacgaagcggtaatcaacacaaaccttgtaagcatgatgcacatgtgccacttatgtctcccatatatggtagaccgtgacactgctattgtatgcactgcttctgtaggcggtttgactggtgtaattaatcaagcagactactgtgctgctaagactggtgtaattggattatgccgtgcattagcattggaatttgcacctagaaaagtacgtgtcaactcaattgctcctggtatgattatgactgacatgttacgtggagtaaaccaagatgaattgaacgctcttgcagcaacaatccctcttggacacattggtgaagttgaagaaatcgctggtgctcttgaatacattttgactgcaccttacttaaccggacaagtaatctcacctaacggtggatttgttcttcaataa

SEQ ID NO: 1629 - DNA, 1032 bp, Methanobrevibacter ruminantium
  source 1..1032: mol_type = genomic DNA
atgaaaatatggattgatatatcaaatgctcctcatgtaagattttttaaagatgtcattaagtattttgaagatgaaggagatgatgttttagttacagcccgtaaatttggagacattcataagttaatggatatgtatgatatagactttatatctgtaggaaagcatggagtcacattggaagagaagctaaaggaaagtgcagagagagtcgttaacttagcggatttgatttccggtgaaggatttgatgttgccctttcaaagcattccattgagcttccaagggttgcatttggccttggaattccaagcctgtttgttttggataatgagcatgcaatggctgccaataagctgacccttccattatgcagcaaaattattgttccaaacattatagatatgtggaaactaatggagtatggggctaatcctaatgatataattagatataacggaacctctgagcttatgcacttcaataactttgtattcaatgagaatatctttgaggatttgggattggatttgcctcttcaaagaaccatacttatgaggcctgagccatctcttgcgtcctatttgaatacagactgcagaaaatcagttttatcccctgttgtagatgtcttaaaggagtatgcaaatattcttattcttcctaggtttaaggaacaggctgagatatttgaaggaataaagaatgtgacaatccttaagcctccggtagacacttcaagcataattaaggcatgtgaccttgtaattggagctggaggaacaatgaatagggaagctgcaatacttcagacacctgttatctcatgctatcctggagacacattgtctgtagaccagttttatgtgaataatggtcttatgtataggactacagatttagaggacattactaaacaggcacttagctttattgtaaatccacataagcctattgactttaaaacagatgatctctttgatttgattgtgaaaaatacttatgagctgggcggttctaagaaataa

SEQ ID NO: 1630 - DNA, 762 bp, Methanobrevibacter ruminantium
  source 1..762: mol_type = genomic DNA
atgcataaagttgctgatgttgaagtagcaaagaacattatggatgccaatgcaaaattggcacataagaatttacatttattggaagaccacgatatcttttgtgtagactttgtaggagcaatcggatctggtaaaacagctcttattgaagagattattgaaaatgttgatgaaaaaatcggtgtaatcgctggggatgtaatcagcaagtttgatgcaggcagaattgaatctcacaatgttcctgtagtcggattgaacaccggcaaggaatgtcacttggatgcccacttggtgggtcacggattaggtgacttgcctcttgatgatattgattatctattcattgaaaatgtgggaaaccttatctgtcctgtcgactttgaattaggctcacatatgagagttgtggttgtaagcgttactgaaggtgacgacactgtagagaaacaccctcttatcttccaaaactctgaccttgttataatcaataagattgacttggcagaagctgttggagctagcgttgataagatggtatgtgatgcaaaacgtcttaatcctgatgttaaggttattacttcaagcttaaaagaaggaaaaggtttagatgaagtaattgctgctattgaagattgcaaggctcatgtagctgaacatcatcaccatcatgaccatgagcatgagcatgaccacagtcacgaccatgagcacagtcatggccatgaccatagtcacagtcatgaacattcccattaa

SEQ ID NO: 1631 - DNA, 375 bp, Methanobrevibacter ruminantium
  source 1..375: mol_type = genomic DNA
atgcacgaattagctatggctcaaggaattttaaatgcagtgctggaaactgcagaggctaacaatgcaattgaggtaactgaaatagttattgaaattggcaaattggctatgcttaatccggaacaattgaaatttatgttaggtgtcttatgttccgagacaatcgcagagaatgctgaacttattgtagaggatattgatgttgaaatcaagtgccacaactgtgactttgaaggagtcgctaatgttgatgacagcgatcattatgctcctatgattttatgtccaaaatgcgaaagtcatagggtggaagtcaaaaacggcaaggatgtaaccgttagaaacattagtattgaaaaagaggacgaataa

SEQ ID NO: 1632 - DNA, 921 bp, Methanobrevibacter ruminantium
  source 1..921: mol_type = genomic DNA
atgattattggtggttcagcatcacaaaaactagcggctaatgttgcaaaggaattaggggatgttttatgtcctatagaaactaaaaaattccctgacggtgagagatatatcagaattaaatcagaagtggataaggaagttacaattatccaatccactggttttcctcaagatgaaaacttggttgaacttttatttttaatcaggactgtcaaggacttaggtgcagagcatgttaaagtggttgtgccttatttaggatatggcagacaggaattaagatttaaagatggggaagctatttccgctcaattggtagctaacctaattgaggaatcaggtgctgatgagttcatttcaatcaatctccatgaggacagcgttagagacttcttcaacattccaactgcaaatctttcagcaatgcctcctattgcagaatatattgcaaacactgtggaaaatccaataattattgctccggataagggcgctttaggatttgcagaagagatcgctgaaatcttaggatgcaattgcacttatatgagcaaagtcagattaggtcctgataaggtggaaactactattgtagacattcacagcgattttgacagcgaagatttggctaaagtaaagaaagactctaaggtaaatatagattctgtaaaggataaggaagcaatcatcattgacgacatcatagcaaccggaggaacaatcgtcaatgcaattggcatattaaaggagcacggcgctaaatcagtagatgtctattgtgttcacccagttcttgtaaacgatgctgtattgaagatatctgcagctggagctcgtgaattggcaagtacagataccttaaaatcagatgtcagttcaatatccgttgctaagatcattgctgatgtcttaagataa

SEQ ID NO: 1633 - DNA, 1104 bp, Methanobrevibacter ruminantium
  source 1..1104: mol_type = genomic DNA
atgttattgatagctcaaaatcattttcaacttatacttgaagtaggtttgattttacttgctactatgatattcgtaatcaatttggttcctttatcattaagtgtggtaacattcctctcattattcctatctggaggatttacaattctatttggagccgacttggctttcctggtattatcatttggtcagcatgaatttactcaccctttcggtcctattgccctattggctattgtaaccgcattagcgtcgcttaaggttatggaagggtcgggtgttgatatatcaaggcttaaaaatatcgtatatgtttttcttatagcaataaccgtattcggtggagcaatgcacagatcattcctattgctatggttcatcggtctgttcataggttatactatcatttccaaatcctttaggcaaaagtctatccttacaatcagaaggattttaatgtttttccttgcagctttagttgcattcggtttgcttgagcttgtttccaggattttaagcatggaagttttctctccattgttaaggatttcaagacttgctcagaactctttggcaagtctaaaattggtaattggaaatactcaattgataggtcacgatcctgcttcatcctattggtctgacagtactggatttgcagatggttatattagcttgccaatgcaattcattttgatgtttggcttgccattcccattgttctttggtcttttggtaaccaagaaggatacaatcgactatatgcttccaggtatcttcggttatgcatatgactttggatatttgacattcgttatattgcttttattagtcttatttacaatcataataggcctgcttgttcttcgcgaatacagacttaaaagagaaaagaacaataagaaatatttaggtaaggaagttcttttaattggttcccttactggatttattgctcaagcgatcattggtttgttcctctttaacaggacaataaacggtatggcgctgctcacattcctgttcttaggctctttggtcttggctcatgttgtgactattagacgtgatagcaatgaagttttaagccaacaaatttaa

SEQ ID NO: 1634 - DNA, 480 bp, Methanobrevibacter ruminantium
  source 1..480: mol_type = genomic DNA
atggtaaatataaaaactgttgcattagctgttatagcaatcatagttgttttattggctatatttgctgtttccaatgtagtgattttagctcaggatgatactgaagggggaattcctggagttgatatggctgctttatggagtttgaatggtggtttccaatggatatatcctggaagctcttttgaccctgaaggccgtactcttcacaatatctatatgcttgacgacccttatggcgaagttaagacaatcatgcagtacacatataatgtggatcctcatattctggttataataaacgaccaggctgctgcccatatatttggggacaatatattggatacaatccgtcagcatgattgggtcgaaggccattcccgtggagatgccgttggaatgagcataacctctgtaaatcctttgccgataattccagacattttaatgggaaatattaagataatgttcatctaa

SEQ ID NO: 1635 - DNA, 2175 bp, Methanobrevibacter ruminantium
  source 1..2175: mol_type = genomic DNA
atggaagaaaagaaaatagaatctacagatgttgaagtgaatgaatctaaagacttaaacttagattccactgtagagaataatgaaattgacaagactgaagaacttgacgcttcctctgaaattgatgagaatgaagaacttggcacttcctctgaagtaagagaaaccatagtcattgacacagccagtgaagtggttgaagcggatgtggtaagcgaaaccatagacagttctgaatctgtcaaggatgaagaggaggatagcaatcctcttgatgtagaatatgttgaagaagatggaaaacgtaggataaagcctatgcttgattacgaatctctttcaaatacctctgaaattgaagttcctccacttctcatcgaccaggtcataggtcatgaggaatctgtggaaacaattaaaaaagcagcaaagcaaagaagaaatgttcttcttattggtgatccgggtgtaggtaagtcaatgctcgctaaaggaatggctgagttattgcctcctgaagtcttagaagacgtattggtttatccaaacggggaagacagtaattatccattgattaggacagtccctgcaggtcagggcaaaaagatagtcaaggcaaacaaggccaatgcaaaaagcggcgatgagaagaagatgatgatcaccatgtttgcaactgcagctatctttgttcttggaatcctataccaaagaatatttgaagctatcattgctgcattgcttgtaatatttatttccatgcaaatcaagcctaaggcaaataacatgtctcctaaattattggtaaacaacggagataaaagatttgcaccattcatggatgctactggtgctcatgccggcgcattgctcggtgatgtaaggcacgacccttaccaatctggaggtcttggaacccctgcacacgaacgtgttgaaagcggaatgattcacaaggctcataagggagttttatacattgacgaaataggtacaatgagcatgaaaactcaacaagagctattatctgctatgcaagagaagaaatatgcaatcactggtcaaagtgaaaacagcagtggtgctatggtccgttctcaagcagttccatgtgattttgttcttgtagcttctggaaatatccaagttcttgaaggaatgcacattgcaatgcgttcaagaatcagaggatatggttatggggtctttatgaaagattatatggaagacaccgaagaaaaccgtaaaaagcttgtacagtttgtagctcaagaagtcaagaacgacggcagaattcctcactttgcaactgacgctcttgatgaaattattttggaagctaaacgtagagcaggaagaaagaacgctttaactcttagattaagagagttaggtggtttagtacgttcctcaggtgatgttgcaattgaagaaggtgcagatttggtaactgctgaacatgttgtaaccgctaaaagatttgcaagaaccttagagcagcaaattgtagacagatccattatccaaaggaaagaatacagcgtattccattcctcaggtggaaagatcggtatggttaatggtttagctgtaatgggtgatagaagcggtattgtcatgccaattgctgctgaaatggctccggctaacagcaaaaacgaaggtaagatcatcgttaccggtaagcttggagaaatcgctttggattccgttcagaatgtaagtgcaatcattaagaaatacactcaagtggacatttccaatcacgacattcacgttcagttcctccaaagttatgatggagttgaaggggacagcgcaagtgtttcaataactgcagcggttatctctgctgttgaaggcattccgatagaccaatcaattgctttgaccggttccttaagcgtacgtggagatgtcatgcctattggtggtgcaaccgctaagattgaagcggcagctgaagcaggcattaagaaagttctattgcctaagtccaatatggaagatgtcatgcttgagaagaagtatgaggatatgattgagatagttccaatcgaaactatcgaagacgtattggaaaatattctaatcaacggaagcaagaaggaaaaattaattaataaaaatgagagaaatcagtggagcagtcacaagcaaggtctctactga

SEQ ID NO: 1636 - DNA, 1641 bp, Methanobrevibacter ruminantium
  source 1..1641: mol_type = genomic DNA
atgactaaatgtttaatgattcaaggaacagcatcaaatgctggaaaaagtttgattgttgcagcactttgcagaatatacacaaaaagaggatacaaggttgctccattcaagtcacagaatatgtctttaaattcatacactacaaaggaaaataaggaaatagccattgcacaggttttgcaggcaaaggctgcaaatatagagcctacagtagatatgaacccaattctcctaaagccaaagggagaatcatgctcacaagttatcatacaaggagaagcagttggaaacaaggacttctttagaaaatatgataagacaaaggccacccaaagggatatagacaataatctgatggatgatgaggactatagaatcattgcaaaggaagctgtaatagactcattaaacaatctcaaggaagattatgacataatcattatggaaggtgcaggatctcctgcagaaatcaacctaagggaaggagaccttgcaaatatgggagctgcagagattgcagatgcaaatgtacttcttgtaggtgacattgacaagggaggagtctttgcatcaatagctggaacattcctattgcttgacgatgcagaccgctcaagatttaagggagtcattataaacaagttcagaggaaagcaggaattattatgctctggaatcgaaaggctcgaagaaatcattcaggtcccagtccttggaattgttccttatgctgaaaacctccagctaccagaagaggactctgcatccttaaaggagcacaactggacaaaggaatttaagaataatgatgatcacataataattggagttgtaaagcttccaaagattgccaacttcacagacatagacccatttgacacagaagatgatgttgaagtgagaatgattgaagtccataattacaaagacaaaatcaaggacattgatgcattgatcttaccgggtacccgtaactccactgaagacattatggaacttgaaaagaccggtttggcacaagagataaggaaactgtcaaatgaatccaagattccaatcatcggaatctgcggaggataccagatattgggaaacaagatctatgataaaaaccataaggaatccaaacttgatgaagttgaaggattaggtcttttagacattgaaagtgagtttataagggaaagcaaggtcgtaaagcaaagcataggtagaatagaaataaatgataatatcactggtctaaataattccgatgaaaataatatcttttatgaaatattctctaagatcaatggggaaactgtaagcggctatgagttacatgaaggcactacaaatcttataagcgccaagccattatttaaaatagaaaagggaattggaaataatgacaatgaccaatttgatggtgcttacagcaagaatgtatttggaacctatttccatggaatatttaataattataatcttagaagagagtttttaaaccatttaagaaaaaataagggtttggatgaaaaaactggtgaagatccatatgaaacaagcgttgaaaattctcttgaaaaattagcaaatattgtagaagaagctcttgatatggattatattgataaattggtttttgatgaataa

SEQ ID NO: 1637 - DNA, 1161 bp, Methanobrevibacter ruminantium
  source 1..1161: mol_type = genomic DNA
atgagagatgttgcgattattggagcttcccaaacaaaatttggagagttatgggatgtttcatttagagaattaatttcacaagctggtcttggagctattgaagacgctaacctaagcggtgcagacttggaagccatgtttgttggaaacatgtctgcaggtctttttgtaggtcaagagcacattgcctcacttatttcagacagcatgggaatgaaccctgttccatgtacaagagttgaagctgcttgtgcatctggaggattggcacttagacaaggaatcatggctgtagcttccggataccatgatgttgtggtagctgcaggtgtggaaaagatgactgatgtggtggatgcaactccggctattgccacagcatccgatcaggaatgggaagcacagcaaggagccactttcccatcattatacgccatgattgctcaaagacatatgtatgaatatggaaccacaagggaacaattggctatgatgtctgtagttaatcataagaacgcttcaaacaaccctaatgctcaattcccatttgaagttactgtagataaggtattaaattcatctcctgttgcagatcctttaacattgcttgactgttcccctgtatcagacggtgcagcagctatcgttatctgtgcagcagaaaaggctaaggaatacactgacacccctatctatgtaagggcatctgcacagtcttccggaaccattgcgcttcatagcagaaaggacatcactaccttggatgcaaccattgcagcttccagaaaagcttatgatatggcaggagtcactgtaaaggatattgatgcaactgaagtccatgactgtttctcaatcaatggattgcttgcaattgaagaccttggatttgctaagaaaggagaaggcggcaaagtattggaagaaggtcagactaatattgatggtgattgtccgattaacccatctggtggtttaaaggcaagaggccatcctcttggagccactggtattgctcaagctgctgaaattgtatggcaattaagaggagaagcaggcaaacgtcaagtggatggtgctgaaatcggtatgactcataatgttggtggtaccggcggtacttgtgctgttcatatatttggcagagaccttaactaa

SEQ ID NO: 1638 - DNA, 1041 bp, Methanobrevibacter ruminantium
  source 1..1041: mol_type = genomic DNA
atggcaggaattgtaggatatggggctaatgtgccttcatatagaataaaagtagaagaaattgcaaaagtttggggagataacccagaatcaatttccaatggtttaattgttaatgaaaagtcagttccatcttctgatgaagacactgctactattgcagttagctctgcaagatatgcattaagaagagcacaaattgacccacaagatattggagcggtttatgtaggttctgaatcccacccttatgcagtaaagccaactgcaaccatcgtagctgaagcaatcggtgcaactccggatatgactgcagctgacttggagtttgcttgtaaggcaggtactgcaggtattcaagcggtaatgggtttagtggattctggcatgataaaatacggtttggctataggtgccgatacctctcaaggagctcctggagatgctttggaatacactgcatctgccggtggcgctgcttacatcatcggaaataaggacacaatagcagactttggaaccacttacagtttcactactgacactcctgatttctacagaagggaaggtcagccttatccaagtcatggaggaagatttacaggtgaccctgcttacttcaagcatgtcttaggagcagcaaaaggattgcttgaaaagacagattctaaagttgaagattatgattatgctattttccaccagcctaacggtaagttttacctaagggcagctaagaaattaggattcactccagagcaatataaggatgggctcttgactcctaatgttggaaatacctattctggtgcagttcctttagccctttccaatgtattggacaaggcagagcctggagataagatatttattgtatcatatggttcaggtgcaggaagtgacggatttacattgactgtaaacgacagaattgatgaagttaggaatttagctcctacaactgaagagatcctctctaaaaagatttatgttgactatgcagtttatgctaaattcaaaggaaaacttagaatggcatag

SEQ ID NO: 1639 - DNA, 267 bp, Methanobrevibacter ruminantium
  source 1..267: mol_type = genomic DNA
atgagttcaggattaactataggattgctctccttaataatttttgggaatatagaaaacttgattcttgcttcacagggagtagtaaaagccgcaaatccacttaaacttgcaatattcagtttaatatgcgtaagttgttggctaattttaggaacagtatgtacacaacaattacaaaattatggaatttacattgaattcattggcggatttgcaatattcgtattaggacttcaatccatgattgaagcagcgagaggatag

SEQ ID NO: 1640 - DNA, 288 bp, Methanobrevibacter ruminantium
  source 1..288: mol_type = genomic DNA
atgtcatttgcagaatcattaaaagaatataaaccatttttaggtttattgatttttggtaacattgaaaacttagttcttgctgcccaaggtgttattgaaggagcagatccttttcttgttgcaggagcaagtgtttgctttgtaattatttggcaatttataggagtctttggaaccaaatcagcaatgaaatactctagacacattgaattcattggcggatttgcaatattcgtattgggaattcaatccatgcttcctttaatataccaattgcttggataa

SEQ ID NO: 1641 - DNA, 669 bp, Methanobrevibacter ruminantium
  source 1..669: mol_type = genomic DNA
atgtctgatgaaaagatggaaagagtggaagataatgaattattgattaatgcacgtaagcctgaaggagaattaggtgatcaattattggatagaatgaataagagtcacgaatctcttgcacaatggggcgtaagtcatttggatatctctaaagatgatatcattttagatattggatgcggcggaggagtcaacgttgaaagattccttaaaatgactgaaaacaaggtttatggtttggattactcagaagtcgctgtagaaaagtctaaaaaacttaatcaaaaagcaatcgaagaaggcagatgtgaagtcattcaaggctctgtatctgaattgccttttgatgatgaaatattcgacattgtaacaggctttgaaacagtttatttctggccagattttgtcaatgacttaaaagaagtcagaagggtgttaaaggaagatggaataatatttatctgcaatgaagcaattcctagagatggggacgctcgtcaagaggagcttaaagaacttttggatatgaatatttattcagatgatgagttggaccaatcattaaggcaagcaggattctcagatttaattatttttgataagagcagttcaaaagttgaatccaaggacgtaagtggttggatttgtgcaatagctaaaaaatag

SEQ ID NO: 1642 - DNA, 468 bp, Methanobrevibacter ruminantium
  source 1..468: mol_type = genomic DNA
atgacttttggaaacgataaggaaaatatttttgtaaaaaatgtagttgattatggtgatttaagtaaatctgataggagttctaaccttggcaggttttttcccaatcgtcagtcccctaaatctgattttgattctgttccatcttcaattgatgagaagataatcaatatcttgacttttaaggatgaaggtgattcaaatggttctaataatgatggaacttctgacgattctgtggatggtgtggattattctctctttgatgaagaattagaatacatctgcagcttaggcttcaatccatttgaggaaggggggataaatagggattccttggaagagcatttcaatccatatcttgaaaatcatccagaggagcttgctttcctttctgtctttgaggattttactttagtccagatgaactttagcgatatgattaaggaggtctattttgaggaatag

SEQ ID NO: 1643 - DNA, 1611 bp, Methanobrevibacter ruminantium
  source 1..1611: mol_type = genomic DNA
atggcacaaggtcaacctatttttattttacctgaaggaaccaacagattattaggtagagatgctcaaagaaccaatatcttagcaggtaaagtattagcagaaactgtaagaaccactttaggtccaaaaggtatggacaaaatgttagtggacggactcggagacattgtagtaaccaacgacggagttactatcttaaaggaaatggatattgaacatcctgcagctaaaatgctcgttgaagttgcaaaaacccaagaagacgaagtaggagacggaaccacaactgcagtaatcattgcaggagaactccttaagaaatccgaaaccttattggatatggacattcacccaactatcattgctatgggttacagacaagctgctgaaaaggctcaagaaatcttagatgacattgcaatcgaagacatttcccgtgaaatgttagttaaagtagctatgactgcaatgactggtaaaggaactgaaaaagctcgtgaacctttagcaaacttaatcgtagacgctgtacagcaagttgctgatgacggcgtagttgaaaccgatcacattaaaatcgagaagaaagacggtgcagtagttgaagaatccactttaatccaaggtgtaatcgtagacaaggaaaaagtacaccctggtatgccttctgaattaaaagacgctaaagttgttttaatcaactccccactcgaagtcaaggaaactgaagttgacgctgaaattagaatcaccgaccctgctcaaatgcaagcattcattgaacaagaagagcaaatggtcagagacatggttaacaaagttgcagactctggcgcaactgttttattcgcacaaaaaggtatcgatgacttagcacaacactacttagctaaagcaggaatcatggctgtaagaagagtcaaaaaatctgacattgaaaaattagctaaagcaactggtgctactgttgtatccaacttagatgacttaactgaagctgacttaggaagcgctggctctgtaatccagaaaaagatttccggtgatgacatgatctttgtagaagaatgtcaagaacctaaagcagtaacattactcgttagaggaagtaccaaacacatcgtagctgaaatcgacagagctgtagatgacgcaatcggtgtagttgctgctactgtagaagacggtcaagttgtagctggtggaggagctcctgaaatcgctatggctaaaaaacttaaagaatacgctcaatcaatcagcggaagagaacaattagctgtaactgcatttgcagaatccttagaaattgttcctaagaccttagctgaaaacgctggtttagacagcatcgactcccttgtggacttaagagctgctcatgaaaaatccccttacatgggattaaacgtattcactggcgatgttactgacatgaaagaagaaggtgttgtagaacctaaacgtgtcaaaaaacaagctatccaatctgcttcagaagctgctgaaatgattttaagaatcgatgatgtaatcgcttccagcggaaccagtgcaggcgacatgccaatggacccaggtatgggcggcatgcctcctatgatgtaa

SEQ ID NO: 1644 - DNA, 1017 bp, Methanobrevibacter ruminantium
  source 1..1017: mol_type = genomic DNA
atggtagaaagggcaaatattaatccggcaatgatgctatgggctagaaagcgtgcaggatacataaatggctttgaggaagacttgcctaaagacatcaaatcaaaatataagtcttgggaaagtggagaggaaaagcctacttggacacagcttagaaaggcaagcaagaagttttgccttcctagtgcattcttctttttggagaaggtccctgaagatgatgattttccaaaaatgattaattatagaaagttagacgctgatgatatttttgaaaacaactccccaagcctaattaaacaaataagaaaatcccaaagccgaagggaacattatcttgatttattgtatgaattagaggaaaacattccatcatttgaaatatatgaaggctccttaaataaaaagcatgtctcaaattacattagggaaaaattgggaatctctttagagactcaaaagacatggataagaaagaacaagtcaaaagacagcaggcattataatttcttaaataaatggaaggaaatcataacacgaaagattggggttctaatctttgaaagcgaaggagttgcccttaatgaaatgagaggattatgcatattccataaggaagttcctataatcctattgaatggaaaggatagtgtaaatggaaggatattttccctcttccatgaattgacccatcttctattaggccaaagtgcaatctgcggagatgatgagaatattgatgaagagatcttctacaatgcagttgcaggtgagtttcttgttccaaatgaagatttatgcaaaaatacaaatgcagataatatggatactatttccaatggcgccggtggaaattatttgaataatcagataaaatacaacggagagccttactgtgcagttgttttagaggcttatgaaaagggaataatcaatggtggagaattttccagattcactaatctaaataagaaattcattccatttatgtttaatagatatctattttcttaa

SEQ ID NO: 1645 - DNA, 276 bp, Methanobrevibacter ruminantium
  source 1..276: mol_type = genomic DNA
atggaagaattcagacagcaattagtggataaggtagtgttttcattggttaatacaaaacaaatcagcaatgatgatttggacaaaagaaataacagcatttcacttgatgttagaaaattaatcattggcagagttttggacaaggtcaattccaatataaattacgaaggagaaaacttaagttatgctcaaataattgataagcaagctaaaaaaatagttaattacttgataaatggagaaaaatatactggctttagtttaagatggtga

SEQ ID NO: 1646 - DNA, 696 bp, Methanobrevibacter ruminantium
  source 1..696: mol_type = genomic DNA
atgaaaatactgattgagggatacaacaaatcaatccataagagagacaatcaaattctaatcatggaaaaggagggggaattggaaaaaatcaatataaaaaagattgatgatataacaattatcggaaaaggatccatcacatttgatgccttgagactaatctctgaaaataatgtccggctaatgtctatagactactttggaaagataaactatactcttgagtatccgagcaatgaaaacatattcctaagaaagcagcaatataaaacaagtgaaaaccacaaaggtctgattattgcacgggaaatgataatgtctaagatgattaatcaaaaatcgacaattaagacccttaataaaaacaaaaaattagaaaatgttaagatttttgaaagaaacatcaatgaagcaattaaacaaattggcagtttacggtttggagaaaggacagacattgaaaaatcaaaaatgaagatgatgggaattgaaggaagcgcctcagtggactattggcttgctgtaaatgaacttctgcctaaagagataggtttcttctcaagaaataacaggcatcctaatgatattacaaatgcaagccttaactatgcctatgcaatacttgcaagcgaagtaaacaaggcgcttgtcataaatgggcttgattcatattgcggttttcctgcattttga

SEQ ID NO: 1647 - DNA, 276 bp, Methanobrevibacter ruminantium
  source 1..276: mol_type = genomic DNA
atgaaggtcttagtttcatttgaaatcaaattcaaaaccaacaaggaaaagattatatccattctaaagcattttggctttagaaggatgcaagaaaacttatattttggggatgtcgaatatgatgaactatatgctatgcagtccgatattatggagaacattcgagaatatgacagcatactgacaattcccatctgcaaatcctgctatctgaagctgaatgtatttggaagaaatctaagctttaaggacgaattatacaaaatattttaa

SEQ ID NO: 1648 - DNA, 9162 bp, Methanobrevibacter ruminantium
  source 1..9162: mol_type = genomic DNA
atgaataaaagcaaaaaaactatgattatgctgattatggcaattcttgttttattgaccatggccagcgtaagtgccagcgaacttgaagacattcaagtcacagcatccaatggcacatcagatgccgttattgcatctgaagcaaatagtgcatatcctgataatgccattatcacatccgaaaaggaaaatggcgatgagaatattatcgcaacggataatggaaaaatcggatatgaaaatgacgataagactattatcgcaactaatggaaatgggggaaatatcggatatgaagatgacgataatactcttatcacatcagacaaagaacttaacgcattggataaaggaaaataccaatccctatctgtaggagactaccattcctttgaggaattgcagacaattctcaatcaagcggatggcggagagacaatagaactgaactatgactattcccttggagcaggaggatcaaccctaaagcttacaaagggattgaccataaacggaaataaccatacactatatggcgtagggcttgaccgcatactttacataagctccctcaacacccagccaatcatcctgaacgacatcatattcaaagacggcggaaaaaaggacagttacactaacctggaaaccaactggggaggagccatatactacaacccgacaactgaaggcggtgcaatcggcggcgaaccggccgattttatcataaacaattgtacctttgaaaacaatggagcagtcaacggaggaggagccatcttttggaacggatctctcaaaatcatagattccagattcttcaacaatgaaatcgaactgggaagcggaggcgcagtctatgcaaacggcaatttgactgctatcggttgctctttcagcaacaaccgcgtcagacatggacttataggaatggacatgctaaccacaacctttacagatgaaggatattgggcaaaggtaattcaatactacagtttctatagtgtcgatgtaattccccctacaggaggggcaatattctgtaacggaacctgtaagataaacgactcaagttttgacaacaaccaggcaggagaagcgaatgagatgggaaccggtggaggagcaattcattccatgaacgatataaccgtctgcaactccactttcaccaacaacaaggcttacgatcagcatggtggcgcaatcctctgtaacagatccggatttatttacaactccactttcagaaacaatgtagcaaacgtgggaggtgcaataagctgtttctattaccttaatgcagaaggttcaacattctccaacaacggtggcgaaataggcactacatggatggatgaacactcctttgatttccttatagataattttataggcagcatacctatcataggggacatatacggcgccctgcaaaatttccttgatcttttaggcgtagagagtgtcgatgtcctgacaggccaatacttcagcgttggaggcgccctctacactggactcgactgcaatgtcgataaatgtacatttgaaagaaaccatgcagccgaaggcggtggcgcaatatacagcgaacgaaaggtaacagcaaaaaacagcgcattctcatcaaacaaggttttccgtggagacagcgcagtctctgaactcatgagcagtcaaggaaaaaacagagacggcggagcaatccatgcagaaaatgcaacaaccatcagaaactcagaattttcaggcaactccgctccaagcaagggcggtgcagtctactgtgcacatcacctggaaatgagcgattcctcatttttatacaacacagcataccaaaacggaggagccctatatgcagatacaataggaacaatttccaatacaaagttctccggcaattcagtaaccaaaggcagcggtgacggaggagcagtatacatcatcgcccaaagcgatgctcgatttgaatcctgcgaattcagcgcaaacactgcagaaagcgacggaggagctatctatatagcaaattcaaattcacttttaaggctgaacaaatgcacattcattcaaaacattgcccatcttgacggcggagcattcaactgcagaggaaagactgaaatcaaaaattccgtattcaagagaaattcagtcgatggagacggacagaccgaaaacagccagggaggcgcagccttctcaaaaggagatatgagcattagcgattccagcttcgagcaaaacatggcaaaacaccatggaggagcagcatataccgacggaaagatgacagtgaaaaacagcaatttcacagtcaacagcgcaaacaatggaggagcaatatatgcaagcgtgatgaatgacgaagtgacaaattcaatattcaagaagaacactggaaccaatggagacggcggtgcaatctacatcaatgacaaatcttggcctaagttcgattcctgcgtattctcagacaacaagtgcgtagtcaaatcctcagttgaaaattcccaaggaggagcaatctatgtaagaaacgatgactccgagctaaaggtgaccaactcaaacttcacaggcaatgctgcaggccaaggaggagccatattttccggcaaggttaacgaaatcaccaattcagtattcaagaagaacggtgcaagcaaaagcggaggagcagtatacatagaaccaaactgcaatcctaagattcgccaatcagtcttcgaagaaaacgtgggcggcgacaaaggaggagcagtctatcttaattcaaaatactcctacctagaactgaccggctgtaacttcaccaagaacactgcaaaagaaggagggggcgtatatgctcaacaaatgagcgcaaaagtctcatccaacagattcataagcaacaaggccaccgacggtaaaggaggcggaatatacgttagaaactatcacattactgaaacagtaaagagatatacaaccgaattcgtagactgtacattcacaagcaatacatgtacagacaatggaggaggactctgcatggactcaacatattccgtactgaaaataacctcctgtaattttacaagcaacactgcaaagaataacggaggcggagtatgggcccatatgataaactccatccaatggtcaagcttcagcaaaaacaaggcgaccgagggcaaaggtggaggagtccacattaaaaatgactaccctaacagaattgcagataaccctaaaaccgaagtaaagaactgccaattcgattcaaatacatgcaaggatgaagggggaggacttcatgtggaatccgaacacgccaagctaacactgacttcttcaacattcagatttaattctgcaggacgcggaggaggagtctatgcccataaggtcatttcaatcaacagctgcggattccacaacaacagcgcgaattatgtaaagaacaacggtgacggaggagccatatatatagaaaacgacaacgactttgaaatcaagagctgcagattcgaaggaaatacagcaaagagcagaggaggagcaatctatatggattcctatgaaatcaagaccaagatatcctactctacattcgtcgacaactatgccggcagggatgaccattccagcacattatatacattcatggcaggacacagcgtattcaccaagggaacctatacaaacatctccctatgctggttcggatcaaacaatcctagtttcactgaacagcttgttgaccagaacagggtatcaagcgacaaagaaaagaaaccttcagacttcggtgcagaatacctgaagatcaatataaaaatcaataatacccgtcctattgcaggaaatccttataaggtaaccgtctatttcactggaaatgtcaacaacaatgtggtgagcttcagctcaaacaccctctaccattccaccggaaaatttggaggggacggcacatactccaatatcaaagcggacaagaatgacatgactgcagatgtggtcctcactccagaatcaagacagatctggggacagcttgaccatcagaaagtatatctgaatgtcaatccgctaaccaagaattcaactatggtagagataagatcctgcgaggatatcaagtatcctgatgcattggaggtcaactataccctagtcaactataccataagcaatgcggaagcggccacatacataatcaatgacagcgaaggaaacacagtaaagtcaggaaaccttacaagccctgagacattatatgtagaaggattgaagcctggaacctattcaataacaatcacaatccctgaaacatactactatctatcatccaatgcaactgcaagcttcgatgtctttaaaggagacatcgaggaactgagaatcgtggtaaacaacaggacatatcctgaagaggtcaaggccatcgtctatgccagcgtagacgaagactatgaagtgacaataggagaagagacaaagaccgttactgtaattggaggaataggccaagtcaatttcggcagcctagaaaccgacacctatgaagctacagtatccttcggaggaagcgatctctatgagcctatctcaaacgctaccgaatttacagtatatcctgaagaggaaggcaccaatttcgagattgatacaaatgcaagcgaaatcacatacggcgcaagcatcaaagtcactcacaaattgcctgaagatgctacaggaaccatcaaatattacctgaacaacggcactgtccttggagaactgccggtcgaagaaaaactgacactggaccttgatgcaggatactatgtaatatttgcaaactattcaggcgacgaaagcttcgagcctgactgggacagcgcagatgtcctcgtaaagcaagtagaaacagaattccatataggcctccagcagcaggtcatatccggcaaccctgcctatgtcacccatagcatatccgagggcgctacaggcacaatcagctactatctgagcaacggaaccttccttggagaagtgcaggtcggcgagacatatgtttcacctaaatggaaggtcggaatctataacataaccgcaaactattccggagacaggaactttgttccggcatcagacagcatggaattcagaatcaatcctgacttctcgttcgacatataccttgacgaagacgacgtcatatacggccagaccactacagtacgtccaagcttgccttatgacgctacaggcaccgtggaattctactataacgacacatacctgggcaaggtaacaataggccaatatgaaatcataatggttgacggagaggaatactacgaaactccaggagtggagcttcctgaattcgacgtgggagtccatgaaatcgtaggaaaatacttgggagacaagaattatgaccctgcaatcgcaaacgtaaggcttactgtcctaagtaccgaaacagtattcgagatcaatgcaagcccaagcgaaataaaatacggagaagctgcagctgtcatccataaactgccaagccttgcagtaggtaccatcttatattacctgagcgacggaacatccctcggcgaactatactactacgaggaccttgcattgcctaaattggctgtgggaagctatgagattcttgccaactattccggagacgaaaacttcaacaatgcaagcgcaagcacaaccttgacaatcaataaggcagaccctgatttcgaaatctatatcgcattcccttcctatgacttcggagatagccctgtagtcttcgttaacttacctgacgacgctacaggaaatatctcatactacctgagcgacggaaccttccttggagagcttccggtagacgaaaggctgtccttgcctatactgaatgtaggaacacatacaattataggaaactattcaggagacggcaactacaacaatgcaagcgcaagcatgacagtgactgtaaatgaggtatccatggaattcaatcttggaatcagcgcagaagagataagctacggcgaaactgcaacagtcacccacagactgccaagccttgccaaaggaaatataacatattatctgagcgacggaacactcctcggagagcttccggtcagcgaaaacctgaccttgcctaagcttgatgttggaacatacattataatcggaaactactccggtgacgaaaacttcgacggagacagcgcaaatgtaacattgacagtcattcaggcagatcctgcattcgcaatcagcataagcgcagaggaagcggcatacggcgaaacagtcacagtcagcccagcactgccagaagatgcaacaggaacagtaatatactacctaagcaacggaacaatactaggcgaacttgcagcagacgaaaacctgaccctgccaaccttcgatgtagatgtctatgacattttggcaaactattcaggagacaagaactacctcaatgcaagcgcagaaacagcactgattgtaagccaggcagaccctggattcgaaatcagcataagcgcagaggaagcagcatacggcgaaacagtcacagcaagccctgttctgccagaagatgcaacaggaacagtgatatactacctaagcaacggaacaatactgggcgaacttcctgtagacgaaagcctgaccctgccaaccttcgatgtaggcacatacacaatccttgcaaactactcaggagacagcaactacctcgatgcaagtgcagaaaaagagctgaccctaataaaggcagactctacactggaaatcaatgacatagcctttgactacagcaagacaggctcagccgaagcaaagacttcaggcgcagaaggaatcgtcgcttcagtggcgggccatgacgaagccgtcgtcgaggtaaacggaaacgagattacagtatccggacttgatgcaggcagctacaccctaagcgtttcaacaatcgtagacgacaaccacaacagcgcaagcaagaacatcacagtaacagtcaaaaagatcgattcaagcctttcagtcgaaggccttgagctggactatggcgaatcaggcaatgttgatgcagcagctgaaggagctaccggcatcagcgccaagatcggaagcaagagcattggagtaaacggatattccatccctatttccggactggatgcaggcaaatacaacctgacagtgactacaatccctgacaggaaccacaaccctgtaacaaaaacagcccagatcactgtaaacaagatagattccacattggaagcaaatgacatggcattcgactacgagggcaccggcacaagttcagtgacatacaccggcgcaaccggcgtaaaggcttcagtaatcggacagccaaatgcaaaggtcaatgtaaagggcaaggagatttccgtctcaggattggatgccggaaactatactctggaaatcactacaatccctgacaagaaccacaaggctgtaagccaaacagtcaatgtcacagtcaacaagatcgattcaaagcttgacttcaacaaccttgtagactacggatctgcaatgaacgttaccgtaaagaccgaaggggcaagtggaataatggctgaaatcgacggaaaggaactcggcgtcgacaagtacacaatccctatctccgcattggatgcaggggaatacgaccttacagtaacaacaatccctaacagcaaccacaatcctgtcagcaagaccgtcaaggttacaataaccaagcttgactcagaactggctgtcgaagaccttgaattcgactacaacagcactggaactaccaatgcaacattcgaaggcgcaacaggcatcacagccaaagtcgtcggccagccaaacgcaacagtagagataaatggcaattccatatcagtttccggattgaagcctggaagctacaccctggaagtcactacagtccctgacgaaaaccacaaccctgttacagcaaaatctgcaataagggtaaacaagctggagaccgcaatttcagccaatgacataagcacagtccacggcgcagacaagaacctgaccgcaatcataagggacatcaacggcaatcctgtagccaacgccacagtatccgtcagcctcaacggcagcaaaaaatatgtcagcgattcaagcggacagatttcaattcctttgaagagccttgctgcaggcaactacacagctacaatcagctttgcaggcacagagatatacggcaagtcaagcgcaagcatcaaagtggctgtagacaaggagccaacatcaatagctgcaacaaacgtcaatacacagtatggccttgaagactatattacagcagtgctgaaagacggccaaggcaatcctttgggcggagtcaagctgaatgtagatctggacggcaacaggacaatcgttaccgactcaaacggacagatcaagattgctaccaaagacctgacagcaggcaactacattgcgacaatcagctttgcaggaaacggaaactacatggcatccgagtcaaatgcaatcgtcaacatcaacagaacaggcacaaggttcaacttcaagaacatgacaaccaccgcattcgactacagaatcgaaggaaggataggaaaatacttctacttccagctagtcgacgaggatggaaacccattggccaacaagaacgtatgcatcggattcaatggagtcaagtacaaccgtacaaccaatgaaaccggctggaccaagctgcagatcaacctgagatgcgtaaacctgtacacctttgcagtaacattcagcggagacgacaactacacaggcgcattcaatgtagccatgataaacgtgacacatcaaagccctaaattgactgcaggcaacaagagctataaggccagcgcaaatacaaagacattgactgcaaaattcaagagcttcaagggaaccgctattgtaggcaagaagataacctttactgtaaacggcaagaaatactcagccataaccgataaaaaaggaattgcaactgtaaacgtaagccttaacaagaaaggaacttataaatacactgcagcctttgctggagacagcacatacaagaaggtgagtgttacttcaaagctgactataaagtag

SEQ ID NO: 1649 - DNA, 555 bp, Methanobrevibacter ruminantium
  source 1..555: mol_type = genomic DNA
atgacaacaactgcattcgacttcaagatagagggaagaataggaaaatacttctacttccagcttcttgacgaatacggaaacccagtagcaggcaagaacgtttcaatcggattcagcggaaggatatataaccgtacaagcaacgagaccggatgggcaaagctgcagatcaaccttaaatattccggatactacacatttgcagtaaacttcggcggagacgatgaatatgcggcagcattcgatgttgcggcaatcaacgtaaccatccagacccctaagctgaccacaagcagcaagacatacaaggcaagcgccaagaccaagaagcttactgcaacattcaagagctataagggaactccgattccaagcaagaagattacctttaccataaacggcaagaagtacactgcaaagacaaacaagaaaggagtcgctacagttaaggtaagcctatccaagaaaggaacctataagtttacagcctcatttgcaggagacaggacatacaagaaagtcactaaatctgcaaagctgaccataaaatag

SEQ ID NO: 1650 - DNA, 165 bp, Methanobrevibacter ruminantium
  source 1..165: mol_type = genomic DNA
gtggaaatagatgactattttgacattttcggtccaagcggccacgccagtatgatgtacccgggtgaccttgctggtggtgcagagaatgttgccaattgccgttgctgggtacggtacactaatgagagaccaagcaacctaaaaccatatggaaccatataa

SEQ ID NO: 1651 - DNA, 420 bp, Methanobrevibacter ruminantium
  source 1..420: mol_type = genomic DNA
atgtatttgactaagttttgtcctaaatgcggagaagaaaacgaagatgtggctcaattctgcagtaactacggtcatgacttcaaggatgtgaatcaaagaatgaaggaatcgaaaagagagaactcttcattccccttgtctggaacaaagatactgctgtgcattgtgcttcttattgttttaattattgcagcattcctcttcactggcggaaacgctgacaagcctcaaaacattaccatgattaaggagaatacttatggcttcacttttgtcaatagaggggttcttttctataattatcacttagatgaggttttaccaatctgccggatgatttcgagggctatgactttaaggcaagattctacgatgcaaatgacacattggttaaggagtatcatgataactatatga

SEQ ID NO: 1652 - DNA, 810 bp, Methanobrevibacter ruminantium
  source 1..810: mol_type = genomic DNA
ttgaatcagctgaaagaggaagtcgactctcgaatgaaatccattgaagacaatgcaagcgaaaagaccaagcaaaagcttcaaaagaaacagaaaaagatcgatgacatatcagaagctgacatagacgaacagatagaaacactggaaaaggaaaacaagaagcttaagcgctaccaaagaatcttagatgccctgcaagagaaaatggagattgattccggaagggtcatgggcttaactgacggaatattctcaattgtaatgactcttctaatctttggaataacattgcctagcaccgaaatcctaactgatgccggactttcaagtttcattagttccatactgccaaatattggagtcacacttgtaagtttcatcttgcttgcctcattctggatttaccatcatgaatttattaaattaaaatgcttaaacttggtttacctatggcttagcatgttctatttagcgacagtctgcttcattccatttacaacaacccttattggaacatatcctgaattccgcttatcaaccaatatttttggaataaatatattgctagttattatattcttcctattgatgcttaattatgcatctaaaagaggattccttgatgaagaggtaattgagaaagataagaaatatgtccatcacacattatatataatcctaggattggcagtgattattaaccttcttgactttagtgtgaatgaaaacttcatttacttgttcttcctagtgcctattatctctacaataagggatgtacgtttcaaattaaaaaataccgagtaa

SEQ ID NO: 1653 - DNA, 2061 bp, Methanobrevibacter ruminantium
  source 1..2061: mol_type = genomic DNA
atggcaaatgataatgaaagacttcaacaattggtaagatcatcccttttggaaaacaacaaattgaaaatggaaattgtcaagcttaaggagaatgaaaactctcttaagtctgataaggaatttgatgaacttaaaaaggaatatgaagcatccttaagtgaaaaagaccaggaaatccttgacttgaaggactctcaccaaagcgaccttgatgaattgaagcttaaatatgatgatgatttaaagactaaagaaaatgaaatatctgcccttaagattcagcataagcaggatttggaaaataaatctacagagatttccaatattaaagttaagcacaatgatgaattgaagcttaaggatagcgaaatcgaccagttgaagcaaaagcatgatgaggaattgagattaaaggataatgaaatcatagatattgaatatgattttgataataagctaaagcttaaggatagcgaaataaactctcttaaggagcagtttaaccaggaccttaagagcaagagcctagagcttgcagatttccttgaaaagtttgatgaggacatcaagtccaaaaatgatgagattgatcaaatcaaagaggattacaataaggaaatcatatctaaggatatggaaatagaaagccttaccaattcattgaatgccaatattgaagttttaaacaaatcaaaggacctcctttcatcaaaggatgaaacaatcgacaagctaaatgacaaggtcaaggagctatctgatatgaacgattccctttcaaacatgaaggaatcctttgatgctgaacttactaattttaaaaccctagagttaggggagcttaacctaaagctaaggaatgccttaaatgacataacctctaaggacaatgagattcaatccatctcaaatgacctaaagattgcaaataatgacatcgttgacttgaagcgtcagcttaacgagtcaaaaacaaatgcaaatgaattgaatcttaagctggcaactgcacttagttcactcgatgacaagaatattgaaatacaggcattaaacaataggatcgcttcccagaatgagaatatcattgaccttaagaacaatcttgtaaataaggacaatcttgttgcccttcaaagggagcttgattcaagggatgttgcaataagggaaaaggatgttcagatacagttgcttaaggacaagtctgtatcaagggaagagtatgccaaggtcaagaatgagctctctaagaaggacttgcagatcaagcgcctcaatgaggtcaaggatctcttctttgaactttcagacaatagctttatggatagtcagtcctcatctgttgttaacaagacatcttcagatgataagtcattgatggagcttaataatatcaagaaagagctagagcttgcgaaagaaaacaaggtcaagttcaagatagttgaagagaatcttcttgatgatgaaaaggcaagtgccgatttagataaaaaggtaaaattggatgagagcaagctaaatacagatttagaggaattggtaaattcagagatagataacttcgatgatcttgttaagagtagggatgcaaaagctgaagaatctaagtccactgatgcatccagttctaaaggagattatacctcttctcagactaatcttgctggtttagaatcttccaaagctccacaatcagataatgcagagattcaaaagcttaaggaagagttagaatcctataaaaaacaagaggcagaatataaaaagcaacaagaggagctaaacaaatataaggacgtttatgaaaagcttacttctcctcagctaaagaacttaaactctatccaatcccaaatctattatcttcttccggatgaggcaatggacactctttcaatcaaggattatcttaatgaggttgcattcaagaacctttcatttggaaatacaaagaatatcctaaagagtctagagagaaagggatatgtggaagttgttaaaaaggaaaacgacatattcttctggaaaaagcttcctatacctgcagaataa

SEQ ID NO: 1654 - DNA, 156 bp, Methanobrevibacter ruminantium
  source 1..156: mol_type = genomic DNA
atgatttatatgatgaatctgagagaatcattgactcatatgaggagcaatggactgcctctcttaaatcaaatgaaggtaaatctgtctgtggattattataataaatatattttaacacataaaaaaacttatttttctaaatattattcataa

SEQ ID NO: 1655 - DNA, 366 bp, Methanobrevibacter ruminantium
  source 1..366: mol_type = genomic DNA
atgaataacactactaaaatattaattggagttcttatgggactgcttatcgtaggtgctgcagtaatgtttgtatcagcaactgcaataaatgatgtatctgacggaaactcttttatgggacaagtacaaaatactgcaaatcatgtgaagaatgttgcttccaatgacattaaaagtggcagcaacatcataggtggaggatctgaattcaattctcaagaaggaaatgggtatttttatcaaataaattatactgatggaaatttccgccaatatgatacaaaaacaggaaagcttataggttcaggctttaatgaagatcaatcaatccttggcaatgacgatggatttaatttagaataa

SEQ ID NO: 1656 - DNA, 1662 bp, Methanobrevibacter ruminantium
  source 1..1662: mol_type = genomic DNA
atgcaagaaaaaattgacttggtttcactgcctaaaaaatcattttggaaattgagcattcctataatagctttctgcatcttcgatgcaatctacggcatcgttgatatgctatgggtatcaaggataagtgtagaggcattttatgcaataggagtgtcaataccaatcacatctctcattttctcattcggtgattcaataggccagggaaccaattcaatgatgtctcgttttataggtacgggagactatgaaagcgcatacaatacattgatacatgggattctaatcgcaaatatcatatggctcatccttgtgctttgtcttatattcgcacaggggatactgttcaaagtggatgatgccgattcatacatattgatctttgattatatggtccctatgataatttttgcatatgtattcatcttaaacaatctgttttctgaaacctttcaggcagaagggaattcccatactccaactatcctgattatcggttcaaatatcctaaacatcatattggaccctatctttatttttgacttgaatttgggaattaagggagccgcttacgccagcgtcctatcctcccttataacattctcagtcctgatgtttttatacactcatggaaggaccaagattcctttaagccgaaagtacttcaagttccgcagctacatacttgttgaaatatttaaggttacctttccaaacttcctggatgatgcaatctggagctttacaatgtctttcattaatgtcatattgattgggacaatgggagagatcggaccgatattatactccgtgtcaaacaagataaggtcattgctcaatgcccctaccaaaggctatggaaggggattgatgagcgtaacagggcatttgtttggagcggagcaattcgataagctgaaggaaatgtataagtatgtgcttaagatagcagtctgcacatcactcgttataatgattgtcttcttcttcgttagaaactgggcatttggcctattttcaattacaggaatggacaatgaaatattttggatagctgtcggcggaatcattatgatgaccatactgccattttccacaatctcatcaaagatgctggacggatttggtaaaagtctctattccctgctcattacaataatcaaggtcgcaattgaaattgcattgatatccctcttgacacaatacttgaaggatggctcttcagtcttgattggaattatactttctgaaatcatctcttctatagtatattataaattcttaggatacctattcgaccacttcgataagaaatatgaattcaagtacactgtaaaggcatttacaataaaaaggaaagataaaagagaaaaaagaagagaaagaatcagacaaaatattgaagagaaaaagttgagaaaggaagagaaaaaggaagagtttagacagaatattgaagagaaaaagttgagaaaggaagagaaaaaggaagagtttagacagaatattgaagagaaaaagatgagaaaggaagagaaaaaggaagagtttagacagaatattgaagagaaaaaggcgagaaaggaagagaaaaaagaggaatttagacaaggtcttgaagagagaaaagaaaaaagaaaagagaaaatagattaa

SEQ ID NO: 1657 - DNA, 1197 bp, Methanobrevibacter ruminantium
  source 1..1197: mol_type = genomic DNA
atgggttcaaaaaattttcaatatctggatgaattgattcacagcagtgcaaatgagattattttggattcagatattgtattagattttgatgaagaatctgaatatgatgatggaatcaaactggatgttgatgacttaactattgatggaaatgggcatgtcattgatgccaaggatgggctgtgcagattaaaaaatcatgcgaaaaacatcacatttaagaatctttgctttaaaaatttcaaatccaagtttccaatatcaaatcaatctggtgatttgatatttgagaattgcagatttattcacaatcaaggtacaatctataattattttggaaacatatggctaaagaattgttgtttttatagaaattacttatcaaggtcctcttcaggatattcagtatgcatctataatgcaaaggattccaaggcattcgttagcgattctcatttttatcaaaatgaggttaactatccccattatgggctgattttaaatgacgggcttattgaagtcaagaactctatctttcatgagaacaagggtgaagattgtgaaatttgtgtgatttttaaccgaaagggggaattgcttgtggataactgcaaatttaaagacaataaaaatgtatattgcagttatgattttgcagaattgattgtttccattttaaatgaggcaggaaaggtttccttaagcaattccacttttgaaaatgaaaacagaatccttggttcaattaaaaatatgggcatttgccgtataatcgattgcaaattcaaagatagtctgatatataatagtcagtggtattctagcgtttcccgtcctgatgaacttgattttggcccatatctggaagttgaagattcaagtttcgccaataaatatgatgagggagtcattgcaaacagcggactttgtaaaatagcttcatgcaatattgatggaagatcatatttgaacaatgatgatgttctattcattgatgaaaaggactttaatttattaaaggataatattattaattctggagagattgtttttgattatgatagggatgttcctatctatgaatcctttaaaggtcatggcaaatctaatggcacaaattccaatcttgaagatgatttggataatgacaagagcgatgatggttatcctccattgggtgcgttgtttagatag

SEQ ID NO: 1658 - DNA, 642 bp, Methanobrevibacter ruminantium
  source 1..642: mol_type = genomic DNA
atggctatggatttgacagatattggaattgaagaaggacagaaatatgaagggatttacactaccatgagcaaggacggtgtaaaaaatgcagcgccaataggaattgtatgcaaaggcaaggacaaacttggatgcagattatttgtcggtaccaaaaccctcaaaaacattatggaaaccaggaaatatgttgtaaatataacctttgatcctataaattttgtaaattcaaccatcggaaacttggatattgaagagtttacagatgatgaggacattgcaatattaaaaaatgcggaagcatatgtcatttgtgaggtcacagacattaggaaaatggatccgattaaggaccatataacatcaaacggggaagcttatatcataagcagtgatgttgtcaaaatcgtcaaaaacaatccatgtgcaaaggctttaaacaggggagtattcgcacttctggaatgccttacaaactatacccgacttgaccttgtaagcaaagagcagcaggattatttcatcggaaggttcaatgaaaacaatcgcatgattaagagggtttcaggacctgatacgataaaagccatggagattcttaaaaacagcatgatagaaaagggttttgatgttgaatag

SEQ ID NO: 1659 - DNA, 1071 bp, Methanobrevibacter ruminantium
  source 1..1071: mol_type = genomic DNA
atgtcacgtaattttaaatatcttgatgatttgattctaagaaaggataaaaaaatagttttggattttgatatagaattaactgaggatgaggagcttgaatattgggatggaattaaattagataaagatgttcttattgatggtaaaggccataggattgatgcatgtgggaaagcaagaatatttgattgttccggcaaacatatcagacttaaaaacataatattgaaaaatggaaaagcaataaatggcggggcaataaagatttctaaggactctaatttggaaattatagaatccaaatttatttataacattgcaaatggaacatgcaatgaaggaaatggcggagcaatattcaataaaggaaatttaaaactattgaaatccacatttgagaataatatggctaaaggagagggtggagcaataagaaattacggtaagttaaatattgcagaatcaatatttaataaaaacaaagcaaaaagaggcgccgcaataatcaatcgtaatgatttgacaatatccaaaaccatatttgatgataacactgcagaatggtatggtggagcaatatttcataattggggccaagcaagcattttggaatctgaattcattaacaattcagttacagaagatcatggcaatggtggggccatatgcaattggatgcgatctcaattgaacataaccaaatcctcttttaagcaaaacatttcaggatctgctggagcaatttacaatgctagtgattgtaagttgaatataagccagtctgcctttaaagaaaattcagctagatatgctggtgcaatagttaattatggcaaggcaagcattcaaaaatccgtatttggggcaaataaatcaaataagtttgaaggtggtgcaatcttcaattattctgaagggaacctcattatttcacaatctgtgtttgaatcaaacatatccgaaagggttggcggagcaatatattcagaaaatgataattctttaaaattgaataattgtaaatttaaacacaacaagccagataattttaatgtaggttctaaataa

SEQ ID NO: 1660 - DNA, 966 bp, Methanobrevibacter ruminantium
  source 1..966: mol_type = genomic DNA
atgaagcatagattaaatttagataataaagacccaaattatattttgttgaaagaaatatttaaaattatggattctagaaaatccaaaagtatattagcatcctatggatttaaaaacttaaatagaacaatatttacttttaaaattatatttataagtatgttctttggaattgacattccattcattttaaacgagcttaaatccaaaaaagaacttcgcaaatactttaatatttctgaagttttgactgcagatcaagtttataaaattttttcagaaataaactctgaaaaacttataaaatgtttaaacagaatcttaaactcaagaaatatggtcaaaaggagaggaaaaaagactttcattgtcgatgcgactccagtggacttggatatcaatttccgcagaaataaaaagagcaaagaacatctcagaaaattgaatctcaaatggagttattcttcctctaaaggctattatattggatttaaagcgactgttgtgatggattacgattctatgaatcctgtttgcattttaatccattctggagctccaaatgatgcaggactttttgaagagattttagaaaaccttcaaaaaagacgaataatcagaaaaggagatacattaatctttgataaaggatattacggctataaaaactaccaaataggaattggcaagtataaaatcgttcctttcatttttccgaaagaaaaattcaacagaacaagacttgatgatattttaacctatccattagccgtatttaacaaaacaaagaaaataatggaagaaaaaagattatacaacaaattaaaaaaggaattattagaaaaattagattcatgggagaaatttaaaccaataaggggcaaaatcgaagatttttttcaaattattgaaacaaggcttgaatatgagagaaatccacaaatatactccaaaatcagttga

SEQ ID NO: 1661 - DNA, 303 bp, Methanobrevibacter ruminantium
  source 1..303: mol_type = genomic DNA
atgtcacaagaaagatataaacacattcgcgaaagtctttttgattatatcaatgcatttttaatcaacaagtatgatgaattatattattttaatatgtacgaatccgctgaaaatatgaattgggatgtagaatacatattcaaattaaaatattcattaacattccatgaaaaaaagaatctagagattagaataagaaaagacttgaagaaatttttaaaagaaaaatttgaaatgaacatttatgaacttgctattttaattattctagaggataatgaattgcattccaaaatttag

SEQ ID NO: 1662 - DNA, 240 bp, Methanobrevibacter ruminantium
  source 1..240: mol_type = genomic DNA
atgttttatattgaaggagaaaatataaaatatgaaattttaccatataaaaaagggaaaaaagtaattatttaccttaaaaaaactgaaaacggatttgttagaaaaaacaaatgttttggaacacattatttagaacagatttttgattataacaataaattattaaaagaaacaatatatgaaaatccaaattttgtagacttaacaaattttccaattgacctagattacgattaa

SEQ ID NO: 1663 - DNA, 150 bp, Methanobrevibacter ruminantium
  source 1..150: mol_type = genomic DNA
atgaatttggaggtttttaagatggctagaatattaattccaaattatgaattcgttaaaaattggtctgaagatgaattaaacgattttttaaccacacctgcaggtatcccacatgaacttatgcatatagttcgtaaagttgtttaa

SEQ ID NO: 1664 - DNA, 735 bp, Methanobrevibacter ruminantium
  source 1..735: mol_type = genomic DNA
atggaatgttatcatttgcttcgtaaagagaattattctttagtaaggaaaaaaatagagaattttttagaaaaatatcctctaaaaatatctgaagagaattatttttattttaataataaatttgaagaaaatttttattttatcttttttattcactcaaaatatgtgaatgtttcccaaaaagaagatgtattgaaaaattataaaatcttaaaatatgactatccatttattttagctgcttatggagaaacattaatcgaatttgatgagttttctaaagcaaaatactttttagaattagctaataaaataagtccatttgatattgggattttaagacaattactaagaatttactgtatagaattagatagggagaaaattgaagaaatttttaattatgcattagacattgtttatgatgaatattaccttttttatatttatgagtttttatcagaatattatttacaaataaatcaaatagaaattggtaatttattatctcaaattgctaaagaagagtcatttaatgtagctgaaaagcactacataaaagatttatttaataaatatgatataaatttggggtttaatgaagaattaatttctcatatggaatatattgtgaatcttttaaataaaaaaggggacttcactgaatcttatcttttaaatcaggattgtgctgatttaaaaaggtttaatagaaaatttaaatattattga

SEQ ID NO: 1665 - DNA, 405 bp, Methanobrevibacter ruminantium
  source 1..405: mol_type = genomic DNA
atgtcaaatattgaaaaaatcaattcagaaataaaagattatgtcaattatgtccaaaaaggaggtaaattagaacctttttttgaagatatttgtttagtaactactgaattagttggatttagaaaaatcagtaatttcgaagatcttttttcacaatttaaaaagggagattatttagcattatttagggatacacaaaatgaattagatgaattagctattgttgttaaatggaataatttaatgataggttatgttcctagaaaacacattcctatattgtctagtttaatggattctggaaaagaaatctatgctataattgatgatttaatattagatgaactatttaaagatcttttttttgagacagtcaaaataaaaatctttttaaaagagtaa

SEQ ID NO: 1666 - DNA, 759 bp, Methanobrevibacter ruminantium
  source 1..759: mol_type = genomic DNA
atgtcaatgattgttcattcagagtataaaaaattaaaggaccatttatatgatttagtttatgaatatgaagatttaataaatcatatctgtccaaatatagaaatggaatatctccttaaatttggaatatatgaatatgaattatataagaaagagttagaattaaataaacttaaatttaagttaaaattacttcaaactgaaattaatcatcaaaatgaattagatttaaacgaaatagataaaaaagttatagataaatatacggagtatgcaaataatcttaaaaactctatgaatgaacttgaaaacattataaaacataaagataactattttcaattagatgaagaagatgaaaaagaacttaaaaggatttataaaatacttataaaaaaattacatcctgatttaaattttcatcaagaaaattttaaaaaagaattatttatcaaagttactaatgcatataaaaatggtgatttggaggaattaaaagcattatatgctatgctacctgatgaagatattgaagaaaaatccagtttaaatgaattaaaagaattaatacattcatttgaaataaagattgaaaaaattaaaaatgaatatccttataataagttagatctactttcaaatgaaaaagaaattggggagtataaaattaatattcaatatttaatagattcatgcaatgaggaaatagaagaatatagtaataagataaatgaaattattgaaaatcagcattaa

SEQ ID NO: 1667 - DNA, 1050 bp, Methanobrevibacter ruminantium
  source 1..1050: mol_type = genomic DNA
atggtaaaagtaggtgtacttggtgcaactggaatggtaggtcaaagatttatccaattattggctgatcatcctgattttgaaatagctgctcttgcagcatcctcaagatctgcaggcaaaaaatatgaagacgctaccacttggtatatgaatgatgaaatgccggaatctgtaagggacattaaagtaattgaaactgaccctgcacatatggataaggatgtggaaattgtattctcctcacttcctgctgattttgctgcaaaagtcgagccagaatatgcaaaggattttgtagtggcttcaaatgctagtgcaatgcgtatgaaaaaggacatacctttagtcattccagaagtcaacccacaattcttggacatgattgaagcacaacagaaaaacaacaactgggacggtttcattgtaacaaaccctaactgttcaaccattgctttgactttaactttaaaaccgatttatgacaacttcaacattaatagaatctatgtttcaaccatgcaagctgtttcaggagcaggctataatggtgttccttcaatggctatcttagacaacttggttccatacattggcggtgaagaagagaaaatggaaagtgaaactttgcatcttttaggttcccttgatggtgatgaagttgttcctgcaaacttttctctaagcgcatcatgccacagagtgcctgtcattgacggtcacactgaagcggtatttgtagagttggatgaagaggcagacattgacaagatcaaaaagaccatggctgacttcagaggacttccacaggaattaggtcttcattctgctccagaacaacctgttatcgtaaaagaagaagatgacagacctcaaccaagaatggacagaatggcttatggcggtatggctgcaaccgttggtaggctcagaaaagatcaagcatttgataacagcttcaaatatgttcttgtaggacataatacaattagaggcgctgctggtgcttctattttgaatgctgaattgattaataaacaaatattataa

SEQ ID NO: 1668 - DNA, 819 bp, Methanobrevibacter ruminantium
  source 1..819: mol_type = genomic DNA
atgataaaagttgctgtaactggagcctctggaagaatgggctctggaattataagaaaaatctctgaacaagatgatatggaagtagtggctgctatcgaaatgccaaacactcctttagctggtgtagacgctggtgaaaaagcaggcattggcaaaatcggagtgccaattgtaggttcagaggatttggaaaaagctttggaagaatctggagctgaagtattagttgatttcactatcgctcctgctgctgttgaaactattaaaagagctgccgattgcggagtaaaccttgttgttggaaccaccggatttactgaagagcaagctcaaggaaatgcagatgtaatcaaggaaaaaaacatcaaagcagtaatttcctctaacttctccattggagtaaatgtattcttcaaagttctaaaggacttgactcctattttaaatgactttgacattgaaatcattgaagctcaccacaaccaaaaggcagacgctccttctggaactgctatgactgcatttgaagttgttgcaggtgctttaggaagaaacccagaagaagttggcgtttatggtagacaaggtcaagtaggcaaaagaaccaaagaggaaatcggtatgcatgcagtccgtggaggagacattgtaggagaccacactgtattgtatgtcggtgatggtgaaagacttgaagtaaaacacatggcacataccagggaagtgttcattgccggtgttatcagagccttaagattcgtaggttccgcagaacctggaaaagtaaatgatatgactgatgttttaggaatttaa

SEQ ID NO: 1669 - DNA, 894 bp, Methanobrevibacter ruminantium
  source 1..894: mol_type = genomic DNA
atgcgttttgaaggaacagctgttgctatggtaactcctttccatgaggacggatccatagacgaagaaggatacagacaaaatattaactggttgattgacaacgatgtagacggtttggttgctgtaggaactacaggagaatctgctaccttgacccatgatgaacacagaaaagttcttgacatcttgattgatgaggttgacggcagagtcaccacaatagccggtaccggaagcaatgcaacaagtgaagcattggacttgactaaatatgcagatgatgcaggggcagacatggctcttctaatcactccatactataacaaaccacaacaacatggagtaattgagcattatacccaaattgcaaactctgtagacattgacttgattgcttacaatgtcccatcccgtaccagccttgacatggctcctcaaaccattgtcgagcttgcaaaagtggataacattgctgcattgaaagaggcttcatctgatgttgataaagcatcaaaaaccatgaaactcttaagggacgaaggtttggaagatgaaatcgtaatcctctccggtagtgatgaattgacccttcctcttatgtcaatcggtgcaagaggtgtaatcagtgcttctgcaaacatcgatcctagaaccatggttcaaatggtaaacaacattttggatggaaactatgacaaggctatggaattgcattaccaacaatatgacttaatcaaagccttattcattgaaaccagcccagcacctgcaaaagaagcattgaacatgatgggaatgcctgcaggtccattaagattgcctttagttcctatgttagaggaaaacaaagcaatcctaagaaaagcattggaagatgctggaatattatag

SEQ ID NO: 1670 - DNA, 1218 bp, Methanobrevibacter ruminantium
  source 1..1218: mol_type = genomic DNA
atgggattaattgtagccaaatttggcggtacttcgattggaaatggtaaaaggattaggaaagctgcacaatctgttgttaatgagtatatggatggcaagaaggttgtcgttgttgtttcagctatcaataagactactgatgaattagtggctattgctgatgagtccattggaaaagaagttaccgaaaagcaattggcggaaattttatccctgggtgagagaaccagcataagagtattttcctcagtccttgaatccttgggagtgaaatccgaatacattgacccaagccatgaattatggccagtcataactgatgacaactatggaaaggctcaaatcgactttgaaagaactgaagagcaagctcaaggtcttttatcacttttggagcaaggtatcattccagtggtatgcggattcttaggaagaactgaaaatggggaagtgacaaccctcggaagaggcggaagcgatgtcactgcattccttttaggccactgccttaaagcagataatgtaatcattgttaccgatgttgacggagtcatgtcaactgacccaaggaagatagatgaggctgaaaagcttgattacatttcagttgaagagatgagggatttagctacacacggcgctcaagtattgcatccacatgccttaagatttaaagatcctgaaataaaagcaaagattatcagttttgaaaaaggagacttatcagaccctggaacagagattgtcggcccttttgaagattcaatgggcaaaaaagtatgcctacaccatgagcctatttctgtagtggctgtagtgggagaggacttgcttaatcaaataggacttcttgcaaagatgaccagcttagttgctgatgcaaacatcaacatctacggcatctcagcaggccagaactcaatcacattgttcctcgataaggaggaagcggatgacgcttatcatttattgcatgatttggtcattgcagaggataacttaagctccatctccttaggaagggacattgcaatgctcaccatgatcaatcctgattttattgaaactccaggagtaatcactgaaattaccaatcctctaaaggaaaatcatattaatattgttgaaatttcatcatcccagactgcaattgttttattcatcaattgggaagatggaaaggcagcatatgatcttataaaggaagttttataa

SEQ ID NO: 1671 - DNA, 198 bp, Methanobrevibacter ruminantium
  source 1..198: mol_type = genomic DNA
atgggaaatattagaacttcatttgtaaaacgtatatctaaagaattaattgaaactcacaaaggtaaatttaccaccgattttgaagaaaacaagattttagtagctgaatactctaccgtaagcactaaacatttaagaaacaaaattgctggttacattaccagattagtcagacaagaagcaaacaaagcttaa

SEQ ID NO: 1672 - DNA, 324 bp, Methanobrevibacter ruminantium
  source 1..324: mol_type = genomic DNA
gtggacgaaaaggaattgatgagtatatatgaaactgaagaagaagctcgcaatgttcttttaaagtctagaaaaagaatcgatgaaattgataatgatttagttaacttaattagtgaaagaacttcacttgctaaggatatagtttcagctaaggtttttttaggcatggaaatttatgacaaatccagagaagatgaagtccatgccaaggtaagtaaattagctcaagaaaaaaatatagatgatgatattcttagcgatattatgaacatgctaacaattttaagtaaaaataaacagagagaatttttggaggaatga

SEQ ID NO: 1673 - DNA, 870 bp, Methanobrevibacter ruminantium
  source 1..870: mol_type = genomic DNA
atgcattacataaacgccaagacaatattatcaagcaaaaacggaatgaacctatataggggatgctcccatggctgcatctactgcgattcaagaagcaagatatacaatatgaaccatgactttgaagacattgaagtaaaggaaaacggaatcagactccttaagaatgccttaaagagaaaaagggaaaaggtcatgattggaacaggatcaatgacagacccatacattcctcttgagagcaatctaaagtttatgagagaatcattggaactcatttacaaatacggccatggatttacctgcataaccaaatcagacctcatccttagagacctggacctaatcaagaaaataaatgaaaatacaaaggcagttgttcagatgaccctgacaacagctgatgatgagctatgcaagatacttgaacctaacgtctgcacaacaaaggaaagagtcaatgtcctaaagaccttaaacgaaaacaatatccctacaatcgtttggctatgcccaatcctaccttatataaacgatacagaggaaaacattaatcaaatattggattactgcattgatgcaaatgtaaaaggaattttatgctttgggatgggaatgaccctaagagaaggaaacagagaatatttttataaaaaactagatgagcatttccctggactaaaagaaagatatagaaggacttataggaatagctatgggataaaaagccctaataataaaaaactaatgaagatattcctccaaaggactgatgaacatggcattatgaacaatatagaggatatatttgaatatcttcatgagtttccaagccatgagagcacaaagcagactactttgatgtaa

SEQ ID NO: 1674 - DNA, 918 bp, Methanobrevibacter ruminantium
  source 1..918: mol_type = genomic DNA
gtgattgatttggcaaaaatagtaaagtctccaggttctgctacagttataaatgcaatatcaaccggttttggttctgcatttggaattgatttgaatataacttgtgaagcggaattctcttcacaaggcattgactgttcatctgacttgggagtggaccccaatttaatgaacatatgtgtaaaaagtgttttaagtcattataatattggaaaagacttgtctcaggatgatcttttaaatgatttggattttggaaatggtgaaggaattaaaattagaacaaaatccaatcttcctttaggctctggcctttcaagtagcagtgccttatctaattctgttgttatggcaactgcaggcttgatttcagatgaatttttcttaaagcctttaagcgattttgaaatgattaatcttggaattgacgcatctcttgaggctggagtaaccataaccggagcttttgatgatgcttctgcatccttttttggaggacttaccataactgataatatggaaaggaagattttgcatcaggagaaattgcctgaatatgatattttggtttttatgcctgataaggagtcattaagcggttcatctgatgtaaataggatgaaattggtagggtcatatgttaagatggcttttgaagaggctatgaataagaggtatcttaaggcattgactttgaatggtcttttgtatggaactgcacttaattttgataataatattgccttggatgcccttagtgcaggggctttagcttctggattatctggaacaggatcctcttttgttgctattgttgaagaggatacaattgatgatgttaaggatgcttgggcttcatttgatggaaatgttattgaaacaaaagtaaataatgaaggaactaggtttatttag

SEQ ID NO: 1675 - DNA, 858 bp, Methanobrevibacter ruminantium
  source 1..858: mol_type = genomic DNA
atgagcgaaaataatagaactttgattacaataggaatcggcgcttttattataattgccatattattattaatagcccttgttttaccattcagtaatttggcagttgacaatgatgaaatagcagtaatcaccataagcgacacaatcacctatggagacaatagcacttctgcccatacaagcaaaaaggaaattgaaagcgaacttaacgatgcctactcaaatccaaagattaaaggaattgttttggatatagacagtggaggaggaagcttggtggctagcgatgaaatttcagacttaataaagaaatctcctaaaccaattgtaagctatattggagataaaggatttgatgaagcttatcaaatagcaagtgccactgattatattttcgcaagctcctcatcatctcttggaggaatcggccttagctatataaatacagacagatactccgatgaaaaagtcacaggagtctttaatgaaaagtatctaaaaaacaataaaacaaaaagcaattctaaagtcaaaagtgcaaatgacttagcaaatgctcaaaagatggttgatcaggactatactttattcattaagaaaatcgctgaaaacagaaacttaacagcagattatgttgcggaactggcacatggcaaaaaatataatggaaatgaagctaaaaaactaggattgattgatgaaatcggctctaaaagccaatcaatagaaaaagcagctaaattgtcaaatgcaactaattatacagtaatcacttatccagagcctcaaaagaaattaactgagattttaggtgaaaatgatatttttaaccttaaagagttaattaaaatctaa

SEQ ID NO: 1676 - DNA, 252 bp, Methanobrevibacter ruminantium
  source 1..252: mol_type = genomic DNA
atggtatataaagtagaagtatttacttccccaacctgccctcattgtccaggagctgtaagactcgtagaaaaagcaaaagaagaattaggagatgctcttgatgtaaccatttacaatacagcagaagctgaagctatggaaattgctagaaaataccacatcatgtatgttcctacaatcattattgatggtgaaatcaaattccaaggagctcctagctacgatgaattaatggcagaattaaaataa

SEQ ID NO: 1677 - DNA, 1107 bp, Methanobrevibacter ruminantium
  source 1..1107: mol_type = genomic DNA
atgaaaatagcaatggtaggtcaattcccaccccatatcggaggagttggagtacatatacacagcctagcaaagcaactaatcagggaaggccatgaagtatatgtgattacataccctcacaaggacattaaggacattgacggaattcatgtcattggaacaaaaggaataaatataccaggccttagaggattgatgtttggaattaatgccaaaaaagaattaaaaaagcttataaatgaagaaaacattgatataatccacggccattacctattccctgcaggatgggccagcgttaaggctggaaaatcaacaaataccaaaacctatgtgactgcacatggatcagatatctttgaaatgtataaaaaacaaaaatttatgaggccctttataaagaaagtgctctctgatgcagatatagtccttgcagtaagcaatgcattgaaagatgaaataataaagattgatgttccaggcataaaggaaaagattaagattcattggaattcagtagacattgaaaaatacaaaactacagaagagaataaggataagtttaaaaaggaactggttaatgaatacaatctagacccaaataagccaatgattctttttgtaggaaatataattaaaagaaaaaatgtgaatctccttgttgaagccaaaagactaattaaaaccgatgcaaatcttgtaattgttggagaaggttctgaattaggaaagttaaaggaaaaagtaaagaatgatgataaaatcaatgacgtttactttacaggagctagaagagatgtggaagacatctatccaagctgtgacttgcttgtactgccttcctttagcgaaagtttcggacttgttttaatagaagcattagcatgtggaaatgcagtcattggaagcaatataggcggaataaaagagataatcacagaagacgttggattattgattaatccaaatgatagccaagacctagccaatgcaattgataagatacttcaggatgaagaattgttgaataaatttaaatcaaatgcaagaaatcgagccaaagacttttctaaaactgaattgccttatgatgagctgaaataa

SEQ ID NO: 1678 - DNA, 471 bp, Methanobrevibacter ruminantium
  source 1..471: mol_type = genomic DNA
atgggagaaaaagaatttactcatttaacagaaagtggagttcatatggttgaagttggtgcaaaagcccaacagagaagaactgcaatagctagcggaaaaatccatcttcaaaaagaaacaatcagaatgatagaaaatgccgaaatcaagaagggaaatgtattaactacagcccaaatcgctggaattcaagcagttaaaaagacatcagaccttatccctctttgccatccgttgaatcttagtggaatagacatagaatttgaagttgaagaagaggaaatcactgcaatctgcgaatgcagattaactggccaaactggagtggaaatggaagccataacaggagtaagcgtagcccttcttacaatatgggatatgacaaaagctgtagaaaaagatgaaaacggacagtatcctaatacaagaatttcagacattaaagtccttaaaaaagaaaaaatataa

SEQ ID NO: 1679 - DNA, 2073 bp, Methanobrevibacter ruminantium
  source 1..2073: mol_type = genomic DNA
atgaaaaacattcccactaatattaaacaaataataaatgattgttatccatacattaaagagttcaatcccgcccaaaaggctgtaattgaatctggataccttgaaaatgataagaattacatcatagccattccaactgcaagcggtaagactgtgcttggagtcatggctgcacttcaatcaatcctatctggaggaaaggcagtatacgctgcccctctcatatccatacagaatgagaaggtcaaggaattcaagaaatttgaagagcatgggatttcagttggaaagcatccatcatcctctgacttgtcaatcatggtctttgaatcatttgatgtcctgacacgattttcctgggatgtattaagagatgttgacacaataattatcgacgaattccatatgattggagaatattccagggggcctacaatcgaatgtgcaataacaagggctaaaatcataaatccaaacttaagaatcattgcattatctgcaacattggaaaatatgtctgaaattgaaaattggcttgatgctacagttatagaacacgattataggccagttccattgaataaagacgtattggatacagaaatgttcaacactaaaaataaaaatgatgtagtggtaaaagttattgaaaaagcaattgaagatgattcacaggcattaagcttcgtatcaacaagaaggttcacagaaagccttgcaaactatgttgctgaaaagctaaagaaaaaaaccacagatgaacaaaagaaaaggtttaaggaagttgcagacaagattcttgaagttccagagaaaaaaggctcaagacctacctccacctgcttgaaacttgctgaaagctgtgagaacggtgcagttttccaccatgcaggactcttttccgaacagaaggaaatcattgaagaggaatttagaaatggaaacatcctaatgattgcagcaacaccaagtttgatgtatggagttaacctcccttccaaatatgttgttatacgagattacactagatggacctcccaaggacctcaagcgattccagtatttgactacgagcagatgtccggaagagctggaaggccacaatacgacaatgcaggatattcctatttgattgcaaaatcaatggaggaagcttcaaccctggaagagcgatacatctatggagacatagagcctacaaactccaaactgattgaaaataaggatgcagtattcaggcaaatcatagcccaagtggcttccaccatatcaaagacacctgaagacttagaagatttctttaagaaaacattctatggctatcagatgacaaataacagttcaatgagctttttcgcagaggaaagcctaaaattcgaaatacagaatgcattggaatttctgcttcaaaatcagatattgcaggctacaccaagtggacttaaaacaacagcacttggaaacttaatagccaaatccaactatacagtggaaactgcagtaaaggttaaggaatatgcgaacttggttgaccaattcagtgcagaggaacttatctatcatttagcgcagactcctgatatgcctctcatttcatttaagggcagacgctctaaagacccagtgcgagaaaagcttgctaattatggcctatttgcattggagatagcaaatccagaggcaactgccgtgtcccttatcgaatggatcgatgagagaaacgaatatgagatagaaaatgcctataatgtctatgcgtcatctacaagacgggctgcatatgaagcgtccctacttgtcagattcactaaaaacacattggaagttcttggaaaatacaattattcaaaggatttggacttcctatcagcaagactctattacggagtaaaggaggacataattcctcttgtgattggagtaaaacgcttaggaagaaaacgtgcaagagcattggtaaacacattcggagaggatttaagacctgtttcagaaaatgaacttcaaaaagtagatggaatcggacctaaattagctaaaagcataagaaactttgcagacaattattga

SEQ ID NO: 1680 - DNA, 303 bp, Methanobrevibacter ruminantium
  source 1..303: mol_type = genomic DNA
atgagtttttgtgacattcgtggtgaaactatagatatcggcgcttttattagatacactggaacaggtaccataagcaaagttgttgatttaaaggaagaagataaacagcaatgggttaaattggatgaacctgctttatggtatgctgcagattctttagaagtggtcgatgaaaaagatctcattaatgttgagactgtggatagagatactcttgaaaaagttaaagacattaaagaaggctacgaagaacttaatgctaatttaaatgatattcaaggctgtgaaggtggaggttaa

SEQ ID NO: 1681 - DNA, 456 bp, Methanobrevibacter ruminantium
  source 1..456: mol_type = genomic DNA
atgaaaattaaacaactattaggtatgttagttttagacgataacgcaaacgaaattggtaaaattattgacgcagattttgaacctgaaactggtgcaattacaaaaattgtagtcagccttaagaaaaatttcctcacttccgaccaattggatgtagagtataatgatgtaaaaagcattggagattacgtattattgaaaattacaattgataaggaaactaaaataaaagaagctgaagaagctaagaaagctgaaaaagaagctaagaaagaagctaaaaaggctgaaagagaagccaaaaaagcagctaaagaagctgaaaaagaagaagcagtagctgaacaaatcgaaaaacaagtggaagttgttgaagctgaaattgttgacgatgctgaagaagctgaggaagcagtagaagctgaagaaactaccgatgttaaagtagaatag

SEQ ID NO: 1682 - DNA, 1707 bp, Methanobrevibacter ruminantium
  source 1..1707: mol_type = genomic DNA
atggataaagcatgcagaatcatcatagaagacattatgaatggaaaaataactactcgacgtgaattggaagtagaaaaaagacagctatgcagagatagaaaattaaaaaagttcatgagcaattcagttatcctagagcatgcaagccttgaagagaaaaagatcgtatcaaacctattaaggaaaaagccaactagaactatctctggagtggctatagtggctgtcatgtgccatccacaccaatgtcctcatggaagatgtttctattgccctgaaagtgatattgcacctccaagttataccggagaagagcctgctgcattaaggggcagaatgttcaagttccacccttatgtacaatgctataaccgattaaagcaacttcataaggtaggccatcctatcgacaaggtggaacttatcatcatgggaggaacattcccttcaaaggatatctgctatcaggaatggttcgtttcacaatgtctaaaggctatgtgcgattttggaattatccttgaaaacatcagccaaatcgatgatatcgaatcaataaagagagaaggccttttaaaataccatccttattcaaacaatgaattgaagacttatccccctaacgactatgtcctaatagatgacattcaaaggataaatgaaaattcaaaggtcagatgcattggaatgacctttgagactcgtccagactactgtaaagagccccatgtagatagaatgcttgacatgggagttacaagagtagaattaggagttcagacaatctataatcacatctacgaaaagataaaaagaggccataaggtagaggatgtgattgaggcaaacagaatcctaagggattccggagtaaaggtagccatgcatatgatgccagggctatttccacttgcaagggagaatccaagaatagaacaatgtccagaacaggacctaaagatgtttaaggaaatcttcaacaatgaaaactttaagccagatatgcttaaaatctatccttgccttgtaactgaaggaagcgaacttcacaagctttataaggaaggcaaatacaggccttacactgatgaagaggctgtagaattgatagttcaaatcaagaagatccttcccaaatgggttagaaccatgagaatccaaagggacattccatctaccttgattgaagcaggagtcaagaaatcaaaccttggcgaattggtctataaccgacttgaagaggaaaaaataaactgccaatgcataagatgcagggaaataggccataagaaaacagaacaggactattcaattgatgattacagattattccaagaagattacactgcagtgggaggtaaggaacacttcctatccatagaagataagaatgaggaaagcttagcaggattcttaaggcttagaatgcctacagaacaagcccatagagaagagattagagacaatactgcaatagtaagagaactccatgtctatgggaacatgattaagataggccataagggaaacgccataggtcagcataccggatttggagaaagacttcttaagaaagctgaagagataagcatcgaccaaaacaaggaagagcttttaataatcagtggtatcggagcacgaaactattatcgtaagtttggttatgaacgtaaaggtccttatatggctaaaaaactaatctaa

SEQ ID NO: 1683 - DNA, 723 bp, Methanobrevibacter ruminantium
  source 1..723: mol_type = genomic DNA
atgattacagcagaagaattagctcaatatatcgaatttactaatttagataatactgcaactgaagaacaaatgaaagcattctttgataaggcaaaagaatataacttttatgcagtagtagtccttccacactatgttaaattagcaaaagaagaattaaaagacactgatatgaaagttgtaactgttgtcgacttcccattaggtgctggaaccactgaaagcaaagttgcagaggcaaaagatgcaatcaaaaacggcgccgatgagattgacatgatggcaaacatccctgcaatcaaggagcacaactttaaggcagttaaagaagacatcattgcagttaaagaggcagttggagatcatatcctaaaagtcatcattgaaaatgcccttcttactgttgatgaaaaggcaggagcttctgcaatgtgtgaagcgggaggtgcagactttgtcaagacctcaagcggattcaatggaaatgaacatttctatgctttaatggaaagcttaagaatcatgaaaaagaacgctccacataaggaaatcaaggcagctggcggaattaacaattataaattagtaaataatgtcattgcagcaggagttactaaaatcggaacttcctcaggacacattattatggaccagttcaatcatgtgatggacaatcaaaaggtaagtccagaacagaaaacaggcccaaggcttatttag

SEQ ID NO: 1684 - DNA, 201 bp, Methanobrevibacter ruminantium
  source 1..201: mol_type = genomic DNA
atgagtgaattaccaatcgcacctgtcggtcgtatcttaaaaaatgctggcgcacaaagaattagcgatgatgcaaaagttgcattagctgaagctttagaagaaaaaggtgacgaattagctaaaaaagcagttaatttcgcacgccacgctggtagaaaaaccgtaaaagctgaagatatcaaattagcaattaaataa

SEQ ID NO: 1685 - DNA, 1287 bp, Methanobrevibacter ruminantium
  source 1..1287: mol_type = genomic DNA
gtggataatatgaaagtatttatagaaacctatggatgtacatttaatcaagcggattctgaaattatggcagggatattgaatgaaaacaatatcgggcttgtctccactgaagaggaggctgatgccattattgtaaacacctgctatgtaaaattgcctactgaaagcaaggtaataaacagaatcaaaaaccttcaaaagcagtaccctgataagaagattatcgttggaggatgcatggttgaagtggatcctaaaaagcttgaggcaatcggacctaattgctcatggattggtcctcaccaattaaacaagactgcagatgtagtcaaatctacaatcggcggtgaaattgttagggaatttggtttttccgatgaacctaaagtctgcgttcctaaaatacgaaaagatccatacattcatgttatccaaatatgtgagggctgcttaggtgcttgcacatattgctgcactagatttgcccgcggccatttaaacagctatcctataaaggatattgtggaggaagcaagattggccattgaagatggctgcgttgagattgagcttactgcacaggacacttcagcatttggtaaggatacaggcgaaaagctctctgatttaattaaggaagttgcaagcttagatggggactttagagttcgtgttggaatgatgcaccctagaaacattggaaatgatttggataatcttattgaagcatttaagatggaaaaagtatatgatttcattcatttgcctatacagtctggcagtgacaaggtcttaagggaaatgggaagaaaccatactgtagatgattataagaatattgtctatagcttcaaacaggctattccagatattactatagccactgacatcattatcggatatccgacagagactgaagaggattttatgaagacagcagagcttattagagaaatcaaattcaatcttattcatctctccaaatatcagcatagggagggagccatatcatcttccctggataatattccttttgatgatatgaaaagaagatcaaagtatttatctgagattaagtttgaaatgcttgaagaggaaaataagttcttgcaggatagggagatggatgctttggttgtggaaaagggctctaaaggaggattcattgcaaagaccaattcatatattcctgttgtggttcaggatgtgaacttaggagagtttattaaggttcatattgataagacaactggaacctatctcattgggcataaaatcgattga

SEQ ID NO: 1686 - DNA, 633 bp, Methanobrevibacter ruminantium
  source 1..633: mol_type = genomic DNA
atggtatgtccagtttgtgggtctgatgatgcaatcgtattaaaaaataaactaatcgacgctaaatctaaggaaattcgcgagcttttacttaagtgtggcgaatgcggctctgtatataaggaaagattaactcaagataagccaaaaccattcagattgattatcagcgagcatgaagacacccataaggtgtcaattgacttgtatcctgatgaagaacttcgtgttggagattttttgatgtctgaacttggagaagtgaagatcacttccttagagcttccagatgaaaagcgtgttcaaaaagctattgccagtgaagtaaagactatttgggcatcttctgaagagattcctgcacgttttggtgtttcaattgaccttcatggaaaggtcgcttcattcaaatgcgaaacagaccgtgactttaagatagcggtagatgacattattaaaattgacaagtatgtggcaagagttcatgtgataaagactgaagagagaaagactactaaaggttatgcaaaagcaagagtaattaagagagtttatgcaaaacctgttaaattcaatcatttcgattatgatttaagtaaatttattgtttcttttaagccattgaataagtag

SEQ ID NO: 1687 - DNA, 486 bp, Methanobrevibacter ruminantium
  source 1..486: mol_type = genomic DNA
atggctgaaattaaaggaaaagtttggaattttggagataacattgacactgatgtaattatccctggaagatacttaagaacattcaatcctaatgacttagcccttcatgtccttgaaggggaaagacctgattttacaaaaaacgttgaaaagggagatgtcattctagctggtgaaaacttcggatgtggttcctctagagagcaagctccagtagccatcaaggcagcaggagttgatgtcataattgcaaagtcatttgcccgtatcttctatagaaatgcaatcaacataggacttcctgttgttgttgcagacattgaagcagatgatggtgatattgtttcagttgatttggaaaatggaattatcatcaatgagactaaagacactaaagttgaattccaagcttttaaagaattcatggtaaatatattatctgatggtggtctagttaaacattatcttaaaactaaagaataa

SEQ ID NO: 1688 - DNA, 981 bp, Methanobrevibacter ruminantium
  source 1..981: mol_type = genomic DNA
atgattattagagcaccttcaagactccatatgtctttaattgatttaaatggatcttataagagaattgatggtggtataggtcttgcacttaaagaccctcaatttgtattgcaaagtgaagaaacaaatgaaaaaggatacactttagagtttgcagattctatttctgaagattcaagggaagaatgtattgaaaagattccaaaagctgctgaaaagatagcagaactttgtgatattgaatcaggattccactttaaggttttagaagcatatcctcctcactctggattaggctctggaactcaaatttcagtctgtaccgctcacttgatgactgagactgttggtcaaaaatataccagcagggaattaagtacaatggtaggcagaggaggaacctctggtatcggaacttttgcccacgacttaggtggtttcattgttgacggtggacacagcttagaggaaaaacctggattcttgccatcttccgcttcaaaggcaaaacctgctacattaatagcaaggtacgatttccctgaagaatgggatattttgcttgcacttccggaagttaaagagcatatgcatgaccaacaggaagtaaatgttttccaaacctattgtcctattccaaaaacagaggttgaacaagtttcccacttgattctaatgaaccttcttcctttcttgcttgaaaaggacattgtcaactttggttgggcaatcaaggagcttcaaaaagttggtttcaataagcttgaacacagtttggatgctagtttcttgcctactatggaagcgattgatgaagccggtgcttatggtactggtatcagttcattcggtcctaccctttacactgtctttgataagaacaataaagacatagttaaagcagcaggtgagatcgtaggtgaagaccgtgtaaaagttgtaaaagctcaaaaccacggttatgttttagaaaaataa

SEQ ID NO: 1689 - DNA, 1530 bp, Methanobrevibacter ruminantium
  source 1..1530: mol_type = genomic DNA
atgttcattaagaaaacaactagtttatgtcctcactgccttaagcctttagaagctgaggtttaccaagaggatggaaaggtctggattgaaaaggaatgtccagaacatggtgtctttaaaaatacttattggagtgatgcagagttatatgacagggttgaccaagttgattcaatcactcaggatttagaaaaccctatggttaataaggttgcaaaatgtcctcaaaactgtggtatctgttctgaacatgaatcctacactgttttaggattgattgacgttacaaacagatgtaatctaaaatgtcctatctgttttgcaaatgcagcaacctctaaaaagctctttgagcctactcaagaagagattcgtcagatgcttagaaacttaagaggagaaaagcctgttcctacccctgcgattcaatacgctggcggggagcctactgtaagaaaagacttgcctgacttgattagaatggcaagggaagaaggattttcacatactcaaattgctacaaatggtattagaattgctaagaaggaaggctatgctcaagaattaaaggatgcaggattaaacactgtttacttgcaatttgacggtgtcactgaagagccttatcttgtagcaagaaacaaaaacctcttggatgtcaaattggaagccattgaaaaatgtagagaggtcggattaggtgttgtaattgtacctactgttgttaaaggagtaaatgaccaacaggtgggagacatcatcagatttgcaattcaaaacattgacattattcacggcgtaaacttccagccagtctcattctctggaaggactccatctgaccaggtggaagagcaaagaatcacaatccctgacttcttgaatttggttgaggagcagacagacggccaaatatcaaaggacgatttctattctgcaacttctgttcagccagtatcaaaattcatcggtgctttaagaaatgaagagccaccagtaactctaaactgccaccagcactgtggttcagcaacctatatatttatggataatgataagatcattcctattacacgtttcatggatattgataagttcctaacattcctcaataaatatactgaaaagttagaggatggtggatttgctataaaatcaagagtattggctagcgctgctaaaaaccttcctaaggttttaaatgaggatgaagctcctacaggattggatatgaagagaatattattggacatcttcaaaacccagtcttatgatgctttaggtgaattccacattaattcattgcttatttcttgcatgcactttatggatccttttaactttgacacagacagagttaaggactgtgttattcactatgcagttccagacggaagggttatcccattctgtactatgaactccatctataggcaaggaatagaagatgagttctccactccattaaatcagaaaatgactgaatttaatgataagactggagaagaagaggaagatgctgattag

SEQ ID NO: 1690 - DNA, 303 bp, Methanobrevibacter ruminantium
  source 1..303: mol_type = genomic DNA
atgaaattaagtgaatggattataataaataagataccgaacaataagatcttgactattctcgaagaatatgaaaatattgaagcaattgagtttaacgaccctgaagatgtaaaagcggaagtggaagagcatgggcttcgatatgttgcccataagtatggagtcaatgaaaaagcgctaaaggaatatggctggagatttaaaaaacgagacgccaaaggcaaaaaacgagaggaaactcctattataaaaacagatgaacaaaaaccattggtagatatctttggtgatgaagagtag

SEQ ID NO: 1691 - DNA, 576 bp, Methanobrevibacter ruminantium
  source 1..576: mol_type = genomic DNA
atggcattagaacttatgaatttattgatttccatcttaggagctgtttattttatgctacctgcttatgtggctaacttaagtggtcttgcttttggagggggaactccaattgatggcggagcgaattaccgagatgggaatagaataattggaaacggagtaacatggaaaggttgcattaatggaaccattattggaactcttgttggtgtggttttaggcatagtcggaatgtactatggtgatttaagcactttaactggaggagtcatcgatctccatgtttatggaagcctattctctggtcttatattaggattcttaatggcattcggcgctttattcggtgatgcagttggaagtttcataaaaaggagaatgaatcttcaaagtggccagcctgctccgataatggatcaattagattttgttcttggagcccttatatttagccttttagttgttagaataagttggagcttttttattataatttgtctgcttagtattttacttcatttaagtagtaatactatagcatatttgcttggaattaaggatgtttggtattaa

SEQ ID NO: 1692 - DNA, 690 bp, Methanobrevibacter ruminantium
  source 1..690: mol_type = genomic DNA
atgggaaagatatttaaaattgttacaatcatattgattgtcattgcattggctatacttggtgttttcatctattctgatggacattctgaaaagattggtgaaaataatcttggtgtggtgtataaggttacatatggtcattctaatgaccctaatgtgacaatcggaattgtttcaggcatgcattcaagggaaaagcttcatcaatatgtattgccatatgtttcaaaggcctttgcgtttttacatcctgatgtgaagattgtaaattatattgttaatgtaacgaaagatcctgaagactttacgaaaggccgtgccaatggagaatctttagttcatgattatgttgtaaaagatgttaaaaaagaggactttgatgttgtaatcattggacatgaccatgagccaggctatggtgaggcatattatatagcaactcctgttatggataatgcttctgtaaagctggctaaaaaggttactaaagatattggcttcaatcattacactaggaataaatctcaacctactacaagcacatccattttaaaagtggataagccaattgttgatgctggcacaagggtattcgtttatgagattcctgaagttgatggtaaggtaaatgcattttataagtcttatcagttagttaatgctacttataaccgattgaaaaaataa

SEQ ID NO: 1693 - DNA, 1023 bp, Methanobrevibacter ruminantium
  source 1..1023: mol_type = genomic DNA
gtgaaagtagcaggatttgacatcggtggtgcaaacactgacttagcaattattgattttgaaaatgatgaaattaaggaaatcaaaacagatttcgagtatcttcctatgtggtcagacaataaccgacttggaaatgttttaattgacttaatagaaaagatatgtcccctagaagaaatcgatgcagttggaatatccatgactgcagagcttgtggatgcatttgaaacaaagactgaaggtgtcttggatattgcaaccacttgtgaaaagctatttgaatgtcctgttgcttatattggcgttgataaagtcctatctcttgcagaacttgtacaaaaccctattgaagttgcagctgcaaactggattgcaacctctcaaatcattgctgaaattgaaaaggactgcatatttgtagatacaggaagcacaaccacagacattatcccaatcaaggatgggcgtgaatgtgctaagggcagaaccgattttgaacgctcagcaactggagagcttgtctatacaggcacattaagaaccaatcttacaagctttgtcgattcagttccactgaatggaaaccaatatagggtagcttccgagctatttgcttcaactgcagatgtctataatgttttaggcctaatctctgaagatgatttcacttgcgctacctgtgacggtgcaggcaagtcaaaggaagactctgcaagaagaatatcaagaatcctatgtgcagacttggatatcctatctaaagaggatattttagaaattgccgattatattcataaggaacaggtcaagcagattgcttcaggccttaaagatgtttcagatagggaaggattaactaaagttgttgtgactggtttgggcaaggatattttatgtgctgaggcagctcgactccttggtcttgaagttaagtccatgggagattattacactgatgatgagtgtactgttgctccagctatcggtacagcaatcatgatgaagaattatctaaaatag

SEQ ID NO: 1694 - DNA, 1167 bp, Methanobrevibacter ruminantium
  source 1..1167: mol_type = genomic DNA
atggatttaaaagatgtaacagatgattctatattagtattcgaattattcacagcctctggtatagaagacttgtcaatagtttcagaagctgtagagcttataagatcacttgtaaatgatttaaaagatgaagacacttatgttctaattgcagagccattcaaaaacatattcgatgactttgatttcgatgtaaaaacaataacaatagataatctagaggaatggcttgaggaaaatgcttatatatttgatagggcaatgttcattgcagctgaaaacgacatgaacctctacaatcttacaaagctattggaaaacaaggctgtaaaggtttatggctctgactcatatgcagtcaaattatgttctgacaagtatgaaacctttgattatttaatcaaccgtgtaaatcagccaatgacctataatattcttctaaataaaaagacatattggaaaagggctatccaaatcttctttgataagatcaatggagactatggggatggaagcgataatggtgcagttccaatcatgcaaaagcctaaggacattccagtattggataattcagatagggatgaggttaaaaagtacaagcttattgcaaagccacgctttggagtggactgtgaaagcctaaagatcatctcatcaaaaagggatattgacgagcttgaagaaatctatcctgaaggttccagattcattgtgcaggagttcatcccaggggatgtttgcagtgtcactttaataagcgatggcaagaacgccattccaatcagtcttaataaacagattgttgaaatcgatgagaatggaggaaaatatcttggaggatatgttccatatgagcatgaaatgaaagaaaaagcttttgaagttgctaaaaaggcttgtgaatcaatccctggaataaaaggatgtgtaggtgttgatttgattatagcagatgatgtctatttgattgaaatcaattctagattcacaacttcctatgttggactttccaaggttgcaaatataaatattggaaagacaattgtagatttgattgataagaagatatctattgaagagcttggtgaaattgaatacaaggataaggtaagtttctacaaggatgaaaatggaattttagatataaaaattggtgaatag

SEQ ID NO: 1695 - DNA, 1329 bp, Methanobrevibacter ruminantium
  source 1..1329: mol_type = genomic DNA
atgaaaatagctattgtacttggaacaaggccggaaataatcaagatggcttctgttatggatgaaattgaaaacagaggtcatgaattgttattaatccacacaggccagcattatgataaggaaatgtctgaaaacttcttcattgacttgaaactacctaccccaaattataacattcatgtaggctccggctctcatggagctcagacaggcaagatgatggaaggaatagaagaggttcttcttgatgaaaagccagatatattgcttgttcaaggagatacaaatgcagtgcttgcaggcgcacttgtcgcaagcaaattgcacattccagtaggtcatgtggaagcaggcttaagatcatttgatgagactatgcctgaagagatcaaccgccttgcagcagacatctgctccaaattatactttgttccaacagaagaatcagcaatcaaccttgctatggaagggatttccagaaaaagaatcttcataaccggtaatactgtagtggatgcttgcttcaggaacctagaaatatccaagtctagagataaagaccaatatgatgaaggccttcaggaattggatattgacaatatggataatatcctcaccctaacaatgcatagggctgaaaccgttgacgataaggaacgcctaaccaatataattgaagctcttgaggaattaagcgacatgaacattatcttcccaatacatcctagaactaaaaagacaatggagaacttcaatctctttgacagattaaacgatctccctcatgttcatataatcaagcctgtaggctatttggactttttgcttctcatatccaagtctacaatcatcctaacagattccggcggacttcaggaggaggcaatcacccttgatgttcctgcactgaccctcagatacaatacagagcgtcctgaaacagtaactgccggagggaacatccttgtaggttccgataaggaagtgatacttgaaaatgcaagaaagatcttagatgatgaggactttgcaaataggatgaaatctgctaaaaacccttatggaatgggaaatgctgcagaactgatgataaagataatagaggaatcagataagaatgacacccttaagatggtggctccagatgaggttatggcaagtttcactcgccatatgaaagcagttgatgaggacataactgttgtggactttgaagaaaaaaataattcattaataaaaatagcattccaaggggaagatattaaatacccatatgatgagcttaatttaaatggattaaccatcatttatgaagattatagttaa

SEQ ID NO: 1696 - DNA, 642 bp, Methanobrevibacter ruminantium
  source 1..642: mol_type = genomic DNA
atgtttgaatttacaaaaaacgaattaagagatttagtgattgcatttatcgtgctttcaattgcttttgcaatagcaaatgtcaaattcgatttgcatgcattcatttcaattctacctattgtaatgtttggagtaggagtgggattcctattgcatgagcttggacacaaatatgtggcaaataaatacggttacaaagcggaatttaaattatggcctataggattattaattgcacttattacatcacttataggatgggtatttgcactgcctggtgaagccaagattacagcagagaatattgatgaagagaccactggaaagattgcaatcgctggaccgatggctaatatagggcttggattgctatttatagtaatagcagctataacatatccattaaaaagctcatttacactttttgaattaatttacctagtcagcactgttggcttctctgtaaacgcatttttagctacatttaacatattgcctttctatacattggatggaactaaagtgatgaagtggagtgttaaagcatttattgttgcattcgcaatagctgcaatcatgatgttatcatctatgtttataggggctgaaaatatgattttaatgcttataggaagttaa

SEQ ID NO: 1697 - DNA, 678 bp, Methanobrevibacter ruminantium
  source 1..678: mol_type = genomic DNA
atgaaccaagaactaataataaacaataaggaatatagaaagacagagcccttagaatctttgaatatgtttaaaggacaattatatgaaaccattgtcaccacccaaagcaatgagcatattaaaaatgcagcccctattggagttatctgtaaagattcaaatcatatagtcattcatttggacaattgcgtccatacacacagaaacattatagaaaatggagaattgattgtaaacattacaaaagatccacttatttttacatattcaaccattggagagttggatgatgaatattttgatgaattcaatggcttccctttaattaaggattctcttggatttttcaaggcccatgtaataaagaaaataaacaagaaaagagaaaatgacttcaatgatggaatcggccatgtagtcacctgtgaagtggaggacatttttattagggagtataatgagattgttcctctgaatagggctatgaatgcagttattgaaagccttgtctattattgcagatttgatgcaaagtacaagcatatgcaaaaagagatttggacccatatgaaagagctgaatagagttgctcaaaaggtgggcaatgagaaagaaaagaaatcaatgaaggccatcctagataaaatgagagaaaatcatgattatttggactaa

SEQ ID NO: 1698 - DNA, 465 bp, Methanobrevibacter ruminantium
  source 1..465: mol_type = genomic DNA
atggaagatgtatctgaatttaaaggaattaacggacaattggtaagctttaaaaatgaagttgaaggagcagataaaatcacttttataggctctcctggtgtttgcaccccatttgcagagctattgtcctatgctgtaagaaataaggaaaatcatttcattcccttgcttgacattgatgacgctcatcagtttgagtttaagccatacggcatggttctaaaggatgaagtttcaaatcctcgtgatgctgatgttgttgtcttgttaggaggccttacaatgcctaaatatgaagtggcctttgatgacttgaatgcattgattggtgatgtcttaaaagaagatggtaagatcgttggtgtatgctttatggacatgtttgctaaggcaggttggttggataaggttgattttgactctgtcattgatgcaagcatattaggtgttgttaaaaagtaa

SEQ ID NO: 1699 - DNA, 807 bp, Methanobrevibacter ruminantium
  source 1..807: mol_type = genomic DNA
atggcagataaggataagatctttgaagataatgcttatgatgattctgaatacatttataatgacacctatgagggctctagaaatgattatgatgtagaatatgatgaatcagaagattatgaatatgaagaacctctaattagcctgtttgacattgtaaaggagtatgataagggaaaggttatcgctttaaacaaggtaaacctagacatctatgaaggggaattcgtatcaattataggtccttcaggttcaggtaaatcaactcttttaaacatgctaggggcattggatgttcctacaagcggggaaatattcattgatggattaaacattggaaaggaaaaggatttaagtgatttcagaagagaaacaatcggttttgttttccaacttcataatctgattccaaatctctctgtatgggataatgtacagattccattggtaggaacaggacttcctgaaaaggaaatgaaaaagagagcaaatgagatgattgatgcagtaggattgtctgataagaaaaagcaaaagcctaataagctttccggaggagagcgtcaaagggtggctattgcacgtgcacttgtaaataagccatcaatcattttagctgatgagccaacaggttcccttgatacaaaaacaggttctatggttttaaatctcttaagggcaatgcatgatgtttataatgttaccttgatagttgttactcacgatatggaagttgctagaatggctgataggatgattacaatcaaagatggccagatagtcaaagatgttgataatttttaa

SEQ ID NO: 1700 - DNA, 1137 bp, Methanobrevibacter ruminantium
  source 1..1137: mol_type = genomic DNA
atgagatttataagcttaatcataaaaaatccatttaggaataagactagaagcttcctatccattgtaggaattgcaatcggaattgccaccatagttgctttgggccttattacaacaggtatggaacagtccgttcaaacaacaatgaacgaaggtgctgcagagataactgtaaccaatataacctcaattggtgcagggactattgattccagtctggtggatgagttaaagaacataactaatgtttcacggactgcggggattttgtctgccacagatcaaaactttgttgatatggcctcatcgaacgatatgtcttctatggaatcctctacaaggctttatggaataaatcgggcagaccttgaccttgaaggaataaaagacataaatggaagcttttttgaagaaggcactaagcaggccataattggcaagcaatatgctcaaatgaataatatgtctattggagataatatttccgctttaggagaggaatttgaaattgtaggggtttttgaaaccggtggagtccttgcagatagtggagtttatgtttccttagaaaccttggatgaggtaacaggtgctgaaggaaaggtaaatcaggttatagtcaagacagatgaaggagtaaacgacactgttgtggcagatgcgatagaggataaatatgagaatctgacaacaataaccagcgaagagatgtctcagatgctggataatgttatcggtattcttgatgctgtttccgttgctgtttccgctcttgcaattattgtaggtgcaataggaatcgtaaatacaatggtcatgtctgtttatgagagaactaaggaaataggtgttttaaagtctgtaggatggaaaagcagaaagattctaaagatgattattggagaaaccttggttttaacaatcctttcaggtattgtaggctcagcattcggtattctcattgcagaggtcggtgtcaggctgatgggagatacagattttgctttgggatacagtccaagcactttcatcatggcatttggaataaccattgttgttggattgattggaggaatttatcctgcttataaggcaagtaaattagctcctacagaagcattgaggtatgaatag

SEQ ID NO: 1701 - DNA, 873 bp, Methanobrevibacter ruminantium
  source 1..873: mol_type = genomic DNA
atgaaacgaactgctttaaagattgcttatatcggcacccattttcatggatttcaaagacagccggatgtaaggactgtagaagaggaattaatttatcatcttaggaaactggaatatatagatgatttaaaggcttcccgatttaggatagctggaagaaccgatgcaggtgtccatagcttgggaaatgtgataagctttcaaagcgaaaaggaagttcgtgtcaatcagataaataatagcctgccagatgatattcaaataatcgcttgggctccagttcgatttggattcaagccaagatttgcaaagaggcgctggtatagatatattctctttgaagaggacttggatattgatcttctaaggaaaacagcagaagtctttaaggggacccatgactttaccaatttcacaaaaagaaagcagaagaccactgttagaaccattgaagatataagaatcaccaagccaatcattgatgaagaagacaagaacaaaaaaagtgattttgctcatctaaacaaaagctacagccctatctttgttgatatctatggagaaagcttcttatggaacatggttcgaaagatgatgagaatattcttggatgtaaattatggcaagctcactctagatgatgtggaaagactcctaaatccagaagaaggcgagccaagggcttatatcaaggtggttgatgcagagaatcttattcttatggatatagaatatgaggggataagattcagatatgatgactatgcatgcgaaaggtttaggagatatttgattgataatttgtttgaattgcagaagacatattcgataactgagtctatgttgaactgcttagacgatttaatttaa

SEQ ID NO: 1702 - DNA, 897 bp, Methanobrevibacter ruminantium
  source 1..897: mol_type = genomic DNA
atgagaaaagagaaagaatcaaaagaatccattagcatttatgataattataaaatagatatggaacttaaacacactgacaagcagtattattttatcttttataaaagaaggctttttctaataaataacaaaattccgttagttaaagacttaatatcacttaatattaatgattctgatgtgaaaaactccatttacattggacaattccattctaaggactgctttgcagttgaattggatgaagaatttgactgtgaacattatattaaagccaatgatgattcccaattcattgaattgtattttgtttttgatattgacgaagagacataccttgtggcaggcagagccatacaaataatcgattgggaaaacactcaccaatactgcggaagatgcggagcaaaaacagtaacttccgatattgaaatggcaaaggtatgtcctgaatgtggatttacttcttttacaaggatttgccctgcaataatcacttccatcattaaaaaagatgagtctgagcttgaccaagagggaagacctataaataaggttttaatggcaagacactcctatcacacagctccaagatatgcattgattgcaggatttctggaagctggagaatctgtagaggaagcggttaaaagggaggttatggaagaggtaggaattgaagtgaaggacattgaatactttggaagccaatcctggccatttccaaactcattgatgatcggttgcatatgcaaatacaagtctggtgaaatcaaggtagatgaaaatgaaatcctaaaagcaaaatggtttaaaaaagaagatattgaaagaccggcatcggagatttctatattttcaaaattactcaagaatttcattgaaaactactaa

SEQ ID NO: 1703 - DNA, 615 bp, Methanobrevibacter ruminantium
  source 1..615: mol_type = genomic DNA
atggaacttatagcaaagaatatttcatttaaatacccatcagctaaagactacctattaaaggatgtaagtattgaattagacaataagaagattgtaggtttgattggagatagtggtagtggaaaatcaacattatgtaaaatcttatccggttatatcactaaatatgagggtgaagtaacatttgatggtcagccattccataaaaaaggatttaaaccagttcaattaatttatcaacatccagaaaaggttatgaatcctaaatggaaaatggatcaggttttatctgaatcttgggatgttgatgatgccacattatctgaattcggtattcagaagtcctggcttaccagattcccacaggaattgtctggtggagaacttcaaaggttttcagtggtaaggtcccttaatcctaatacaaagttcctaatagcagatgaaatgactacaatgcttgatgcaattacacaggcacaaatcatagattctgttttaaaaatagtaaaggaacgtaaaatgggattcttattggtaagtcacgatatggatttggtagaaactgtctgtgatgaaaaaatatactttaaagatcttaataaggcttaa

SEQ ID NO: 1704 - DNA, 1341 bp, Methanobrevibacter ruminantium
  source 1..1341: mol_type = genomic DNA
atggataaattattggatgttgaaaatgtttcaatttcatttatacaatacacaaagggattaaatcaaagggatttaaaagttataactgatttgacattagatatatctgaaggtgaaattttagcagtattaggttcaagcggttctggaaaaagtttgcttgcccatgcaatatttggaattttgcctgaaaatgcaagacttaatggaaaaatcaaatttaaaggcaaggaattgtctcaagcagataaggaagaaatcagaggtaaaggaatagtgcttgtgcctcagtctgttaacttcttggatcccttaatgaagatatcagatattgcaatagggcactgtgatagcgaagaggagaaaaaggaaaagaaaataaagcaaagagaaattttcgaacattataatttaggtcctgaagtggatgagatgtatcctttccaattgtctggaggaatggcaaggagagttctagtttcaactgcacttcttgcagaccctgaccttgttgtagcggatgagcctactcctggacttgatgagaagactgtagaagagacattgaatcactttaagcatatgaaagatgatggaataggtgttcttttaataacacacgatattcatgctgcattagaggttgcagacaggataggaatattctattcaggatatgtaattgagattgcacttaaggaagacttctcaggagatggggaaaacttattgcatccatatacaaaggccctctacaaggcactccctgcaaatggatttgaagtcattaagggacatcagccattgcatggggagatagtcaaaggctgtccttactatgacagatgtgactggagatttgacagatgtaaggaagagcgtcctgaattgatggacattggtcttaagaagattagatgctttaaatatgatggtgtcactgaagatatgattaaggacggtgctattgaggagactgctgaagccaatatcgaagatgctgctaatgaagtagttgaaaaagctgctgaacttgtggatgaatccaacattgaagaaagcgctgaagctgttgaaggtgctgaagaggctgttagtgaaactgaagatgcaattgaggaagaagtagctgaagctgttgaaggtgctgaagaagctgttgaaggtgctgaagaagcagttgaggtcccagaagaagcagtagaagaaggcactgaagaagcagttgaggaatcttctgaagaagcagttgaggaatcttctgaagaagcagttgaggaatcttctgaagaaacagttgaggaatcttctgaagaggcagtagaagaaggtgcataa

SEQ ID NO: 1705 - DNA, 507 bp, Methanobrevibacter ruminantium
  source 1..507: mol_type = genomic DNA
atggatataaaaatcaaagaaatagaaaacgatgagtctcaaataaagtctgttcaagagtttttatatgctcaaataaaaatagaatatggtattggtccaatgcctgaatttcattatgatattgatggattgaaagactattacatattgcctaaaagaaatgccttctttgcagcatatgatggggataagatagttgcaacagcaggtgttagggcatatgataaggattatgaattctttaaaggtcaatacaatgaagagaatacagcaagcatttggagactgatggtagatgagcagtatcgaagaaatggacttgcacgcattcttgttaaaaaaatagaagagtttgcaaaggaagaaggatataaagaaatttatttaaacactcatagatatctggaagcggctttgccattttggaactctcttggttatactgtaactatagaagaagatgactatgatgaaacaaatcatatgataaaggttttagtttag

SEQ ID NO: 1706 - DNA, 855 bp, Methanobrevibacter ruminantium
  source 1..855: mol_type = genomic DNA
atgattaagaagaaaactaatgataaggagcaatggtttatataccgtgcaaatcttaggacaaagacacttgtaattattggacttgcagcattgattatcataagcattttcgtatgcggatatttcataagggacatccctacaaatttcgcttcagctaatcagatgccttcccttgaacaccttttcggtacagattggatgggaagggacatgttccaaagaaccattgccggtcttggattaagcattatggtaggtttcatcgcatcagttctcagtaccatcatttcaattgtcttaggattgttctcaagctttaataagtttgcagatgaggctgttgctggaatcattgaccttttcggttccattccacacattcttctaatcattatcgtttcaataatgtttggtggaggagtatggggtgtaatcatgggcgtaggtcttacacactggacacctcttgcaagggttctaaggtctgaagtcaaggagattaagaccaaggaatacattgcattatctgaaaatcttggaaggaataaggtttggatagctataaagcacattttcccattgattatctctcaaataattgtaggagtaatcctaatgttccctcatgcaatcatgcacgaggcagcaatcactttcttaggattcggtctgccacctcatgagcctgcaattggagttatattagctgaatcaatgcactatctttctgctggatactggtggttggcattctaccctggtctatccttgctgatagttgtattgctatttgatcttattggagagaatgttgaaaagctcctcaatcctgaaacagcacaaagttaa

SEQ ID NO: 1707 - DNA, 990 bp, Methanobrevibacter ruminantium
  source 1..990: mol_type = genomic DNA
atgaataaacaaaaaatagcaaaatattttggttggaaattagtacgatttgtcgtattaatgattgcagttgcaatatttagttttgtattattagatttatcccctattgacccagttaatgcttatttaaaaggtgctgcagtaactgaagctcaaagagcaattttacagcaatactttggtaccaatgttccattgcctgagaagattttccattggcttatggatttgcttcaaggaaatctgggaacttccttaatctaccgtagaccagttatggatgttattattgacaaattcatggcttctcttgcattgatgacaatatcctggattttaagcggtatcatcggttttgctttaggagttgtagccggtaaaaacaaaggttcctggattgataaggcagtgaaggtctactgttatgccatccaatccgctccatccttttgggtgggtatgcttatatcgatggtattctctgtttatctgggatggttcccaataggattcggagttcctattggagtaaggagtacggatgcaacctttattgagtgggcaaccaggctggttcttcctacgctgacattaagccttgtaggtcttgctcctattgcaatgtatacacgaaatgaattggttcaggtcctatcctctgactatgtattgtttgcaaagtccagaggggaaaagggctgggcactgataaaggatcatggtttaagaaatattatgcttccggcaatcacacttcaattcttatcattcagtgagctcttcggaggggctgtcatggtggaacaggtattctcataccctggaataggacagactgcagttgcagcgggtcttcaaaacgacgttccactatttttaggaattgtggtcataagtgcaatatttgtatttgtaggtaacttgcttgcagatatttcttattacttcatagatccaagaattaaggagaatgagttcaatgattaa

SEQ ID NO: 1708 - DNA, 1620 bp, Methanobrevibacter ruminantium
  source 1..1620: mol_type = genomic DNA
atggataagaaaacaatcattatagctgcagtagctattctcgttattgctggaattgccgttttcgcatttggaggcggcggaagcagcgatagcgatccgacccacttgacagtagctacacacagcaatatggcagaacctgaagcaggtttcaacccgcttacaggttggggttgcggacacatgaactataacccattggtacaaagctgtctctttaagacagacaagaatggagacatagttccagaccttgcaaccaactattcaattagtgctgacggtttaaaatggactgtaaaggttagagatgacgtcaaattctcagataactccacttttgacgcaaaagacgtagcatttacattcaacactgcaaaagacactgaaactgatttagatttaaccaatcttaagaaagttacagctaaggatgacaagactgtcgtatttgaattggaagaaccaagatccacattcatctatgacttaaggtatgtaggtatcgtacctgaagagtatgacaacgctacctacggcgaacacccaatcggtaccggaccttatgtattggaccactgggataaaggtcaacaagctatctttaaggcaaatgacaactggtatggtgacaaaccttacttcactcaaatcaccatgttattccctgaagaagctacctggctagagttagctaaatccggtcaagttgacattgctcctgttgcaacctctgcacttaacgaatctgtagacggatacaactttgttgaaaagtctgcaggtagggcacaaggtatctccttgccatatcttgaagatactggaaaaaccagcccagcaggtgcaaagatcggtaacaatgtaactgctgacaagtccatcagagaagcattgaacataggtgtcaaccgtgataaaatctgtgaagaagtattctctggtcacgcttcacctgaatataccagcgtagataccagaagctttgcaaaccctaacgctaaagtaaaagatggtgatgtagcaaaagctaaacaaatcctcaaagaaggaggatgggaagacacagacggtgacggaatcgttgaaaaagatggcgtaaaagcatcctttgacttatactacccacctgattaccttgacagacaatctttagcaacagtatttgctgaacaagctaaagacttaggcattcaagtaaacctccaaggtgctgactgggataccatctatgctaacatgtattcctctgcttctgtaatgcaacagacctcaccggacccatataaatccatctatcaacaatatcactctaaggaagctgatgacttctatatgaaccctaacttatataacaatactgcttccgatatgttgatggaacaagcaatgcactccaatgacttcaaactagcagactccttatgggctcaatctgcccttgtaaacggcggaggctggggacctgctggagatgctccatgggtatggcttgctaactacaactacaactacttcgtaaaagaagatattgatatgggtgaccaacctgacggtttaggaaatgacttcttgattaatgttgttgattggactagaaccaattcaactgcataa

SEQ ID NO: 1709 - DNA, 693 bp, Methanobrevibacter ruminantium
  source 1..693: mol_type = genomic DNA
atgtccttatcaatagaactggaaaaatacctgaaaggcaatggcgcaatagaagtaggatatgcagacatcaccaatttcactccaaagaaaggattgaacacaggagtagtctttttcatcacctaccctaaggaagtgatacgaaacatggcgaatgctccaacattagagtacctttatgaattgattgatctaaacaccagactggatgcccttggaatgatctgtgaggagtttcttataaataaaggatataaggcatatgcacagacaaaaaagagattaggaggaaactttggagagttcaattcatttgagcttccacataagaccatagctacaagagcaggcatgggatggattggaaagtcagcactctttacaacattcaagtacggatccgctttaagattatgctcagtgctgacagatgcccctttagagataggagagccaataattaagtccagatgcggaaagtgcatgatatgtaaggaggcatgtcctggaggagcaataagcggaagaaactgggattatactcttaaaagaaatgatttttatgatgataagaagtgtgagaagtatgcgcttatagtctctgaggagaatctgggaaaacctgatacagtctgtggcaaatgtatttatgcctgccctcatactcagaagtatgtgaaaagaacttga

SEQ ID NO: 1710 - DNA, 561 bp, Methanobrevibacter ruminantium
  source 1..561: mol_type = genomic DNA
atgaatgttaatattaaagagttaggaaacgacccagaggaaataaaaaatgttcaaaactttttatttcacatgataaaacttgaatttggctatgattatgtcccagagtggcatcaggacattgtgaatatggaggactattatataaatccagaacgcaatgcatttttcgttgcttattccgaaagcggtgaaattattgctacaataggtctgagggcttatgataagaattttgaaaaatttgaaggcatatattccaatgacactacatcaagcatttggagactttttgtcgataggagatacagacgttgcggtttggcttctaaaatgtttagcgtagctgaaaactttgcaaaagacagggactataaaaatatttatttgcatactcataggacattagagggggctcttcagttttggatgaaaatgggctttatcattaccttggatgaaggtgatgagcttgaaactgtccatatggaaaaattcattcaaaaattaaagatttcaccacaagcaggtatcttaacttatgcaattaagttataa

SEQ ID NO: 1711 - DNA, 726 bp, Methanobrevibacter ruminantium
  source 1..726: mol_type = genomic DNA
atgcttacttttattcaaatggaatttttaaaattaaaaagatcaaaaatatttttattaagcgttcttatggctgtgcttccagcccttctgatgtacatagcaacatttgcttttgatgaagtccaggcctttgacgctctatttaccaatgtaaacatgtatatgtctgtattgtttgctgttcttatctttgcaatcattatggcatatctctttggaagggaatacaatgaacataccttaaagatgatgcttaccattccaatttcaaggggaaagttcctgatgtctaaatatctcatgttccttatttggattttgattctaacagttattacaagcctatcaactatgatatttggttttgctgcaggactaagcggatttactgtaaacttgctaattaacagctttgcacagcttctatttgcaaatctattgctctttttgacattctctccgtttgtatttatttcattgtttgttacaaatatggtgcctgctatggttggcggagctagtctaactcttgttaatatgcttgtttacggacaaacctgggctccatatgtcccttgggtatgtccttatcttattgcatctggagagatagcagaatatggaataaatatgctattgccttatggattggtttttgctactttcatagttggaatagtcatttcttatctttactttactaaaaaggacgttcctctttag

SEQ ID NO: 1712 - DNA, 1068 bp, Methanobrevibacter ruminantium
  source 1..1068: mol_type = genomic DNA
atgagtcaactcattaactattattttattattaaaggtgattttgtgactgattacgttatagagacaacaaatctatcaaaaaagtattcaaaaaaatatgttgtcgattctattgatatgcatgttgaaaggggaaagatctatggtcttttaggcaaaaacggagccggcaagaccactaccatgtgcatgcttttaaacctggttgctccaagtgatggagatatccttctatttggaatgaatccaaaggagcattccaaggaagtctattcaaacataggatctatcatagagactcctggattctatgagaatctgactgcatatgaaaatctggagatagtttctaagctgagaggcaagtataatcctctaatcattaagatggttcttgagatggtcaatcttgaccatgagaagacaaagaaattcaaggactattcattggggatgaagcagagattgggaattgcagctgcaatcatgcataaccctgagcttctcattcttgatgagcctataaacggtcttgatccattcggtatcaaggagataagagaccttcttaaaaggctatcaagggagtatggagttaccattctcatatcaagccatatcttaagcgagatagaaaacattgcagatgtcataggatttatggatgaaggatgtttgattgatgagataacaaaagaagagcttcatacaagactgaataagtttgtagagtttgaggtttcagacattgaccttgctgttgatcttctaaaggacacaggatttgaggaaaacggtgactttacatttgcaagaaacattggcaattatattgaagatatgaattctcttaaatcttttgagtctgatggatatgtgaattctgaagatggctttgaatctagtgaaaatgccatcggaggaaccatccatttattgaccaatcttgatttaagagaccaattcaataagctatttgtaagctctggaatcgatgttagaaaggtaaatctatgtgaagagaacttggaagagttttttacaaggattgtttcttctgcttaa

SEQ ID NO: 1713 - DNA, 756 bp, Methanobrevibacter ruminantium
  source 1..756: mol_type = genomic DNA
atgaagaatgagaaaacagaaaatgaaaataataaaaatacttcctcaccactagtcaaatacctgttccaaacaagatttttcctttttggattaactaaaaagtcaaagacaataaaaaagatatttaacaaagtcttttttgaagacaatgaacttttcattcttccaaataaaagcacagtgaacaaaagcaacaccaaaatcactgcaaacattgaaattaaggagagctttcaaaaggatgactctgagtttctgccaagtgaaatccttaaggaaataataaaagaagcaaataatatctttattatgaataaatgcatttgcagaagctcttcaaactgcaaagactatccccacgactttggatgtatctttttaggtcctgcaagcaagaaaatatcttcaaaatatggcaaagcagccacagtcgaggaagcattggaacatgttgatatggcagacaagctaggattaagccatttgattggaagaaataaattcgatagccttttgatgaatgtgggaccaaaagaggaattgcttacaatttgccattgctgtccatgctgctgcctatggaaaatcattccagatttggatgatgaaatcagcaataagataaaaagacttgaagatgtggaagtaaatgcattagatgacaagtgcaagatgtgtaaaaaatgtttagaggaaaatgtctgcatttctaatgcaataagtcttgaagatgataagataactattgattaa

SEQ ID NO: 1714 - DNA, 120 bp, Methanobrevibacter ruminantium
  source 1..120: mol_type = genomic DNA
gtgggctgtggccattgtgttcaagcatgcaaatttgatgcaatccgattaaactatagcagaaaatctgtagattctgttattaatagaattgaagaattagtcgactataaaaattaa

SEQ ID NO: 1715 - DNA, 741 bp, Methanobrevibacter ruminantium
  source 1..741: mol_type = genomic DNA
atgtcatttcaagataataaaatgttaattatgcctgctgtagacattagaggtggaaaatgcgtacagctagtgcaaggaaaacctggaagcgagcaagtagtcatagaaaacccagagaaggttgctaaaaaatgggaagatgcaggggctgaagtggtccatgtaatcgaccttgacggagcccttgaaagcgttacaaatatagaaacaatcaaaaagatactgaatgaagtttctgttcccattcagcttggaggaggcataagaagcatagaatatgcagaggagctattgaatcttgatattgatagattgataataggcactatgggaataaagaaccctgagataataagcaaattatctaacgagtatggcagcgaaagggtgatgatctctcttgacagcaaagacaataaggtagtcataaaaggctggcaggaaaagatagacaagtctgcaagtgaaataagcaaggagtttcaagaactgggagccggaagcatattgtttacaaatgttgatgttgagggcctgcttggaggattctatgtagacccagtaatagaccttgtagactctgtagatattccagttgtctattctggaggagtgacaagcctagatgacctaaaacaattgcagacaacaggtgcaaaaggagttgtaattggttctgcattgtataaggataaaataaagctagaagatgctttgaaatatcaaaacattgaataa

SEQ ID NO: 1716 - DNA, 453 bp, Methanobrevibacter ruminantium
  source 1..453: mol_type = genomic DNA
atgaaagtaatggcaacaggagcatttgacatattgcatccaggacatggattgtatcttgaaaaggcaaaggaattaggtggagaagatgcagtccttgcagttgtaatagctagagactcaacagttaaaaagaaaaaaagaattcctgttattgatgaaaaccaaagattagaaatgatcaagtacctaaagccagttgatgaggcatatataggccatgatggagacatgtttgaaatcgtagaggaaatcaagcctgacataatcgcaatcggattcgaccaaggccatgatgtaaacaagcttcaggaagagctggataaaaggggaataaaggccaaggcaatgagggttgaagcccataggattgcagatttggacagtacttgtaaaatcatcaagaagatacgtaattcagactttgaagaggattatgtaaactgtgactag

SEQ ID NO: 1717 - DNA, 1017 bp, Methanobrevibacter ruminantium
  source 1..1017: mol_type = genomic DNA
atggtaagtatagcaattgtaggcggaagcggatacacaggaggggaattaatcagaattctttctgctcaccctgaagcagagatagtggacattacttcaagacagtttgaaggaactccagtccacaaggtccatccacatatcagaggaacagatttagtatttagaaacaagaagccaagcgaattggatgcagacatcatatttacagcaactcctcatggagcttctatgaagatagtacctgatctcattgaaaccggagctaaggtcattgacctaagcggagactacagattcaatgacattgacgtttatgaaaaatggtatggaatcgaacatacctcagacctaaaaggagttttcggacttccagagattcacagggaagaaatcaagaaaaccacactccttgcaaacccaggatgctttgtaactggagctatcctttcaggatacccattgtcaaaggcaaaacttgcagagagaatgatattcgattccaagactggagtaagcggagctggagtaaatccaacaacttccacacactatccaaacattggagacaatgtaaacccatataaggtaacaagccataggcatatgcctgaaatccaacaggagcttggtgcgttctctgatgttaagatatcattcactccacatcttgtgccagtgataagaggaatattgaccacaaatcactgtttcctagttgacggtgcagacatcacaagcgaagaggtattggatatctataaggaaacctataagggagagccattcatacagattttagaggatggggagattccaagactcagcagcgtaagaggatccaactatgctcaaataggatgctttgaaattgatgaaaccggcagacttgtcatcatttcagccattgacaaccttgtcaaaggggcatcaggccaagcggtccataacatgaacataatgtgcggatttgatgagaagactggattggacttctttggaatgcacccataa

SEQ ID NO: 1718 - DNA, 489 bp, Methanobrevibacter ruminantium
  source 1..489: mol_type = genomic DNA
atgaacagaataattctatactattcagagggaggaactactcagcaggttgcagaaacattagcaattaacctaagatgcgacatctgcagaataagagatttgaaaagtagggacggctataaaaacagattgttttcaacctttgatgcattcagagaatccaagacagaaatctatcctcctagattagacttaagcgagtatgacaccatctatataggaactccaatctgggccaacaatccaacccctgcaataattaccttgattgacaggtataacttccttggaaaggacgtagtcctctttacaacatccaccaactctgaaggagaaaacacatttaataaaatggatatgaaattaagggcaagaggagcaagagtagttcaggaattcaatatcaaaaccaaggacaagagcttggaaatgattagcgaagatactgaaaaagccataaaaaacttagatttagaattatattaa

SEQ ID NO: 1719 - DNA, 1158 bp, Methanobrevibacter ruminantium
  source 1..1158: mol_type = genomic DNA
atgtttgacaaaattatggaaaatcataaagccttaattgccatacctattatacttgcacttttatcacttgctcttatctcctttaatggaatagaacaaggagttgaacttaaaggaggatcacttgctgaactgcaactgacaggttcaacaagcgtaaatgaccttgaaagtcaattaactaaagaattgaatacaaacaacataaaagtgacaagcaatggcgaaaataaggttactgtagaactggaaaataatgttaattcaagtacattttcaaaggccatagatggaaaggcaaaggtgatcagctataatgagataggtcctgttttatctgaagaggcaatgggacaaatatatatcgctatgctatttgcatttttatttatggcagttactgtttttattgtatttagagagcctgtaccttcagtagctattatcctagcagcattatgtgatatactcattgctcttggaggtatgtccattcttcacatacccttgtcaattgcatctgtaggtgcattattaatgcttattgggtacagtgtggatacagatattcttcttactacaagacttcttaaaagaagggaaggaactgttgatgaaagagctagaaacgctatgcacacaggtttgaccatgtcctgtgcagctatcgctgcaatgggaattctttacatagtcactgtaattatcatgcctgaagcaactaccttaagcaatatttcagcagttctggttattggattaattggagatattctttcaacctggcttatgaaccttggaatcttgaagacttatattgattggagacagtctaaaaagcaagataagtttaatatagatgctcctaagtctaatgagtctaaatccaaatctaaagaagaagatggcaagtctgaatccaaatcatttaaggacagatttaaaaggtccaaggatgatgattctaaagattctgaatctgaagactcttctaaagattctgaatctaaagactcttccaatgacatagacagttcagaagaagaaaaatcttcaggtaaagataaaaaatcttccaagaagactaaatccaataaaaaaggaaacaaacgtaaaactaaaaaaagcaaaaagaaagggaaaggaggtaaatag

SEQ ID NO: 1720 - DNA, 1224 bp, Methanobrevibacter ruminantium
  source 1..1224: mol_type = genomic DNA
atggctagtaatttatccaaattcttcaaggatagacaagtaatcatcctaattatttgcctcataatcagtatcataagcataagtttccttggagtagaacaaggacttgacctaaagggcggttcctccatccaattgcaattggaacatcctgtaaacgactctacaatgaaagtggtcacctctgtactggacaaaaggcttaacttatatggtgtaaccgatgtaaaggtccgttcaagcggagaccagatggtcatagttgagatggctggaaagagccccgaagaggtggagcggctgattggtaacccaggtatttttgaagcaaaaatagacaataagacagttctagtaggcagtgacgttgcaactgtagacgctcctgttgttggagagtctggagaatggcaagttccatttacattaactacagaaggagctaagaaatttgcagagcttgcaaagggaaaaggcggacatgaagtggtaatgtatcttgacggaaagcagatagatgaccaccctcctgcattggctgaagagcttgcaagcggagaggctgtaactgaagttcaggttacaggtggtgccgaagatgttgaaacagcaaaagcagagtcaaatgaagtattcactgtattaaagacaggttcacttccggtaaagattcacactgtaggttccaatacagtttccccagagttaggtcagcagtttgcacaaggagcattgattgcaggtcttcttgcaatccttggtatttcagcagttgtatatatcagatatagaagagccttcctagctatccctatactcattacaacattatctgagataatcattatcctaggggtcgcttcaataatccattggaacatagaccttgcagcgattgcaggtttgattgcatctgtaggtactggggtagacgaccagatcatcattacggatgaggtgctgcaccacgacgatgaaaacaccaggcatagaagaacaagaactcaaatgaatgtgaagaatgctcttttcatcatatttgcatcagcaggtaccttgattgcagctatgcttccattagcctatgtaggatttgcaagaggaagcagtggaatcggtacaattgctggatttgcattcactacaatcattggtgtattgattggtgtattcattaccagaccagcttatgctaagtttattgaattgtttgtttcttaa

SEQ ID NO: 1721 - DNA, 1242 bp, Methanobrevibacter ruminantium
  source 1..1242: mol_type = genomic DNA
atggttatagttgtaggaactggtgccggaggagcaataattgccatgaagcttgcaaaggcaaatattccagttacaataattgaaagaggcccatatatagcaagcaaagacgcatatgaaacatatgacatgaaatattatgacaagagatttgaaagcgaacaaagcctagaccttcttaagaccacctgtgtaggaggatctacaatagtggcagcaggaaacggcgtaagggttcttgaagaggaattcaaggacctaggcatagaccttagcaaggaatacgaaacaatagaagagctaatcggcgtccatcaaatggatgacgaccatataggtgaaggaacaaggctatttttggaatctgcaaaggaatgcggattcgatgcaatcaagatgcctaaattcatcagggatgaggactgcaagccatgcggcaaatgttcattcggatgtcctagagatgcaaaatggagcggaaaggactttatagacatagcaatcgaaaacggagcagagcttattgaaaacgcagaagtcactaagatacttactgcccacaaatcagcaagcggtgtcgaatacatacaggatggccaagttaagaccatcgaatcagaccttgttatccttgcagccggtgcaatcgatacagcagtcatccttcaaaagactggaatagacgctggaaacaagctattctttgatccattcataagcgttggaggagtcttaaaagacataaaatacaacacagaggtacagatgaacggacttgcaataggaaatgaatatatccttgccccacatttctcctcattcatttcaaaatatatcaaagaaacataccctgaagttgaggataaggacattttaagcattatggttaaggttcaagatgatatggtaggatctgtagacattgatggaaatgttaagaaattcaatacaataggcgatataagaaggcttggacaaggagctgcagctgcaggctcaatccttcaaaaggcaggagtcgatgcaacaaccatgacttcaacagtattcaggggagcccatccaggaggaacagcagcaattggagaggttgttgataagaatctgaaaacagaaatcgatggcctttaccttggagatgcaagcgttattcctatctctccaggcaagccacctattttgcttatccttgcattagcggaaagattagcaaaccatttaattgaagaggttatttaa

SEQ ID NO: 1722 - DNA, 429 bp, Methanobrevibacter ruminantium
  source 1..429: mol_type = genomic DNA
atgtgggagatggtttggcctattttgcttgtcattttatctaatacgatttataatatttgtaccaagtcaactccagggaatgtgaatgcctttggaacattgatgataacttatataactgcagctattttaactgctatcatctttgtatttctggtaaagcctgagaatgttatggtggaactttctcatgttaattggacatctgttgtgcttggaatagctattgtgggattggagcttgcttatatttttgcattccgtgccggttggaaggtcagttctgcttcaattgttgcaaatattggacttgccattgttcttgtattcgttggggcgattctttatggtgagaatataacacttaagcagcttggcggcatatttatttgtgctgttggattatttttgattaatatgggttaa

SEQ ID NO: 1723 - DNA, 462 bp, Methanobrevibacter ruminantium
  source 1..462: mol_type = genomic DNA
atgactaaggtagagttaaaggttaagccaattgaaaacggcactgtgattgaccatattccagcaaataaggcgcttcaggtattaaagattctagggcttccaaagaaaggaaccaatgttacacttgctatgaatgtccattccagattaggatataaggatattgtcaagtttgaaaatagggaattggctcatactgaaatagataagatatcattgattgcacctgatgcaaccatcaatataatcagggattatgagattgtatctaaaaataaggtaagaaaggtaaatgagttgaatggaataatcaaatgcaccaatcctaaatgcatatcaaatactgaagagcctctagagactaagttttatcttgttgactctaatccgattacagtaaggtgccattattgtgaaagattggttcagtatgatgagatatataatcagtttgaatag

SEQ ID NO: 1724 - DNA, 6768 bp, Methanobrevibacter ruminantium
  source 1..6768: mol_type = genomic DNA
atgaaattaaataaattcttcattatcagcataatattgattatatttctatcaattagtgcaataagtgcagaaaatactgataatgcactctcaacagatacacactcaaatgacaatgtactctcaacagattcacgatcaaatgagaatgcactcacaaacgagaacacactcttaacagatacacactcaaatgagaatgcactcacaacagacccactcacaaaggagaacacacattcttataaggattcagaaaagtctctttcatcagatgcttttaataagaccatttatgtaaataaaaccggaagcgatgagggagatggaagcgaagcaaatccttacgctacactaaaaaagtccatttcacaacttgatgactctgacaatgctgtcatctacatcggtccaggcaattacacaggtgaaaataattctgccttggagataaacttagaccataaagatcatgacggatcccttagcattattggagattcaaatggaggaactgtttttgatggggaaaacttaaatccaataataatatcaatcagtgaggattcaatagtgaccttaataaatatcacattcactcacggcaaaaataatatgggctctgccattagaagttctggaaatctcactattgacaattgcatattcacggaaaactatgcaacaaatcttgctgcactttatgttgataaacatagccctttaacagtaatgaactcaaaatttttagaaaatagggccaaacaatgtgcagatatctatttttcacaaaactcagaaataattttattaaataatctctttgaaggttcaactgcagaatattcctatgcctatagcccatccgtatccctgcaaacaggaaaaagtttagtcaaaggaaatacttttaagaatctgacaggcgcttattataaaggtgcattgtatattgcctataacaatgggataaatatagccaacattactgataatacattcatcaactgtaattatacagggacagatggagcaatcctatttttccaaaatgcctatttgaagaacaataaattcatagactgccattcttccactgcatttctatactccaacactgagtttaatgcatacctaagttttgaagatgcagaaattgatggcaccaccttctttttaaaagccaatgtaaccgacgacatgggaaataaagttaaaaatgcaaaggtcatattttacttgaatggagaaaatgtgggttctgctagttctgataataacggcgtagcaatgataagcattaaaaaattgctggaaaatggagaatatgtaatttcaggtactcagtcatactctgaaatcaatccttttggggtaaacgtaaaaaatgcaactgcaagagttaattacgaccacagctctcttgaagtgtgggtatcaactgatggagatgatggctctggcaacggcagtgaagacaatccattcaagactcttagaaaagcattggattatggaacagcatctgctgtcaatttgactgtgcacgttaaaaacggaatttacaatggggatgacaatagagatttgtcctattccactctcggcaaaatcaccatcgttggagaatcctactccaatgtagtgattgatggagaaaatataacaaagagcatatttgctttctcttcaaccttagacgttacactgattaatctgaccttaatcaactgtccttccactcttataaacgcatacacattaagcatgatggacaacattgtcataaattcaggtaccatacgtgcccaaacaggtaacaatggagtaacaattgataatttaagagtaatcaacggtacagatcaggccataactggctataatctgagattaaccaattccagatttgaaaattgtgatggtctcactcacaccggtttaatatggctatccaccaataataataaggtcacctatttagaaaacaataccttttttaataatacaattgcaggatccgccggcggcggcgccgcatactatatccaaagtgacttaataagcatcaataacactttcgactcaaattggattacggaaagtaggggagaaaatgttgcttatgcagggggcagacatataatttccatcaatgacaaattcatcaataacgaggttcccaaatatgttgcccaatatcgaagcattggaaacgaagaatgtgaaataattgtggaaaacattactttcatcaacaacaaggcatctggaaatggtgcaggtttagcgaccactggagccatagtcaaaggagggaaattcatcaataacagcgcctctggaaacggcggcgcaatatatctcttaaatcatgacaatacaagttcatattgtcaaatgagccttgaagatgtcatttttgaaaacaattcagccacttgcggaaaggacattttcatcgaagggagttctggaaacaatatatttacctatttaaataatctgacaatagttgccaatgatttgaatgtaactagtttgtctgataatttaaccgtcagcgtatttcacccttccggcgccataatcggaggaggggaaataagtttctatcttgatggtgaatacattggaaaatccactctggtcaatcaaaatgcaagtttagaatatgtaggatttaaaaacaataccatatacgaattcacaagcatttatgaatacgcctctttaaatgacacttacattgacggcatagtttccaccaaaatcccttacgccttggaaaacattgaactttatgtatccgatggcagtggcgatgatgaaaatggaaacggcagcataagcaatccatttaaatcaatttccaaggcattgagcgaaggatatcaaaaatcaacaaatattacagtgcatattttggaaggcacttatacaggaagtttaaacagcaatttaagaattccaacaactgttaacatattgcttatcggcgaaggggcagccaagaccataataagtgacagctcctcagactatttcattacagcattaaaaggcaaatgcgaattaagaatatcccagatgacattgaatagggcggcccgtgacacacaatcagccatctatattgaagaggaatccaatgtggccattgacaatgtcacattcattggcggccaaggaaattacggcggagccatcaatactgcaggaaacctttccataagaaattcatatttccatgacaatggatatgcagatagaactttacgtgcaaatgcctattacggaggagccatttgcaatgacggcaccctaatcattgacaatacaatatttgaaagcgaccatgcaggcagactaagtgaaattgcgaatcaaggcacattatacatgaacaattcaaaagtgattgacagcataaacgcatatagcataaacatggatttggttgctatcggcgcttatggtggccaaaagggcgaaattacaatagaaaatagccaattcatagttagctccaagaccatcaatgaattgaatgacagaatctatgatcctacaagggcattgacctgcttgggcattggttcatgccaacatgcaatcctcatcaactccacattcattggcgaaggggcagtattctccccttatgtatttggcggaattaactcaaataatcttgcaagtggaggatgtaccatgattccaggagatttggaagtctacaattcaacatttagaaatgtccaagctgtaaatataatatattcaagaacagataatgtgagatatcactcccaaagggtctttgaaggatgcctattcgataatgtcgaatatataatagctgttttgaatacaggcaatttttcagttgagatgcatgactgcgttattttatcagatgatcttgctaaaataggatttggaagtgaaaaaaccatgaaaatggacatttccaataactggtggtcctccaacgatggaagctatgacaatgccaccctaggaactaccaattacatttcaaattgtgttgtaaaactcaaggaaataagttcagagactgttcatcctgaaagctatctgatcctaactctaaattcaagcaatagaaccggtctgctacaggatgcaatcctggcattcaaggcatacgacggcgaaaacataagcgattacgatggagctttatatcctcgaaatttcgaaatgtctgccataaatgccactttagatgacctggagggcacaataattaacaaggccatcaatccatttgagggtgtagaaaacagcggatattacattgaagccattgtagacaatcaaaaggtcaatctgacagtccatgacagcctatctatcggcaacgcatacattttagctgagaacatttcaatcaactacaatgaaacacaaataaatgtcactgttttggaagagaacggcaaaagagcggatggaggaaacgtttcattgaaattgcatgataaaacctatatatccgaaatcattaacggcactgccatattcgatatagatgtccttcctaaaggggattacctattaaattattcattaaatcgtcctaaggtttatcacagcatttccaactcatcaaatttaactgtcattccatttaaaataaatgcttacgccaatgccagcaatatcaaagtgggagaggatgcaattgtcatagcctatctagataaggatgccggaggcaacgtcactttaggtgaggaaatccaaaaagtcaatgatggaactgccactttcatcatttccaatttggccaaaggggattacacttaccaactaagttattccggagatgaaaaatacgataatgaaacattccatgtttcattctctgttaacttgaaggatgctagcatcagcgttgagaatgacactttggacttgtttgttggctccaatgaaaccattgttgccactatctctccaataggacttgccgtaaattacagttgcagcaatgaatctgtagcaatggttgatgaaaatggtgtcgtcagtgcagttggtgcgggaatggctgtaattaccttgactgtcggtgatgatgtaacttatagcaaaaactctagctctgtcactgtcattgtcagtaaaatcccaaccatcattgagatagttaatgataccattagcttagaagtcacagacagccttgattccattgcaagtttaaatccagaggagggaggcaatttaaactatgcaataagcgatgacttgattgctaagattgacaatggccaaattactgcattaagtgaaggcagtgccattataaccgtttcatttgatggcaatgacaagtatacaaaagctcaaaacaaaagcatcaagattattgttaatcttaaagaggccagcgttagcgcattcagcaatattgacttgctggtgggtgaaaatgataccctttctccaaaaacctcccctgaaggattagatgtgagatatgaatctaacgatacatctgttgtgcttgttgataatggccaagccattgctgttggcgagggcaatgccaccattacattgactgtcggcggcgatggagtatatgcagaaaatacaacaacagtgaaagtcagcgtaagcagaatagctaccatgattgaaattgaaaaagataccattgaattaaaagtcaatgaggaatccccaatcggagctatattggagccggatgttggcaatttaacttacagcataagtgatgaaagcattgctaaagttgaaaacggcaagataattgctttagctgaaggaaatgcaagcctaagcatttcatttgcaggagatgaaagatacattggaacaaatgcaagtgtggagattagagtaaataagataaacacaatattgactgaaacagacataacaacaacctacaaagaggagggctaccttatagcaacactgaaagacagccaaaataatccaataagcggagctgtactgactgttgacttggatggaatcaaaaactatacaactgattccaatgggcaaatcaagatagcgacaaataatctgattccagacacttatactgcaagaatcagctttgcaggcaatgaaaactacagctcatctaatggaaatgcaagtgttaccgttaaaaggataggtacaaagcttaatttcaatgacatgaacactaccgcctttgattccaatatagaaggaagaataggagaatatttctatttccaattagttgactgcgatggaaatccactagccaacaaaaaagttatcataggattcaatggagtcaaatacaataggcaaaccaatgaaacaggatgggcaaagatacagatcaacttgaaatatgccaattcttacacctttgcaatagcattcctaggagatgacaactatagcggatcattcaactttgcagtaatacgcgttagccaacagacccctaaattaactgcaagtagcaagacctataagtcaagcgcaaagaccaagacactgactgccacactcaaatcctctagcggaaaagccattgcaggtaaaaaaataagctttagactaaatggtaaagtctatacagcaaataccaattcattgggagtggctactgtaaaggtctctttaaacaagaagggaacctatagctttacagcgcaattcagtggtgacagcacctataagaaggttactaaaactgcaaagctaacaataaaatag

SEQ ID NO: 1725 - DNA, 1371 bp, Methanobrevibacter ruminantium
  source 1..1371: mol_type = genomic DNA
atggaagaacacatagacttatttaaaagcatactaaacaagatagaagataaagtggattatgcagacataagggctggaactggaaacaacacaagcataaccatgaaagacaatcagattcaagacattaacacaggactgtcaactgttgcaagaataagagtattaaacaatggagcttggggctttgcaacaaccaatgacttttccaaacttgaagagataagcgaaaaagccataaagatatcaaactcactgaaaggagacatcactcttgcagaatgcgacatcatagaggatgctgttgcaattgaacagaagataaagctaagcgatgtaagcatagaagagaaaaaggaaataatacaagatgcaaacaaggcaagcaatgttggcaatgtaataagcacaactgtaagatatggggatgcagagtcaaagactgcatttctaagcagcgaaggaagctgcatactaacagacaatgcaagggtcagcctatcacttaatgcagttgcatcaaatggggagcttatccaattccatcatgacagcttaggcggagtcaagggatttgaagtattgaagaatgcagatatcgaatcctttggaagaaaagttggagaaaaggccactgaacttctagatgccaagccagcaccatcaggaagatttacaatcattgcagacaatagcttaacaggagtatttatccacgaggcagtaggccatgccgtagaggcagaccttgtgcttcaggatgattccatacttcatgaccagatgaataaaaagataggttcagatattgttaatatctatgacgactcaagcaataaggatggattcggctattatccatatgatgttgaaggggttaaaacaagaaagaaccagatagtcaaggatggagatctaatttcatacctatcatcaagggaaagtgcaggtaagcttgacattccgcttacaggtaatgcacgttcatcaatcagcgatcagcctattgtaagaatgagcaatacctatctccagccaggagacttaagctttgatgagcttattgaagacattaaggacggaatatatcttaaaggctcaaggggaggtcaagtggatacaggaaaaggaatcttccaattcaatgcttccgaagcatataagatagaaaacggagagttaaaggaccacttcagagacgtttccttatctggaaacatacttgaaaccttaaaatgtgttgatgcaataggatctgactttaagctaagcgttggattctgtggcaaaggtggacagactgcaccagttggagatggaggtcctcatactaggatattgaatgcaatggtaggtggaagtagttaa

SEQ ID NO: 1726 - DNA, 558 bp, Methanobrevibacter ruminantium
  source 1..558: mol_type = genomic DNA
atgttaagtgaagacgacggcaaatatttacttgaattagcaaaagatgcaattgaaacctatgtaaaagagcatgataagattgatgtgccttcagattgtccagaacatcttagggaaaagcttggagtatttgtaaccctaaacaagaacaacaacctaaggggatgcataggctatccagaacctatctttccattggttgaagcgactatagagtctgcaatatctgctgcagtaagagatcctcgttttccagaagttggtgaaagcgaacttgacagtcttgaatatgaaataacagtactcactaagccagagcttattgaagtggataagcctatagattatttggataatataataattggagaggatgggcttattgtagagaaaggattctatagaggattattattgccgcaggtagcacctgaacacaatatggataaggaagaatttttatcacatacttgtcttaaggcaggtttaaggccagatacatggttaaataaggatacaaaggtgtttaagttccaagggcaaatatttaaataa

SEQ ID NO: 1727 - DNA, 1056 bp, Methanobrevibacter ruminantium
  source 1..1056: mol_type = genomic DNA
atgatgttaccaactataccaactccagatgagttattggataaaggatttagaagaggaaagaaggcagctgatttaagaagaggagaaaagatgcctaagcgcctgaaagggaagcgaattgaagagaccagagttatcactgcctgtcaggtaatcaaggaccgtcttaagatgattcttgatcggactcctgaaattgaagagcttccggaattctatcaggattatatagacattacagttggggttgacgactttaagcaagctctcggtgcagtcaactgggcttacggaatcatcacacagcttgaaaaggaatatggggcaaagattaggaaagctccttctgaacgtgccaccggtcttcgaaagcaagcctatggccgtatatcatctgttgtacataagattgaaaaggaccttgactttttggactttgcaaagcaaagccttagaaacatgcctactgtagactttgatgcaataagcattgtaattgcaggatttccaaatgttggaaagtcaacattactaacccacattacagatgctgagcctcaagttgcaaactatccatttacaaccaaaggtattcagattgggcattttgaaaaaagatggcagcactatcaaatcattgacactcccggtcttctagacaggcctattggagacatgaatgatattgagcttaatgctatggtggctcttgagcatctggctgatgcaatactctttatctttgatgcatctgaaacatgtggatatgcccttgagaatcagtacaatcttctggaggaaatcaagaatgtctttgatgcccctatcatatatttatttaataagatggacatttcagactatgatggagcaaggcatgactatgttcaggagtatattgataagactgagaatccattgcttatctctgcagctgaaggtgaaggattggaagagatcattcagttaattcagcaggttgaaaaaagagagatagctgaagaagatgaagatgaatatgaagatgatgaaaactattttgatttgacttaa

SEQ ID NO: 1728 - DNA, 594 bp, Methanobrevibacter ruminantium
  source 1..594: mol_type = genomic DNA
atggctgaagatatgagcgaaaatattgaaaccaaatctgactttaaagacaaagctgaagaattcaaagcaaaagctgaagcaagaactgaagctaacaaagaaaaatgggatgaaacctacaacaaaggtaaagacgtagcaggaaaagttggtgaaaacctatcaaaaaccattgatgacaccatcattgcaatgaaagctatgcaaaagaactttgatgacaaataccaatcctataaggaaacctctgcaaccaacaaaatcagcgttgaccttgcagaaactaaagacttctactacttacaagcttacctagcaggtgtagctaaagaagacatctcaattgaagcaactgacagttccatctccatcaacgcagaacttaaaaacattctctgcagcattgaagaagatgaagaaaacccagcaaacctaattatcactggagtaaaaactggagttgctgaaaggaccattaaattaggagctgaaatagttaaagaggaaatttctgcaaaacaagacaatggtatattatttataaccattcctaaaaaagaaattcctacaactaaaattgatatagaataa

SEQ ID NO: 1729 - DNA, 204 bp, Methanobrevibacter ruminantium
  source 1..204: mol_type = genomic DNA
atggcaattcctaaagctcctgttaataggattattaaagatgctggtgctgaaagagtaagtgctgaagcagtagatgcattagtagcatacttagaagaagacgcagctgctatctctaaaaaagcaattgaatatgcaaaaatcgctaaaagacaaactgtaaaagctgacgatattgcattagctattaaaaacgaataa

SEQ ID NO: 1730 - DNA, 672 bp, Methanobrevibacter ruminantium
  source 1..672: mol_type = genomic DNA
atggaattttatatcataaacggcgggccaagaaagaaatacaacactgcagagcttcttaaaaaagcatctgaaggaattaaggatgagttaaaggacattgatgaggatgtaaacattcatcaaatccatttatatgacttgaactttaagggatgcaaatcctgcttccattgcaaaagaataggaggcaaatactatgcacaatgtccaattaaggatgaccttttggaattgcttcctaaggttcagaattcagatggaataatctttggcagccctatctactttggtgaaatcacaggagagttaaggtcctttttagaaagattccttttttcaatacttgtttatggaggagagtccaatgctcctaaaagaatgcctatggcaatgatctataccatgaatgttacagaagagggatttaatcttttctatggagataagtttgatatcttggaaaatgccatggctaatttaatctcaaagccatattccttaaaggtctatgacacttttcagttttcagactattccaaatatgagaactatgcctttgatccagaacttaaggccaaacgaaaagaagagcattttccaatagatcttgataatgcttataatttaggcaaaaaaatagctcaagatagtttaaaactcaatgaatag

SEQ ID NO: 1731 - DNA, 1011 bp, Methanobrevibacter ruminantium
  source 1..1011: mol_type = genomic DNA
atgagatataagatgtatgatgaaatgatggagcagccggaggctttaagaagaacatttgcctctgaaagtgaaaacatggcaaatatatctaaaatcgctggaagcgttgagaccatttatctaatcggttgcggaagttccatttcaacatgttactccgttagggatgcattggcatctgtcagtgacttaagaatagaagtgtttacaggttatgaattcgtttacaataaaaaactaaatgatggcgaaaactcattattcattgcaacttcccaatctggggaaactgcagatacattgactgctttaaaaagagcaaatgaatttaatattgatacagtttcaatttccaatgagccagagagctccatgattaaggaagccaaatatcctattgtaactttaggaaatactgaaactgcaattttaggaactaaaacctatataacccaattggcttgcctttatcagatattgttccctgcatcaggatatgaaaagacagatgagattatggaacaattagccaacatgccagacttggttcaagagctattggaatcaactgaagaggacaataaaaacttagcagaagaactaaaggatgaagaaggattctattgcttaggaagtggagtcaattacggccttgcatataaattggctatgaccatgcttatggaaggagctataaagcatgcttgcccattatattccgcagaatacagacacggactaattgaaagggcagaggaaggagttcctttaatcttcttggatgcagatcttgaatcagatgagctaaccaaaagagcaatagcaaatgcaagggatgaattgaaggcaaattgcataatctataatttaagggattatgctgatataaacccattgcttgcaccatttgtctttgtagtgcctttagaatggtttgtctattatttggcacacttcaatggagaagatccaggtagtaccagacatattggtaaggttagatattaa

SEQ ID NO: 1732 - DNA, 546 bp, Methanobrevibacter ruminantium
  source 1..546: mol_type = genomic DNA
atgaatgttgatttaagcaaggcatcaatgaatgtaggacagcaatacgaagcgattctcactacaataaacaatgaaggcaagacaaatgcagctcctttcggagtgaggataatagaagaagataaagtcatgctaaagatatttgaaggtggaaacacaattaaaaacataaaggataacggagaatttattgtaaacataacaaatgaccctatcatgttttcatatgccacaaccacaagcatccccgatgaatatttaagtagaataaactatgatgaccatgaatttgcacatataagcaatgcagatgcttattttatctgtaaagtctatagcattaaggaaggaatgagaaaggataatattaaagatagtgaagcgaatgtgattaaggcagatgttcttgaacttaaaataaatagcccttgcgttaggccaatgaatagaggaatccatgcacttatggagtctcttgttaactattcaagaataaatattgttgataaagatacacaggactttttttatagaaagatttaa

SEQ ID NO: 1733 - DNA, 1371 bp, Methanobrevibacter ruminantium
  source 1..1371: mol_type = genomic DNA
ttgcaagaggcaaacgaagacatagatttaatcgtaaaccatccaaagcaggcaattaacaagcttgcacttccaatcattttcagcaacttcttcatggttttaaacaatatcatagatggaatatgggttgctggattaggatccaattccttggcagcagttggctttgtaactccattgttctttgccatggtcggttttgcaaacggattgggagcaggtgccaacagcctaatatcaaggtgtatcggtgctgaaaactatcagggggctggaaacagcgccatccattcgatgatgttaagcataattgtcacaatctttgcaacaatcgtccttttggtgtttttaaatcctctccttatgctgatgggtgccggtgaaatcatagaggaaacttcaaattatggttatataatccttgttggagcatattctatctttttacctgcaatgatggctgcaatattccgttctgaaggggaaatcaatagggcttcctatcctttgatgcttaatgcaataatcaatatgatcttagatcctatctttatatatgtccttggatggggagtcaagggtgctgcatttgcaactgttcttgctggaacctttgcaacacttccaatggtctattggatgtttatcaagcaggacagtttcctaaaaatcaagctaagcgaatataagaccaatctaaagatttataaggacattcttgtagtgggaattccagcaagcattgagcagtttataatctcttttgtgtctatccttatgaattattggctaaccctcttggctggaaccctggctgttgcagcatatactgcaacatggagattggtgtcaattggagtctctccaatcattggtattggagttgcagcacttaccgttggcggtgctgcctatggggcaaagaatctaaagaattttaagacagctctaaattacagtgcgattctaggaattatttcatcaataatcatatgttcaattttctttgtatttgcagagcagctatcattcatattctcttattcagcagatagtgcaatacttgctccaagggttgtggatgcattaagaatcctttgtttctttattctccttatgcctttaggggtcatatcaggtaatctcttccaggcaatgggaaaaggaactatttcattagttcttaccattcttagatcattcattctagaggttatatttgcaggcatatttgcatttgtattcgattgggcagatatagggatttatacaggtctggtttgtggtatgatgtgtggttctattgtttcttatctttatataaattattatcttaaaaagcatgaagactattttatagttaaatag

SEQ ID NO: 1734 - DNA, 1875 bp, Methanobrevibacter ruminantium
  source 1..1875: mol_type = genomic DNA
atggatgaaaaaactattgactatgagggaaacataatcacagtaagcgcagaaggacttgatgaggatatcgaaataggagatatcaccattacagatgcagaacctccagagggagacctagtcataactgcaaggatccttgaagttgaaataaaggaagtctatcctgctgaaattgtcatagaaaacggtctttttaaggatgccattccaataatcactgatgatgactcactacttgatttagattatgatggagttctaattccaggattcatagattcccattgccatattgaaagttccaagctatccccatctaattttgcaaaggttgcattgacccatggaaccacttcagttgtagctgaccctcatgagatagcaaatgttcttggaatagatggtgtaaggttcatgattgaagatggaaataaagttccatttgacttttattatggggctccatcctgtgttccagcaactccatttgaaagttcaggagccattattgacagcaaggacgttgcagagcttttaagccatgatgagatagttgcccttggggaaatgatgaatttcccaggtgtattggctgaggatgaagaggttatagctaaaatcaaggcagctcatgactttggaaagccaattgacggccatgccccacttctttcaggagatgacttaaaaaagtatatctcatatggaatatcaacagatcacgaatgcagcaattttgctgaagccgctgaaaagaaaagagcaggcatgaagattatggttcgtgaaggctcatctgcaaaggatatggataatctttttgatgcagatgaaaggtttaactatatcatagaggaagagatgagaggaaacattattgcagatagtactgatgaggcaatggcagttcctccatttgactttttggtatgtgatgatgtcgatgcaagggacctatccaaaggccatttgaataaattggttaaaaaggcaatttccatgggaatcaatcctaaggaagcaattgcaatggccacatttaaccctgcagagcattatggattaaactgtggatcaatagacccgggaaagatagctaattttgtattggtcgatgacttgaaaaaccttaacatttccaaggtctgggttcatggagagcttgtagttgacgatggagaggttctctttgatgtggaagctcctgaaataatcaataattttgatttagatgaagtcaagccttcagactttgacgctacaatggaaatgggttatgtaagctctttaatggatgagacaaccaatgtatttgttattgaagcatatgatggcgagctaataactggaaaactggaagaaagccttcttataaaaaataaggtaattcagccagacattgataaggacattataaaaatcgctgtaatcaacagatatggcggtaacaatatcaccaatggattcataaaaggatttaacattaaaaaaggagcaatagccacaacagtttcacatgactcccataatattgttgcaataggcacaaattcagaggaaatggcagatgctgtaaatctgattaggcagcatcaaggaggccttgcagtggtatgcaaggaagatggcattcaagacatacttgaccttccgattgcaggtcttatgtctgataaggatgcagagtatgtggcatctaagttagtcgagctctttaatctggtccgtggattgggatgcactttgacttccccattcatgacattgtcatttatggcattgcttgttattccagcattcaagataagtgacttaggattgtttgactttgaaaaattcgatttcattgatttaatacacaatatttaa

SEQ ID NO: 1735 - DNA, 1218 bp, Methanobrevibacter ruminantium
  source 1..1218: mol_type = genomic DNA
atgtataaaagagaaatagaactgtccggtcatatcattgattctttaactcttcctaaaaccatggacattatcatggataatggtggagactttgatatactggaatttgatataggaaagcgtaaatctgacactagtaaagctaagattatggtttcagctgaatctcccgatattttaaattctatacttgatgaacttaattttattggagtttctatatctgaaatcgaagaggttaatttagtcccttctccaaaggataaagtagctcctgaaggcttttattcaacaagccatcatgttactcatatttattacaaaggcaaatggattttagtggataaaatcgaaatggattgtctgattgtcattgatgaagagaatgagacagcatcctgcaagccaattgcagaccttaagaaaggagacctaattgtagttggaagagaaggggtaaagattacacctcctcaaaggtcaagaggaaagcaaggggtatttgagtttatgaacagtgatgtatcctctgaaaagccaatgatgagcatcataaacgatgttgcaactgaaataaagaatgtcaaggctaatggcggaaagatagctcttgtaggaggtccagctattgtccatactggatctgcaccaatcgttgcaaagctaattaaggaaggcattattgatgttatctttgctggaaatgcattggctacccacgatattgaatgcgatcagtttggaacttcccttggtgtaaagatagaaaccggagaggtagtagctcacggtcacactcaccatatgagggcaatcaacaggatcaataagtcaggctcaatcaaggcagctgtagaggatggaaccttaaagagtggaataatgtatgaatgcattaaaaatgatgttccatttgttcttgcagggtcaattcgtgatgacggaccacttccagatgttattacagacactgcagagagtcagaagcttatgcgtcattatgctcaagaggttgatatggtcattatgatttcaacaatgctccattcaattgcaactggtaacttgctcccttcaagagttaagagtatttgtgtagatattaatccatctacagtaacaaagcttgcagataggggaagcgctcaagttgtgggaattgtgacagacgtaggggctttcttgcctgttttatataatgcattacatgattaa

SEQ ID NO: 1736 - DNA, 726 bp, Methanobrevibacter ruminantium
  source 1..726: mol_type = genomic DNA
atgtttataggtcttttggctccggctattgtgtctacagttttcattatgctgtcaggctcagacttgcttaagaaggactttaagaataaaatgatcggcttttataaggtaaaatggctgaatgtgatttgggctgtgattgtatttgcgattgtaatagtctgttccattttgctttcacttctttttggacagccaattgaccagttttcctttactgaaagcttttcctttacaggtgttggaattgctggagcatttatcacaattacacttgcttctataattgaggaagtgggatggaaaggatactgtgaggattcaatcggtaactatatgaactggttttgggaatccatgatttttggagtgctatggtctttctggcattttcctttaatctttatttcaggaacctatcaggcaggacttatggtaaatcctctttatgtgattaacttttttgtcagcggaatccctatgggatttgtcattacttgggtctatcttgaaagtgaccgttcaatattggcttgcatgatattccatttcttcgttaatttcatgcaggagaaaatagcgttgactccagagacaaagtgcctggagacaatagtgataacagtggttgcaattcttatagtcatggctaaaaaggatatgttctttgaaacccgtcatgttggaagactgcttgaatacaatagcagccagcagcaataa

SEQ ID NO: 1737 - DNA, 615 bp, Methanobrevibacter ruminantium
  source 1..615: mol_type = genomic DNA
atgaaaaaaggtgaaaaaaggaaacaagagctattaaagatagcttatgatatgtttcttacaaggggatacgagaataccagcgttgacgaaatcatagaaaaggcacagatagccaaaggcacatactactaccatttccaaagcaaagagcagatgctcgaagaagtcatagatatgatgattgatagtgagatcgaaactgcaaagcagattatcggaatggatatttctgtacctcaaaaaatagtggggataattgcatcaatgaaacctaccgaagtagaacagcctataaaggacactcttttccagccggagaatgtgttgatgcaccataaggtccgaaagcaattgattgatgttcttactccacttttatccgaagttatacaagagggagtggatgaagggatctttgaatgcgacaatatccctgaacgtgttaagatgctccttatcatcagcgatggtacctttaatgagggcacatttagcgagcgagatatttcagtatttatagacatgactgaaaagcttcttggagcagagaacggaactatgagcttcatttatgatctaattgacaagagtgagatggagggggcccagtga

SEQ ID NO: 1738 - DNA, 210 bp, Methanobrevibacter ruminantium
  source 1..210: mol_type = genomic DNA
atgggtcttattttattttttttatcatattttttactatttttattttcacaaatccatcactccttttatgatatcattattattgctagtcctatatgccatagtaaatctcaagggatatatttatatatgatgatgtttaaattattattaaaaaacaaaaaccgaccaatagtcgaaaaattatttagaagaatattgggctaa

SEQ ID NO: 1739 - DNA, 975 bp, Methanobrevibacter ruminantium
  source 1..975: mol_type = genomic DNA
atgcttttcaatacttatgaaccgggcaaatttgctttttcacatgaatctgttgattattatgatttaattaactcagaagataatttaaatggttcttctgatttttcaaagtcaaaaaaatggggaataatcggagttccttttgacagcacctgttcttatcaccatgggtcccgttatgctcctacaatcataagagaagcctcttttggccttgaacaatacaacagcgaattcgataagcttttagatggcgaattttatgactgcggtgacttgaatgttgttcatggaaactgcaaaaggacttgtgaaatcctggaagattctgtaaatgacttgattgaagcaaacatcaagcctatcattatagggggagagcatagtgtcactttaggttcagttaatgcattatctgctttagaagataaaaacaatttaaatgacatcactgtcattcatttggatgctcatagagacatcattgatgaatatatcggtgaaaagtattcacatgccaccattatgaaaagaatctatgatttggagcctaaggaactgattcaaataggaataagatcattctctgaggaagaaagggattttgtagaggataaggaaaatataatcagtttttatgcaaaggacattaagaatcagaatattcatctaaacgaagacgtttccacatttgaagacttattgtctaaattggattcaatcgaaggtaaagtctacatttcaattgatatggatgtatttgacccttcagttgctccatctgttggaaatccaactcctaatggtctgtttttagctgatgttcaagctatctttgaagcactaagctttaatgaagagatagatattattggatttgacttggtagagcttgcaagcgacagattgggagatattagtggagtccttgcagctaaagttatttatgactttttgactctctttgcttga

SEQ ID NO: 1740 - DNA, 408 bp, Methanobrevibacter ruminantium
  source 1..408: mol_type = genomic DNA
atgtcaacaaaagttgtagaacttaaaaccgtaaaagtcggaaaatatattgttttagatggtgaagcttctaaagtaactagcttaactacttcatctccgggtaaacacggagctgcaaaagcaagattagaagctgtcggtatttttgatggtcaaaaaagaagtttagtaaaacctgtagacactaaagttgaagtacctattcttgataagagagtcggtcaaattttagctgttatgggcgatcaagttcaaatcatggacttagaaagctatgaaacctttgaattacctatacctgctgaattcgaagatgaaatcagaggcgctgtaggtactgacttaggtgtagaatatatcattgctttaggcaatatgaaaatcatgagaactaaaaaagtataa

SEQ ID NO: 1741 - DNA, 462 bp, Methanobrevibacter ruminantium
  source 1..462: mol_type = genomic DNA
atgagaattgctattgtttccggaaatgcagaaggccctacagaattaaatgcttttgataatgctttatatgaagcaaaaataggtgatgtaaacctaattaaagtatcaagcatgttagaagctaatacaaaaatagaaaaattgcctaaattaaaagcagggtctatggtgaattgtgtcttatcaagcatagtttcatctaatcctggcgaaaacttaactgcatgtgtggcagtagcaatcggagatgaattagggtgcgctgttgaagttgatggaattgacaaagatccagaagacttaaaggatgaggcaaccaagatggtcaaatatatgatggataaaagaaatgtaaaaatcaatgagctgattgttgaagaggctcatcacacagttaaaaacattggatctgcaattgcagcagtcatttacattacagacgacatcttagaagaataa

SEQ ID NO: 1742 - DNA, 1866 bp, Methanobrevibacter ruminantium
  source 1..1866: mol_type = genomic DNA
atgaatcaagacgatatacaaatttgtaaagagatagcaactacagttttcaaaaatgtagagaatctccttgatggccaagtaggaaacccaaaagcaggagaatttgttaagataggcgcagacggaacccctacttcacatatcgacatcatagcagaagatgaagtaatcaaacttctaaaagacgctgattttgaatcttaccttatcagcgaagaaatcggagaactacgacttgggaaagggaaacaacaatctgtaagcctctctgaagaattgcttaacaacactccggaaaataaaaaagaagaagaagaaatacctcgctatattttcttaatcgatccccttgacggaacaagcaatgctgttaaaaacatcccagcatacggaatgtccattgcagttgcaaatgttccaatcggaagggaagcaacccttgaggacgtccaacttggattcgtaaaaaactactcaaacggtaacttctatgaagcagtcaaaggaaatggagcaaaggaaaacggtcaaccattgactccaagcaaagaaaccgatataaccaaaatcaccttaggaggattcacaaaaagcaaaaccctctctgtttccaaactagtggacactgcaagaaggatgagagtactcggttctgtagtattggaattggcatatattgcaaacggaaaatatgatgcattccttgacttaaggggaagtagaatcatcgatattgcagcatccaaacttattgtagaggaagcaggagcaatcgtcacaaataaatacggagaaaagctaaacaacagactaagcatctatgaaaaggcagttgtagtaagcgctggaaatgaagatctccacaaacaaatcattaaaatcataaacaacgatgaattggataaggtaacaagcgttgctatagtcagcagagtggatgagtataaatcagtcttattctcacttaaaatctttgaaacattgattgaaaagaatattgaaaccgtccttgagacctcccttgctgaaaagcttgaggaaataaaggaagacccagagcttcacaagatcattgcaaaaacaatgaacgagacccctgaaatcgcaatgcatattgaaagcctgaatttcaactatgagtttatggattatgccaagcaattgaatgaacttagaacagacattgcaatcattctaggaggagacggaacactccttagaacccaaaaccaattgacaaaggaaatccctatctttggaatcaatatgggcactgtaggtttccttaccgaaattgaagtggaaaacaccttcaaggcccttgatgcaatcctagatggagaatggtctaaggagaaaaggacacagcttatcatatcccacgaaaacgagtctttccgtgcattaaacgaagtcgttataatgactgcaagacctgcaaagatgctccattatgaagtttcagtggacggggaagttgtagaggagctaagagcagacggacttatcatttcaaccccaagtggttcaactgcatattcaatgtctgccggaggcccaattgttgaccctaaagtgggagcattcatcattattccaatctgcccatacaagcttggagtaagaccatttgtagtgtccgatacaagtgagattagaatcaagcttttaagacagggcaaaaaggcaatctttgtaatggatggacagattcaaaaagaagtaaactatttagaggagcttgtaatcaaaaagtctgaaaaagacgtttactttatgagaatcaataagaagtacttctataagaaggttaaggataaattaaatgaaggcggacttgaatccattaatagagttctataa

SEQ ID NO: 1743 - DNA, 1635 bp, Methanobrevibacter ruminantium
  source 1..1635: mol_type = genomic DNA
atgaatgtatttttagttgatttaacccatggaggagtaaaaatatcctctgaactttcaaaatccaaaagatttgaaaaggtatttgcatacgacttatacagcacattaaaagaggaagacgagcatcttttaaaaacctatgatgtgaccatattaaaggatttcgactcatttaaagaggaattaaaagaaaacagcaaagaacttttaaaatcagaaaaggaaaaagaaaataattctaaagacttaataatcaacccaattcactcttcattaaacattaaagacttattaaatcaaatcactgaagaaattaatccaaacaatgatttaacccatctctacgaaataattaaccaccaccaagctacaaaacttgttctagaaaactggaaagaagaaactaaaaaacatgacataaaaactatcgaaataacaggagtaaaaggaaagacaagtacagctttccttctaaaagagatatttttagaaaataatcaaaacacacttctactatccagtttaggagcatatctatttagaaaaaaccaagataaagaaatggaacttattttacaaaagaatatcagcataacccctgcaaacataataaacacaatacagcttgcaaaaaagatagcaaacccaaaatgcagttatttcccaaaatgcgctgcaaacaaaaacaagcaagaggaaaatgaactgtttgaagaatataacaataacccataccacaatctaaactatgatattgctatttttgaaaactcattaggagtatgtggccttggagatattggaatacttacaaatcttgttgagaattatccaatagctaaaggatcatccaatgcaatggaagctaaaagacaggtattcgattgctcattagtaatcatagaatatgaaactctaaatgaattctacaaaggggaatcagaggaatataaggataaaatcaatagcttttcattaaataacaataaggcaaatgtattttgtaaaaatatagattttgatatagacaatactcaaataaaaatcacatatcaagatttcaaaacaagaaataagaatacaataaatggagaattcactcttaattgcttcgcaccaggaccgcatcatgttttaaatatcctaacagctgtttcaactgcattggcattggaaatagatgaaaaaaccattatagctggaatatctaaattcaacggcatcgatggaagaacacaggttaaaacagttgaaaattcaataataatagaggaaataaacccgggaattaatacaaaagccatagaaagctcaataaatatgataaaagatatagataattattatatcattatcggaggaaaatatggagttacctgcgaagaaatagatgaggaaaaactatccaattatttgaacaattaccttacagataacccaaatacaaagctaatactaactgatgaagttggtaaaagtctaaaagagaaattagatttattgaatgataaagatgaatacgaaataatgtttattgagaattatgaagaagctagagatcttgccataaatgaaaataaaaatatattatttatttatagatccaattattcacaagtttctaaacgttga

SEQ ID NO: 1744 - DNA, 870 bp, Methanobrevibacter ruminantium
  source 1..870: mol_type = genomic DNA
atgattgttggaactagaggaagtaaattagcacttgtacaaacagattacataagacaatgtttatacaatatcaccggagaagaagtggaaaagaatattataaagacaaaaggggataagattacaaactcccaattatataatatggattccaaaggactttttacaagagaactggacaatgctcttctagatgaagaagtagactttgcagttcacagtctaaaggatgttcctaccgaattgaatgaagatttggagattgtagcagtccctataagagaaagccctaacgaagtgcttatttctaactacagctggagcgagcttgaagaaggctccacccttggtacaagcagccttagaagagaagcattctgcaaacaccataataaggactttgaacttaagccgatcagaggaaatgttgaaaccagaatagaaaaggtcatggatgggcaagtggatgcaacaatcatggcagaagccggtttaaatagattaggacttcaaaaatacataaaggccaagtttccaaccgattatatcatgcctgcagcaggtcaaggcgccttagcggtaatgacccgaaaagactcagagcacaaggaaacaatcagaaagctaaatcactatttttcccatcaggaagtcttagctgaaaagaccatcctagaagagattggagtaggatgtcaatggcctattggagcaatatctggaattaaaaacaaccaattggaactaaaatccatccttcttgataagaatggagagatcctttaccaaaaaacccttagcggaagcattagagaggctaaggagatgggtgttcaaataggtaaggaaatgattgagtttatctaa

SEQ ID NO: 1745 - DNA, 948 bp, Methanobrevibacter ruminantium
  source 1..948: mol_type = genomic DNA
ttgagaactataaatgttggagttataggtgtaggagcaatgggatataaccatgctcgagtatattcaaaattggaaaatgccaatctggtagcggtggctgatgtagtaaagccgacccttgataaggtatgcaaaaagtacaatacaaaaggatactctgaaattgaagacttattgaaaaaccctgaaattgaagctgtaagcgtatgtgtgcctacaactttccaccacgaagttgttatgcaagcaataaaatacggaaagcacgttttagttgaaaagccaattgcttttacagctgaagaagctcaggaaatgattgatgcagcaaaggaagctggagtaaagcttgcaacaggacacgtagaaagattcaatcctgctgtgcagaaagctaaggaactgattaaaaatgaagtaattggtgacttggtagcaatctcagctaaaagggtaggtcctttcccaccaagaataaaggatgtaggagttgcaattgaccttgcaattcacgacttggatgttatgaacttcctaattgaagagcctgtaaaacaggtctatgctacaatgagcagcagattggatcaatctgactttgaagaccatgcagaaatcatggtaagctttgaagaggacattacaggaatccttgaagtaaactggttaactccatataaacgaagacaaatcgagattaccggaactgatggaataatcacagtagattatatcgaccaaagcattgaagtctatggtaaatttgctcaagacattcaaataaagccggtagaacctttaagcgaagagctaaattcattcctaactaagattggaaatgatgaaactccagagattactggtgaagatggtcttaaagcacttaagatggtgcttgcagctaataaatcatctaaagaacacagcccaatcaattttagataa

SEQ ID NO: 1746 - DNA, 615 bp, Methanobrevibacter ruminantium
  source 1..615: mol_type = genomic DNA
atgaatcaagaactcattaacagagctcaagaacttagaaaccacggatttaccactggtgaaatagctgatgagcttaatgtatcaatggatactgcaagatggttgactttacagaaaacagaagagcctgtggaaacagaagctcctgtagacattgcaattaactggaacagcttaggaggaagcgcaaccagactcagatatgtttcagctgccttaagtgacattgcattaaagcatggtgacattgaccttgttgtaggaatcgcaaccagcggaattccatttgcaacaatcatggcagatgtaattgaagaattaaccggaacaactacctgcgtatctattttccaccctaaaaaacacagaaccaatccaaccaacagcgacgaaggagcaataagcagcaatttcggaactgtggaaggaaaaagaatagttgttgtggatgatgtaaccaccagcggtgacacaataaaagatgtaatcaaagtggttaaggatcatggcggaaatcctatcgtagttactgttttgattgacaaatccggacttgaagaagtggacggagtcccaatcgaatcattaatcaaagtaagtcaattaaggtaa

SEQ ID NO: 1747 - DNA, 807 bp, Methanobrevibacter ruminantium
  source 1..807: mol_type = genomic DNA
atggaatttaatattgtaaaagagttaaatggtcaatttgaccctattgtactaattaaaactgatgaaaagccagaagatgctttggcccctaagcctggaagaggaggctgtgttatgtcttttgttgcacagtccattgcaaagcgaaaggtcactgccttcggccgtgaaaacatcacctgcggaggggtatcagcaggatttggatggggaactggatttaagacagataaggacaaggaatttcaagctacttttctatctcttggccttgattctgcaaaggataaggatgcttttcttgaaagattgagctatttgccaaagcctactcaagagatgtttaaaaaaggagagaggatattttcagactttgacactgcatatgaaaacatacagaataggcctttgtatgatgagggagaatatgttgtttttaagccaattgagcttcttgaagagggggaaactccagattcagttatctttacagcaaatactatggaactgtctgctatcctacagttgaatggttcatttagggctgaaagtgctcacataatgacccctcaagcttctgcatgtcaggctattggcgcatttacttttgaacaagaagactctgataatcctatccctgtattaagccctctagactttgcagcaagggctcatatgagaaggttgattccagatgattatatgaatctgtcaatgccttggaaattgtttttaaagttggaagaactaagtaaaaatagcgtttttcaaacccatttctgggatgattttgggaataaataa

SEQ ID NO: 1748 - DNA, 1422 bp, Methanobrevibacter ruminantium
  source 1..1422: mol_type = genomic DNA
atgattgaaaataacatttgtttattaacagacagctataagctcacccaccactatctacacccaaagggtacagagaaaatctactcctatcttgagagcagaacaggtgctgagtttaacaagactattttttacggactgcaatacatccttaaaaaatacctagaaggcaatgtagttagcgaagagaaagtattggaagcagaaagaatcgtagacgctcacattgctccaggcattttcaatacagatgattggatgtatatagctcaggaattagatggaaagctcccagttaaaatcaaggcagttgctgaaggttccccagtaaacgtaggcaatgtattgatgacagttgaaaatacagacaagcgtgcttattggctgccaaactatcttgaatcactgcttcttcaggtatggtatccatcaaccattgcaacactctctgctgaggttaaaaagctatgcaatttctatctggatgttacaggctcctcaaaggacaatcttaactttatgttgcatgactttggctaccgtggtgcaagctcaacagaatcatcaagattagcaggatctgcacacctattaagcttttcaggcacagacaccgttccatcccttgcaatcccagttaactattacaatacaaatgagatccaaggattttcagttcaggcaacagaacatagcgtaatgacagcaatgggtccagagggcgaaatggaacaggccatcaatgttgtaagaaacgcccatgatggcattctatcaattgtaatagacagctacaactataagaacttccttgaaaacgcctgtatcaaaggacacaagctaaacgaagaaatcaacgaattcctaaagagaactgaaggaaacaagattgtattcagaccagacagtggagagccaatctcaacaacaatagactgtcttgagataattgaaagaggattcggtacccacaatacagacaaaggatacaagatcttcaatgaaaacataggccttctctggggtgacggtttagactatcaaaagataagagacatcctatttggaataaaagctcaaggatgggcagctgaaaacctcatattcggtatgggtggcggattgcacacagcagtaaacagagacactcaaagaaatgcattcaagtgttctgcccagcttagagatggtgaatggatagacatattcaaaaagccattggacacaagcaaaaagtccaaaaaaggaagattcaagttaataagaaacgataagtttgaatacagcactgttccaatagaaactgaaggcaaagatcaattaagaaccgtattcaaagatggtgaactattgattgatgatagctttgaagaaattaaaaagagaacagaaacttataatatgtttcctattaaataa

SEQ ID NO: 1749 - DNA, 1374 bp, Methanobrevibacter ruminantium
  source 1..1374: mol_type = genomic DNA
atggaagagtccaaaactagatttgaaggagttgaatcaatcttaggagaccctaagaaagccatatggaaattatcaattccattaataatttcactatttatcacaagcctctatagtgtcatagatgccgtttgggtgtcctctcttggtgccgatgcattggctggtgttggctttgtaagtccaatattcattgccctaatgggaattgggaatggtttgggagcaggagcaacctctgcaatatccaaatacattggagagggggataagaaaaagtcagacaatggtgcagttcatgcaatagtaataaccgttattgtatcaatatttactactcttcttttccttatattcctaagggatattcttctttcaatgggggcatcaaatactatagattatgcaatggattatggagtcattctagtttcaggctctatattggttattctatccaattcattatacggggtccttagaggtgagggagatggaaatagaactatgtatgcaatgctatttgcctctatcttaaatatgattctagatcctatatttatttattatttgggcttaggagttaagggagcagctattgcaactctcatttcccttttgtttgtaaaccttctcttgttttattggttttacattaaaaaggacacttatttaaggccttttttaagcaattataggtttgataaggatataacagtagacatcttaaaggtaggttttccagcaagcttggagcttgttaacaatgccctctttgcagcacttttttcccttcttttaactgttgtcgcatcaacagatgctgttgcagtttattctacaggatggagggttgttacaattgcaacaactcctatgcttgctgtaggaactgctttgatttcagtggtagctgccaattatggggctagaagatatgaggacattttacttgcccataggtattcaatgaagattgcggttctatttggctttattgcagcgatagttgtctatgtatttgctcctcagattgtttcaatatttgcctatactggcactagcatgagattaagctcacagcttattgcatttttatctgtgattgttatctattttcctacaatgggatatggtgtcacatcaacatttctcttccagggaactggcaatggaattactgcaatgtttcagactatattgagggaaactgtatttacacttggttttgctataattctagctgtggttttaggctatggggagtatggagcctggtggggaattattcttggagagttggttgtaaatactataactatgttttgggctgattggcatgtaaaacgcttgattaggtctaataattaa

SEQ ID NO: 1750 - DNA, 420 bp, Methanobrevibacter ruminantium
  source 1..420: mol_type = genomic DNA
atggaagaaaacaattacatcgtcttcaaaaaacaatacggcaacattaaacgccctaggaccaaggaagtctcaataaatcaaaacggagtcaaaatttacgaaaaggaccaatcaatgattataaacatagttcttccaatagaagactcaatgaaagtataccaattctttgaagaattcaacttaggtgaagacatacaatttaatatcagcaatactggagactttgaatgcgtattccgaggaatttcttcagtcattgataaagacagttactcttcattctcaattacagtccaagagaaatatcaaaggccagatcagctccaagtggaagcagactgcaatcaagttgatgaatatggcaatccaattcagcaatgcataggctgtgggcttcacagagacgaaatatga

SEQ ID NO: 1751 - DNA, 939 bp, Methanobrevibacter ruminantium
  source 1..939: mol_type = genomic DNA
atgattgacgaaatttatgactactacgaaaaacgtctaagcacttccaattctatcctcaagatgagaggaattgacgaagaaataaataaacttcccttagggattaatttagatattgcaaacatcttaagcacaatcgacatatatgactacgatgaaaagaaagcagccaaaaagatcaaggaagcttatgttgaagtcttcaaggaaggaatatatttgggaattggctttggcaagatcttaaagttcaactatgcaaagtcacatcctgaaaactatgtggaatgtctcgaagaggattatcaacattttaccttctatgactttaagatagaggttctaaagaagatcattcctccgataaaggttaagaaatttacccaagagaggcatcctaaagagataaactacagaaacgaaagctttgaagacatccgctcatacacctgcataaatgtcgagacccaatgggaagacaaatttgactttgaagtgaatcctgatgcaaaggaaatggaagattatatccgccaaagggaggtgaaatcatatgaggataatgaggaattaaagaaatgtgttgatgacttgaagatgggaattcaaaatatcctattccagaagttctttgaagcattggaggtggatttggaaaaggcagagaatggctgtgaaaacaatctgcgctttgatgaggagactgcaaaggacgtcttcatttcccctgtattctccaatctggaaggagagtttaaaatcagagagcttgtcaataaatatcttattcatgtattcaatgaaggaaagatcatcggccttttaaatggcataaagatagttctagaggacattcaaaatgacaggctagactatgaagagatgaattcaatgagctctagagaaagctttctatacattaaggagggtttatag

SEQ ID NO: 1752 - DNA, 846 bp, Methanobrevibacter ruminantium
  source 1..846: mol_type = genomic DNA
atgataaatgaaattgtaaacggctataaaaaccagcaaaaggtctatttaagttccataataaaaacactgaacttagatattccagacgttttaagtgtctatccaaaatcaaaccacgatttagataagatatttaaagaaatcaagctaatagacaaggacgaaaacatcctggaacctctagaggaattctacatagacaccttaaaaagaggaatattaagttccatacctcttggaaagagcttcatggtaaagctccatagggatgatgaggaacattttaacgaagttttaaggatgaacagcggattgttcttaaattacgttcctaaaatcagttcccttgaagatttggaaaaatgcactccaaaatatggggaaagagattactataaaatgaaggaagaagaacaagtcattgtcatagttgaaggaatactacgatccttttgtgaattcacaactgataacaacctaatggttgactaccattttgaggaattgtttgatgttttggatattgatctaaagttggctaaaaaaagatgcaataagagaatcaaattaggtaataaatccaaaataggaatcatctctgcaatctacaagaacaagaacggcaaattcagagtgactgacttggtcaaggagcactgccaaacaatctttgaagagggtatgagacttggaataagaaatgggataaaaatagtcatggatgatgttcattcaaaaagaattgatcctgatgactttagcaccatggaattaaatgaactttcagcctatttctataaggaaataaatgaagaattagaacagctcgctaggaactgttaa

SEQ ID NO: 1753 - DNA, 1224 bp, Methanobrevibacter ruminantium
  source 1..1224: mol_type = genomic DNA
atgcaaaaagacaattctaatcagaataatgatttaaagcaggggattagtgattctaatcaagagaaggatttaaaccataagaccaataattctaatcaaaataaggattttaataatagaattagcaattataatcaagaaatgggttttaaaaataaatccaataattctaaacaagaaaatgattcgaaaaacgatttagattccaataaaaacataaatccttttaagcaaaaggatgatgattttgataaggccttagataaaaactacctagaagagtataatactcagtactactacagcattagccagtgcacttcattggataatagctcacaaggtcgtttagtttcaaacatccttcttaatttgatagagtctcttgaaaactatcttttaaagatagctagaattgattatattaacagttattttgattgggattttcatttattaaacagctcatttgaaaatgcattctgcatgcctggtggcaaggtattggtttactctggcatattgtcaattgccgataatgaggaaaggattgcatatatattggctcatgagatggctcatgcattgcttaatcatccaagggattatattattgttaaggataaagaatataataatgttcttttatttaagccatttagtcttaatcaggagtttgaggctgatagattagctatgatgatacttaaatgggcagattatgatattggcaatattccttcattctgccagttccttaggggaaactataataagtttaactatttttccacacatcccttaagtgatgataggcttatgaatatggaaagtctgattgctgagataaataatctaaaggacgattgctttgcacctattataaagaatgataggtctaatgcccttatttatacaaagagatatgctggttctcagtataatgataaagataatgagattgaggataggccaaaggtattttgcactaattgcggatactatgaggattccgatgcagtcttctgttctaattgcggttctagaatggatgataagtctagatgtgatagatgtggggctctaatcgatccaggggatgtcttttgtacaaattgtggcaatgtattggtagatgattataaatgttttaactgtggtcataaaataaaacctggtgatgtattctgtgtaaactgtggaataaagcttattaggtag

SEQ ID NO: 1754 - DNA, 399 bp, Methanobrevibacter ruminantium
  source 1..399: mol_type = genomic DNA
atggcaacttttagttcaatagaagaggcaagagagttttttaagggagataagtttgcaactaacattggagttcaattggatgagcttgaagatgactcctgtgtatgcagcttagagctatgtgatgattttagaaatgcctatggtgctgtaatgggtggagcaatattcactcttggagattttgcatttgcagttttatctaatcaattgcacagacctactgtaggattgcaggtaagcattaattatttaagtggagcaaaaggagaaaagctcattgctaaggcacattataaaaagaatggaagaactacttctgtaatcaatgtggatataattgatgatactggaagagagatagcacagtttgttggaactggatataagatgtga

SEQ ID NO: 1755 - DNA, 1008 bp, Methanobrevibacter ruminantium
  source 1..1008: mol_type = genomic DNA
atgaaggacatatttgatgaatgccagtttggcgagtttaaattaaaaagcagaattatcagaactggcggatgggaaagagacacagaagacggaggctttttaaagccaaaagtctttgacagatatgaaaagatggctggaaatgaggtcggcttaatagtctctgaaatgtttgcacttgaccctaaggaccgtttttatccatactgtgcaaacatgaactataagggattcattaaggattataaacaggttacaaacctatcacatcactttgaggttcctattttaggccagcttgctttcttcttttttgatgatggaacaaaccagaaggcagagccaaatgacataagccttgaaggaataagaaagcttcaggcagaggtggttatggctgccaagaagttttcatttgcaggctttgatggaattcaaataaacatggctcataacttttatcttgcaagattcatcaatccttattttaaccagagaaccgatgattatggtggaagcactgaaaaaagaatgagaatagttgtagagattataaagcttataaaaaagatggtaggatgtcatgtaagctttagaatcaatgctgttgatggaagaaaaggtggaatgactcttgatgaaagctttaagatagcaaagattcttgctgaagccggtgcagatagcgttcagattacagctagaacaatctcctttaagtttggagagactggagaccacgcattcctttcctatgccgatagaatggcaaaggaattggatattccagtaatattagggggcaccttgcgagatatgaaaacaatgaatgagatcttgaatgagacagatattgaattcttatcacttgcaaagccttttgtagctcaacaagacttcttgagcgaatggaaggaaaatggtgatggagtttccagatgcagggcttgcaataattgttatggtaaaaaggagagtaattgtttccagtttggtgatgaatga

SEQ ID NO: 1756 - DNA, 576 bp, Methanobrevibacter ruminantium
  source 1..576: mol_type = genomic DNA
atgttagaactagataaacttttggatatctttaatgctggagatacattggttatggatgaggaagctacagatgcttgcaattactatagtgccgaagcacagaagattacttgcgaattaaattatcaatataatgactttgataaaagaagagaattgttctccaaactcatcaatcaggagctggatgatgaattcagggtttttacacccttctttacagattttggtaaaaacatacatctgggaaagaatgtcttcatcaatgcaggatgcaagttccaggatcagggaggaatatatattggagatgatgtgcttataggccataatgtggttatggctaccttaaatcatgatgaaaatcctaataatcgtgctaatttgattgcagctccaataaggattggaaataaggtttggataggttcaaatgcaaccattcttccaggagttagcattggtgatggagcaatcattgcagcagctgcagtggttacaaaggatgtagaggaaaactccatagttgctggagttccagctaagtttattaggaaggttaaaacggattaa

SEQ ID NO: 1757 - DNA, 1404 bp, Methanobrevibacter ruminantium
  source 1..1404: mol_type = genomic DNA
gtggctggtttaaatctgattgatagtgtaatgtattaccctattctaattatcgttatggcaattgcaggactctactttacttttaaaacaagaggagtccagataagattatttttagagtccataagaatccttacggagcctccggatgaggaaggcagcatatcttcccttcaggcaatgcttgtctccacagcttcaagggtaggaacaggcaatatcataggggtctccactgcattatgtctgggaggtcccggcgcatgcttctggatgtgggtgatgtgtatcatcggagcatcatctgcattcatggaaagtacacttgctcagatttataaaagaaaggacaaggagggggtcttctatggaggtcctgcatattatatagagcatggtcttcataagcataaattggctctgctcttttgcgtatttctccttgctacatatgccgtaggattcaatatgctttgctcctttaaccttcagtcaacattcatggaatatccgttctatcatccaagcataactccgattatcataggtgccgtgcttgccattatcacctgctactgcttacttggagggggaaaaaggattgtcagtgtcacaagcacacttgttccggttatgggagtttcctatgtcatcatatgtttgattgtgattcttttcaacattcaaaacgtgccagttatgtttcttttaatctttagggatgcatttgatttccagtccatccttggaggggttgcaggatcatgtatggtttatgggataaaaagaggattgtactcaaatgaggcaggtgtaggttcagcccctaacgcttcagcttctgcagatgtatcccaccctgcaaaacagggattggctcagacactatctgtatatattgacacccttcttctttgtacagcctctgcattgatgtgcctgtccactggagtggtaagggatgcggcggtttccggtgctccatatgtccaaaacgccatttcatctgtctttggatggataggccctatattcattacagttgctatgattctttttgcatttacaagcctgattggaaacctttattatacaaataatgtcttaatgttcatgaacaatgagaagatgccttcaaagagattcgtgcacatatttcatattgcatgctcattgattattttcattggagcaatcattccaatggatgccgcatgggctatggccgacattacaatgggtggaatgactttgataaaccttcctgtttgtttgcttttaagcaaggcagctatagattgtcttaaggattatgaaaggcagaagaagatgggacttaagccagtatttaaggcaagttcgatcggactaaatgaagaagagctagattggtggaagtaa

SEQ ID NO: 1758 - DNA, 336 bp, Methanobrevibacter ruminantium
  source 1..336: mol_type = genomic DNA
atggcgattccaaaagcacctgtaaaaaggattatgaaagaagagggcgctgaaagagtaagtgctgaggcagtagatgcattagtagattacttagaaactgatgcagatgccattgctagaaaagcaattgactatgcaaaacttgcaaaaagacaaacagtaaaagcagaagatattgcattagctattggccgcccagaaacttctgaatccactgctgagaatccacacaaccttttagaagtggttcaaaaagtattagatgctgcagcagacggaaaaggctttgaagaaatcattaaatcatttatgaaactagaaaaaaaagaataa

SEQ ID NO: 1759 - DNA, 1335 bp, Methanobrevibacter ruminantium
  source 1..1335: mol_type = genomic DNA
atgtcctatgtagatgaagtaattgacttaattgttaaagaaaaccctgatgaacctgagtttcatcaagctgtaaaagaagtattagaatctttaagagtcgtaatcgaagaaaacgaagaacaatacagaaaagacgcacttttagaaagattagttaacccagaaagacaaatcaaattcagagtcccttgggtagacgacaacggacaagtgcaagtaaacaccggttaccgtgtacagttcaacagtgcaatcggaccttacaaaggcggtcttcgtttccacccttccgtaaatgtaggtatcattaagttcttaggattcgaacaaatcttcaaaaactccttaaccggccttccaattggcggaggtaaaggaggatccaactttgatcctaaaggaaaatctgacagagaagtaatggcattctgtcaaagtttcatgactgaactctgcaaatacattggtgctgacactgacgttcctgctggagatataggtgtaggtggtagggaaatcggttacttattcggtcaatacaaaagaatccaaggattatacgaaggagttctcactggtaaaggattaactttcggcggatctttagcaagaactgaagcaactggatatggtttattatacttcgctaacgcaatgcttaaggcaaacggcgaaaccttagaaggtaaaaccgtaattatgtctggtgcaggaaatgtagctatctatgctatcgaaaaggcttaccaacttggagctaaacctgtaacctgttccgattccaccggttggatttacgaccctgaaggaatcgatgtagaattattaaaagaaatcaaagaagtaagacgtgaaagattaactgcatatgctgaagcaagaccatctgctgaataccacgaaggtaaaggcgtatggaccgtaaaagctgacgttgcattcccatgtgctacccaaaacgaattagacattgatgacgctaaaaccttagttgaaaacggtgtcattgctgtagctgaaggtgcaaacatgccaaccaccttggaagcaaccgaatacttaattgaaaacggtgttttattctcaccaggtaaagcttccaacgcaggtggagtagctacttccgctcttgaaatgagtcaaaactctcaaagattatcttggacctttgaagaagttgattccagactccaaacaatcatggaagatatctttgcaaatgtagatgcagctgctaaagaatacggatttgagaaaaactatgtagttggagcaaacattgctggattcttaaaagtagttgacgcaatgaacgctcaaggaatcgtatag

SEQ ID NO: 1760 - DNA, 549 bp, Methanobrevibacter ruminantium
  source 1..549: mol_type = genomic DNA
atgaaaatactaatctcaaatttaaagggaaaggaacttgtggaaatagctatgaaaaaccagatagacaagctaatttcagtctactcaaactataacgaaacaagcctccttgatcagtacatgactaaagaaaacataaagataagtacaacaaatgcaattgatgcctgcaagcagcttacagacataattcgccatcaagacacagatgatgagatctatgttgcaagcgatggaaactttttaggatcaatgctgaactttgttgcaaataaggaagctgcagactatatattctattccttcaacaatcagattatccaaatgcctagattaagcataaatctatctgaaacaaaaatgaaaattctaaagagtctgaatgaaacagagcagactgcaattcttattggaaagaatataggaatctctagagccatggtctataagcatataaacagccttatggaagatggcctggtggggcagactaagcagtatgaaaagtactatctaacaaatgcaggaaagatgctgattatctaa

SEQ ID NO: 1761 - DNA, 240 bp, Methanobrevibacter ruminantium
  source 1..240: mol_type = genomic DNA
atggctgaagataaacaagaacctttaagtccgattgaagagattaaaaaagaatatcttgaaaagatagactactttggaaatagaagaagcaaatatgctctttataaaaagttcagcaaaaaatacaacttaaaccgcagagtctttattcatatcctgaacgaggctcatgaagatgttggaagcccaaaaagatatgaattgagaagacaaacccctaaagactataaaagataa

SEQ ID NO: 1762 - DNA, 840 bp, Methanobrevibacter ruminantium
  source 1..840: mol_type = genomic DNA
atgcttattgtttattgtttaaacttttatatggtgttttttatgttttatttagtgggattaggtttatttgatgaaaaagacatttccttaaagggaattgaaactttaaaaaaagttgataaggtttatgctgaatttttcacttcacgcttgtttggatctaacttcgaatccattgaagagactattggaaaagagattattgttcttgataggactcaagttgaagaggaatctgtttttttaaaggaagctaaggaaattgatgttgctctcattacagggggagaccctttgattgcaaccacccactcagactttttagttgaatgcgcaagggatggaaccgactttgaagtgattcacggttcaagcatactatcttccgcacctgcaatttcagggcttcaggcctataagtttggaaaggtgacaaccattccattcccagaccttgagtacaactatttccctaagtccccttatatggctattgaagagaacttgaaaaatgatatgcatactttggttcttttagatattcaagctcataaggataagtatatgacaatcaatgaaggattagaaaacctaatgacaatcaaggacaatcttgaaagggaagggatgattgatgagaacagcttggcaattggaattgctagggtaggatccaaggacaatgtagtaaaggcaggatacattaaggatcttttggattatgatttcggaggccctcttcattgcattgtgattccatctaaattgcatattgtggaagctgaatatttggttcatgttgcagatggtcctaaagagattttagatgatttatag

SEQ ID NO: 1763 - DNA, 1404 bp, Methanobrevibacter ruminantium
  source 1..1404: mol_type = genomic DNA
atgaatgtttttagaagttttatagatattctaagcgataggacagttaatgaaagaggatatttcttctcaaataaggcactctttgccttatttcttcctctgcttgttgaacaagccttagaattttgcgtaggtcttgccgactcaatgatggttgcctcccttggggaggtagcgatttcaggggtgtccttagttgactttttagttcagctgcttatatttagcttttcggctcttgctacagggggagctgttattgctggccagtaccttggaaacgatgagccagagaaggcatgtgacgcttcaaaccagctggtttggtttacaaccattcttgcagtaataatggctgttcttgtcttgatcttcaggccatttttaatcaatctcttctttggtcagatagagccggatgtctttaacacttcaagcatttatctaagctatatggctatttcaattccattcattgccatctacaactctggagcagcaatatttcgtacaatgaacaaggcaaaccttcctatgcagataatgtttgtctgtgacattttaaatgtcattggaaatgccatactcctatttgtctttggatttggggttgaaggggttgccattccaactgttcttgcaagagcattggctgcagtcataatgatctactttgtccttcaggaaaggtatgaaatacatatcagaaagacacttaggcataagtttgactgggtcttgcttcgaaaggtcttgaatgtgggaattccttatggggttgaaaacggcgtgttccagcttggaaggattcttatcttaagccttgtatctacattcggaacaatagccattgctgcaaactctgtaggatatgcaattgggatattttcagttcttccaggatttgcaataaaccttgggctgactgccgtcatttcacgctgtgttggtcataatgactatgagcaggccaagttctataataagaagatacttataataacctttttatctcatttggcaatcaatctgcttatatttgctcttcttccatatatactgcagatatataatctatctcctgctgcaagtgccttgacctatcagatggtagtttggcatggaatctttgcagttctaatttggccgatagcatttactcttcctaccacattcagaggtgctggagatgcgaaatggccgatggcggtaagtttgtctgtaatgtttatctgcaggatagccttgtcatatgtgattgcagactttatgggagttggtgtatttggaacatggattgcaatgtttatagattggtatgttagggctgcattctatgtttacagatactttagcggcaagtggatggagtatagagctgttgggactaatttaagttga

SEQ ID NO: 1764 - DNA, 1461 bp, Methanobrevibacter ruminantium
  source 1..1461: mol_type = genomic DNA
atgattttgaatcattacattttaagtggaataaatgaaaagattggtgaaatggaggaggaatttcagttgatgctacttgcttcggaaattgtcgattgttgttttaatttctttgaaattgaacgaaaaacttcaaaagtcggcaggcctcattttgagattaagaatatgataaaactgatattttatggctacattaataaaataacgagttctgtagtcttggctcataatgccaagtataattttctctacagttttatttcgcatggctgcgaaccaagcgaccggacaataagggattatcgcaagaatttcatgagcatattccaattaataatgagctttacactaattgcaacatataaattgggtttgagtgattttaagtacattgcaattgacggtacgataaaacaagcttataactctccctttaacataattaaggaaaaagacatccggttattaattaagcattatatggttgaggaattaacaaaaaatgagattaaaaagcttagaaaaacagcgaagaaatttttgaaggataaaacgaaaacagacgaagaaaaagtggatattctttttgaatggtggcgtttgctggatttttctggacaaagttctctgggtttgaatgatcatgatgcgagatggatgaaaattaaggataaaggacagatttatccaaaattttcatataatcttcaattagggacagatactgagtctaagttgatttgcggagttaacgtagtccaaaacccaacagaccattatcaaatacccgctttaatgaatcaaatcataagcaatttaaatcttaaaccaacaaaaattagcgcagatactatttatttaacgcttgcaaacttaaattacttggataacttaggaataactgccttaattccaacatctcagcaaaatcgagagaattctggcgaaaagccaaacaatcgttttgctataggttattttgtttttgatgaatataaaaatgttttcatttgtcctgaaggacaggaattgacacttgatggaatttatcaggcacacccggaaaaaggaggaggaaacaagctaaaagcagtctattctaacttcaatgcttgcaataattgcataaataagggagtatgtttcaaaacagggcatagatcaataacaagatatgttcatgagcttgcttataaaactgagcggataatatcttcagaaaaaggcattgaagaatataaattgcgttctagtactgtagagtcacataatgggactttcaaaagggtttatctttatgattttattccaataaccggtttaaaaagagtacagggattgatgtttgccattgtagcttcatataacttaataagattcttaaatcttattaaagaaaataatatgagtttacaatctgttattaattcaataagatacatatcatcgagttaa

SEQ ID NO: 1765 - DNA, 1098 bp, Methanobrevibacter ruminantium
  source 1..1098: mol_type = genomic DNA
atgttaaccataaaaattccagtgcaaaatatagaagcaacaagacaaatagtgctaaaacataagattcttgactatgactataagatcaaggtggaaaacggctttggccatataccgattagagaggaaacagaagacgaaatactctctaaagtcatagaagaatgtaaagaagaaataataaaacaaaatagcgattatactatcgaagtagtcgatttaaaccaaaatgaagaacttgaaactgtcaaaagatatccaagaagcataactgagctccttaaggacaagctaagcgatgaggagatagaggaattaaagaaatcctttgatataattggtgatgtggttattgtagaaattccagaggagcttgaagcacataagaaggaaattggagaggccacacttcagttcacaaaacgaaagacagtatatatgaaaagaagcgctgttgaaggaataacaagaacaagacagcttgaactgattgcaggtgaggacaatcctataaccatccataaggaacatggaacaagacttaaactagatgtgaagaatgtctatttctcaccaagacttgctacagagagaaaaagagttcaagaggaaacaaaagatggcgaagagattcttgatatgtttgcaggaatcggaccatttcctattgttatagcaagagaaaagaatgtggatatcactgctgttgacattaatgaatatgcaatcaagtatctcaatgagaatattaagttaaataaattgcagcctaatgcccatatcactgcaatatgtggagatacaaggatagttgcagataatgaattgaagggacgaaaatttgataggattatcatgaatcttccaggattagcgccggatttcttagatttggctgtctccatgtgtaaggacggaggagtcattcattactatgaattctcagagggtttttcacagggaattgaaagggcccagatagcttgtgaaaaacaaaataaggaagttgagatacttaatacaagaaaagtaaagtcaaccagccctggaatgtggcatgtagttattgattgtaaagttagtgataaaaaatag

SEQ ID NO: 1766 - DNA, 960 bp, Methanobrevibacter ruminantium
  source 1..960: mol_type = genomic DNA
atgagaacattggaatgggaagacaataaattaaagcttatagatcaaaccaaactgccagatgaattgacttatgtctactgcagcaattacaagcaagtgattacagcaattaaagatatgattgttcgtggagcccctgcaatcggtgtctctgctgcctttggtatggcacttgctcagcttgccggagaagacatggaaaaggttgcagttgagatgaagaatgcacgtcctactgcagttaacctgatgtgggcagttgatagggttatgaaagccgaaaacatgcttgatgaggcattagagatggctcgtgaggacattaacacaaaccttgcaattggagagtatggcgcagagcttattgatgacggagacactgtccttactcattgcaatgcaggagcacttgcctgcgttgattatggaactgcccttggagtcttccgctctgcattcaatcagggaaagaacattcaagtgatatgtgatgagacccgtccaagaggacagggagcaagcctaagcgtttgggaaatgcaacaggaaggaattcctgtaaaactcattccagatgttgcaagcggatatctcatgtcaataggaaaaatagataaggttgtaataggggcagacagggtggcccatgatggaatagcaaataagataggctcatttatggtggctcttgctgctaagaggtttgacattccgttttatgtagccgcaccaatcagcacatttgataaggaaatcagcatctttgatacagaaatagaagaaagagatcctaacgaagtcatttattatggaggagcaagaatctgcccggaaggaactgaagtaattaaccctgcatttgatatagttccaaaggaccttataacaggggtcattacagaaaaaggagttttcgatttgaataatttagaaaaagactttaaagagcttttctaa

SEQ ID NO: 1767 - DNA, 891 bp, Methanobrevibacter ruminantium
  source 1..891: mol_type = genomic DNA
atgactaaaaaagacataacttgtggaggagaccataaaggtgcaagatttgcacacattacaaaagtgcatccatgctataatgaaaagctccacgataaggttggaagggtccacgttccaatcgcacctaaatgtaatatcggatgcaatttctgcataaggtcaatcaatactgatgaggacaggccaggtgtagcaggatccatcatggatgcagatgctgcagtggaacatgtattgaatgtgacaaaggacagcgcaatcactgttgtaggggttgcaggtcctggagactcattggctaatgaagccacatttgagttctttgaaaagatcaacaaggtaaagccagacctaatcaaatgtatgagtacaaacggtcttttgcttcctaaatatgctgaaagaatagcagagttaggtgtaaacactgttacagtaactgtaaatgcagtggacccagagatattaaaggaaatcaacggattcattttctatgaaggcaaggtctataagggacttgaagcagctgaaatcctttccaaaaaccagcttgaaggaattaaaaagataactgaccttggagttgttgtaaaggtaaatatcgttctcatcccagggcttaatgacgagcacattccagagatagcaagaacagtcaaggaatgcggtgcagaccttgtgaatgtccttcctcttattccattgaataagatggctgactatccaagacctggatgcatggagattgaaaaggctagaggggaagttgaagagtaccttccagtatttagggcatgcacccaatgcagagcagacgcttatggaattcctggaaagaaacatgaggatcatcatattggaaatgctccacagtctcacttctag

SEQ ID NO: 1768 - DNA, 567 bp, Methanobrevibacter ruminantium
  source 1..567: mol_type = genomic DNA
atgtatattgaatcaaatgatccggaaggagcaaaggtctacgacatgattataagacagatctttcaggatttggtcctgccaccttccattgatgacatgaaggcttatgtaaatccaaatgaggtctgtttcataattgcaatcaagatgagaaagacttcacagcacattaccttgaaggaagtggctaatgtcgactataacgctgaagatgacactacagtggtaatcattgacaatgaaaactatcttccaaacattctaaaaaggctttgggaaatcaatggccgtgaaaatgttcaccagccaagcagatatgtcattcacttgcctggagagaagaatgtctctgatttggttgtagacgaccctcatgaaaatctaaagagaagaatttatgatgcagtctttaggatagtccctgaaggatttaagataatgaaagacatgtctgaaggagacattgtctgcattgttgccacagatgaattgattaaggatgaatgggttgaaaaggctaaaggatatatggtggaattgaacactccaaagacttgggattaa

SEQ ID NO: 1769 - DNA, 1236 bp, Methanobrevibacter ruminantium
  source 1..1236: mol_type = genomic DNA
atggtacagattgcacttgtttcctgcggtaccgaatacagtggtatccaaaaggaaatcgaaaaggcagctcttaagtttggagctgaaattatccttcctgaaattgatttggattatattaatgaagcttatgaaaaattcggattctctgctcaaagctcaagcttaaagcttatgattgcaagggcaatgtccattgtagaaggcagatgcaagcctgatgcagtattcattgcaacctgcttcagatgtgctgaaggagcattggtgagaaacgaagtgagacgtttcatacagaacaacacccgtattccagtggttacatactcattcactgaaaggacaaaggctgatgaattgttcatccgtatggaagcattggcaactacagttacaagaagaagcattcttgctcgtgaaaagcaagaaggacttactcttggtctcgactcaggttcaacaaccacaaaggcagttcttatggaaaacaacaaggtcattggaaccggttggacttcaaccaaggatataatagaatctgctaagactgcagctgcagaggcctttgacaatacagattacaactgggatgatgttgacggaataggaaccacaggatatggtaggttcaccatgggtcgggaatttggcgcagagcttatacaggaagaattgtctgtaaacgcaaaaggtgcagtatatcttgcagactgccagaaaggggaagctacagtgctggacataggcggtatggataacaaggttattacagtaaacaatggtattccagacaatttcaccatgggcggtatctgtgcaggtgcttccggaagattccttgacatgacctcaagaagattggatgtggacattacagagcttggtcctcttgcagtgcaaggagactggagaaaggctatgcttaactcctactgtattgtattcggtattcaggaccttgttacaaccttagctgcaggaggctcaaaggcagatgtagcagctgctgcatgtcactctgtatccgagcaagtatatgaacagcaattacaggaaatcgacattcgtgaacctttgattcaagtagggggaaccagtcttatttcaggacttgtagaagctgtcagtgaaactttaggtggtatagaggtaattgtccctgagtattcccagcatattggagctgtaggtgcggcattgcttgtatctggtatgggcaaaaggcatgaataa

SEQ ID NO: 1770 - DNA, 507 bp, Methanobrevibacter ruminantium
  source 1..507: mol_type = genomic DNA
atggtaaaagtagctatttatccaccaaattcattgattttagctgacttgattgagagaaaaggtcatgctcctttagctcttcaaaaacaaataagacaaaagataaaagacccggagattgattcacctccaatgaacattacagaggaagacccaataaacggattgaagtatgcagctattgaagtcccttcaggggttaggggaagaatgtccatcatcggacctcttatagatgctgcagaggctgcaatcattgttgacggcgctccatttggctttggctgtgtaggatgtgcaagaacaaacgaactgtccattttctgcttgcgtaaaaaggacatacctgtacttgaagtggtctatcctgacgatgaggatgggaccgtgcttatggtaaatcaaatcatggaattcttggattccttgcctggcggcggaggagacatggaaggagacaatgacgttttaggcgaacagattggaactaaaggaggaaaataa

SEQ ID NO: 1771 - DNA, 507 bp, Methanobrevibacter ruminantium
  source 1..507: mol_type = genomic DNA
atgcctgcaaatttatgtataactccagatttaggtaaggaggacatggatccggaagtttctacaaggatgatcattttaagttccaaggcaaatgtaagcgaaagcgaagtcgtcaacttcctgcatatgcttaacttgccacttacaataaaatggacttgctatggggcaatgatcagcggcaaggacaaatatgtcagacaagcgattagagagcttcgcaaattggatccttacggaatctttacaaaggaaagaggttttgctccaggtgacccaagaagatgcagaggccacaggtatgggccaagggaaggattccaccaaatggagaaggaattcagaattcttgactatgttggagaggccttgaaaaatccaagagatgtggaaatcgagaagaaagaacctgtttctgttgattactttaaagaagttttagataaggctttagaagaatctgaaggttcttcaaaagaaaaaagtgaggacgataacaaatag

SEQ ID NO: 1772 - DNA, 1569 bp, Methanobrevibacter ruminantium
  source 1..1569: mol_type = genomic DNA
atgaaaagaggcaagcctatgctaataaaaattaatggagaagatgtggatattcctgaaggatctaccatcaaggacgctatagagctttccaatgcgccttataagaaaggaagcattgtctgccttatcaagggagaaagcgaaatacaaagcaatgtccttaagtataagataaagactcctaagggaagtattctcattgaattggaagtttctgaaaaatcaaagcctttgactgatttcttcaaggaaaactattctctcttcagctccaacaatgttcgttgggaaacctctaatgaagtggccataggtccggtagagtctaattttgaaccgtctcatgatgagttcaggtattttgacaatgatgtcttaataagcctctccggtttttccaaggaggccacacatataatctttgtaaaggacgatcactcaaatgtatatggagttccaaaatacagcgacagaggagtctttgcaaggattatcggaggaagaagaacattgttctcacttaccgatgatgatgagatattgtcaatcgagcctgtgattgagagaagcacagtcaccgacagtacaggaggctcaaatcttgaggaagttcttgaagagggaaatcagctattcacctacgctcttttagagccaaatgcaaagtctccagcatcagttgagcatctgttctcattgattagaaacaacaaaatacaggttgactttgaatctaactcatttttaggtttctatgaattaaatggtcttactaaggatgctgaagagataagtgaacgtaagagaggaacagtaaccttaagaagcgaaggaaacggaaaaggaagagtctatgtctatagggaggacagggtcagagctgaaacccataccaatcttgctacagtcaagcaaggtatggaactctttgataccgctaaaaagggagacttcattactgtattaagcgatcctgaaagaatcatgcttatgatgctaactcaaaaggaagcagaggaaaaaatgcaatctttaggaataaagcatgttcgtgacggaaaccttgatgacgatgcgattgttgtgattcagacacctgaaaataccattgacattctggaaaataaggaagtcaccaccttcggacttgcaagcgatgaattggttaagatcaaattgactgacaaggctccaagaaccagatggtatcttgagaaaatcagtggattggcagaaaagcctgtaggcacattgaaggtctactttgcagttcccgacatgaacatgttcatgttcaatggggatactgacgaatccaagggactcattccagagaatatccctacagatattgtaaaggccggtgagatagctgtaaccaatatgtcaaggaagaacttaggtcttattggtataaggacaatcgatactgatgagttcggacctactggtgaggcattctcagctacaaacattgtaggtgaggttgttggaaacattgaaggcttgaacaagcttaaggatggaagcactctttatatttatgaggtttacgatgaggaataa

SEQ ID NO: 1773 - DNA, 684 bp, Methanobrevibacter ruminantium
  source 1..684: mol_type = genomic DNA
atgagtttattggaagttaagaatcttaagaaaagctttggagacaatgtggtcttgaaggatatctccttttccgttgaaaagggtgaggtattgtcaatcataggtccatccggatccggtaagtccacattgctaagatgcataacagaccttgagacagaggacagcggtgagatcaattttgacggaacctttggattggtgttccagaacttcaatcttttcccacatcattctgtaatgaagaatattaccaatgcacctctaaaggttcaaaagagagacaaggctgaagtttacgagcatgcaagagaccttctaaagaaaatggggctttctgataaggaagatgcatacccttcagaattgtctggtggtcaacagcaaagagtatccattgcaagggctctttgcatgaagccggatatattgttctttgacgagcctacctctgcacttgaccctgagcttacaggagagatattagctgtaataaaggacttggcagctgagcatatgactatggtgattgttacccacgagatgaactttgctagaaatgtttctgatacaattatcttcatggatgagggtgtcattgtggaagagggctcacctgaagaggtattctcatctgacaatcaaagaatgaaagagttcttaggcaagttttatgaataa

SEQ ID NO: 1774 - DNA, 654 bp, Methanobrevibacter ruminantium
  source 1..654: mol_type = genomic DNA
atgttattaagtaaaattttagaagaattattatggggtatgggaacctccattgaaatattccttcttacattgctgttttccattccacttggtttggcagtggctgctggaagaatgagcagcttcaagccacttcaatggtttatgaaggcttatatttctatcatgagaggaactccattgatgctgcagctgattgttgtattctttggtccatattatatattcggaatgacactttcaagggattacaggatgattgcagttataattgctttcaccatcaactatgcggcttactttgcagagatcttccgtggaggaatcgaatccattccaaacggacaatatgaagctgcacaggtattgggatataccagagttcaaacattctttataatcatcttgcctcaagtggtaaagatagtgcttccatcaattacaaatgaggtaatcactcttgtaaaggacacttcactttcctttgtgcttgcaattccagagatgtttacagttgcaaagcagattgcagcagctgaagcttccatttcagcattgctgattgcaggtggattctattatgtattcaatgcgcttgtggcaattattatggaacgctttgaaaagagattggattattacgatacatag

SEQ ID NO: 1775 - DNA, 825 bp, Methanobrevibacter ruminantium
  source 1..825: mol_type = genomic DNA
atgaagaaaaaaatagcaattattttaggaattgcattattagcattcttagtcatcggcgcatccagcgcaggtttcttagactttttaggtggcgatggaactgctactaatgatgacaatacttttattgtcggttttgatgcagaattccctccatacggatacaaagacgataacggggaatatgtaggatttgacttagacttagctcaagaagtatgtgacagaaacaactggactttagtaaaacagccaatagactgggatgctaaagacagcgaattggactctggttcaattgactgtatttggaacggatttaccatcaacggtagagaagacgactacacctggtctgaaccatacattgacaacaagcaagttgttgttgtaaaaacagattccggtattaacagtttagctgacttagatggtaagattgtagaaacccaaaaagattcatctgctttagcagctcttgaaggggacaacaaaaccttagctgacacctttaaagacttaactcaagttgctgactataacactgcatttatggatttagaaaccggtgcatgtgatgctgtagctattgatattggtgtagctcaataccaaatcagccaaaaaggaagcgaccaatacaaaatgttagatgaagaaatctcatctgaacaatacggtatcggtttcaagaaaggaaatgaccaattaaaagatcaagtccaaaaaactttagacgaaatgtttgaagacggaactgtagaaaaactcgcacaaaagtacgacacctacggagttcctggcgctcttattcaaaaataa

SEQ ID NO: 1776 - DNA, 978 bp, Methanobrevibacter ruminantium
  source 1..978: mol_type = genomic DNA
atgaattttaatgagcttgttaaatcacttcaagagtttattggtgtaagtaggaaaaattcaatagaaaaggttacaaaggctttaagcgaaacttataatatctctggagatgttcttcttgactttggagacgatgcatctgcaatcgatattggaaatggtcaggttgttctacttgccgccgatggaatctggggacagttaatgagtgtcaatccttattgggcaggctactgctctgttcttgttaatgttaacgacattgctgcaatgggaggtaggcctatcgccatggtaaatacattatccattaatgatgatgaaatctatgatggggttcttcagggaattgtagacggctgccgcaagttcaatgttccaatggttggagggcaccttcaccctgatgccgaattcaattcattggatgtggcaattgcgggaattgctaaaaaggattctctaattacttccgctggtgctaatgtaggagataaggttattgtagccattgacactgacggcaggcagcatcctcagtttgtcttgaattgggacaccacatatgaaaaggatgcaaagctggttcaagatcagatttctgttatgcaggagatagctgaagctcatttgccaactgctggaaaggacattagcaatcctggaacccttggaactttggaaatgttgcttgaggcatctggtgttggagcatttgtagagcttgagaggattcctagaaatcctgatgtctcttgggaggaatggctgatggcttatcctggagctgcctttgtaatgactgccaaggaggaaaactgtcaggagattattgatagacttagtccttactcctttgaagttgcagtggttggagatgtgattgaggataagatgcttgttttaaaatcaggtgatgaggaagctgttctatttgatcaaaggaagaatcctgttcttgtcttaggcaattaa

SEQ ID NO: 1777 - DNA, 633 bp, Methanobrevibacter ruminantium
  source 1..633: mol_type = genomic DNA
atgacattgctgggccatcacattcatgataagcttttcctctctaaggacaccttggagattccttttgatgaggaggcagactctcctgagaactttaagtcaatcatgtttaatgtattcaagtcttatgtcattgagagcattaaggaagtcgttccaagctttgttgaaaaggaccacgaatataatgtggtcaatagctatgaaggattcgttgaagaggactatgaatttgaagacttggatgactttattcaagagctggagtatggcagctatgagggctctaatgagatttatgtggatgaggacggctctttagttgaagaggtctatattgaggatggtgaagttcctttagaggaagtttatattgaatatgatgatgttcctgtagaggagatctttgtggagcatgattctgatgatgatatttatgtagagcatgagtctgttgaggagatttttgttgagcatgatgacggctctatagatgagattattgttgagcatgagcctaatgaaaatattgtttatgaggatgctcctgtagaagagatttttgttgagcatgagcctaatgaagagattgtttatgaggatgctccattagaagagattttttgttga

SEQ ID NO: 1778 - DNA, 1242 bp, Methanobrevibacter ruminantium
  source 1..1242: mol_type = genomic DNA
atggaaattggagttgttgtacatggccccggaatcatagattctggctgggctataaaaattattgatattttatctaattatggaaatgtccattgtcgtttaggcggaactatgggcaggactgcagttattgacgctgctttagaggatgccatagacatatccttaaaattactccctagccaatctttggaactcttcaatagggaaggtgttgatataatcttcctattgaattatggaaagtcccctgaaactggcagagtctttggatataaggttttcaaccattactttaagcagatttcaaatgaggattatcttgctaccaatcataagcctttatatgatgcaagcgttcctgtaattcaaattgaacgtcctggagaagaggacggctcaataatcagctggaatacagaattgaatgagcagctaagcaaaagccgtaaaggcagattcaaattgggattgggaaagaagaatatggtggaatcattatcctttaactttgaagaattattcgatcatttaaaaacttccttaaatttagtagaagtcacaccagaggaagtcgtatccaattatttctccaataatcaggaaaggaaagatgaagaggacattgagaaaatattacgttcatatgatgattatgacatcagccattacacctaccgtaagattcatggagtaagccctgatgagaacatcttcataaacggcatagttgtaggctattccaatggagattccattgtcttggttgcccgtgacggattgattgccgacattataaatggaactattaagtatcacggacttgaaaagctaggtcctgttgatctggagagggtcatagttaaaacaggtcttcttagaaagtctgatgatgtaaatccgagagtcttatcaaataaggacatttcacttaaggatacagaaaggcatatctattcaggtgagatttcagaagatgactattcctttaaggttgcttatgtggatcatgcagcttatgacatctataagttcaaggactttgatttggttgttacaataggggatgatacttcccttgtggcctcagatattctttatcgttttgatattccaataattggaataaccgatggagacttggataaggtcgttgaaaacggatttgtaaatgagaagtcaacaatcattgaagtggcttcaggctttgatgacattgctgggccatcacattcatga

SEQ ID NO: 1779 - DNA, 507 bp, Methanobrevibacter ruminantium
  source 1..507: mol_type = genomic DNA
atgagtgatttatattatgtcttagatgcatctgcatttataaatggatttgaaccgaaatcagattttaacattacagtttctgaaataactgatgaggttaaagacttaaaatcacgactaatattaaatcaagccatagatgatggtaaaattataattcaagaggcccaaaaggagttcttggataaattagatgaaaccattgccaaatctggtgatgacttaaggttatcaggtcctgataaaaagctattggctgttgctttggctttattggatgaaggcaaagagattaaggtcttaactgatgactattctatgcaaaatgttttaaaaatccttgatattccctatgaaagcattataactgaaggaataaaaggagtttataattggaaaaagacctgtgaaggctgtaaaaaggagtatcctgcagattatccatttgatgactgtgagatatgcgggtctaaagtatttaaacgaagaattaaaacttactaa

SEQ ID NO: 1780 - DNA, 519 bp, Methanobrevibacter ruminantium
  source 1..519: mol_type = genomic DNA
atgaaaagtgaaacaatggaattacataagaagaaagctccaataaaggtttcatgtggaattataacacttagtgacagattctcaaatgacaaagagggaaaggaaaaagacttatccggaaaatacttgattgatgaattaagcaaaaaatacgatgttgacgattacacaatcattcccgatgaaaaggacatattaaaagacaccatagaatcaatgatagataatggaatagatgtaataatcacaacaggtggaacaggccttgaatcaagggacataaccattgaaactgtagaacctttatttgaaaaggaaatgaaaggatttggtgaaatattcagagcaatttcatatgaagaattaggggcgggatcccttttatcaagggcaacagcaggagtttataaaaagacactcatattctgcatgccaggatctcctaatgcagtaaaaacaggaatgaaaatattctatgaagaattagggcatcttaaaaaacatgcacaaaaatag

SEQ ID NO: 1781 - DNA, 531 bp, Methanobrevibacter ruminantium
  source 1..531: mol_type = genomic DNA
atgtgcatggtatctaaagaatatttaattgaaattcttaaggaaaacaaagtatttgaacaaggggaattcactcttgcttcaggaaagaaaagcaactattatgtcaatatgaaaagagctataacagagcctgaaatcttgtctacaattgcaaagctaatcaatgaaaagattgatgatgatacagataagattgcaggacctgctttaggagccgttcctattgcaactgctgtttctttggaatctaaaaaaccgctccttatgattagaaaagagaaaaaaggctatggaacttctaaattaatcgaaggagatttgaatgaaggggataaggtaatccttgttgaagacgttactacaactggaggttctttactaaaggccattaatgcaatagttgataatggtggagtagttcaaaaagcttttgttgttgtagacagggaagaaggtgcaatggagacctttgcaaatgagggaattacattagaacctttaatttccgttagcgaattttttgaataa

SEQ ID NO: 1782 - DNA, 285 bp, Methanobrevibacter ruminantium
  source 1..285: mol_type = genomic DNA
atgagaattgcaaaggaattaattggtaaagaagtcttaggaactgatgtaaccgttatgggaaaagtcgttgatgttgatattgatgttgaggataatattattgaatcaatcattgtctctaaaggaggtattcaggaaagcttaaacatttctaaaagcgaattggtcattccttttgatatgataagcaaaatcggtgataagattcttttaaaagatgcattcggagaagacctagatcaaatggctgatgagattcaagatttgaaaaaccaattataa

SEQ ID NO: 1783 - DNA, 114 bp, Methanobrevibacter ruminantium
  source 1..114: mol_type = genomic DNA
atgatggtttttggaatagaagatccttggatttggggagtttatgttttactcattggaatgacattggtttgtgttgcctacggcgcattaaactggaataatgaggattaa

SEQ ID NO: 1784 - DNA, 1650 bp, Methanobrevibacter ruminantium
  source 1..1650: mol_type = genomic DNA
atgaattactttttactaggaattgtttttatcgtttacttccttatggtaggttacgtaggttacctagcatggaaaagaacaaattcctctgaagactttttggttgcaggtagagaaactcacccatacattatggcattaagttacggggctacttttatctctacggcagctattgtcggttttggaggagtggcaggtaaatatggtatgggtatactatggcttgcattcttaaatattcttgtagggatattcattgcatttgtattcttcggtaaaagaactcgtaagatgggtaagaatcttaactccctaaccttccctgagtttttaggccgcagattcgatagtaaattcatacaatactttagtggagttttaatcttctgtgctatgccgatttatgcggcagtggttcttatcggtgcagcaagatttatggaaagttctttaatgcttgactttaatctggcccttttcatattggctgtcgtaatttgtggatatgtgcttttcggcggtttgaagggtgttatgtatactgacgcattgcaaggaacaatcatgtttatcggaatgttgattcttcttgtattcatctattgggtattgggcggtgttactgaagcaaacactgcacttacaaacatggctcacctatatcctcctgatgccttggcagaaggtggtacaggctggacaagcttccctaaactgggaagcccattctggtggactctcgtaaccactatcatcatgggtgtaggtattggagcattagctcagccacagcttgcagtaaggttcatgactgtaaaatccaataaggaattgcacaggtccctcttgattggagctgtcttcattgctgttatgaccggtaccgcttatatcgtaggttcattatgtaacgtatacttctatcagaacttcggtcagattgcaattgactatgtaggtggaaatatggattcaatcatccctacattcatctcaactgcacttcctgaatggtttgtatacatattcctcttgtccttgcttgcagcggcaatgtcaaccctttcctcacagtatcacactcaaggtactgcattaggtcacgatattgtagacgcatttaaaaacagaggaactacccgcgaatatactgatgaggagattttggaaggctcttcaaaagaggaaactagaataggatttatttcagttagccaattaggtattttgattgctgtagtgttgtctttaatcattggtcttattttgcctggaggtattgtagctcttggtacatctctctttatgggattatgtgcagcagcattccttccggtctattgtgcagccttattctggaaacgtgcaacaagaaaaggggcaattgcaggtcttttatccggtacattcacaagtcttttcttgcttgtatttgtatataagaaaactgctgttggccttggaatctgtaaggccttaactggtatggacatgctgattaatgtaatgccttggtattcaattgatgtgatggtatttgcaatacctgtttctgtaatatttacagttgttgtaagcttgctttcacctccgatggatgaaaaagtaattaaaaggtcatttgagggactttctgaagaataa

SEQ ID NO: 1785 - DNA, 1302 bp, Methanobrevibacter ruminantium
  source 1..1302: mol_type = genomic DNA
atgatttggaatcagaatgcagaatgtatggataaggaagaaaaagaagaaatgcaacttgccttactccaaaaacaagtaaagagagtttatgaaaaggtacccttctatagggaaaagtttgataaagcaggatttcatccagatgacttaaaaacccttgatgacattaccaaaataccatttacaaccaaagcggatttaagagaagcatatccatttggattattcgcagtaagcgatgatgagattatagaaattcacagtacctcaggaacaaccggaacacctgtcgtctccggatacacacaaaaggatattgacatttggggagagtgcactgcaagggccattgcaatggctggcggagataaaaactcaaaaatccaaaattcctatggatacggattgtttaccggaggattcggtatagaccacggtgctaaagtaatgggagccactgtaataccaatgtcttctggaaacactgcaagacaattgaagatcatggaagacttccaaagcgacattctcacctgcactccatcctatgcaatgtatttggcagaatcccttgaaaaggaaggatacactgcagatgacatcagcttgcacggaggaatcttcggagctgaaatgtggactgaagagatgaggcgtagcctagaggaaaaattaggaatcactgcacataacatttacggacttactgaattgatgggtccaggagttgctgcagagtgcaaatatcagacagggcttcatattcaagaggatcatttctatccagaaatcattgaccctgaaaccgaagaaatattagaagacggcaaaagaggagaattggtcttgaccaaccttacaagagaaggaatgccggtcatcagattcaggacaaaggatatgaccgcacttagaagggatgaatgtccttgcggaagaaccactgtaagaatggatagaatcactggaagaagcgacgacatgctaaaaatcaaaggagtcatggtttacccatcacaaatcgaaacagctatcctacagattgaaggattgactgcaaactatcagattcatgtatcaagacctcatacccttgatgagatagaggtaaaagtggaaacctcacctgaagtattctcagatgagatgaaaaagatagaagaatttgaaagaagaattgccaaaaagattcaaagcgctattggcataagcgtggatgtgactttagtagagcctgaatccttgccaagaagcgaaggaaaagcaattagagtaattgatgagaggaactttgattaa

SEQ ID NO: 1786 - DNA, 432 bp, Methanobrevibacter ruminantium
  source 1..432: mol_type = genomic DNA
atgagcgtaaaacaactttccgtatttcttgaaaacaaagagggaaaattaaaaaaagcagttaatgcaatgtcccaggctggagttaacatcagagccctttccattgcagacagctccaaatatggaattttaagattaatcgtttcagacaacgaattagctataaaagccttaaaggaagaaaactttacagttaaagaaactgaagttattgttgtaggagtaaaggacgaaccaaacggattgaacacaatgcttgaaatccttgaaaaagagcatattaatgtggaatacctttatgcattcgtcagctccaagactgatgaagctattgttgttgttaagattggaaactatgaagacggtttaaaagcacttgaaaatgctaatgcaaacctcttatccaaagaagatttagctgaattataa

SEQ ID NO: 1787 - DNA, 1278 bp, Methanobrevibacter ruminantium
  source 1..1278: mol_type = genomic DNA
atgttagatagattaaaaagcattagtcttggaaattggatactcatcggaatggttttaggcctaataacaggcgtaatattaaacttgtatgttcacagccaatttattgacataatactcatagataacgttttctacttaggaggaaacatatttatcaagctaatgaagatgctggttgttcctcttgtcttctgttcgattgtggtaggggtggcctcaatttcagacattagaaagattggtacaatcggtgggcgaaccatcctcatctaccttattacaactgcccttgcagtttcaatagctcttctgattgcaagcttcatccatccaggtgcaggactgcatatggctggccttgcaactgcctcaaacgtttcaaccaatgttacaataaccaatacaatcttaggaatggttccagacaacccaatcaactcattggcaaatggagacatgctcccagtaatcatttttggagtactggtaggaatcattctagctaagctaaaggaagagacagaaaccataaacaaggtctttgaggaaggcaacacaatcatgatggaaatgacttcaatagtcatgaaatttgccccaataggtgttttctgtcttatggctaagacatttgcaaccttaggattcgatggtcttatgccgctgagcaaatatgtaatatgtgtgctcataggccttgcagtgcaggcattcattgtctatccgtcacttatggtcatatttacaagattgaatccgatcaagttctttaagaaattctattctgtaatgctatttgcattttcatcttcaacatcaaatgcaacaattccattgaacctagaaaaattaagcgaacttggagtctcaagggaagtctcatcatttacaatccctcttggagccaccatcaatatggatggaaccgctataatgcaaggggttgcagtaatgtttgctgcacaggcttatggaatggatttaggagcaagtgcgctacttacagtaattttcactgcagtgatggcctctataggaactgctggagttccttcagtaggattgattaccttaaatatggtattcacttcaataggattgcctgtagatgcaataggaatcattatgggaatagatcatatcttagacatgtttagaactgctgtaaatgtaacaggtgatgcaatatgtactataattgtatcatttaagaacaagtctatagatttggatgtttttaatggtaaaaaacaagccgagggaagttcataa

SEQ ID NO: 1788 - DNA, 279 bp, Methanobrevibacter ruminantium
  source 1..279: mol_type = genomic DNA
atgccttttaaaatcgatagtgctattgttaaaaaagatatggactccggcaaatatgatttggtggatcctgaaggaaaattctcacaagcggatgctttaatggtcattaatagtgatgatttcattactgtacaacttataataaatgctattttaagaaatgactttaaagcatggaaagatgtaaaatgggaaggtggagacagtcttaaatcccttttagttaaattaggatatggtaaagaagaaatagttgaaatgttaaaggaattttaa

SEQ ID NO: 1789 - DNA, 3177 bp, Methanobrevibacter ruminantium
  source 1..3177: mol_type = genomic DNA
atgcctgttgataaggatattaataaagtgcttataattggttctgggcctattcagattggacaagctgctgagtttgactactccggttcacaagcttgtaaatcacttagggaagagggtttggaaactgttctagttaacagcaatccagctaccattcaaactgatatggatatggccgatacagtttatacagagcctttaactgcagagctagtagctcaaattattgaaaaagagaatattgatgcgatactacctaccatgggaggacagaccggtttaaacattgcaactgaacttggaaaattaggtcttttggaaggaataaaggtcataggttctgacgttcaaacaattgcagatgtggaagacagagacctctttgctaactttatggataggctagatgagcctattcctaaatgtcatgcagtggaatctgttgaaggggctttagaagctgtcgaagaaatcggataccctgtcatcgtacgtcctgcattcactttaggaggtaccggtggaggaatagcccacaataaggaagagcttattgaggtaaccacccacggtcttgacatgagttacatcaaccaagtattgattgacgaatccgttttaggatggaaggaaatcgaatttgaggtaatgagagacaagaacgacacctgtattatcgtatgtaacatggaaaatgtggaccctatgggaattcacactggagacagtatagtggttgctcctattcaaaacctgaatgatgaggtctgtcagcgcctaagagacgcttccattaagattatcagaaaccttggaatcaatggtggatgtaatatccaatttgcattgaaccctgaaaccaacgaatacaagattattgaagttaacccacgtgtaagccgaagtagtgcgctagcatccaaggctaccggttatcctattgcaaagatctcctccaaggttgcacttggacttacattggatgagattcaaaacgacattacaaaagagactcctgcttcctttgagccatccattgattatatcgttgtaaaaatcccaagatggccgtttgacaagttcaaaggaatcgacagaaagattggagttcagatgaaggcaacaggagaggtaatggctataggaagaacctatgaagaggccattcaaaaggctatccgttcattggatatcggccttcatggattcgagtatcttgaatacactgaagacaaccttgcaaaccctaccgatgaaaggctcttccatatgtactctgcaatcaaggacggaagaagcgtagaggagcttgcagagctctctaagatggatgcattcttcctatacaagattgaaaacatagttgagtttgaaaatcaggttacaaaagaggctcttgaagatgaagaattcttgcttaaggctaaaaaattaggattctccaatttcacacttgcaaagcttgcaggaattgaagaagaggatgttaaagcacttcttgataaatttgatattaagccatcctataagatggtagatacctgtgctgctgagtttgaagctaaaaccccttattattacagcagctatgacaaaggaaatgagcttgtaaagtctgacaatagaaagattttgattatcggcgcaggtccaatcagaatcggtcagggaattgagttcgattactgttgtgtacattcttcccttgccttaaaggaccaaggaatagaaacaattcttgtaaacaacaaccctgaaactgtaagtactgactatgacgtttcagatgacttgttcttcgaacctttaacctatgaggatattatgggaatcattgaacaggtagagccagagggtgtcatcgttcagttcggaggtcaaacatcaatcaatctctctgttcctcttgcaaaggctggagtcaagatattaggtactccatatgaaagcattgatagggttgaagacagggaaagattcactgaagtattgaatgacttgcatattcatcaggccccttatggattggccaattcatttgatgaggcaaaagaggcagcagaaagaataggcttcccagttcttgttcgtccgtcctatgttatcggcggaagggcgatggaaatcgtctatggtgtagatgagcttgaggaatatatgaaagaggctgtaaaggtctctccagagcatcctattcttgtggacaagttccttgaagatgctgtagagcttgatgtagaccttttatgcgacggggaagacgtattcattgcaggtattatggagcacattgaagaggctggtgtccactcaggagactctgcttgtgtaatacctcctcaaaccattccagagcatttgcttgaagtaatcagagaaaatacaagaaaattggctttggaattagatgtcattgggctcatgaacattcaatatgctgttaaattggatgaggaaagagtttacatcattgaagctaacccaagggcgagcagaaccgttccatttgtaagtaaggcaattggtgttcctcttgcaaaggttgcaacctccttgatgatgggcaagacccttaaggactttaatttaaccaaggaaatcaagatcaatcacgtagctgttaaggaatctgttttcccattcttaaagcttacagaatctgacagtgtcttaggtcctgaaatgaaatccacaggagaaagtattggtattgatgaaaacttcggccttgctttctataagtcacagctttcagcgggaatggacttgcctaaggaaggaaacctcttcatcagtgtaagggaacaggatcagcctaagattcagccgattgcagagaaggctcatgctttaggatttaatataatggctaccaagggtacagccaattcaatatttgatgttcctattacaagggtcaagaaggtttcccaaggacagcctaacattaaggaagcaattttagatggaaaggttgatatgattattaacactcctcatggtgaacaggcttctaaggacggctatacaatcagacgtttagctgtagagcttggaattccttatgtgactaccttagcaggagcaagagctgctttaaatgcaattgcagctgttaaggaaaatgatttaaaagttaagtcattaaatgagcacattgctaatatttaa

SEQ ID NO: 1790 - DNA, 1080 bp, Methanobrevibacter ruminantium
  source 1..1080: mol_type = genomic DNA
atgggaaatgaagcaaaattagctttggaagatggaactgtcctaaaaggtaaagcctttggttatgaaactacgactgtaggtgagcttgctttttcaactggcatgtccggttatacagaaagcctaacagacccttcctttaagggacaaatattaatgagcacatatcctttggaaggaaattatggtgtaagcgaagattggtatcaatctgacagtgttcatgtagaaggatttgtagtaagggaagcatgtaagaaattatccaatttcggaactaaaaagaccttggatgactttttaaaggaattcaaagtatctggaatcgaagatattgatacaagggacttgactttaaaaatccgtgagaaaggttcattaaaggcagcccttgccactgaagagattgatgatgatgaacttgttgcaaaggcacgtgaacatacaagcatcactgaattggatttggttccattggtttcaactccagagattaaggcttttggagactttgacaagactgtagctattattgactgtggagttaaaaggaatatcattaaatgtttccttgaaaacaatattggcgttgcccttttcccatatgatacagattatcaaacaattcttgattatggagttgatgggcttatggtctcttcaggccctggaaaccctgagagattaaccagcacaattgaaaatgtggaaaaattgcttaacagattccctgtattcggaatttgcatgggtcagcaagtaatcgctaaggcatttggcgcaacaacatataaaatgaaatttggtcacagaggagcaaatcagccagttaaggacttaaacactggaaaagtgtttatcacttcacaaaaccatggattctgtattgatcctgaatctttagctggaagtgacttggaactcaatcaaataaacttaaatgacggcactcctgaaggatttttgcataaggaattgcctttaaggaccattcagtatcacccggaatccggtcctggacctaatgatactaaggtcttgtttgaagagtttggccaaatgattagggagtactag

SEQ ID NO: 1791 - DNA, 750 bp, Methanobrevibacter ruminantium
  source 1..750: mol_type = genomic DNA
atgtctcattttgataactctgattttaataaggatttagatgtgaataatcaatatgatccagtaaaaggcaatgataaagcattcaatggcaaatattcacttaatttttcaatctctcataatgatcctaatttctctaatcttgcaatgtcttctagtataatctctgaaaccactcttgaagaagattgcattcttttaaaaaagaaatccttgcttaagcgaaagtctttaggctctcaaaagatttattatagggaaattcttgaattggacttgattaagtccactctatcatctttatatagttccataaggatagtttattctaaaaacggatattctaagagggtcttgtctttaagcagttctgatggatttgctgtaaggtggttttatgatgccttggttgtgaagtattcctatgtcaagtctggtttggataaaaagtatgattttaattcaaatgagtctgattggatagaagcgaatgaatctaataaaaatactagtttatctggtgatttaactaattctaatgatttaaatgattcttctattaaagaagatgatttgaataattctaatggctccaattctggcgatgaatctcataattctctttcttctaaacagtctaaattgtctgattttgtctctcaaatgaataaggagctttcagaggaagaaactagaagcttaaaaaagaaaatgaaatttgagagatgttctagcggagaatactaa

SEQ ID NO: 1792 - DNA, 390 bp, Methanobrevibacter ruminantium
  source 1..390: mol_type = genomic DNA
atgttcttagataggttttcattagaaagaaatgatttgaactttagaaaatataatttagcaatcctaattgcttctttgcttttgtatttattgaatatttattttttaagttcctttggagatttctttaaattttattttgacgatttatttgcaattatggtattgttcagctttttaaatcttgtttttccatataagatagacaatttctggataattgtaatcataacaatatttgcagcattcttttgggaatatgttgctttattcattaagccaggctctgtatttgattatttggatattttggcttattttctatctatggtgatttatttaattttgatttatgcttttgaaggtgaattgaatgtctcattttga

SEQ ID NO: 1793 - DNA, 228 bp, Methanobrevibacter ruminantium
  source 1..228: mol_type = genomic DNA
atggaagatgaagtaatagatgttgaagattatgaagttaaggaaacagcaatagtagttagcgatgatgaagaggataatgattactctaaaagttcaaatgataataattacacatccaacactacatttagaactgcaaccattagcttatccaatgaaaagttaattatacttgctttagtggcaattgttctcattgcaatattcttattgacattttgttaa

SEQ ID NO: 1794 - DNA, 231 bp, Methanobrevibacter ruminantium
  source 1..231: mol_type = genomic DNA
atgaatcaattttgtccaaaatgtggtgcaaagcttttagacccttatgcaaagttttgtagtcaatgcggcactaatcttactgaaaagaaagaaataaacattgatgaattgcctgaagaaagaattgacttaagagaagggatgacaaacaccaataaaggaatgtacagatacacaaaatggggaagacgaaagaaaaaacctgtaaattgggatatggaaaagtaa

SEQ ID NO: 1795 - DNA, 351 bp, Methanobrevibacter ruminantium
  source 1..351: mol_type = genomic DNA
atgagatcattagaggaaattggagctaaaatagaagaattaaatgataaaattgcaggaatcagagcagaagatgaggaaaatctaacaaatgaacttaaagtcattcttgcaggttccgaattgcagtcaatcatattaacaagcacattaacaagcaaagaacagcaagttcgagacttgcttgataaatttgtacaaagaggggatgagcttaacgaaagatacgaagaggcatctatagaagatgatgcagctgcaaaaaatcaattgcatgctatgatttggaccaatgacataagaattgacaccctcaaatgggttcttgaagaagaagatgttggaatttaa

SEQ ID NO: 1796 - DNA, 1419 bp, Methanobrevibacter ruminantium
  source 1..1419: mol_type = genomic DNA
ttggttcttatttgccctatccttgctgaagaggcacatgcaacaactgtctttctaacatcagacaacgttttaggccacgatgaggacatgcaaatgctaaatgatatcaaacagcagattgagaccaaatcaaatgggcaaattacagtcatagttgatgagaatgcctcaaaccctggagaagggactcgggcaatgaatgctgattgcgacatagctgtaacaattgcctatgcctgtgccggaaacctggtggaccttggaagctattcagtacaatccaccaaaaagataatctatgtgaatgcaggctcacttgaccttacaagcataaacttcttaagaaggtcttatgacgacaattggtcttcatccagctttgcatcccttcaaaaccctggacaatatctatatgattctggaataaccttattgcagcctggacaaaagttctatggggaaacagacaatggaaacctggaccattgcagctctgaaatagacggatacattgcagatgaagtgatgaagcaagtctattcaaatggagtaatcagaaaactggactcagattatataaacagacacaagctggatccaaaatacttagcagaagattccaaaaagattgttgacggatttggaactccaatggcagattcctatggctcatacaccacacagcaattattgtatatgagcgcatcctatttggtaggatatagtctagatgttccacaacaatttgcccctccagagaatcctgcagaatactctgcatttacaaagggaacatattcattcaatgaatactgtgaaatggcagatattgtagtggattatatgaatgagcatggaaaggctccagattcaataagctataagggagctacaatcagttattatgacttggtctataactttgcgctccttactcaagatgatttcgatgcagctcatatgaacttccctcaaaatgccgacttccaaaaatacaattcaaatatcctattggacattcttccaatagcaattattatagttgtcattattgcagtggcaattataataagaaaattaattaaaaaaggaagaagaggaattaagagaatcaaaaacagaggcaaggacaataattattatagaaatcaggcaagtggaaacagatctagaaaatcaagaggaggttctagagacaattattctagaaacagtgccagatataataattcaagaggaaatcaatcctctagaaaatctagaaatagcggaagacctagaaactctagaaacagcagagactctagaaacagcaaaaataaaaggtcaactaaacttttccacaaaaatgtagaccttgaccaatatgataattctagatcaaaagagccaaaaagattgaataagaaaagataa

SEQ ID NO: 1797 - DNA, 930 bp, Methanobrevibacter ruminantium
  source 1..930: mol_type = genomic DNA
atgacttctcaaactagcgaaaaagaaaatcaagagttaatagatagtttaaacaatgaaatagactatctgaaagagattctaactagcaagatctttgaagaagagcatcttttaaacttcacctgccgtgacattgaaacagattatgccttgaaatttggagtttataaatacaaaataaaaggatataaacttaaaattaaaaaaacaaaaagaacaattgaattaatcaaaaaaatggtcaatagacaagagataaatctattcaataaaaaactagaggaaatgcagccaaatcaagcaaaaatcaatgaaaccaagataaataaacctcgattgaatatgaaggaaatcgaagaccatattgaaaatgaattcaaagaagaggacattgaactcgaaacagagactgcaagaacaaacatccttatcgaagagcatagaaataatctggatagaagagtgcctgttagagaaatagatgctctttataaggaatgcattagaaaaatgcatcctgatttattattcaatccaacagaatatgaggaaagcctatttttcaatgcaaaggaagcttatgaggatagagatttcgaggaattggaagcaacatacaaccttatacacacccataagattgaagagactcctcaaacagttgaagagatggaaagattcatagaacatttggaaatccatataaaactagaagaaagagagatttccaatataatcaactccaaaccatatactcaacagaaattccttctaaaccaaaaaaaggtaaatgattatagagaaggattagtcaaatcccttttagaggttgaaaaagagtatattaaatgtaaaagagagttaactgatttgaaatcaaaaaataacttaagctacaaattagatttaactaaaaaggacaattaa

SEQ ID NO: 1798 - DNA, 447 bp, Methanobrevibacter ruminantium
  source 1..447: mol_type = genomic DNA
atgcttattcgcgaatttcttccatctgatctggctagagtttatcaaattgaggtagaatccttttcaacaccttatgatattcctattcttaagcaattatatgatattggtgcaggatttcttgtagcaactgaaaatggtcaggttgttgcttatattattttctggcttaaagaggaaaacttaggtcatattatcgctttagctgtagatagaaagtttaggggtcaacatatagcaactaggttgcttatgatggctgttactgttcttagaaattgtagcgttcctaaaattaccttggaggttaaggctcaaaatactcctgcaattagcttctatgaaaaattcggctttaaaatagagaggaaagttccaaattactatgaagatggatctgatgcctatgtgatgtacttttatacagattccattaaaaattag

SEQ ID NO: 1799 - DNA, 414 bp, Methanobrevibacter ruminantium
  source 1..414: mol_type = genomic DNA
atgtgggatgacttagaagaatacattgagaatctatctaatgattatagctcaaagaacaatagaaaaacaaagattgtagagattggagttggaaaattccaaacaatatctgaccatttaagggaaaatgaaaacatagagcttataatgaccgacatagaccctgcaaatgagaatgtcgttaaagatgatgtgtttaatccaaatatggacatctacaaaggtgcagacataatattttcaatcagacctccaggcgaaatacaagaagccattatgaaaatcagagatgaaatagattgcactttaataattaaacctttatttaatgaagatttaaatataaaagccaaaggaatgaaattgaaaaattataatagggcttcattttacatttatcaaaaggaataa

SEQ ID NO: 1800 - DNA, 2721 bp, Methanobrevibacter ruminantium
  source 1..2721: mol_type = genomic DNA
ttgatagaggaaatcttaaaaacctacaataccacaattgaaggtttaaccaatcatgaggctaaagaaagattagaaaaatacggccctaataagattcaagagcaggaaagcgacgggctgttaaaactttttttatcacaatttgccgatgcattaatctttcttcttataattgcagcgataatcagctatctaattggtaaccatttagatgctgttgtaatagttattgttgtaataattaactcaataattggatttattcaagagtatcgtgcagaaaatgccatgcaggaactaaaaagcctagtgagcaaggaagcccatgtaagaagggagggcaagacaaaaatcatccctgctgaaaagcttacaattggagatatagtcctgattgaagagggaaacaaagtccctgcagatctgcttctcgttgaaagctatgaccttacaatagatgaatctctgctaactggagagtctgaagaggttagaaaaaatgctgattattccaatatgggcaatcttgaggaaaagataagaaatatttcaagccattaccaagaggaggaattaagagaaaagattgtctcaatgaattccaatgtattatccggtagaggcactggtgttgtgattgcagttggaatggacactacaatcggaaagattgccactatgattcaagaagaagatgaggagactcctttggctaaaaaagtggacaagcttggaaaaagaattggagctttatccattgcagtctgtattggagtattctttatagatttcttccaggattataatatcatagaaggatttatgactgcagtttccttggctgtagctgcaattcctgaaggattacctgccgttttaacattgactttggctttaggaatgcaaaagatggctaaatcaaatgcaatagttaaaaaactttcttcagtcgaaaccttaggttcatgtacattcatctgtacagataagactggaacattaacagaaaatagaatgactgttagggaagacttcttattggataatgacaaatcagtattaatttcaggcctttgtaataatgcaaaatatgaaactgtagacgaaggagagtatgaatctctagaaaaagataataatagggctagaaatagtagtgaagaagacagcaaaaagactgaaaacagcaaagaagaaagccaattaatcggaaaccctacagatatagcagcatataactttgcaaaaggccatggatttgacaaattagaccctgaacactcctacacacgtcttgatgagattccttttgacagcaacagaaagagaatgagcgttatctataaaaaggaaactcagaatgaaacagaatattacatatttactaaaggagctcctgaattgattttaaacctatccgataggatagaaaaagatggaaatatcaaagaaatcgattctgaaaccatatccaaaataaaccgcaagattgatgagatgaccaataaaacattaagggtcattgggctttcctataagcaaatagatgaggaagactacaataagataaaaaatagccataatgataataaaatacatgatatccaagaggaattggaaagaaacctaatcttcacaggacttcttggaataatggatcctccaagagccgaagcgatagatgcagtggcaagctgtcaaaaagcaggaattgaagtcgtaatgataactggagaccataaggacactgctacagccattgcccgagaaatcggaatattatcaaaagaggattgtgagagccttagcaagcatgtgctgaccggtgaggaactggacagattgaatgatgatgaatatagaaatatcgtagaggaaatcaaggtttatgccagagtatatccagagcaaaaaagaagaatcattgatatcctgcaaagcaaagaccatatcgtttcaatgacaggtgacggagtcaacgacgctccggcccttaaaaaagcagccataggagttgcaatgggaagcggaacagaggtcaccaaagagtctgctgatatgattattcaagacgacaactttgcaacaatagtctcatcaatcaaagagggaaggacaatatatgacaatcttaagagattccttaaattccagctctcaacaaatataggagctatattaacaatcactataggctcattgcttcctataccaactccatttactccaatccagcttctttggattaatattataatggatggccctccagcacagtcattaggattggaggcctctgaagacaatattatggaaaggccacctgaaagaggagagcttttagataagaagacattgattaagattacaatttcaggaattgtaatgacaattggaaccttatccttattcatttatgaattgggactaaattcaccatatggtaaaacaaaggcaattaccatggcatttacagtattcgtgttataccaattgttcaatgcattaaattacaggtcaaaatcaaatgtgaaaaataagatgcttatattttcacttattggaacattcatactccaagtgctggttatctatgtgccatacttgcaaataatattcaaaacatgcccaatagagccattcgattggatcttggtaattatattatctgcaatcattttagtcactgataaaatagctaataggctaatcaactaa

SEQ ID NO: 1801 - DNA, 123 bp, Methanobrevibacter ruminantium
  source 1..123: mol_type = genomic DNA
atgaatttaatagcagatattgcaagtggtctcttttggatgagtttagttatgattggaggatttattgttgttattgcattaatgactttaattggaaaaggctcttctgcagatttctaa

SEQ ID NO: 1802 - DNA, 309 bp, Methanobrevibacter ruminantium
  source 1..309: mol_type = genomic DNA
atgaatcaagcaagaattaagcttactggaactgatcctgaaaaacttaactatgtttgtgaccaattaaagaaaatctctgaaagaactggtgtagatatttccggtcctattccattacctaccaaaaaattagttgttcctactagaaaatctccagatggagaaggaaaagctacttgggaaaaatgggagctccgtattcacaaacgtttagtcggtattggtgctgacgaaagagctatgagacaagttatgaaagttaacgttccagataacgtaagtattgaaattgaacttaaaaactaa

SEQ ID NO: 1803 - DNA, 1242 bp, Methanobrevibacter ruminantium
  source 1..1242: mol_type = genomic DNA
atggcaaaagaaaaagaacatttaaatttagcatttattggacacgttgaccacggtaaatccactttagtaggacacttattattaaaagctggtgctatcgctgaacaacaattagatgaaggtgaagacaaattcagatttgttatggacaaattaggagaagaaagagaaagaggagtaaccattgacttagctcaccaaaaattctccaccaacaaatacgactacactgtagtagactgtcctggacacagagacttcgttaaaaacatgattactggtgcttcccaagctgacgcagctgtattagtagtagctgctaacgacggtgtaatgccacaaaccaaagaacacatgttcttatccatgactttaggtattaaacaattaatcatcgcaatcaacaaaatggacatggttgactacagcgaagacagatacaacgaagtaaaagacgaagtatccgacttactcagatccatcggtagagaccctgcttccactcctttcatccctatgtctgcatttgaaggagacaacatcaaagaactctctggcaacatgtcatggtacaaaggtgacgctttaatgactgctttagacaaattagtaccacctgaaaaacctgtagacttaccattaagaattcctattcaagacgtatactccatcactggtgtaggtaccgtacctgtaggaagagtagaaactggtatcatgaaacaaggagacaacgttatcttcgaacctgctggagtttccggagaagtaaaatctatcgaaatgcaccacgaaactttccctgaagctgaacctggtgacaacatcggattcaacgtaagaggtgtaggtaaaaacgatatcagaagaggagacgtagctggacacactgctgacgctccaactgtagctaaagaatttactgcacaagttgttgtattacaacaccctggcgtaatcaccgttggatacacccctgtattccactgtcacacctcacaaactgcatgtactttcttagacttaacttccaaacttgaccctgctaccggtcaacctgaagcaaccaaaccagacttcattaagactggtgacgcagctatcgtacaaatcaaaccaaccaaacctatggttatggaagaagctgctaacatcccacctatgggaagattcgctatcagagatatgggtcaaaccgtagctgctggtttatgtcttaaagttactgacaaaaaataa

SEQ ID NO: 1804 - DNA, 2208 bp, Methanobrevibacter ruminantium
  source 1..2208: mol_type = genomic DNA
atggtgatgattttgagtagacgagacaaaatgattgcaaaaatcaaagaattgatgtaccaacctaaaaatatcagaaacataggtatctgtgcacacattgaccacggtaagaccacattatccgacaacctcttggcaggtgctggaatgatttccgaagagcttgcaggagatcaaagattcttggatttcgacgaacaagaacaagctcgtggtattaccattgacgctgcaaacgtatccatggtacacgaataccatggcgatgaatatcttattaacttaatcgacactccaggtcacgttgacttcggtggagacgtaactcgtgcaatgagagctgtagacggtgcagtagtagttgtatgtgcggttgaaggtatcatgcctcaaactgaaaccgtactcagacaagctttaagagaaaaggttaaaccagtattattcattaacaaagttgacagattaatcaacgaagtaaaattaggacctgaagagttagcaaacaagttcattggaattatcaatgaagctaacaagttaatcactaaaatggctcctaaagataagaaagacgaatggcttgtaaaagtggatgacggtagtgtagcattcggttcagcataccacaactgggctatcaacattcctatgatgcaagaaaccggaatcaacttcaaagacattatcgattactgtaatgatgaaaatcaaaaagaattagctaagaaagtacctttagctgatgtattattaggtatggtagtagaacacttgccatcccctgaagtttcccaacaatacagatgtcctaacatttgggatggagacattgaaagcgaagctggtcaaactatgattaataccagccctgacggacctttagctgtaatggtaaccaacgtatctgtagataagcacgctggtgaagttgctaccggtagagtatacggaggtactgtagaacaaggtagtgaagtctacttagtaggaggtcaagcaagatccagagtacagcaagtaggtgttttcttcggtcctgaaagagttcctactgaaaaggttccagctggtaacattgtttacattaccggtgcaaaaggagctaccgctggggaaaccatctgttctcctgaaaacaagattgtagagtttgaaggaatcgaacacatctccgaacctgtagttaccgttgctgtagaagctaaaaacactaaggacttacctaagcttattgaagtgttaagacaaactgcaaaagaagacccaaccattcacgttaacattaacgaagaaaccggtgaacacttagtttcaggtatgggagagcttcacttggaagttattggtgtaagaatcaacaataagggtgtagacatcctcacttccgaacctattgttgtatacagagaaactgttgcaggaaaaactccaaaccctgtagaaggtaaatctccaaacaagcataacagattataccttgaagtttcacctttagacgattcaatatttgaagcattgcaaaacggtgacatcaaggaaggtaaaatcaaagctaaagaagaagctcaacaattcattgaccacggccttgacaaggaagaagctagaagagtatgggatgtttacaacaagtccttattcatcaacatgacccgtggtatccaatacttagatgagatcaaggagcttgtcattgaaggtttcgaatctgcacttgaagaaggtccagttgcaaacgagattgcaatgggaatgaaattcactcttgtagatgcaaagcttcacgaagacgcagttcacagaggacctgctcaaatcttgcctgctatccgtaacgctattaagggtggtatgatgatggctgacccaacattacttgaacctgttcaaaaggtattcattaacaccccaactgactatatgggatctgttactaaggaaatcctaaacagaagaggtcaaatcatcgacatgccaactgaaggtgatatggtaaatgttgaagctaaagtacctgtagctgaaatgtttggttttgctggtgagatcagatctgcaactcaaggcagatgtttatggtctactgaaaactctggattcgaaagattaccaagagaattgcaaggtcaaattgtaagagaaattagacaaagaaaaggattggctcctgaaccattcggtccggaccactacttaggataa

SEQ ID NO: 1805 - DNA, 561 bp, Methanobrevibacter ruminantium
  source 1..561: mol_type = genomic DNA
atggctaaattatttaacaaatgggaccttgatgaagtggaagtggaagacttaggtttaaagagatacatttgccttgatgaaaccattgttcctcataccttaggaagacacgtaaaaagacaatttgcaaaatccaatgtttctatcgtagaaagattaatgaacaaaatcatgagaaccgaaagaaactccggtaaaaagaacaaagcttacaatatcgtaaaggaagctttagaaattatcaatagaagaactaaacaaaaccctgttcaagttttagtaaaggctattgaaaacacctctccacgtgaagaaactacccgtatcaaatacggtggtatcggataccaagttgctgtagacatttctccacaaagaagagtggacctttctttaggattcttaacaagaggaactttacaatccgcattcaaaaacaaaagatctgttgctgaatgtttagcaagtgaaatcatctttgcttctgaagaagatactagaagtttcgctttacagaaaaaagaagaaaaagaaagagttgcaaaagcagcacactaa

SEQ ID NO: 1806 - DNA, 426 bp, Methanobrevibacter ruminantium
  source 1..426: mol_type = genomic DNA
atgccaggactttttgctgcaaaaaagcttaaaaagaatagacaaaattttaaatggaaagacgtagattataaaagaagagcattacgtttagatgtaaaagcagaccctctcgaaggggctcctcaagcaagaggaatcgttattgaaaaagtgggagtagaagctaagcaacctaactccgctatccgtaaatgtattcgtgtacaattaatcaaaaacggtaagcaaattactgcattcgcaccaggtgacggtgcaatcggttttatcgatgagcacgatgaagtaatgattgaaggtatcggcggaccatccggaagatccatgggagacattcctggagttcgttggaaagtaagtaaagtcaacaacgttgccttatctgaaatggtaagtggaaagattgataaacctgtaagataa

SEQ ID NO: 1807 - DNA, 405 bp, Methanobrevibacter ruminantium
  source 1..405: mol_type = genomic DNA
atgagattcattgctctttttgagagtatgactggtgcaatggttaaggattgcattattgacgatgaaaattccaaggttacctttgttgttaaaaacggagatatgggtttagctattgctaaaggcggaactaccgtaactaaagttaaaaaggcagttggaagaggtgtggaaatcattgagtataatgaggacccagaacagttcattaagaacatcttatctccagctgaattgaagtctattaagattgttactaaaaacaatgatgaaaagatagcttttgttaataccgattcttcaaacaaaagaatagcaattggtaaaggcggaatcaacattgaaagagcaaaattattagctaaaagacaacacaacattagcaatattgttttaaaataa

SEQ ID NO: 1808 - DNA, 300 bp, Methanobrevibacter ruminantium
  source 1..300: mol_type = genomic DNA
atgatggacgtagaaagaggaataagagtcgctgtagacacaggagatgtgaccctcggctctgaaaaatctattcaatctttaaaattaggtaaaggtaaacttgcagttgttgcagctaacagtcctaaagaaattttagaagacgttgaatattatgcaaatctctctgaaattcctttcattgtatatgaaggtactagtgtagacttaggttctgtttgtggtaaacctttcactgtagctactttaatcataaacgatccaggagattctactatcttagaagcaatggggtag

SEQ ID NO: 1809 - DNA, 1245 bp, Methanobrevibacter ruminantium
  source 1..1245: mol_type = genomic DNA
atggcaaaatatgacatttcaatgattaaagataataactattataaagaacaatgtgaacatgctgaagaatctctaaacaaaaaatggtattctgaatcaattttaacaatggcaataactcttgaagaattaactgaagaattaatcaaatataccaaaaatatttccgatggaaaattaagtcaaagagataagatatggatattaaaagataatggaatcaccaattacaatatatataactatttacgtgaagcaaacatctcaagaaacaaattagtacatggagaaatacctagaaattatagcaatactttttcaatgtataaaaactttttaaaaattgtattttggtatgatgaaaattatgtaattggaaaacttaatactaaaagtaaactaaaacaatatttaaataaagtttgtgatgattcacatatcctcaatatcatagaacaagaaattaatgatggagcaataactgaaaatcatcaaataattaaaagacataacaaagagttaattgattatgttgaatctttaaatatagaattagaaattaaagaaaaattaataaaagacatatattctggagttacaaaaaataggtcccaaatagaagaaaaaattaagagagaaaagaaagatcctataataggtgttgtaaacatagtaaatacagaaaacatgatgaaatacacaatccaatcaacagatattgacaaagaagtaaaagaaaacatggaaaaactagaaaacaacacacacgaaaacaaacaactacaagaagactacaacaaatacgggccggaatcattcactacagaaacagtaaacatatgcaaaaacgaagaacttagcaaaataacaaaagaagacgaaataatattcaatgcaaacaaatcatataataatcgaaaaaaagatattaatcctaaaataggcattgcaaacataattaatacagaaaccctaatgaaatacacaatccaatcaacagaccttgacaaagaaatcgaagaaaatataggaaaactagaaaacaacacccacgaaaataaacaactacaagaggattacaacaaatacgggccggaatcattcactatagaaacagtaaacatatgcaaaaacgaagaacttagcaaaatattaaaagaagacgaaataatattcaatgcaaacaaatcctataataacaataaaaaagaagaaaccggagaaaaaaatcataccctgtaa

SEQ ID NO: 1810 - DNA, 1755 bp, Methanobrevibacter ruminantium
  source 1..1755: mol_type = genomic DNA
ttgttagggggtattaatttgaataatgaagatattataattggtattgattttggaactacaaattctgcagcttgtatttataaagatgaaaaatttcaaataattcctagtgctatgggttatgattatttccctagtgttgttgcagtaaatgaaaatggtgaattgctagtgggacatcatgcaaaaaagcaaatggcaagtaatgctagtaattctgttgcagaatttaaattaaaaatgggtgaaaatgaaactattaaatttaatggtgaagataaacttcctcaagagattacttcttatgttttaggtcgtataaaaagagatgctgaagcttatttaggtaaacctattaataaagcagttattagcgtacctgctagttttgataatgatgctagaaatgcaactatggaagctggggaaattgctggttttgaagtcgaagctcttgttgatgaacctacagccgcatgtttgacttatagtctcacaaaaaattttttaggcaatattttagtattcgatatgggagggggcactttagacattatcattggagcctttgatggttctgaacttgttccaaaagtcactactggagctagatttggtggtcggaatattactatggctttgcgggattatcttcaaagagactttgaagaacaaaatggattaaagctagaagattatataactcctgaatatgatcctcttattgatttgtataatgctactgaaatcgctaagatagaattatccagcaccaaaactactaatgttcatatagattctattgtaatgactgataaagggcaacgtattaatttggataaaaatgtaaaccggtctgatttaaataagttatctgatgaagttgtaaaaggaagtaaagaaaaagttcttgaggcacttaaggatgctaaattaacaaaagacgatattgactttttggtttttgttggaggccctactaaaatgcctcttattagggaaagcattgaaaaacttttaggcaaatctgctgcagaaggtattgatccaatggtatgcgttgctcaaggggcatccatatataaagggggtccaattacagtaggcactattaattctttaacattgagtgttgtaattaatgaaaaagagtctgatccacttattccaaaaaacactcctcttccagcagaagttactaaagaatatcatactatgcgtgataatcaaacaagtgcaaatattcaaatcgttgagggagaatctattcttgcaaaagaaaatcatacacttcactcttttactttaaggggacttcctccaaggcctaagggcgaagtcgcaatccaagttaaattaaaagttgataaaaatggaataatgggattgtctgcaaaagaactaagcactaataaaaaattatccgcgacattcgattcaagtaaccgtatgtctagtgaagaaattaagaaggcaggtttagataatgagaatcttttaagtgattatgaagaaaagattaaacaaagaaatattattaacgatgctgaggaagttattttcgaaggaaaaaaactaatcgagaactatagtggccatatgttaatatctgataaaaatagagttaacgagaatattgaaaaacttgaaggtttgttagttattccaaaaaattttgaattaattaaattaattactaaagatcttcgaaatttaattgaaaaaattgaatctgaagatttttattattaa

SEQ ID NO: 1811 - DNA, 2052 bp, Methanobrevibacter ruminantium
  source 1..2052: mol_type = genomic DNA
gtggtaaataaaggttctaatgatgattttaattgtaataattgggagcttggccgtatttttgcccgtaagggtaattttactgaagcagatatacgttttgaggctgagttaaatcattctctttctcctaattctcttgttcttgatgaccatggccatcttttgaataggatgggtaaatatcaagatgctattgataaatttagaaatcttttaaatagtgatgaaaattatgttagcagtttatttggtattggtatttcttacattggcttaaataagttgggtgatgctttaaagtattttgaaaaagttaatgaacttgatgaagaacatgcagatgcttggtactactctgctataatttatggtaatccattttatcctaagtatgatcttaacgttgcaaaaattagatataaaaattatcaaaaatcaaaagaatcatatattaatgatcccaagtattttagtaaaccctttgataatttatcttgggaagaattgcatgattactataaatgcaatagcctatttcgtataattgaacaatctctggataaagggattcttgatgaatttttaaacttttctaatgactataaaagattgtattgttttgatgaagagggtttggacaagcaatttgatatttttagattatttgaaaatgatactcctttagcagataaaattgataaattccatgaagataaaaatattgaagacaaatttgaatctgcaggttttgaagaggatttaattgagggtttatcctttaaacttggaatgatgtctattgatgataaaaaaatgttgaatgaacttatggattattctaaaagttcacaattaagtttcaatgatattaatgatttaattcgtgaaaatgttttagacgaggatatgtctctcgatgacttttatgaaaatagggaatatatagttaaaaatcgtattaaaaaaaataattctgaatatgaaaggaatgttgaaaaaagagtaaatactgagttaaaaaaccaaattgcaattaataaaaggttaaatgataatttaattgaaaaggatgaagtgattgaaaagttaaatgataatttaattgaaaaggatgaagtgattgaaaagttaaatgaaaatttaaatgataaagaggaagtgaatcaaaaaatagaagataagttgagaaataattatgaattattatctgatgaaaatataaatcaaccagaacatcgttttgataattatgatttttcaactaaggagattaaatcttctttttctggtttaaaagaatcaatggattcatatttggaagatatggaatcttatttgaatgagtgtcaagatgtaagttctatgaatattctttcaggtattaataatcagtgttatcaagatgatttggaatatattaaaaatgaatgtggtatttccgatgttgatcttaaaactttaaaatctgcttttaaagacttttataatggtaagtttggatctgcttcttataatttcagtcttgaacgtctaagaaaaacaattggaaaaacatctgaactcaaaaaatataggtattttttaaaattaacttcaaagtctcgtgaaaagatacttgaagaagaagactttaattggcttattattaaaaatttaaagttaaaagattataaaaatgaaaaagaaaagaaaattaataaaggaaaaaaacttaaaaaagaaaaatatcctataggatggtttaatttgggcaatatttgctttgattatgcgaattcacaatctgttaaaactactgtaaaagcaggaaacaatgctatggatgcttatgagttagcatatttttgttataaatgtgccgaggatagtatttctaatcaggaagaaaactcaaagtatgagtttaattttaaggacacaaaaaacgaacaagaatttaaaaacaatgttgtgaggatgatttctaattgtgaaattaagattttgcaacaagaaattaagggcgaattaaaaaaattggataaattacaaggaaaatttaattggtga

SEQ ID NO: 1812 - DNA, 1638 bp, Methanobrevibacter ruminantium
  source 1..1638: mol_type = genomic DNA
atggtagatgctgaagcaaaacttgatgcaattaaaaaggttgaaaaagtacttaaaaagaataaaattgactttcctcaaagttatattgatgaattggcaagtgcttatatcagaagagatttgactgataaggaattgaacactttagttcttaaggtcgaagaagcttatgaacgtgctcatattgaagcaggtgaagctgtaggaactgttgcagctcaatctgtaggtgaacctggtactcagatgaccatgcgtacttttcactacgcaggggtagcggaattaaacgtaacattagggttacctaggcttattgaaattgtagatgcaaggaaaaagatttccactcctacaatggacatttacttcgaagatgagtacaagaacgacgaggaattcgtcagaaagttagcaaaccaaatcggtaaaagcacaatcaatgatattttagctgattatgacattgactacttcaattataagattgtcactgtacttgacaatgagaaaatcgagtctagaagacttgatatagatgatattattagtcgtgttcaaaagacattcaaaaagctcgaaatcattaattatggtgacgatgagcttattgaagaagaggctaaagatattgaagatgtcgattctgatgttgaagaaaccgacattgctaaggtcgataaagtggatgaaactggtatggctaaagcggattctgatgctgaggaaactggtatggctaaagctgattctgaagaagatagtgaaactattcaagtttcagatgaagaagtccaagagccttccaacatcaatcttaaaaaatcagatgaaaacattacattaatctttgaacctagcaaaagaaccatcagagaacttagacttctcggtgataaggtccgtgacttgcagattagtggtaccaaaggtatcggtaaagttattattcgtaaggacgatgctgaatgggttcttcataccgaaggttccaaccttggcgcaatctttaagattgaaggtattgacaaggtaagatccactacaaacgacattcacgagatagaagttgttttaggtattgaagcagctcgtaatgctattgtctatgagcttaaccgtaccctatctgaccaaggtttgactgtagacatcaggcacatcatgttggttgcagacatgatgacttccgaaggaactgtcaagtccattggtagacatggtatcagtggtgagaaatcaagtgttcttgctcgtgctgcattcgaagaaaccggtaagcacttgcttcacgcaagtatcagaggagaagttgatgatctcactggaatcattgaaaacattattataggtcaacctatacctcttggtacaggttctgtaagtgttacaatgaaaccagatgcatatcctattactgcaggtataactaaacgtggtaaaggtaagtctggtggtagtgcttctgaatctaaggaggttaatagtggtattgctaaaggcggtaaaggtaagtctggtggtagtgcttctgaatctaaggaggttaatagtggtattgctaaaggcggtaaaggtaagtctggtggtagtgcttctgaatctaaggaggttaatagtggtattactccctga

SEQ ID NO: 1813 - DNA, 2781 bp, Methanobrevibacter ruminantium
  source 1..2781: mol_type = genomic DNA
atgtcaccagatcaaattagggaaatgtctgttgtaaacatcaccagaccggatacctatgatgaagacggatatccaattgaaaatggtttgatggactctcgcttaggagttattgacccaagtttaaaatgcagaacttgcggtgagaaaggaggagagtgccaaggccactttggtatgattgaccttgcaagacctgtaattcatgtaggtttcggtgatgacattcataagatattacgttctacctgtaatgaatgtggacgtgtcctattggatgaagaagagattgaagagtatactgaaaagttaaatgagcttcaagaagctggagaaagcacagaagatctcataaaagaagtttacaaaatctgtaaggctaaaaaggcaaaggatgtctgccctcattgtggtgctgaacaggaagacattaaaatcgttaagccaatcggcattattgaagtacgtaaggaatacgatgaaaacggagaattgcttacagatgcaaatggaaatcctgtaacaacagattatgatttaacagcatctgaagtaagagaaaagttagagcgcattccagatgaagacgcttatgtattgggagtaaaccctgaagttgcacgtcctgaatggatggttcttactgttcttccagttcctcctgtaactgtaaggcctagtattacccttgatactggagaacgttccgaagacgatttaacccataagcttgtagatattttaagaatcaatcaaaggcttattgaaaacatggacgctggagctccacagcttattgtagaggacctctggcagttattgcaataccatgtaacaacctacttcgacaatgaggcaagcggagtacctcctgcaaggcacagaagcggaaggccacttaagaccttggctcaaaggctcaaaggtaaggaaggaagattcagaagcaacctttccggtaagcgtgtaaacttctcagcacgtactgtaatctcccctgaccctaacatcagtattaacgaagtaggtgttcctgaaatgattgcaaaagaggtaactgtacctacctatgtaaacgaatggaacattgaagatttaagggaagctatcctaaatggtcctgatgctcatcctggtgcaaattatgtaagaaaatacaatgacagaatcaaagattacaataaggtcagagtattggattccaataaggaaaccgtagctgaaatgttaacttgcggtgacattgtaatgagacatcttaaggatggagacattgttttattcaaccgtcagccttcccttcaccgtatgagtatgatggcccacgaagtaagggttcttccatacaagacctttagacttaacctttgtgtatgtcctccatacaatgcagactttgacggagacgaaatgaacatgcacgtattccagactgacgagtcccgtgcagaagctaaatcccttatgagagtacaggaacacattttatctcctcgtttcggaggacctattatcggtgctattcacgaccacattagtggagcatatcttttaacccgtgacggattcaccgtacctgaagatgacgctttccaaatgataagaaaatcccacttattgaaatgcccttatgatgaatatcttaaaagggatcttgatgagaaggaatataaacagcaaatcaaggaatacaatgaaaagctcaaacgtaaacacagagattggactggaaaagaattattcagcttactacttccaagcacccttaacatgaattacagagctgaaatctgtagaaaatgtgaggaatgtatggcagaagcttgtgaatacgattcttatgtggttattaaggacggtcaattgacccacggtgcaatagacgaagctgcatatggttctttctcaggtaaaatcttggataatatcgttaaggaatatggtccggcatacgctaaggaattccttgaccgttccactgaccttgctatctgtggaatcatgaaaacaggtattaccacaagtaccaacgatgaggaaatccctgaagaggctattgaggtaattgacgctcacttggataatgctgaacaaaaggtagataaattgattgaaacctatgagatgggcgagcttcaaccattgcctggacgtagtgcagaggaaaccctggaaatgcgtattgtgcaagttctaggggaagctagggacgcagcaggggacattgctgcaggttacctcactatgggtaagcaatccccagacgattcctatgaccatgtgatggctgtggaaaaccactctgtagttatggcaaagaccggtgcaagggcatccatgttgaaccttgctcagattaccgcttgtgtagggcagcaatctgttcgtggtggacgtattacaagaggatatcttgcaagaccgcttcctcactttagaaagcacgaattaggggctagagctaaaggatttgtacattccagctacaaagaaggtcttgaccctgtagaattcttcttccacgctatgggtggaagggaaggtcttgtagatacagcgattcgtacagcacaatccggttatatgcaaagaagacttgtaaacgcacttgaagacttgaatgtaagatcagacggattggttacagacaataagaatcaggttatccaaaccgtatttggtgaggatggaatagacccagcaaaaagtgactttggtaaagtggctaacttagacaagcttattgacgaaatgagaattaaagatgagggtaaataa

SEQ ID NO: 1814 - DNA, 1812 bp, Methanobrevibacter ruminantium
  source 1..1812: mol_type = genomic DNA
atggttaaggctaaaatttatattaacggtaaacttacaggaacttgtgatgaacctgaagagtttgttaaggaaatgcgcgctagaagaagatctggcgagattcacaatgaaatgaacattacctattatgatgaaaaccatgagatttatattttcactgaccctggaagggcaagaagacctttgattcttgttgaaaaaggtgagccattgcttaaagatgaacacattgaagcaattacaaagggagaattgaaatgggacaatctgtttgaattaggtcttttggaatatttggatgctgaagaggaagagaattcatatattgcaatgaacttaagccaattgaatgaagaccacacccacttggagattgacccatctaccatgctcggtatatgtgctggaattattccattttcagaccacaactcatctcctaggaacacaatggaagcagggatgacaaaacaggcattaggattatacgtatccaactacgcattgcgtaccgatacccgtggtcacttattgcaccaccctcaaactccactggtaaagacaagaatcattgatgcaatcaattatgatgacaggccatccggacagaacctggttgtagctcttatgtcttacgaaggatataacatggaagacgcaatgattctcaacaaatcctctctcgaaaggggaatgggaagatccagcttcttcaggtcctatgaggcatctgaaagaaggtatcctggtggacaagaggacaagtttgaaagacctgaaaaaggagttaaaggttacagatccgaagaagcttataaaaaccttgacgaagacggaatcgtaaaccctgaatcccatgttgaatcaggtgatgtattaatcggtaagacttcacctccaaggttccttggtgaaattgacgagttcggtaccgttgcagagaaaagaagagagacttctgtcactgtaaggcatggtgaaaagggtattgtagatgcagttctccttaccgaaaccgttgaagggagcaaattaactaaaataagagtaagagacacaagacaacctgaattcggtgacaagttcgcatcaagacacggtcagaaaggggttgtaggtctcatattatctcaagatgacattccatttacagaagacggagtcgttccggatatcattgtaaatcctcacgctattccatcaaggatgtctgtaggacaggtattggaaatggttgcaggtaaggccggttgtatggaaggtcaccgtatggacggtactccattcaatgacaatgttgaaggagaaatcaagagagcccttcatgacaacggattcgaatctgcaggctgtgaatcattatacaatggtgtaaccggagaacgtatcgaagctgaaatcttcgtcggcgttgcatattaccaaaaattgcaccacatgacaaccgataaggtttatgcccgttcaaccggacctgttcaagtgcttacacgtcagcctactgaaggtagagctcgtgaaggtggtctcaggtttggtgagatggaaagagactgtcttattgcacacggtgcagctcttgcacttaaggaaaggctcttggatgagtctgacaagtatgaggcagttgtatgtaatgaatgtggaatgttagcagtatatgataagaataagaacaagatgtactgtcctatatgtggagacagtgaaacttatcctgttgagatttcatatgcatttaaattgttgttagatgaacttaaaagtttatgtattttccctaaattaattcttggggacaaagcttaa

SEQ ID NO: 1815 - DNA, 1563 bp, Methanobrevibacter ruminantium
  source 1..1563: mol_type = genomic DNA
atgaataatgagacatggggtttggtagactcattctttgataagtatgatatcgtagatcatcatatcaaatcatataacgattttgtcgaaaatcgtatacagaatattattgacataactgaacctatcactattgaaaacgaaaagggaaactatactcttagaaccggcaagcttaccattgaaaagccattcaccaaggaagcggacggttctaaaagcatgatttaccctactgaagcaagacttagaaacttaaactactctgctcacatgtatttggaaatggcattgcatgacaataacagcgatgaagaggaagagcttgaaaacgtctacattggcgaattgcctctcatgctcaagtccagcatctgccacttgcatggccttagcgatgaggagcttgtaaaaagaggggaagaccctaaggatccaggaggatacttcattgtaaacggttccgaaagggctgtcgtaacaatggaagagattgctccaaacaagatcatccttgagagaatcgatgagattgaagatagacatgcaaaggcaatcgtaacctctatcaaaagcggttttagagcaagaatcactctcgaatacaaaaagccacgtaaaagcggcgtatttttaagaatctcattcccatatgttccaggagaaattccacttgtaatcttgcttagggcattgggattatccacagacggagagattatctctaaaatatccgatgacttcaacttccaaatgtacattgcagacgacttgcaggtttcagagaaggacttgaaattggattcagatttattattaagcttatccaacgaagaaagagacgaatatcttcaaaaggcagctatcaaatacataggtaatagggtagctaaaggaatgactgaagaatacagaataaaacgtgcagaagacgtaattgacagatacttgctcccacatatgggaatcgaatctgacaaacgttatgacaaggctatatacttagctgaaatgactgaaatgttgcttcaagtaattgaaggacaaagagagcctcacgacaaggaccactataccaacaaaaggttaagggtctccggtgacttgacggaagacttgttcagggtagcattctcctcccttacaagagacatgagctatcggcttgaaagaagcctctccagaggaaaagagctttcaatcaaacaggctgttcgttcagacgtattgactgaaaacatcaagcacgcaattgctacaggtaattgggtcggcggaagagcaggtgtaagccagctattggatagggtaagttacatggcaacactttcccaccttagaagggttgtatctcctcttacaagaagccaacctcactttgaagcaagggacttgcacccaacccagttcggtaagatttgccctaacgaaactccagagggacctaactgtggtttggtaaagaacttggcccttatgtgtaagatttcagaaggattcgatccggaagacatagtcaacatcataagcactatggacaatgtggatatgatagattaa

SEQ ID NO: 1816 - DNA, 249 bp, Methanobrevibacter ruminantium
  source 1..249: mol_type = genomic DNA
ttgaaatttgatattttagaacataatgctgttccaaagcatgaaattttaacaaaatctgaaattaaaaagatttttagtaaattagattatgatgttagtcaacttccaaaaattaaaatagatgatcctgtatctaaggccattggagctaaagaaggggacgttttaaaaattactcgtgaaagtcaaaccgcaggtacttttattacctataggttagttgatggctttactgctaataaatag

SEQ ID NO: 1817 - DNA, 915 bp, Methanobrevibacter ruminantium
  source 1..915: mol_type = genomic DNA
atgactaacgaaatcattaaagaaaatacagaaaagattgaagaaatcttaaacggtatcgaagaagcaatggaaaacgttaaggcaaaaagcccacttacccactgtatcacaaattttgtgactataaatgattgtgccaatgcggcattggcaattggcggatcacctatcatgacaaatgacagtcaggaagttgctgaaattggaaatatagcaagcgctattgtaataaacattggacaagtcagccaacttcagatcaattcaatcaaaaaaagctgcgaacatgcaaataaaacaaatacccctattgtctttgaccctgtaggagctggagtaagcaatatcagaaataccatcacaaaggaaatggtagagttctatgaacttacagcaatcagaggaaacatgtctgaaatcaaggcaatagttaatcttattgaccttgaaattaaagacaatgaaaagaaagactctgctggaaaaggtgttgatgtagcagaaagcgatataattacaagagacaacctttacacaaacggactgattgtaagagaacttgcaaaggaactggaaacagttgttatggcaagcggaccaatcgacatcatctcagatggagaatataccttcgcacttgaaaacggagatgcaatgatgcctcttattacaggcagcggatgtatgttaagcacaatcattggaacatatataggtgcaaatgagccattgattggagcaataacagcaagcgctttaatggcaattgcaggagaaaacgccgcagaagcagtcaaaaaagacaatttaggtccaggaagctttagaaatttcttgattgataacttatacaaagtaacagcagatgacatttctaaaagagctaatttgtttgaaatcgatttaaactaa

SEQ ID NO: 1818 - DNA, 660 bp, Methanobrevibacter ruminantium
  source 1..660: mol_type = genomic DNA
atgtttaaagcaatgaaaaaagaggataaaatgaacaaaagcagtattgattattcagtttatttagttacagaccacagaggtaaaaccgatgaggaaatactaaatataattgaacaagcaataaaaggaggaacaagtgttgtccaaattcgtgaaaagactgcctccactaaagatttctacaatctagcactgaaggcaaaggaaataacagaaaaatacaatgttcctttaatagtcaacgacagaatcgacatagcccttgcagttaaaagcgatggcgttcatataggacaagacgacatgcctgcaaaggtagcaagagaaataattggagaagagatgattttaggtgtttcagcttctacagtagaagaagcaatgaaagcagaatctgatggggctgattatattggctctggagcagttttcccaactgcaacaaaagatgatgctgattccgtttcaaaagaagaattaaaagagattgttaattcaaccagcatacctgtagttgcaataggcggaataacaatagaaaatgcagaatcattaaaggacgctgaaatagatggattttctgtagtcagtgcaataatgaatgcagatgaccctaaaaaagcatctgaaatactaaaagagatttataatagataa

SEQ ID NO: 1819 - DNA, 1233 bp, Methanobrevibacter ruminantium
  source 1..1233: mol_type = genomic DNA
atggctaagttcaatactattgatgattttgatgtaaatggaaagactgtcctaatgagaattgacattaattctcctgtagaccctaattctgggattattttagatgacactcgtatgaagatccatgctgagaccattaaggaattatccttgaaaggggctaaaacagttctattggctcatcaaagtcgtccaggtaaaaatgactttactacattcaagcaacatgctgaagttttatccaaagcggtgggaatggatgtaaaatatgtggattctatcttctcatccactgcaaaagaagctatcttggctttggagcctggacagatattgcttttggaaaatgtaagattctattctgaagagcaattgaagcgttctccagaggaggaagccacatctgttcttgtcaagtccttaagtcctttgattgattatttcataaacgatgcatttgcagcggcccataggtctcaaacctctttggttgggtttacaactgtagttccttctgcggcaggcagagtcatggagaaggagctaactgtaattggaaatgctttagagaatgtgcagcacccttgtgtctttgcattggggggaatgaaagctgacgattccattatggttacagagaatgtattggaaaacggcactgcagattatgttcttgtttcagggcttgttgcaaacatatttatttgggcagcaggctatgacatcaaatccactaatgaaaacttcattgaggctagaggatacttggatatggttgataagtgcagggatcttattaaaaggttcccaggcaagatcatttatcctcaagacgttgcagttagcgttttaggagatagggctgatgtaaccattgaaaacattccagacgcttctatttttgatattggcagacaatcattgattgaatattctaagattattagagaagctaaaacaatatttgcaaatggtcctgctggtgtatttgaagatcctaagtttgcaatcggtacagaggatattattaatgcaatagcatcttccgaaggattttcaataattggtggaggacatattgcagcagcttgtgttaatttaggctatggcgataagatggatcatattagtagtggtggaggtgcttctattaatatgttagcaggtaagccgttagctgctgttcaagctttagaagcttctgcagagttatttaataataaagaataa

SEQ ID NO: 1820 - DNA, 675 bp, Methanobrevibacter ruminantium
  source 1..675: mol_type = genomic DNA
ttgagtcttaagacacctgttgttatattaaattttaaaacttatttggaatccagcggtcaaaaggcattggatttggcaaatgctttagaaagcgctggagaagaatctggaattactatggttgctgtaccacaggccattgatatctataggattaaagaggaaacaagcattcctgttttagctcaacatattgatgcagtttcccctggaggccatactggaagcaacttattcgaaagctttgtggcaaatggtgttgacggaaccttattgaatcactctgaatgcagaatgactcttgcagatattgcagaggtcgttcaaaaaacaaagggagctgatttaatctcatgtgtttgcacaaacaatattgaaacaagtatggcagctgcaactcttgctccagattttgttgctgtagagccacctgaacttattggaactggaatacctgtttctaaggcagaccctgaagttgtagaaggaagcgtatctaaagtaaaggctattaataaggatgttcaggtcttatgcggtgctggaatctccactggtgaggatatggctgcagctattgatttaggtgctgaaggtgtgctattggcttctggaattataaaagcggaaaatcctaaagatgccttattggatttggtaagtaagatttag

SEQ ID NO: 1821 - DNA, 915 bp, Methanobrevibacter ruminantium
  source 1..915: mol_type = genomic DNA
atgacatttactaaagaagaacaagcaaaactagaatacagtggatacagattcgtcggtgagcacgggcatgctgcggctaaaacctgtcattggactagaaaaagcataaaaaatgaaggagtgtgctataaggaacaattctatggagtaaaatcacatagatgccttcaaatgtctcctgccgtaccattctgccaccaaaaatgttccttctgttggagagacctatcccaaacccgtacagaatgggaaggagaatatgatgatcctaaaacaatcatagaaggtgcaattaaggcacagaacaatctcttatgtggttttggaggaaacaagaaagcagataggaaaaagcttgaagaaagcaaaaggcctacaaatgcagcaatctcacttgcaggagagcctacgctataccctgaaatagacgaacttataggagagttccacagacaggactttaccactttccttgtaagcaatggaatgtactgggaaaagttgggaagccttgaaaacgaacctacacagctatatgtttcattggacgcacctaatgagaaagtctataatgagctttgcaaccctcaaatagatgatggttggggcaaactaaacaaaacactagaactgatgcctagctttaagaacaatacagcaattagaatcacctcagtcaagggcaaaaacatgttcaataccgatgaatatgccgaactcatcaataaggcagaccctacctatgttgaagtaaaggcttatatgtttgtagggtcttccagaaaacgattaagtatggacaatatgcctagattccatgaggtcaatgattttgctaaagagatagctgataagacaggtagggaattaaccaaatattctgaagccagcagagttgttttattggaataa

SEQ ID NO: 1822 - DNA, 1125 bp, Methanobrevibacter ruminantium
  source 1..1125: mol_type = genomic DNA
atgaagttttttgaacatagcgcaaaaaaagtatttgaaagtgaaggtattaaaattttagaggggcatgtggtatactcccctgaagaggcaatggaagtggctaccgaattcggcaggcctatcgtattgaaatcccaagtcttggtcggtggaagaggcaaggctggaggtattaagtttgctgataaccctggtgaagctcttgaaattgctaatgaattattgaaacttgaaataaaaggggaaaaggttaaacacttgctcattgaagagaaggcaaatatcaaaaaggaattcttcttaagcgtttccaatgacagagccaacagaaggcctatcatcatggcaagtgctgaaggtggagttgaaattgaagaattggcaaagacatcacctgaaaagatcatcagatataatgtaaatcctttaaaggagttcttgccttatgaggcacgtgaaatagcccgaaagatgggtgtaggctctgaattgatttctcctcttggaagcatcatttggaagctttataatgtttatgataaatatgatgcagaagtggctgaaatcaaccctctcattttaactgacgacggcttgattgctgcagatgcaaagcttgaaatagagaatgacgctcttttccgtcatcaggatttagtaaagcaaaacagattcaagcaaaaggactttgcttttgtaaagcttgatggagacattgctgttatcggaaacggtgcagggctcactttaaccggtatggatatggttaccttattcggaggaaagccagcaactttcttggatatcggtggtggagcatctgaagagactatcaataaggctttaagtttggttttaaactatcctcctgtaaaagtagtgttcttaaatgttttaggaggtattactagagcagatgatgttgcaagaggcgtaattgcagcattggaagctaataagtgggatgtaaatattgtaatcagacttactggtactaatgaagaggaaggtcaaagactctttgatgaggcaggcattccttatgagatctcattggaagaagctgctaaaaaggcagttgaaatgtgcaatgagataaaagcaaaagaagctggcaaatag

SEQ ID NO: 1823 - DNA, 582 bp, Methanobrevibacter ruminantium
  source 1..582: mol_type = genomic DNA
atgtttggaaagtttaaagtaaaaaaatatttttctgaattaaataaagcatattattctaatgattttaaaaaagccattaagtatgcagatattattttagaaatggataaaaataatttagaagtattaaaatacaaatacaactctttagctaatatgggagactatgaaaatgctttagtgtgtatagatgaaataattactttggaaaaatcttgtatggctttattaaacaaaggaacaacattatgttatatgaatcgcattgaagaaggttttaagcttcttgattatgttattgataattgtgaagaatatgaggcagcattcataaataaatgcaatttcttttttatgcttgaagaatttgatgaggctctatctttatcagataaaatattaaatatgcatcctgattgttcaaatgcttatgacactaaatcatttatttattataaaagagaagaatatgattcatctttaatttacgcaaataaagcattagaaaaaaatccaaataataatattgcattagagaggaaggaaagacttttatctatattaaattcaaaggattaa

SEQ ID NO: 1824 - DNA, 546 bp, Methanobrevibacter ruminantium
  source 1..546: mol_type = genomic DNA
atgagaactgaagttcgtatagctggttttggaggtcaaggagttatcatggcaggaatcattatcggaaaggcggcatccctttatgataatattaatgctgtacagacccagtcctatggtcctgaagctcgtggaggcgcttcaagaactgaaatcgttgtaagcgatgaagagattgactatcctaaagtgacaagtccagatattcttgtagctatgtcccatgaagccctaatcaaatatatgggtgacttgaaggacgaaggtgttctaatcattgaccctgacatgatcgttgaagaggaaattgttgattttgtaaaagagcacaagatcaagctctacagagccccagctactaagacagcaacagaagatgttggccttaggattgtggcaaatattgtgatgataggtgctattgtaaaggtcactaatgtggtttctgttgatgctgctaaaaaagctattttggatagtgtgccaaaaggcacagaggataaaaatattcaagcattcgaagcagggtatgctttaatttaa

SEQ ID NO: 1825 - DNA, 864 bp, Methanobrevibacter ruminantium
  source 1..864: mol_type = genomic DNA
atggtagaagtaaaagaaagcccatataagaagtatctaagggaagatagattgccacacatattttgtccaggctgtggaaacggtacagtgatgagcgcctttttaaaaggccttgaaggaactgacattgactttgaaaatattgcaatggtttccggtatcggatgctcttcaaggattccaggttatgtcaagtgcgattcattgcacaccacccacggaagggcattaagctttgcaactggtttaaaggttggaaatcctgatttggatgttgtagtcttttccggagacggggattgcgcttccattggaggaaaccacttgattcatgctgcaagaagaaacatcaatcttacagttatctgcattaacaataatatttatggtatgactggaggtcagataagtcctacttcccctaaaggaagctttggaaccactgcaccttacggctcaagggatatgccttttaacttggccgagctggtttcagctgctggcgcaagctatgttgcaagatggaccacaacccatccgttacagctttcaaaggcaattcaaaagggtctggagaacaatggattctcattcattgaagtggtatcccaatgtccgacctatttcggccgtaagaacaagcttaaaactccattgtccatgttccaatacattaaggaaaacagcgtaaacaaaagaagagcagaaaagatggaagaagatgaattggaaggaaagatcattgtaggcgagtttgcaaacaagcctcatgatgaattgaccgatagcattaaaaaattgattgaagagaattccaatatgccactggctatcaaatctgcatttgaggagttggattaa

SEQ ID NO: 1826 - DNA, 1131 bp, Methanobrevibacter ruminantium
  source 1..1131: mol_type = genomic DNA
atggctgaagaacgttttgtacaaggaaacgaagcttgtgcattaggtgcaattgcagctaattgcagattctttgcaggttatccaattactccatctactgaaattgctgaacaaatgtctatcttgcttccaaaatatggaggcgcctttgttcaaatggaagatgaaattgcatcagttggtgccatcataggtgctagctggagtggccttaaggctatgacagctacctctggtcctggaatttcattgatgcaggaaaacataggctacggcttcattacagaaacccctatcgttataattaacgttcaaagaggttccccatctaccggacagcctacaatgtctgctcaagcggacatgatgcaagttcgctggggttcccatggggattatgagccaatcgctcttgctccttcatctgtacaggaattctttgactttacaatcaaggctttcaacttagctgaagagtacagggttcctgtaacagttcttgcagatgaggttgtaggccatatgagagaaaagctcatcattccagatgagattgaaattgttaaaaggacaagacctgaaaagccagatggccaatacttgccttttgatgctccaatggacggaaccactcctatgcctgcattcggtgacggattcaacatacatgtcacaggccttacccacgatgagagaggatatccagacaccaatgatcctgaatcccataccaaattggttgaaaggctatgcaataaggtcattatgaacagaaaggacatatgttccgttaagaaagagcaatgtgatgatgctgatattgtgattgtatcctgcggctctccatatcgttccgttggcgctgcaatgaaaaaagcaagggaagaaggaattaaggtaggatctcttaagatagatactccatggcctttcccagaggaagaaattgcagagattgccaagactgcaagcgacatcatcgttccggaaatgaatttgggacagatggttcatgaggttgaaagagctgctaaaggagaggctaatgttcatttaatcggcaagattggaggaatcctccataagcctgaagagatattggctaaaattaaggagattagcggatag

SEQ ID NO: 1827 - DNA, 207 bp, Methanobrevibacter ruminantium
  source 1..207: mol_type = genomic DNA
atgattattatagattcaaagctttgtaaaggatgcgatatttgcatagcaacctgtcctaagaaggtctattctaaatctgacaaggtaaacaccaaaaacgtttatcttcctttccctgaacatgaggaaggatgcaccaaatgcggattatgcgaattgtcatgtcctgatcaagctatttatgttgaaaaagaggtggaataa

SEQ ID NO: 1828 - DNA, 129 bp, Methanobrevibacter ruminantium
  source 1..129: mol_type = genomic DNA
atggatttgaatgatttaaataaaaataatttaaaacagaaaaaaaatcaccaagttttaaaagatttgaagataaataatttaattattatctttttagacttaacgcaatacataaataataattaa

SEQ ID NO: 1829 - DNA, 372 bp, Methanobrevibacter ruminantium
  source 1..372: mol_type = genomic DNA
atgggtgcaaaagaaaaatatttctctaatatttcaaatagggaaagagctatatttgaaggagccataagcatgggggccttattccatcaatttgtaggaactcccttcaatagaaagacggctgaaagcctagaaaaggctatggaagaatcttttactttacagccttgcattgataaggtagaggtctctatagacttggatagattggataaggctatgacagagtttgaatacacttctctaagtggagacatgttggatgttaagatctattcaaaagtggatgatgtcttggctgtaattagaatagagtttattgaagagcttaattatcctttaatgtatgtggaagatattattgaataa

SEQ ID NO: 1830 - DNA, 762 bp, Methanobrevibacter ruminantium
  source 1..762: mol_type = genomic DNA
atggatttgaaaaatataaaaattgctacaatcattacaattattgcatttataatcattggcctatatgccttgactgaagtaaactacttctcttacaagaatgttgtggaacatgatgatattaatgcgtctgtagtaattattccatccattggggtttttgagaagataaacaatgtttccatctctcaaggggtttatattgatcagatgtctaatcttccaaccaagggagatgtggttctatttggacataggacattgcagggatctcctttcttgagattggacagtttgaagaagggagatattgtaactctcgaatggcctgagataggtgagataaactatacagtcaaatcttctaagatagttccagccagctatggtctgtatttaaatgaaagccatatggaaggggatattcacaatcaggaaatttatctaatcacttgccatcctcttggttcttcagctgaaaggcttattgttgttggagaattgaattctacaagtctaatcaatgaaactgctttggaggaaaatccacatgcatcatgggcatggtatataactttaggattctttgctttaggattgattgtttcatttttatctcctgaagaggaaaggaagattattttagcagttgtgattataataactattattttagtttatttctgcttattcccaatttcttctcagatttgggcagatcaattaggatggctgaatagtatgatgggtgttaattaa

SEQ ID NO: 1831 - DNA, 1932 bp, Methanobrevibacter ruminantium
  source 1..1932: mol_type = genomic DNA
atgtctaatcgatttaattcctttaagaaaggaatttctaaggttaaaaatatatctccaaaaattaaaggaaattcaaatcgaaagaagaataattctaagaataaaaggtctaaatcaactattgaatatatagttcctgaaaattctccattacgtaagaattcgactgatttagactctgattctggatttttcaattctgattatttggatgatttgcctgagggtgtgtcttatactcgtccagttggtgatttgtctgaaggggtgacttatactcatcctgcggatgactcatatgatttggatggagtcgataaaagatatgcaaaatatatttttggagatgatttaagtgatagaaactttaaggatcccagagattcgagctatatggaggatttagataataatgatggtttaaataatgaatttggaagaaataggaattttcataaaagtaggaattatgcagataaacgctttaacaatgatttagataataatggtgaaaattataaaaatgattcttatttggatgaaagttattctgatttttcttttaaaaaggatttggataatggctatttgaatggtgatgcttatttaagtaattctgatttttctgattttgataaagattatttagatgattctaattttaagagcagtcactcaaagaaagcttcccttaaatccaatggtattaaaagcaaattgcttaattttaaagatggccttttgaataaggatgacaattccaagagccgctttggaaaaattgtttttatcttgatatttttggttttggcatcatctatgttttatttctttgtataccaaccatttcaagatgaattaaatttggaaaagaatgcaaagctgaatgaattaaatactctttataaaggtccattggaagctcatgagaatgcatatattttaaaaaatcaaatagaatctgaaaatgatataaatgaactaaagaagattgatattttaatgtatgcgacgaaggattggagaacttatcataaatccaaaatagtctcttccaaggataattttggaagggtcatgctggcttatggggatgaaaacaaaaaccttattatgtctgtcaaggatgcaaatgagtttgttggggataatgacggaagagtcctatcaaacattcaatttgaaaaggtagacactataatcgttcctgtttccatttcacggcttcaggcaagtgcagggcttatttcggtaggttcaatcgttgatatctattccctaaaggacaattattcctatggtggtgacgaggattccaattttgagtcttcatcagcccttaacgaatcttcagaagggcttgtagaaaaccagtctgaggataacgaggatttgggtggtggcgaagatatttctaaaatgcctgtcgattcaaatcccgaagaagattctggtttttcacaaaatggagaaccggatgtaagcggagctactgtattggccattttgcgctctaaagatagcggtgtaatagacagttcaataagcaagtccaatactttagttgagggaaaccttacggatccttatgaaaataccagttcatatacaaatgatgttgaagagcttcttaaagcctctgtatttaattcttatgatgataataaggctttagagtattatttgaatagttatggcataaagttatctaattatgagaggatgtcaaatctggctgatttggatagtgaatatttggttcttttagaagttccacgttccgatgtcagttttgtcataaacaatatggataatcttattctgactattccaacagaatttgctccgaattgggtaattggtgaattgaatgagacttattatgataatatttacaattatgatttaaattcatcctcttttatatga

SEQ ID NO: 1832 - DNA, 945 bp, Methanobrevibacter ruminantium
  source 1..945: mol_type = genomic DNA
atgagattaaaaagtgttggaatgggatattttttagcagtatctgatgctatttcaattttaaacatagcatttggattcttagctattttaatggttattgataacaatttaatatatgcaagtctatgtatccttcttgcagttgtttttgactctgtagatggatgggtttctagaaaacttaatcgtgtggatccgttaggatttggtatgaatatagattctttagcagacattgtatcctttggtgcagctcctatggctatattatactccataggttcaagcatttcatcttgggccggatatctgatagctattgtatgtatgattactttagtttgcggtcttttaaggctgaccagatacaatgtgatagctgataaaatcaattataggggatttgtaggccttccaattccggcaacagccataatattggttacctattatttaagcggattatttaatattgctgttgcagctgtcttgatgttgcttgcttcatttttaatgataagcacaatcagatatcctaaagtggataactattatcttattggtcttggagcgctaatgatcttattgttgattttgccaatacaagtatttattggacctattaaccttcctgctttagtattgtttgttttagcattggtttacatgttcatgacattcctagagttctttattgatgatgacatgacatttgatagggataaggccagtgataaggtaagcaatgttagggagattaccgaaagcaaggtcagcagttctgttactaatgtaaaggacgtctttaagaacatgaaagataccatcaatcaaatctccaatgaggatttggatgttggtcttaaagaagatgctgaagaggaaaaggaaaaagaagaaaaagaagttaaagaagcagaaatagtggaagaagtagaataa

SEQ ID NO: 1833 - DNA, 852 bp, Methanobrevibacter ruminantium
  source 1..852: mol_type = genomic DNA
atgattgaagagagaatacagattcttagaagagctgctcaaatctccaccgaagatcgggaggagaaggtatggtgtgtcatagcgggaaatgacagattagtcgatgatatagcctacaatgcaatcacccgccaaggacagagtccagattatcctttaggagaaaatgtttcaattacttcaaagcattcatataagaagttcgattgcatcatgcttaagggagaaaccttaaaaataagggaattgaagaataaaacccatgaagaagggggagcctctttgcaaatcaccacaacatcccttgaaaggcagccaaacttattggttgtaataggtcccgaagagagcatgaaacgttttgttggtcagacaagcagacaagaggttaagattgatatcttgctagaagatcacaccacaggatttatcaaatccgaaccgaagtcaacaaagattccaaagttcttaaaaaactttttcaatccaatcatagaatcaagcgaagtcatcctatctgttctattgatttcagttaaggatgaaggagatattgataaggtaaaaggaatcagccaagaaaacagcttatttggaattgatttaaaatcaacaattcaagataaggaaatagctaggctgaaagaaagaaaagcaagagaaaaggctaaaaaagaggaagctgaaaagaaagaaaaagaagaaaaagaaaaagccaaaaaagaatccgaaaagaaagaaaaagaagaaaaagaaaaagctaaaaaagaagaaagtaaagaagataaaaaagaaattgaaaaaggagaaactaaagaagataaaaaagaagaagataaaaaagattaa

SEQ ID NO: 1834 - DNA, 1071 bp, Methanobrevibacter ruminantium
  source 1..1071: mol_type = genomic DNA
ttgagtatttttggaaatgaagacgctattgaaattgaaccaactagagtcgtaaaaaatagtttaggtattgacttaggtaccttaaacactgtaattgcaaaaccatctggagacaaatttgacttatatcaaattccttcagtagttgcagtcaaaagagatgatcctactgctgttcttgcagttggagaagaagctaaaaaaatgttaggaagaactcctgaagacatcattgctgtaaggccacttaaaaaaggtgtaattgaaaacattgcacaggcacaagccttgctcattagagcaatggaaataggcattaacgaaggagaaactgtagaaagaatagtaatcggaattcctggagactcttctgaagttgaaaagaatgctgcagaagaaatcggtagaaaagcaggtgctgaatatgttttagtcatcagcgaaggattggctgcagctatcggtgcaggattacctattgcagaacctatgggaaccatggttttagacattggagcaggatccaccgacatcgttgtcatttcccttggaggaatcaatgacatagaaacagtaagatgcggaggagacgacatcgacaatagaatcgtcgaattgattgaagaaaaatacaatgttgcaataagcatccacgatgcagaagccgctaaaatcgaagtgggtatggtacactgcagtgaagagtttgaaaacttgaattatgaagtaatcggaaaatccttagaaaccaacagacctaaaaaggtcgttatcgattccatgctagttgcagatgcagctgaaccaatcattaaacaagtaatcggcggattaaacctcatcttagaaagattaccagctgaattaatgatgggaatctataacaacaccgttgcagtcggaggaagttccagattaagaggaatcaaagaaagaatctttgatgaatctgaaatccctattaaaatttccgatgacccaatgacagtagtagctaaaggaactgctattgttgctgccgaaccattagctttagaacctgaagtacgtttaaaagctatgaaataa

SEQ ID NO: 1835 - DNA, 240 bp, Methanobrevibacter ruminantium
  source 1..240: mol_type = genomic DNA
atggatatgaaaacaatttatttaagtgaagaagtctataacagattatctcttttggctttagaatctgaaaattataatgatcttattgctagattgatagatgtttatgaaaatagctattttgatgaattgagtgatgctgaagctgatttttataatgaaaggattaaatattttgaaaatggggattatgaaggcattagaaaggttgatttaaaattctttggaaaaaactaa

SEQ ID NO: 1836 - DNA, 660 bp, Methanobrevibacter ruminantium
  source 1..660: mol_type = genomic DNA
atgaacacactaggattagatgaagcaggtagaggtcccgttcttggaccaatggtagtagccggaatagtcatacctgaaaagaaagaaaagataatagaaagaatgggagtgaaggattccaaaaggattaccccaaaaagaagggctgtgctctatagaaaactaaccagaatgtttgattatgaaactgtggaaatcagtgcaaaggacattgatctattaagggcaaaaggagtaaacctcaaccagattgaaaagttggccatgatgagaatcattgcaaagcttaaggccgacaccataatcatagattcccttgacataaaggaaggaaggctagaggaagagatgcaaaattttgttggagaaggctcaaaggtaattgcagagcataaggcagatgacaaatatatagttgtaggagccgcttcaatcatagccaaaacaaaaagggatgaaataatcaaccaaatcaataaggaatacataaggtccactggaaacaaggatggaatcggttccggatacccaagcgatccaaagacaaagaacttccttaaaaactacaaatacgatgaaatgccagactttgttagaagaagctggggaactgttcaaagaataaaagaagctgaagaagctgaaaaatcattgtaa

SEQ ID NO: 1837 - DNA, 618 bp, Methanobrevibacter ruminantium
  source 1..618: mol_type = genomic DNA
atgtatttaggaagaattatttcagcaggtaaaacagaagatggcaagccttttgtagcttatagagtttcaagcagatcttttccaaacagacaggtaaaggttcttgaagatgaagcggctatcattccaaaggaaggctttgaaaaggacatttttaaaaactcttatattgcttatgactgtataaaaactgtaggagatattgcaattatctcaaatggttcacagaccaatccgattgcagataagatatccattggtatgaatattcgtgatgcaatggcatattccttgattaccttggattatgaaaaggacgattataacactcctagaattgctgcagtggttaaaggtggagatgattttgaagcatatattggtattgtaactgacagtaagatattggttgaaaagattgatgagggtgctcaattcatttccacttatgaaaagaacagtccggaagatgttgtatattctgccgaaactccagatgatgcatgcaagtttatctttgatgaaggtgcatttgctgagtttgaaaatcctgtatgttcagttgcagcaatctttgatggaaaatggaatatttctggattaaatccagaataa

SEQ ID NO: 1838 - DNA, 402 bp, Methanobrevibacter ruminantium
  source 1..402: mol_type = genomic DNA
atggcaattgacattaagcgtcataaggaaaagcttagacaggacgaacctgaaatcaaactggttcctttcattgacattttatttacattgcttatatttttagtggttacaagtacctttggagctgctacagttgatgataatggttcaggttctggaaagccgaatatgacggacactactggtgatgcggagtattatttgattcctgttgccggtttgcagaaagttactgtagatggtgtggatatgtcctctgagattaagggaaatgcaattggtgtgcatgcaagagtccttgaccagggagatgttcagattaaaacgagtgaacatgcgataattattaaagcgcctccaggtatgagtccgcaagaagcggttcacacgccagagtag

SEQ ID NO: 1839 - DNA, 840 bp, Methanobrevibacter ruminantium
  source 1..840: mol_type = genomic DNA
atgattatagaaatgctaactgatggatttaatatgattatggagatgctgcaaagcggaggagttatcacctatataattctcttgcttggtatctatggtcttttaatatccattagaaaaatattttaccttaggaagataagtaaaattgatgctacagagattatggggacaattacctcttctatggaacagggcggagctattgaagccttgaagaacatcagtcactataagaaccctgtttcaagaatcatgtctgaagcattgaagattggctataagaataagacagaagttgaagaaagtatggagcagatttttattgtcgaattaagtaagatgacaaatgggatcagtgctttaaagaccattattgagcttgctccatttttaggtctaatcggtactgtgcttggtatttggatgacctttaagaatttaggtgtgaatccagatgctgctgcaatggctgaaggtatttacattgctcttattactacaattgctggtttgactgtagctattattcttatgcctttgtacacttatattaaaggtttgattgatgatgaaatggataaaatcgaattggcaactaaaatgactaattggagttatgcagttattaagattcgtgtttatgaaaaattgccttgtgtggttgaagctcttcaagaggcagatggtatcgtaagtgttaaggagattacagatccttattccaatattcagatttcattcaagcctagtatgcttgaaaagagtataagcaatatcattttagagaaatgtgatgtaaagtctgaaattactgaaagtaagttgagacaatag

SEQ ID NO: 1840 - DNA, 765 bp, Methanobrevibacter ruminantium
  source 1..765: mol_type = genomic DNA
atgactttagaattatttggattaaaaaaaattcctttggtaaaaaaaggagatgacattgcaaagattatagaagatgacttgaaagaggaagatatccaacttgaaaatggagacatcttgctcatagctgaaacattaatttcaaaggctgaaggaaacatcataaagatggatgatgttgaagtaagcgacaaagccatagaaatagctgaaaagtgcaaaaaagaccctaagattgtcgaaaccatccttcaggaatccaatgaaatcgttgcagtaggccctaatttcatagttacagaaaccaagcacggatttgtatgcgccaactctggaatagacgaatccaatgtagaggacggattggctaccccaatgcctgaaaaccctgacaagtctgctaaggaaatcagagaatacttagaagaaaaatatcaaaaggagatagcaatcataatcacagacacccaaggaagggcatttagagtgggagcaatcggaactgcaatcggatgctctggaatcaaccccctttgggtgagaataggagatacagatctttatggaagggctcttgaaaccacagaagtggctacagctgatgagcttgcagctgctgcatccttattaatgggacaagcagatgaaggaattcctatagttcttataagaggattcgatgcatttaatatccttagagatactgaaactggaatcaagccactccttagaccaaaagagtttgatgtgtttagaaaataa

SEQ ID NO: 1841 - DNA, 510 bp, Methanobrevibacter ruminantium
  source 1..510: mol_type = genomic DNA
atggttgaaattaattatagttgtacaaattgtgacttttcattcctagacaaaaatctaatattctatttagacacagcaaatgaaactgaaagaatagataatttagaagagatcttgaatgataaaacagacaatttagaattaattgaaacaagcctaaataaagaaagctcagataaaatgactaaagcacttattgcaggctttctttatgaaaattattgtcctcattgcaagcagttaataaaaacctatgttccagaggataataaactatttacagaccaagagatggaaaaaatactaaaaaaggaaatttctaaaaataaacaagaaaataataattttaaaatactgttttttgattttaaaaatactctctatagagatagaagaaagattcttgaaagcaatgaatgtcctaattgcaataaggaaatgtctttagtaatttcagagaaaactccatgtccagaatgtggagaaaaactaaaagaagatttttaa

SEQ ID NO: 1842 - DNA, 906 bp, Methanobrevibacter ruminantium
  source 1..906: mol_type = genomic DNA
atgattaccatactttccggaggcacaggaactcccaaactaatacaaggaataaaagaaatctaccctgaagaggaaatatctgtcatcgtaaatacagtggaaaacgaatacttttcaggaggatatgtagctgcagactgtgatacagttatgtacacctttgcagatatgattgacgaccaattcttctatggaattataggagatacatttaagataagaaacatcctaattgaaatgggaactacagagcttcttaaaataggagatatggatcgagcaatcaagattcaaaagacaatccttttagaggaaggaaagacccttagcgaaattgtagaacatcaaaagaacaagctaggagttaaagcaaagataatcccaatgagcgatgaggactctgaaataaaaataataacaaaagagcatggcgaactggatttccatgacttcctaatcaagcaccaatgcgaaggggaagttcttgaagtaaaatacagcgacgttaagccaagccctaatgtgattggaacaattaaagatgcagataaggtaatcataggtccatccaatccgataacctcaataaggccaataattgcaattgaaggggttgaagaggcacttaaggaaaagaaagtcattgcagtctcaccatttttaggagaagccgctttcagcggacctgctgccaaattcatgaatgcatttggatatgaggcatcatctaaaggagttgctgaattatacaaacctttcttagacacatttataatagacaatgaggataaagacaaaaaggaagaattagaaaaaataattccaaatatagtagttgcaaacacctttatgaaaacaattgaagataagatcaatcttgcaaaagtggttttagaactttaa

SEQ ID NO: 1843 - DNA, 762 bp, Methanobrevibacter ruminantium
  source 1..762: mol_type = genomic DNA
atgatacaaatgactttgatacaaattgataattatggtccatggacagtaactccaagaccacgtactgaatctgaccttcaaattttacaagcggaactttttgcagacgtacaaagacagatagctgctaaaaaaggtttagtgttctttacaagatttgacaacttgcttgcagttacaaacggcttaaatgaagaagaccatatgagaattcaaagatcaattagaaacagatacccaatcacaataagcatgggtgtaggagctgcagagacagctcatgaggcacaaagactagcaaccatagctcttcaaaaagaaggaggagcccaatcctcaggcagaaaagaaattttagcaatcaataatcttattgaaaaccctgaagacagtttcgtacaggctgcacacattgacataaacagcgtaaccgaaacattaaccgacatagagtctgcctttgacacaagcttcatggtaaacaaggctcaacactacctcatgaccaagcttagagaaaaaggagcattattattcttcatcggtggagacaatttcatgtccccatgcaacggcttaagcgaagaggacttaacaaacatccttaaggaaatcgatgaagagataggaatcggattaaaagcaggtatcggaagagcagacaatatggaagacgccgcttatatggcagacatcggacttgaaataatccgtgaaggaaataataaagaatggattcatgtaattgaagaactttaa

SEQ ID NO: 1844 - DNA, 714 bp, Methanobrevibacter ruminantium
  source 1..714: mol_type = genomic DNA
atggccggaataacaaatgcagaatttgcaatgaaactcataccttacggatttgacacagtcaccatcggaggatacaatacagactccgaatcaatagacgcctgtgaaaagattattgcaagaggccgaaaagagttcaattaccctaaagaggaaatctatagcgtaattgaaaatgaagttaacgcaatcaaagacagttttaatgtacaagtctctgcaaacttaagagggagcacaccagacccacttatcaaaatcagcaaaatagaaaaactggacataattgaaataaactgccattgcagacaagaggagcttgtagcagtaggatgcggacaatcaatgcttttaagaccagacttagaagattacataagagaagtggtaaaaaaatcagaatcaaaagtctcaatgaagatgagagctaacgttgaaggggtagacaatctggaaatagcaaaactggcagaagactgtggagttgactacttacacattgacgccatgaaaatgggagtaagagatgctgatttttatctaataaaagaaatagccgaaaacaccaatattttcatcattggaaacaattcaataaattcaatctctcaagcagaaaagatgctgaatgcaggagcaaatggcatttccatagctagagctgcaattagcggaaaattaaacttcgatttaaatcaaataaaaatctaa

SEQ ID NO: 1845 - DNA, 981 bp, Methanobrevibacter ruminantium
  source 1..981: mol_type = genomic DNA
atggctggaactatgaaagcttggagaataaatgaattaggaaaacctcctgtattagaggatgtccctataccagaacctggatttggtgaaatcttaattaaaatgaaaggtgcaggaatgtgcagaactgaccttgaagttatagatgaaggtttcattacagttccatttgtcggaccattcacatttggtcacgaaaacgcaggaactgttgcaaaactcggtcctggagtagatactgttgaggttggacaaaatgtcattgtagacacattgcatgcatgtggtaaatgtcaatactgtctttcaggccgtgacaacttctgtgaagttgcaagtgcacgtggtcttaaggaagacggaggtatggcagaatatatgattgctgatgcaagggaagtcgctcctttaggtgaccttgaccctacagaatatgtggcattggctgatgcaggtctatctccatatggtgctgtacagactgcaaaaccattcattccaaacaatggtactgctgttgttatcggtgtagggggacttggattctactgctgtcaatatttagctttaacaacctctgctcgtgttattgtagtaaaccgttcagctgataagatggctaagatgacaaacttcggtgctgacgaattggttgttttagatgacaatgcatatgataagattatggaattgactgacggcaaaggtgtagatgctgtatttgactttgtaggaagagacaacactttagagcttgctgcacaaatcaccaaaggattaggtctcatttccattttaggtcttggtggaggaacacttcctgtaagctggaccacagtcaaacctggtgttatggtaagattgactcaaggtggaacaattacagacctttatgagattatggacttggcaaaagctggtaaaattacagttcaagctcaaaaatatccattcagtaaggtttttagaagctcttga

SEQ ID NO: 1846 - DNA, 258 bp, Methanobrevibacter ruminantium
  source 1..258: mol_type = genomic DNA
atgagcaaactctctaaactgccgaatattggcaaggtattggaaaagcaattaaacgatgtaggaataaagactgatgaagacttgattgatcttggcagtaaggaagcatggctaaaaatcaaagaagtagatgacagcgcatgcttaaataggctaatggctttagaaggagccatacagaatattcgttggcataacttatctcaagaggataaggacaatctaagagagttctataattcacaaaagatataa

SEQ ID NO: 1847 - DNA, 660 bp, Methanobrevibacter ruminantium
  source 1..660: mol_type = genomic DNA
atggttaggccaaaaatagagcgacgaattgtgaaaaaacctagctacacttgcatccaacacggcgacatatcaagagaagaggatttcgaaagcatcaagatgaatcttgatgagtttgaagcaatacgcttaggagactatcacaatatcaaacaaaaggaagctgcagaactgatgggaatatcccaaccaacatttcatagaataatcaattctgcaagaaagaagactgcaatgtctttgattgaaggaagaaaaatagaaataaacaatgaaaatttctatagcgaagataagatctacatctgcaacaattgcggattccaatggaacaatccaaaaaaggaatatgcaaactgtccagactgtaaaagtgaaaatatcgaacgaattaaggttaatttgaatgaaagtgattatataaataataatccaaataagataaaaacaaatagccaaatatgcgatattgataatacagatgttcctttaaatgaaagaaaatcatttggaggacctggaagtggtaggggaccatcaaaagcatgcgaatgtcctaattgtggccatattgcaccaaaaattaagggattcccatgcagaaacataaaatgtccagaatgtggaacccctctatgcggatcaaagcataaataa

SEQ ID NO: 1848 - DNA, 1611 bp, Methanobrevibacter ruminantium
  source 1..1611: mol_type = genomic DNA
atgtctttcataacattaaaaaacattaataagtcatttaacggagaacctgttctaaaagatataaatttaactatagaggaaggttctactttaggtattctcggtagaagcggtagtggaaagtcagttttaataaacatgctaagaggtacaaaggaatatgctccagacagtggacaagtgctctttgaccttgcaatatgtgaaaacaaaaagtgcttgcatgttgagcctgcttcaaaggctggaggaaaatgtccagaatgtggagcggaactacaagcaaaacaaatagacttctggaatgcaggaagattggaaaaggctgcaatcagaagaagaatctccatcatgcttcaaagaaactttgcattatacgacgaacagactgtaatagacaacgtattgaatgcaatgggtgacgaaggcagatatgaagaggagaatatctacaatgccattgacctattggaaatggttcaaatgagccacagggtaacccacgttgcacgtgacttaagtggaggagaaaagcaaagagtagtacttgcaagacaattggctaaaaaccctatgttgcttttagcagacgaaccaacaggtacattagaccctcaaactgctgaaaagcttcaccaaaccttgattgaaggtgtaaaagatgaaggaatcagcatggtaatcacttcccactggcctgaagttatgaatcacctagctgatgatgcaatttggctagacaatggggaaatcatagaacatggcgcccctgatacaattgtagaaaacttcctcaaaacagtgcctaaagcagaacaagtggaaaaaatagaacacaccgaagagataattaaagttcaagatattaaaaagcattattattcaattgaaagaggagttgtaaaggctgtagacggcgtaagcctaacaatcaaccaaggagaaatctatggtattgtaggtctaagcggttctggaaagaccacattgactaaaatgatgatcggcctcaccgaaccaagtgcaggagagcttgtaatcagattaggtgatgactggattgacatgaaaaagccaggtcctttaaacagaggccgtgtaactccatacttaggcttgctccaccaagaatactctctttacccacacagagatgtacttggaaacctgacagatgcaatcagcctaaacctccctgcagagtttgcaaaaatcaaggccgcacatatccttgagactgtaggatttgaaaaggacaaatccatgagcatgctcacaaaatggcctgacgaactaagtggaggagaaagacacagagtggctcttgcacaagttcttataaaagagcctaatatagtggtattggacgaacctacaggtacaatggaccctgttacaagaatcatcgttaccaattccatcctaaaggcaagagatgagttggatcaaactttcgttatcatatctcacgacatggactttgttctagatgtctgtgataaggcaagccttatgagaggaggaaaactcttaagcactggaaccccagaagaaatcgttgcagagcttacaggtgaagaaaaagcagatatgattaaggaccactag

SEQ ID NO: 1849 - DNA, 483 bp, Methanobrevibacter ruminantium
  source 1..483: mol_type = genomic DNA
atggcatgggatgatgcaccgtcacatatttgcagaggaggagatgtaaggggactcgcattttgctgtcctccagtaaaaccttgccctgtaatgaatgcacttagagaagtgggaattactcctcaggaatttttagaaattaaacagaagtttgcaagagaaacccgattaggggaaggccctgcaacttgcttcggatcacttgtatggtgttgtaagacttcaaagccttgtcctttaagagacatgaccttaaatcaaattaaaatgactgaagatgagtatatgacacttaaaaaacagttatctgaagaaatcttaaaagcaggcaagccaaaagacaatagcgctgaagcaatggctcttgcagaaacatttaatataagcgtagaagaggctaaaaagactcttgaagactgtgataatgatttaagaatggctgtaaaattgctcaaattaaaagagcttgataacgaatag

SEQ ID NO: 1850 - DNA, 624 bp, Methanobrevibacter ruminantium
  source 1..624: mol_type = genomic DNA
atgggacttacttccctttttttagaagtggaaaacaaaaacgtttttatcttaggcactggagaagtagccaccagaagagcacatcgctttttagacaaaggagcaaatgttattctagccggaaactcaatcgatgaagagctaagcaaaaaaggagctatcctaactcctattaaagaccttgaagagcttgtcaaatggagtgacataattgtcactgcaagcggagacgatgaattatgcgaatacatcgcatcaatcagccaaggaaagttaatcaacagagcagacaagcctgaaaagggaaatataatagcgccaacaagctttcttatagacgatatagaaatatccatctataccaatggacaaagccccttaatggctcgagagcttagaaaaaaaatccaatccataatcacagaggaagacattcttgagataaagcttcaggactatgccagaaagctcttaaaagaaaaggtagaagaccaaaagacaagaaagcaatatcttctaaagattctaaacaacacccagataaagcaatgtctaaaggaaaagaatttagataaagccaaaggacttgcagaggagatcatcaattcagaatttaattga

SEQ ID NO: 1851 - DNA, 1197 bp, Methanobrevibacter ruminantium
  source 1..1197: mol_type = genomic DNA
ttgataatcaatatacgtgtagaccacacccttgcagacatagaaactatggaaaaggtctcaaaagacctaaaggaactcttttccaacttaaaagaaaactttaacatcagtgaatatattgaaatcaatacctgtaacagatacgaatatttcctttatactaatgttgatgacgacagcctagactgtgacaacgaatatgtcataatagaatatgacgattctgcaattctccacctattcagaatgacttcagggcttgaatccatgatcatcggcgaagatcaaattctaggccagataaaagattccaaaaagaaaagcgaaaaggaaggccactgcggaaagaccttagacaccatctttacaaaggcaatacatgttggtcaagtggtaagaaacaagacaaaaatcaatcaaggctctatctcaataggctcagcagcagttgatcttgcagaagagcatcttggagatcttcaggacaagcatgttcttgtaatcggtgcaggaaagatgggaacacttgttgcaaaggcattggcagagaaaaacctaaaggcaatctttgtagcaaacagaacctattacaaagcagtgaaattagcagaggaacttgatggagaggcaatactatttgacaatctagaggaaaagctgcttaatgcagaccttgtaataagctctacaggttctccacaccctatagtcaataaggaaagacttatgaaagtatttggagatgaagtccctgaaaaaatgatatttattgatatagcaaacccaagagacattgaagatgatgtcaaggaattgggaatcgacctattcaatattgatgacttaagaggaattgccgagaagaataagaaacttcgtgagaaggaagtaatcgcagctgaaaagataattgaaaatgagtttaatttacttaaagaatcctttaatttaattgaaataaattcaatacttggtagtttaagagagtctatggaagaaataagacaacgtgaaagtcaaaagggcatagttaaactaaatgcggtagatgcgagggacataaaagtcatagataagatgactaagtcaatagttaacaagatattttatgacatctctgaaaaagttaagatatccgctaaaaacaacgaagaagatgttattaaaatgtgtgaagccatcttaaaaagatag

SEQ ID NO: 1852 - DNA, 1128 bp, Methanobrevibacter ruminantium
  source 1..1128: mol_type = genomic DNA
gtgaaatctgataataagagttcaaaaattaaaaaatcagaggtttatattaaatctagttctgattctatagataaagaggccgaagagcttatcttagagtctgcaggttatccatttaactttgcacttcttgaaggacctcatttagaaatatcagataatgtcctctttgagcaatatgcaattgaacaatggagtggaactcttgtaaagactggttcttatttatttgatcaaaagattattccagattatgcatttaaggttctgaaggtttttccagaaaattccatcatatctgaaaacacctctattgtggttgctgatgttgataaggataaacgttcctctataaagtcaaagcaatatgatgttcattttgatgatattgtaggtcaggagaatgcaaaaagcaaatccaaattgatttacaaatatcttcagaatccagacaaatttggcacttgggctcctaagaatgtcttgttctatggcgctccaggtacaggtaaaacaatgctcgcaaaggcccttgccaatgaattggacattcgcctttatcttgtcaagtcaacctcattgattggtgagcatgtgggagatgctgcaagcaggatccatgaattatttgaggctgcaagcagaaatgcaccttccttaatattcattgatgagatagatgcaattgcacttcacaggtctttccagtccttaaggggagatgttgcagagattgtaaattctcttttgactgaaatggatggaatcagcccaaatgatggtgttgtaaccattgcagctaccaataacccttctgcaatagactttgcaatccgaagccgttttgaagaggaaattgaattcaagcttccgagtgatgatgagagaagggaaataattatgcttaatcttgacactttccctcttgattatgatttagacatagagaagcttgtaaaagtgtctaaaagaatgtctggaagggatattaaggaaaagctattgaagacagcccttcacaatgcaataatcaatgataagcagacagttgatatggatgatgtcgcttttgcattgggtgtaaataaatataaagaagaagaagttaaaggaatgtttgaataa

SEQ ID NO: 1853 - DNA, 837 bp, Methanobrevibacter ruminantium
  source 1..837: mol_type = genomic DNA
atgaaagataaggttatttttggtccagcaggtaagccaattgattttaagggaaaggcatttgaatctccagaatatttaggtccaagggggctttatgcatttgaatatcagtccacttatggcgtaaggataggggagtcatctgcaataaagcttagagagtctgcagagagaaatggggttttaatgtccatgcattgtccttattacattaatgtatgttctaaagaggaagaaaagattgatagctccatagaaagactgattcaatctgctaaggttggagaatatatgggtgcctacaggcttgttttccacccaggattctattcaaacagaaaggctgatgtctgtatggatttggctaaggaaacctataggaggctccttttaagatgtgaagaggaagggatagaggactttacctttgctccagagactacaggaaagcgttcacagttaggaaatatcgatgagataattgaaatgtgcgccagctttgaccatttcgagccaacaatcgactttgcccatgttcatgcaagagggcgcggaatattaaataagaaggacgattataactgcatattctcaaagcttgaagacaatctggacattgacaggcttcattgccatttcactacaattgaatactcccacaagggagagagaaagcaccatactctagctgaaggtgatgaatatgggcctcacattaaagatttattgctcaatctgattgaaaacgattggaaagccactataatctgtgaaactcctttgattgaccaggatgccttaagaatgaagaagctttatgacagtttgatatga

SEQ ID NO: 1854 - DNA, 1017 bp, Methanobrevibacter ruminantium
  source 1..1017: mol_type = genomic DNA
atgaaatctgtagctattaatggattcggaactataggtaaaagagtggctgatgctgtagccgctcaagatgacatgaaagttattggtgtaagcaaaaccagacctaactttgaagcaagaactgctgttgaggaaaagggatatcctttatatataggaattccagaaagagagcctctatttaaggaagcaggaatagaaattgcaggaactgttgaagacatgattcaagaggcagacattgtagttgactgtactcctggaaacatcggccctcaaaaccttgagatgtataagaaagctggcgttaaggctatttaccaaggtggagaagaccatgaactaaccggattgtcatttaactcctttgctaactatgatgattcatatggtgcagactatgcaagagtcgtatcctgtaacacaaccggtctaacccgtaccttgcacacccttaatccattggttgacattaagaaagttcgtgctgtaatggtaagaagaggatccgacccatctgaaatcaagaagggtcctatcaacgctattgtacctaaccctccaaaggtcccttcccaccacggtcctgacgttcagactgtaatgaaaggcatagatgttactacaatggctttgcttgttcctactaccttgatgcaccaacacaaccttatggttgagattggaaatgatgtaactaaggaagaagtaattgaagctcttgaaaaacgttccagagtaatggttgttgaagcagctgctggccttgactcaactgctgcacttatggaatatgctaaggatttaggaagaagcagaaatgacttgtatgagattcctgtatggaaagagtccattaatgtagtggataatgaactcttctatatgcaagctgtgcaccaagaatctgatgtggttcctgaaaacgtggatgctattcgtgcaatgcttgaaatggaatctgataatgaaaaatccattgcaaaaaccaataaagcaatgggaatcttttaa

SEQ ID NO: 1855 - DNA, 552 bp, Methanobrevibacter ruminantium
  source 1..552: mol_type = genomic DNA
atggtttttatgattgatctagaccaattaaaaaaggaaattaatgatttaaccaaggattataagggatttgaattcaaatacatagatacagattccattgtagttgagccttggacaaggcttaaatgtcaatatggctgccctaattatggaaagacccttgtatgtcctccattcactccaaaggcagaggaatttatcggcatggtgaattcatataagactgcaattctctttcaaataagtctggcctcccttgaagatgacattggaggtataactaaggtttcggttgatatagaaaacctttgcgctcactttggctattataaggcatttggcatgggcgctgggccttgtatggtttgcaagtcaaaaggtgaagaatgcagtttggatgcctgtaaatatcctaatgaagcaaggccttccggagaggcttgtggtgtagacattcataagacaattgaaaacaatggctatgatattttaggaatcgatgaggagaataacagctatttctgttatggaatcgtcttattggaataa

SEQ ID NO: 1856 - DNA, 1086 bp, Methanobrevibacter ruminantium
  source 1..1086: mol_type = genomic DNA
atggcaaatactttttttagtaaaatagttaaatcattatgggtcttggcttcctttattccaaccctaaatggattggggtttgcttatataggcgctaaggagtttaaaaataattggattattgaaggtgtgatttacgagattccttggtttttattatttatctttgtaaataatgaggatcttggagtgttctttgcaacaataggcttattgggaatggctgtttcctttgttaggtcactctatgtctactataagcataaggacatattgatagatgacgatgccgaaagtcggataagcactgaaaagtccatcacttcattttgggttatcttttctgttataatctttttaaatgggcttggtttgatatatgtcggatttaaaagaaacgttcggcaatggatattggaaggtgctttctttgaatttttatggcttctattttttatcacccccagcaataaggccttaaacagttttatcatttcacttggatttattggtatgattctatctgtcattagaacatttatggtctactttgaagaggaaagaatggatggaggcttttacagtccaacagctgttaagaaggagccacctgctcaaaatcctattgaaaacacaatcaattcttatagtgagaacaatctttcagatgatgatatagttcctgagttcaagggatataagactcaagttgaggatttgaaagacgcttttaagactaaggaagacaatgttaataatttgttatctaagcgttttactaaagaagagcttagctatggcagattcaagtcagttgtaaatgagtttcataagacattctattctcaggcagattccactttaaccatgattaatctggctccagaatacagcgaaagagtagatgagaccataaaaaataagataggacttatggattcattgcttggtgagatgaataatcttttagaagaacttattcttaatgatggacttccagagaagtcagatgaggaaatcactgaattatttgaaaatatgcataatttgattaattctgttgacgattataataaggaatag

SEQ ID NO: 1857 - DNA, 345 bp, Methanobrevibacter ruminantium
  source 1..345: mol_type = genomic DNA
atgaatttcaataaaaaaattttattaataatagcattggtattcattgctagtgttggcattgttgcagctgaagacgcaacagttgatccatacactttcacaataccagatgactacactattgcaacatccgatgacactacctgtgcaatgcaaaaggatgcaacccatgccataagctttgcaaccggtgtcagcgatgatatagaagcagcaaaacaaaatttcatcagtcaaggaaaaacattgcttaaagaagaatccatgaactataatgacatggacatcacccttcaggcattctctgctgatgttgatggaaccaccattatatgtttataa

SEQ ID NO: 1858 - DNA, 1653 bp, Methanobrevibacter ruminantium
  source 1..1653: mol_type = genomic DNA
atggaaaataatgatttagaaaatttaagaaaacttattcaagatatcttggattttgcaaaaactcattctgatacattggatgaagattctgctcctttatggtattttgcaaagggaaaatttaacataactttagatgcccttttgctaaatgatattctatgctttttaagctttttaggattgagtgatggaaatatcagttctgatgaattgaattttataaattatgttttaaatttcaattttacaaaaagcgatttggagctttatttaaagaataatctaattgatgattatagcgaatctcttcctccttccttttttgtgttctatgaatttgataagtttgcattggaaaatggaaaactgactgaaagcattgtagattccttatttgaggttttcaatggaatcggacatctctttatagctcttgataatgagtcttctcttgaaaagaatattttagattcatttttagacaatattaaaaagcaactggctgatttgagaggcttccagtatgaacttatggttttggctttaaaaaatgatttgatagataatatgttggatactaattcaattgatggcttttctgattctaatctggacacttcttttgattctgatttagacaatcctcaattagatgattctttcttagataaggttgatgactttttctttaacaatgaatccgatgatgatttcgttagttctgttgactcttcaaatgatgatttaaatatgggtggtgatgactctttagatagtgattctcaatctaattcctcttctccaagtgattccgattctcaaaaagataataaaaagagcattcaagagagtttagataaattaaacaaattagttggtctagaagctgttaaaagtgatgtaaattccttaataaaccttattcaaattagaaaattaagagagcagcgtggaataaagcaacctgacatgtccttacatttagtgttttctggaaatcctggaactggaaagaccacagttgcaagactcctttcagatatctattgccagcttggattgctgtctaaaggccatttggtcgaaacagataggagcggtcttgtagcaggttatgtaggtcaaactgcaataaaaacccaagaggttatccaagaagccatgggaggcattctctttatagatgaagcttatgcattgtcttctgcaaagggagaaaatgattttggccaagaggcgattgataccattctaaaggctatggaagacaatcgtgatgactttattgttattgttgcaggatatcctgatctgatggatgagttcctccattcaaatccgggccttgaatcaagattcaacaagcatctttattttgaggactacaaccctcaagagctgtttgatatatttgtgtcaatggccagtgaaaccaatctaaagcttgatgaaaaggcagaggaattccttaaaggtcattttgaagacgtttataattcaagggatgataattttgcaaatggtcgttatgtgaggaatatttatgaaaaggtcttgtcaaatcaggccaataggctggtgggcatggaagatatctccgatgatgatttgaatacattaacccttgaagactttaaggatttttag

SEQ ID NO: 1859 - DNA, 1977 bp, Methanobrevibacter ruminantium
  source 1..1977: mol_type = genomic DNA
atgggaattaaagaatttttcctaaataaagaaaaaagaaaaatcgttgctattgagaaagacttaaataataatttaagcattttaggaggctattctatgggaattaaggaatatttcatagagaaaatcgacattattttcattctaatctccataattgctattgccttagaccttttaggtgtagatatttatggaatcagtcttatttggatagcaattatattctgcggcattccaatctttaaggaagcggcaataggtctttacactgaatttgacataaaggcagatgttcttgtgacaattgcaatcatatcttcaatactcattggggaattgtttgcagcaggggtgattgcagtcatcatggcaatcggcggctatctggaagagtatacagtttctaaaacaagagcgggaatagaaaagcttgttgatttgaccccaagaaaggggagattgattgaaaactacaacaagtccaatgaatctgaaagggaaatctcagctgatcttattgaagttggagacatattgaaagtggttcctggagagactgttccagttgatggaaaaatcataagtggcgagacatcaatagatcagtccgtattgactggggaatccattcctgtagataaactggaaggggatgaagtatttagcggaacaatcaatctttatggttcctttgttatgaaagcaatcaaaaagggtgaggacagttcacttcaaagattgattaaattggtagaattctcaaatccaaatgatgcagagattgtaaagactgcagataaatgggcaactctcattgttgtaattgcatttatctgtgctgtcttggcattggttttcactggtgagataatccgtgctgtaactgttttggtggtcttctgcccttgcgcattggttcttgcaactccaactgcaattatggcatctattggaaacctaagcaaaaggggaatcttggtaaaggaaggaataaccatcgaaaagttggctaaagtggatagggtcgtctttgataagactggaactttaacctatggcaagcctacactaactgatgtcattgtctatgatgaggaaactgaagagaaggaacttattcatttgcttgcttcactagagaacttatctgagcatcctcttgctaaggctatcgttaaatattatatggataattatgacgatacccttttaaagttgagcgattttgaaatgatcattgctaaaggggtaaaagctaatctgaatggcagcaatatctgtgcaggcaatttggaattcttcaaatcattagggattgatattccagaggaatttattgaagaaattgtttctccatcccttgaaaaaggggctacagccatctacattgcaaaggattcaagattcttaggatgtgcattgctctctgatgtcctaaggaaggatgcttctgatttggttgttcaattgagaagacttaaggtggtttcaactctccttactggagacaataagcaagcagctgaatacatagccaaagaggcagatatcgttgattatcagtataattgcctccctgaagataagatctccacaatcaagaagtttcaatcacttaaattgaatgttgcaatgattggagacggcataaacgatgctccatcattaagacaggcaaatgtggggatttcaatgggaggggtaggcagcaacatctccatagaagcatctgacgtctgccttgtaagtgatgatattaaatatgttcctcatctcttggctctctctagaaagactataaggacaatcaacagaggaattgcttttgctttaatcttgaatatattggcaacagttcttgcgatgtatggaatgattggacctattgaaggtgcttttgttcataatattggatctgtgatcgttattatctattcatccttgcttttaaggtatgaatatgctaattag

SEQ ID NO: 1860 - DNA, 261 bp, Methanobrevibacter ruminantium
  source 1..261: mol_type = genomic DNA
atggattctgaaaatctacatagaagacttaaaaagattattggccaacttaatgccattgatcgtatgattgatgaagatattccatgtgaaaatattttaatgcagataaatgcttctaaatctgctttgcatagggtcggatatattattgtagaaggtcatttagataactgcattaaaaatgcaatggaaaaaggagacacagacgaggctttagccgatatttcatcaattttagagtattattcaaggctttaa

SEQ ID NO: 1861 - DNA, 450 bp, Methanobrevibacter ruminantium
  source 1..450: mol_type = genomic DNA
atgtctagtgaaaaacgaaatagcaaagatcaatcctacttaggctttgaacttattgaagtggaggactactatctcctatcaaacacagaaaagctgcttgaaacagttaaaaaagactggtttaaaagcctaatggacgaaataagagaattggttggaaagcattatccagactttgtaatttacttagcctatgttgatcatggagatgacggtacaattttaggctatgtgaatgtaagggaagatgacaataagagagatgaagagtattcagaagttgctctaaacaaagaaatgcttgagatatgtgaaaaacacaaagaagataaaatattatttgtaacaattccaagaaagagaaaaagctttataaagttaaaaaaaggaagcatcagagaacatttcaaagaggctctattaaaattaggtgcaaagccactataa

SEQ ID NO: 1862 - DNA, 1089 bp, Methanobrevibacter ruminantium
  source 1..1089: mol_type = genomic DNA
atgactggtgaaagtactcatgaacacactcacaaagaacaaagaagacaatacacattcaataagcttaaggctttcggccaagagatcatagaggacattgagaagaacaaagtgccaactctaaagattccttcaagaggaactggtaacattgtttatgatgaggataaacgttactacatccttggtgatagatatggtagaaggtctctcggaaacgttaagcaaatcagaaaattaggtcagatggtctatgtagctaatttctgtaaggatttagtccaaagggacaagactgctaccatcagggagatgtattatatctctgaaggttggggtattgaattcaatacacaacaggaatccaacattgttggagaggacttggaagttgcattaggtgcaacccgtgaagacttaggattaatgcctgaagaagacggagcatctgtatatggtgatattacccttcttgacggagattatgaaatcaatgcggcaagagcaggtaaatcaggctataccatttctccaactatcgaccaggttgagttattggactgcggagcagacttcctccttgcagtggaaaccatgggaatgttccataggcttgttcaggaaaaggctcacgaaagatataactgtcttattgtaggtcttaaaggtcaggcagctcgtgctacaagaagatttatcaaaagggtcaatgaagaattgggccttccagtttatatctgtaacgacggagacccttggggattccacattgcacaggtaatcatttccggaagtgcaaagttagctcacgttaatcacgatttggctacacctgatgccaagttcattggtgtaactgcaagtgacattcaaaattatgaccttccgactgatccgcttaaggacattgacgtcttaaggttaaaggagctttctaaagacccaaggtatcagactgacttctggcagacagaaatcaaaaagatgcttaagcttggtaaaaaagcagaacagcaatctttctcaaagtatgggcttgaatatgtagtagatacatatttccctgaaaagttaggacttaactaa

SEQ ID NO: 1863 - DNA, 1800 bp, Methanobrevibacter ruminantium
  source 1..1800: mol_type = genomic DNA
ttgtctcaacaagctcaagaactctttgaaaactttaatgagttaactccatcagagttctttagaaaaaataaacagatgttaggattttcaggaaagattcgttctttaactatcgttttccacgaacttataactaacagttttgacgcagcggaagaagcaggtatcttacctgaaatcagcattaaattagatagattaggtaaggaccattatgtattgacccattcagacaatggtcctggaattcctgaagaatttgtaatgaaggtatactgtcagatgtttgcaggttccaaattcagaaacatccaatccaggggacaacaaggtttaggttgtagtggatgtgttcttttatcccaaatgaccaccggtgagtccacccatgtaacttccggatggatggaaaatggggagcttaaaggggtcaagatggaattcaagatggatgtaaagcaaaacaaaggtgacttaatcaagaaaagcgaatttacacctacaggaactggtgtatgcattaagctccactttaaggaagtatcctactctttagctgagcaaggtgcattcgaatacatccgtagaaccatgattgcaaaccctcacgctaaaatcacattcagggatcctagcgctcataaatacatctttaaaagggcagcagaaatcgttccagtactccctcaagaggtattgcctcaccctaaaggggttacagctgacgatatcattaccattgcaaagttcactgataagagaaacttcaaaagcatgctgacaagttccttgtcaagaatgtcctctaaaaaggtttcagaacttcaggagcttaccggaatagatatgaagaaacgtcctaaaaacatggaatgggcagaagctgaaaagatcgtagaagctttcggcaaaatgaaattcatggctcctccaacttcaggattgatacctatcggtgaagagcaaatagaaaagggtatgaaattgattctaaagcctgaattcattaccaccatcacaagaagccctgtaacctataagggtggtgtggctttcattgtagaggcaggtatcgcttatggaggagatgcaggaagaatcgtaaacgaacaaagaaaatcagagatcttaaggtttgcaaacagagttccattgactttcgatgcaggaagctgtgcaattacagaagcgttaaggtctattgattggagacgttacggtcttagagacttggataacactcctcttaccttgtttgtaaatattatctctactcaagttccttatttatctacaggaaaacagagcattgcccctgaacctgaaatagttcatgagataaggcaagctaccatgaaaatagcaagaagacttcaaaagcatatccgatccaaaaaggctgaaaaggaaaaggccatgagatccaagatatttgaagactatgttccagtcatcattgaagaggcagcttcacttgctgagactgaagttccagattataagcctgttcttgctaaggtaacaagaagggcattggcagaaatcatgggtgaaaaggtcgaggaagaagaagaggaagaagatttcgtcgattccttgcttgaagagcttgacgaattcggccacactgtcgataaggagcattcagcaagaaaggacagaattcaggaatctgacttggatgaagcctttatagatgatgaaaagccaagaaagagatccaaaaagtccaaaaaatcagaaggcgctgatgaaggacagtctactttatttgattcagaagaacaggaggaatga

SEQ ID NO: 1864 - DNA, 612 bp, Methanobrevibacter ruminantium
  source 1..612: mol_type = genomic DNA
gtgaatgaattgccggaaactgactatcttagagttccatctgataggattggcgctttaatcggaacaaaaggtgaaactaaacatttgattgaaaatgcaactaatactcatttagatattgacagcgatgactgcactgtagctatttatcctggagaaaatatggaagaccctcttggagtatggaaggcaaaccatattgtaaaagctatagcacgtggctttaatccacatgttgctttaaaattaaataaagatgatacttatttggaaataatcaaattgcctttatatgttggaaagtccaaaaaggctatggcaaggtataagggcagaatcattggaaaggatggaaagacaagagagattattgtagatatggcagaagtggatatggcaatttatggaaagactgtttccttaataggcgagcttgataatgtcatggttgcaaaggaagcagttgaaatgattcttaacggatcaagacataagtctgtctatgcattccttgaaaataagaagaatgaacgtaagatgaaagaattcaaggaagtcgttggaattgaaaaggatgaaattgaattccgtgatgacttggatgactaa

SEQ ID NO: 1865 - DNA, 234 bp, Methanobrevibacter ruminantium
  source 1..234: mol_type = genomic DNA
atgagcttattagataatattgataaaattcatacaacagagatgggtgttggaagaattcaaaggaatcttggaattgatgtggatccagttgaatattgcattttaaaaattaaggataaggacgctgtaattgaagagaagggcaaaaactattatgtaactgttgatgactgtataataacagttaataagcattcttttactataataactgctcataagaagaaatag

SEQ ID NO: 1866 - DNA, 780 bp, Methanobrevibacter ruminantium
  source 1..780: mol_type = genomic DNA
atggatgatgaaaatccaagagtggctaaggcagatgcagaagttcaaaaactgatttcaagaaaaagaactaaagatgcagatgatagaaaggtctcaagcgagatatttgataaggcaactttgcaagtcctttataagctggcgaatcagggccatttggatgttttaaatggtgcaatcagcactggaaaggaagctaatgttttaaagggcataaaagaggatggatctatcgttgctgttaaaatctataggatagccacatctgactttaagaagatgcagtattacattgcaggagaccctagatttaatgtcagatcaagcaataaaagacaattaattaacaattgggtaaataaggaattcagaaatctgactcggctaaaggatgctggagtaaatgttccagaggcaatcacaagccttaacaacgtgcttataattgagtttattggtgatgaggatggaaatcctgcacctacagttaagaatcttcctcctcaagaccctgcccacttctatgagcaattggtggagcagatggacaggttcattaataaggctaatctgattcatggagacctctcctcttacaatattcttaattttgatgagaagcctgtaattattgacgtttcccaatctgttgtaagggatcatataattgcaaatgagttgcttgcaagggatattaagaatattagctttgaattttccaagatgggggttgacacttccattgaggatttgactaatcgattgattaaggattag

SEQ ID NO: 1867 - DNA, 321 bp, Methanobrevibacter ruminantium
  source 1..321: mol_type = genomic DNA
atgtttaggaggcaaattttggcgaaaccacaaaataatcaacaagaatatagaagagtacgtactccaaagaagggagaaattccaggagtcgtagagcaaattatgggacatggtaaacttaaagtaagatgcgctgatggaaatatcagaatgacacgtattccaggtaaggtgaaaaagagaatctggattcgtgaaggggatgttgttcttgtaaagccatgggatttccaatccgatcaaaaggctgatgttatctggagatacacaaggactgaatccaattggcttgaaagaaaaggttatttaaaaatgtaa

SEQ ID NO: 1868 - DNA, 1215 bp, Methanobrevibacter ruminantium
  source 1..1215: mol_type = genomic DNA
atgggtgtagagtttttaaatattatagaatcagatgaagctaaagagatcataaaagaaaagttcgaagaatgttataccgctcaatctgaaatcatagacatagcagaaagtgctaatagaatcacatatagcaaaattgaaagtaagatcgattttccaccattcaaccgttcattaaaagacggatttgcaatcaaggcagaagacagctatggagttaatgaagaaaatcctaaaaagcttaaagtcattgactttcttgaagcgggatcatttacagataagaccgttgagcttggaagctgtgttgaaataagcacaggggctcctattccagatggtgcagatgctgtaataatggtggagttttcatataagtctgatgaaaatccagagcttgaagatgatgaggtggaaatcctaacaagcgtcactccttcacaggatatcggccaaaagggctcagacgttaagaaaggacaggtcatccttgatgagaatatcctattgaaccctccaaagattggagttattgcagctcaaggaatagacactgtagaggtctataaaaagccaaaagtaggaataatctcaactggaaacgaactcctaaccaaccaagaggaattaaggccgggcaaaatctatgacgtcaacagcgaaatgatcagagcgggggtaaacgcatgcggagccgaaggtgaatgccttggaatagtaagagacaattatgatgacttaaaaaacaagataaccgaatcattaaaggaatgtgacattctcttatgctctggaggaacctctgcaggggttggagacaacatccgccacatccttgatgaattgggaacagtctacattcatggaattaccgtccagcctggaaagcctaccatccttggagttgtagatggaaaaatcataataggccttcctggaaaccctgtttctgcaattgtcatatttaatgtgtttgttgcacctgcaatcaagaaattagctggattcaaacaagaggaagagcaaaaaacaataaagggaaaattggcaaaaagaatacattctcctattggcagaatgcagtaccaattggttaaagtagaaggagacagtgttattcctatatttaaagattcgggagcaatattctcacttgcaagtgcagcaggttatacaaaaaagtctcaaaaacagaacccgaatttggtttga

SEQ ID NO: 1869 - DNA, 468 bp, Methanobrevibacter ruminantium
  source 1..468: mol_type = genomic DNA
atggagattcaagaaaagacaattgaagaccagaaagtcgctataatgaattataaaggctatcttaaagatatggagattttaatttccaaattaacaggatggattgagttagaagaaatagaaaccgtcggagacttatttgcaatattttacaacaatccaagaactgcaaaggaagatgaagtcgtttatgatgttggaatcccaatcaatccagaattagaccctgatgaaactgaagagataaggattgtaacaatcatcgaacataaagtcctatccggactccattatggttccattgacaatattcaagagacctataacattatggcagaatactctatcgaaaataaatatgacattatcggctctccaaaggaagtctacattaaaagcaaatttgatgttgaagatgaagaagacatgattactgaaatccaattgccagtaattaagatgtaa

SEQ ID NO: 1870 - DNA, 309 bp, Methanobrevibacter ruminantium
  source 1..309: mol_type = genomic DNA
atggcagaagaagaaaaaagttctaaaaagaaatccaaaagagaattagaaaaggaacttaacagcaaagtagataagatcatagaaaagaacttcgaagattttaaatctcaagatgaacttgaagactttatccaaaaggctttcgacgataaagcttcacaatacaataaaaaaatcgaattaaaagaaaaagagttggataaaaagttcaaagcttcaagagaaaacgataataaaaaaatcgatagaaaaataagagaaatggatagaaaattaaaattaaggtataaaactatgttaaaataa

SEQ ID NO: 1871 - DNA, 1314 bp, Methanobrevibacter ruminantium
  source 1..1314: mol_type = genomic DNA
atgatttatgaaatagcagaagaggcaaaaagagaaatatcaaaatattcagacacttatgaaatttatattgacaggactgaattattggaacttgattctcaaaagactgagcttaattttgcaaaggaagatttaagcttaggagtggggattaggattatcaaggatggagcaataggatttgcattcacatctgatatggatgagattgcaaagacttgtgagaatgcttatttgaattcaaagctcaatacaaaggatgaattttattcatttgcagaatatgaaaaactccctgttgtaaaaggcacttatgataaaagatttaaggatttggatttggatgagcttacaggctcacttaaatctgtcttgaattctgttgaggattatggatgtcaggtaagctctggaggattttccgctgctgaaggtgaaaccttaataataaattcaaatggtgttgaagcctatgacaattctacaggctttgcaataggagtgtcaatcaatgcagttaaggatggtgaattgaccactgcttatgattccgattcatcctgcctttatgatttagatggtatggccttggtagaggatatttgtaatcttgcaatggactccttaggtggagaagacattgaaacttcagatagggatgttgttttagattatcatgctgccactggattattgtctacctttttaagcggattcaatgcagataatgttcaaaggggaagatccagaatcgctgataagatggatgagaagatcattaccgaaaacctttccatttatgatgattccactatcgatggtggattgaattcctctcgctgtgatgatgagggcaccgcttcaaagaggacttgtttggttgaagatggggtattaaaaggatttttatatgatatctacacagcaaataaggatggagttaaaagcagttcaaatggatttagatcatcctatttgggaactccttcagttggggcttcaaatctattgtttgactttaaaagccatagaaacttagatgacattgatgatgcatttttagttactgacgttttaggagcccatacagccaatccaattacaggagacttttcagttgaggcaagcaattcatttttagtttcaaatggtgataagaagcctattaaaaaagccatgatttctggtaatatttatgatcttttggctgatgctgaagctgttggtactgagactaaacaaagaggctctttcattattcctaagatatttttacctaatgtgagagtggttgggaataattcaaattag

SEQ ID NO: 1872 - DNA, 705 bp, Methanobrevibacter ruminantium
  source 1..705: mol_type = genomic DNA
atggttaaaatagaagcaatagctgttgatgttgacggaacaattacggatggcagaagaagagtctgccatagtgcattggatgctcttagaaaggcagaggatgctggaattccagtgattattgcaactggaaacatttcccacttttcctatgctgtggcaacccttgtagggactactggaggccttgtttgtgaaaatgggggagttatctatcatgatggatataatgacaatcgagtgatcgtcttaggagatatctctaaagctcaaaaggcttatgattttctatttgataagtttggaaaagacattccatttaggatagtggaagattccgatgcaagggtttcagaaataactttctataagaatatgagttcagagccacttaaggagatgttgaaggactttgatgtagaggtctatgacagcggttttgcacttcatcttaccgatcctgcggtcgataagggaacagggcttgcaaaattggctaatctcgttggatataatgttgagaatattatgtgcattggagatagcgaaaatgatattgattttctccttgcaggaggatttaaggttgcagtggccaatgcatgtgatgagctaaaagagattgctgattatgtttgcgagaataagtatggtgatggagtggcagaggctattgataagtttgtttttaatcaggaatag

SEQ ID NO: 1873 - DNA, 954 bp, Methanobrevibacter ruminantium
  source 1..954: mol_type = genomic DNA
atgatggctagtatgaaagagatggctgatgctatactaaaaagaattaatgatttagctgttcctgtaaagattatgcatgtttgtggttctcatgagcatacaatcatggaacatgggattagatccttgcttcctccggaaattgagattgttgcagggccgggatgtccggtttgtgtggttccttcaagggaaatcgacgaatgtctgcaactcgtagaaaaaggggttactgtaaccacctttggagacatgttaagagttccaggttctaatggctctcttgcagaggctaaagctgaaggtgcagatgtaagggttgtctacggtattccaaatgctgtggaaatcgctgaaaagattgataatgatgttgtattcatgtctgcaggatttgaaacaacagctcctgcaaccgcttccgagctcttgaaaaagcctcctgaaaacttttcaatcatttcatgccataggctgatccctcctgctcttgacttcttgatcaattcaggagagaccaatctaaacgctctcattcagccaggacatgtctgcaccattcttgggacagagccatttgaaaaattctctactgaatatggaattcctcaagcggtggctggatttaatcctttggatatattaatgtctgtttatatgatattaagacaaatcgatagaggagagcctagaatagacaatgagtataagagagcagttagaactgaaggaaatgtcattggaaaagagatgatggatgaggtcttccatgttgaaagcagggaatggagaggatttcctaaaatccctgattctgttttggaagtaaatgatgagttttcccagtggaatgcaagggaaaagtatgatattgaagtaaaggacgttactgaagctcctaaaggctgcatctgcggacctattcttagagggcttgcaaaaccttactga

SEQ ID NO: 1874 - DNA, 1725 bp, Methanobrevibacter ruminantium
  source 1..1725: mol_type = genomic DNA
atgtataaagataataaaatattagttgtaattcctgcaagaggaggatccaaaggaattccgcgtaaaaacatacgttttttaggtaaaaagcctctcattgcacacacaatagaaatgggaaaggcatccaaatatgtggatgagctagttgtgacaactgacgatgaggaaatcaagttcatcagcgaaaaattcggagcagaaacaatcaaaagggatggaaagctagctgaagactctatcccacttgatccggtaatctacgatgccgcaattcaaaaggaaggaaaaagcaatgaaaaatatgatgttgtaattaccgtacagcctacttccccattgcttaagacaaaaaccttagatttagctattgaaaaactattaaaccccgacaatgaaaacaaagattatgacacaatcataagtgttgtagacgacaggcacttaagctggggctatgatgagaaagaaaaaaagtatttcccattatataaggaaagggtaaaccgacaatatcttccaaaggcatataaggaaaccggaagcatatttgcaacaagaagagaatttgtaaaggaagatagccgtcttggagaaaatataggtcttattgaagtatccaaacaggaaagcatagacattgacaactatgaggactggtgggtagctgaaagaatcctaaacaagaagaaaatcctaataaaggcagatgcctcccacgaaataggaaccggccatatttacagaggcctctcaatagcttcaaagcttgtaaaccacgaagtgattttccttcttgatgaggctcaggaattaggaattgaaatagttaaaaacaacaactatccattcataacccataattccaataaaggaaagggtaaagaggcagatgaaaaagctaaggaagagattatagaaaagatagtggaatacgacccagacattatcataaatgacatactaaacaccaattcaaaatacacaaagacccttagggataatggatttttcatagtaaactttgaagacgttggcggaggagtcaaatacgcccatttagtatttgatgcactatatgaacataagatacctcttaaaaacctttattcaggacacagatattatatcctgaaagatgaattctattaccaatcatttaagaaaatagacaaggaggttaatagaatccttcttacatttggaggaaccgatccaaacaaccttacagaaaaaacgctggaagcaatactggagagcaaataccaaaacgagattgaaataatcctaggattgggatacagcaaaaaagaggaaatccaagaaaaatataaagacaacgaaagaatcagcatctatgaaaacgttaagaacatgagcgaacatatgcataatgcagacctgatattcacttcagctggaagaaccatgtatgaaatagcatcccttggagttccttgcatatgcctctgtcaaaatgaaagagaattaagccatatctttggaaacatagagcatggattcattaacttaggtcttggatccagagtaagcaaggaagacctaatcagaacacttgaaaacacaatcaacgattatgaacttagaatagagatgaataaaagaatgggaaacgtagacttaaagcatggatttgataatattagaaaactgataaagaaggaatataaaaattggaaagcagaacagttaaacaaataa

SEQ ID NO: 1875 - DNA, 840 bp, Methanobrevibacter ruminantium
  source 1..840: mol_type = genomic DNA
atggaatcaaaagacattacaaatattgaagagattataccaagcaatgacgtatatcctttagtaaatctactattccaaagcaaactcttcaaatcaaaagaaataaacacaaacagccttgcaatcagctgtcttgacctaatcgacaaaaacagaataaaaatcacattcaatgaggaaatcgaatcaatcaaaatcagcaagaaccctcttcttaagacaaaaggccaattggaaaaagaattggaactcatgaaaaacatcaaatttacaatcaattcaaaagagatgaaaaaactggataaaagagaccaaatcatcttgaagatgtttaaggacatcaacaaaaaccatgaatttgacttaaaatccatgtatgataagatcctaaagcaggatatagcaatcaaatttgcaaaatacttcaaagattattccaaatcccttgaaagggaaaccaaatactcattggaaaactataaagacctcatcaaggatggagagtttacctttaagggaaatgaaataagcaatgaatggaaagaattcaaaagctctttaaaatcagataagtccttatacagccaagacgcagaaataattgacaaatatctgatttatggaagatgccttgaaattgaaaaggatgttctaaaaaacattgaaaaggcaaatccagactacgattcagagctttacagattcctaaggcataatggtgcagacttattgaagctaatatttgataaggcacttgcaaacagcaagatagaaagaaaaggagacggttcagtacctgttggaaacagcaaatacttcgtcccaggattcggataa

SEQ ID NO: 1876 - DNA, 1071 bp, Methanobrevibacter ruminantium
  source 1..1071: mol_type = genomic DNA
atgaccatattcaatgaagaaccattcctaatagccgaaataggcgtaaactactacgacattgcaaagaaggaaaatatatccaatatggatgcagctaaactaatggttaaggaggctcatgacgcaggatgcaatgcagttaaattccaatcatataaggcaaacaccatagcatccaagaattctccagcatattgggacacaaacgaagagcctacccaatcacaatacgaactattcaagaagttcgactcctttggagaggcagaatatagggaaatcgcagactactgcaaagaaatcggaatcctattcctatcaacaccttttgattttgattcaatagactatctagacgacttcatggacgtttataaaatatcatcctcagaccttacaaacatcccattcataaaaaagatagccaataaaggaaaggacataatcatatccaccggagcatcaacccttgatgaagtaaaactagctatagaaacaatagaaaacgctaacgacaaatacaaaaaaggagaagctggaatcggaatcatgcactgtgtgctctcctatccaacagcaaatgaagatgcaaaccttcttatgattaaaaaccttaaggacctttatccaaattatgaaataggatattcagatcatacaaagccagatgagaatatgctcattcttacaacagcctatctttatggcgccactatccttgaaaagcactacacattagataagacacttcaaggaaacgaccactatcatggaatggacccagatgacattagaaagttcaacaaaaacatagaactgataaaaacaattaacggccaatatgataagatacctctcccatgtgaaggagaatcaagaaaacaggccagacgctcaataattgcaaaggaagaaatcggtgaaggcacaataatcacagaggatatgcttacatataaaaggcctggaactggcatttctccaagtgaaatagataatgtagttggcaaaaaagccaaaataaccattccagaagatgaactgattcaatatgactttttagaataa

SEQ ID NO: 1877 - DNA, 1527 bp, Methanobrevibacter ruminantium
  source 1..1527: mol_type = genomic DNA
atgacttttacagtaaaggaaatatgccaacatatctggtctcttgaagagaaatatgaactgaaccacaaagagattcaaggctgctatccatggcaattaatcagaatgtatctctactacgaaataaccagaaagacaaatgtctttgagtcagctcaacagtccagtctttccctagcggataaagtaaatacattccttccttttataaaaaacagcattctttcaaaccccttaagcggaaaggataccaaagatgttttaatattcgaccatccaagaaaagtcatattaaatggggaataccaagacatctatagctattttctaaaggacattctaataaaaaacaataaaagctttgaaacaatagaatccccatatctaaacaatcatttcagaagcagtgcaaataagaaagaaaataatgtcaaatacaatgaccgaatccttttaggctcttttataaacaaaaccaaaaatagaggaaaattgccatttacagatgaagaaaaagactttatcgaaacaataaaaagagaattagagtctgcattcaaaatagaaataaatctattcaatattattgaagatcacatacttaatttccaatatgattataaaaaatatatagagcttcttgaaaagagaaagccaaagcaagtctatctggttgtagcctatgaaaacaaggcattagttgcagcatgcaagaaaaagaatatagaaattattgaattacagcatggaaccataagtccataccatttaggatatagttacccaaaaaatacaatgctgatgaacaatacaatcaaggaaattgaatatttccctgataaaatactaagttttggtgactactggcaaaattcttcaagcttccctatagaatccgataagataatctcaatgggatttccatactttgaagacaactctaaaacttttatgaagatggcagatgaggataaaaacaaaaagcaaattctattcatttcacaaggagttattggaaaatacctttctgaattggcttatgaactggctaaagaactaaatgaaaaaaataagaaaaatgatttagagaatagtgaaaataatgaatctgatttagaaaataataattatacattcatttacaaattacatccaggagaatatggaacttggagagagaattacgaatatttaaataaagcaaatgaatttgataactttaaagtcattgataaaagcgagcctcctttatatgagctatttgcaaaaagcaactatcaaataggggccttttcaacagcaatctacgaagggcttgcatttaactgcaaaacattcatcatagacgttccaggagtggaatatttagatgacttgattgacaagaatattgtaaaaaaggttaaatcaagtgaagagctgattaattttattgaagatgaagataatttagatttaaaggaatatgataaggattatttctttaaaaacttcgacgaaagcatatttgatgaaatattataa

SEQ ID NO: 1878 - DNA, 1443 bp, Methanobrevibacter ruminantium
  source 1..1443: mol_type = genomic DNA
atgagtgaatacgtgcgatttatacaaagaataggtctagtcgggattacaaacatcctaatatctcttagtagcctaatctttattccaatcattacaaaatcctttactacagccgaatacggaatgtgggctcaagtaaacactaccatcgcacttgttccaaacatagccaacctaggtcttccatacaccatggtacgattcctgtctgctgaaaaggataaggaaaaaataagagattccttctatccaatgataagcctgacattcatatcaacagtgatcatctgcctattgtttttaatatttggacaccctattgcagatgcgctctttaatggaagcatgcaggtattgtacatcacaactgcaatatccttctttgcatgcatgaacctaatgctcataacctactttagaaccttccaggaaatgaaaagatattccctattccttgttcttcaaagctatataggggtttttgtaagcatctaccttacatatgcaggatacaatatagaaacagttgttctcggtcttttaacaggctatgcagcagtattcatcatgatggcatttctcattgtaaggcatcttggattcagctttggaaaatggtcaaacctaaaggaacagcttgcctttgcccttccaaccattccaagcaatgtttcaagctgggtagttgattcaagcgacaaatatgttattggaatccttttagggtcagtggcagtgggatgctattcaccaggatatgccttaggaagcatattgctaatgttcctatctccatttgcagttcttcttccaacgattcttccagagcattatgaaaagggagatatggcagaggtagacaaatatctcagctattcaatgaaatactatcttcttctcactgtgccagcagctgtagggatgagcgtactctctaagccattgctttacataataacaaccccagagattgctcttggaggttatatggtaactccatttgtctgtctaggtgcaatattcatgggaatgtatggaataaccaataatatacttatactagagaaaaacacaatgatccttggtaaattatggataattgtagccatatccaacattgttttaaatctgattcttgtgccttatctaaatataattggagcggcaatagccacacttctctgttatatgctagcatttggagtgactgccattgcaagcagaaagacaatgagattgcctttcaatagaaaggaacttgtaaaaatacttattgcatcagcgattatgggtgcagtggtttatatgatgaatccaagtggaatagttaatgttttagtggctatattagtgggagttgtggtttattttgcaattatatttgttttaaaggcagttacaagaaaagaaataggtatatttaaagatttagtaaaataa

SEQ ID NO: 1879 - DNA, 507 bp, Methanobrevibacter ruminantium
  source 1..507: mol_type = genomic DNA
atgatttcaaagatttttaacattaaacaaagcattaaaagggcttattatacatatagggtaaagagagtgtcaaagtcctgtggagataatctcactgtaaacaattactcctatgtcactccaaagacaagtctggcagataatgttaatttcaatggcatgaagatacaaggaactgccaatgtaagcataggaagcaatttccactctggaatcgactgtatgataatcacagacagccataactatgagggggaagcgattccttatgatgagactgtcatttcaaaggatgttgttattgaagataatgtatggattggaaatcgtgtaataattcttccaggagtctgtattggtgaaggggctataattcaggctggaagcgttgtggtaaaggacattcctaaatgtgcaattgctggaggtcatccggcaaaggtattttcttctagagataaggagcattatgaaaaattaaaagaagaaggtaagtttcattaa

SEQ ID NO: 1880 - DNA, 1986 bp, Methanobrevibacter ruminantium
  source 1..1986: mol_type = genomic DNA
atgaaggttgtagtatgtgagaactgtggtgcaaaatatcaattaaatgatgatgatgatattaatgcatttgaatgttccaattgttctggaagtttaaaagaacttgaaagcttttcagatgaagagattcctaaacaatctgatgaatcatctggatctgattcagttcttgtttattgtataaattgtggtttaaaattccagattgaaaaagatgacaatatcaatgattttgaatgtgcaagctgtggaggtcctttagattatctttccaataaatctgaagaatctcaagagtctcaaatctctcaagactctcaaggttctgatagttattatgaaactgtttcttatgttcaatctgatgacatcattcctattcatgccgaccctaattattctgattctgatgacatcattcctattcatgcagaatccgattcccaaaccccatattacgaagaacttatagaatctgatgaaatttatgcaaatcaatacgaagatgatgatcaatactatgtaagcgaatatgagaaagttcttcaatctgatgctgattcctactatgaagacgaatatgacgatcaatactaccaaacagaccttcaagaagaaggctcaggtcaaatcagcttagatgagctttattatacttcagaatatcctgcttatgatggaactgatgaaattattcctattcatgctgaaaaaagatatatggaagattcacaggattcaggatttgcatatggtcctaatggaaaatacgctgaagactacttagaggaagagtatattgaagaggagtatgttgattctgtcgaagaggaatctccttatgtagaggttatagacataccagaggatgagttgccagaaactcctgttgttttaacaaggcaagtcctatctgaagaggatcaaaggctatttgacagggttcaaaaccaaatggtatttgacagccctgaagaatatgaggcatttaaggcagccagatacaaatattatgtaggattattggatatccttaaggaggaatatctcctttcaatggaaaatgaattcaagtctggccgttcagttaaaaacctaatcaaaaaaggcggagagacagttaagcaaagcaatttatatgctgacgattctgattcattggtctcacctgaaactgtggaattgatgaaatcaaatcgcaaatatgagcctaaaaagtccaatgctgatgttataatcatagcaggattttttatagttatagtttcccttgcttactatttctttgtaagccaaataatgtatgttctcattgcatttgcattaggtttggttattttggcctatggcgcttataagaaatatgtcttcaatgaatatattgcaagaggcagaatcatccgtgaaaggttgcttgcccttccaaatgatttctatgtattctatgcagttcagccaccacaatcaaaggacattataaatcacgttgttgttggacctactggaatatttacaattctctctcaaagatatgattcaaaggattataagaataagcttaagtctgacactgaaacaggagatatgttaagcgaatccgcttccattcaagactataggcaaaagaagaatactctagagcttcagactgattatgatgacaatcaatcaagattccaatttggtaatgaagagattcatttcactcaaaacagccaaatcaaacgtaaggcattggaattaaatgaagacttggctattttccttgataagaaaggattcaatggaatctatattgagccattgatcggttttgtaaatgatgatttggccatattgaatgtaattctaaccaatgaggaccttttcattgatgagctattcaataaggtaattcgtggaagaaaaagattggatgagcttacagttgctaaaatagcaaggctactttcttattattctgcaaactgtgatgtatattaa

SEQ ID NO: 1881 - DNA, 1173 bp, Methanobrevibacter ruminantium
  source 1..1173: mol_type = genomic DNA
atgaatattttacatgtggctcatttcttctatccatgtctgtctgctggaggagtagttaatgcaagttatcaaattgctttaaatcaagtaaaagataataatgtgcatgtttacacatcagactcctgtaagcagcgattgaaatttgaagatggtcgttatgatgtagatgtggatggaattaaagttgattactttagaaatctgtcaaacagatttaaattagctaccatgttagacactccactttccgcttattttagaattagaaaggatataaaaaatcatgacatcattcatattcacgaacataggcagaccttagctattttagtaagccattatgctcgaaaaaacaatattccatatattgttcaggcccatggatctgtacttcctttcttccaaaaggaaggattaaaaaacatttttgataaggcatttggatttaagatacttcataatgcatcttgtgtatttgcccttactgaagtggaaaaggagcaatacattaaaatgggagtctctgaagacaagattgaaatagtccctttgggaataaatattgaagagtatgagaatttgccagaacctggaaagttccgttcaaggttcaatattgctgatggggataagctgattctgtttgttggaagaatccatgaaatcaaaggccttgatctattgattgatgcctttaatcttttaattaaggatagttcttcccctataaagttagctattgtagggccagatgatggctatttggacactttgaatgaaaggatagcagagaataatctggaatctcaagtaattattacaggacctttgtataaaagagaaaagcatgaagctttagtggactgtgacttgtttgtaatgccttcaaaatatgaatcctttacaacaagtgggcttgaggcaatggcttgtggcaagccattggttttaaccaaaaacaatcatattcatgattgggttgatggaaatgtaggcatttcctgtgatgatgatgaaatttctctaaaggaagctatgaaaaaacttttatttgatgatgatttatcagaaacatttagttcaaatggtaaaaaattaattaaagaaaaatacaattgggatatgattaatgaacagattttaagtatttataatagatttatctaa

SEQ ID NO: 1882 - DNA, 1788 bp, Methanobrevibacter ruminantium
  source 1..1788: mol_type = genomic DNA
atgatgttttctaatatttccaaggatttaaatattgaaagaaaggattatttatgcctattccttttattggtctatagcgcaataataactgtccttttaatcaatttcaatgaaagtattggaatatattgttcagatgtctatatctatctttataattcccttgtatttgcccgaatgggctataacaacacttatctatatctctctcctttggattttggtcttgtggaacttcattttttatttagactcggttttgtgaatgaagtgtccatttatgctgttactggtgtattttcaatctttggaagcttaggaatttatgttttgctgaaaaggtatttcaattctcttttaagccttgccggaggagtgctttttacaagcttttcattgaatctgctttggtgggcaaatggaactttagacttgcctgctgtaggattgtctgtttgggcgattctatttttaatccttgcagttgatgagagtccaaaatattatatcctttcatttgtctttttggtcttaagcatcttcactcgctacacctgtctctttctgattccattgtttttgctctattacttatctaaacatgatttgtttggctttttagattcattaatctccgatagaaaagaagccttttcaagtctaagatcatttttaaaaactgaagagttcagatatcttatgattgcattggttctggctttgattgttgctgtgcttttcatttcagtgattttatattatggggctgaactttcatttctagagcagggaagcacattcgcttcaggttcaaagggagcattggatgattatgcacatactacagataccttattctacttccatgactttttaaactttttattctcccaaaaggtgattttccaggagaatttcattccaacccttaccggcgcaagctatcttgcttatttgattctatttatattgataattggaatttcactgggtatttatagatttttcaataagaacaaatcagaggataaaaagcaatttgataatgttaattcttcaatttcaaatcttaaggaattttcttttaagacaagccattttaaaacacttttgtatattggattgttactttcattggctattgccattttaggattcaagataaattcaataatcacaattgcatttctattgatagggctggttatcatattttccttgctaaagtctaagggtcttgatagaaaagactattctgtccctatttttatgataggatggtttttagtctatttcatattctttacctttttaaacataaaggtgaataggtatataattacagttttcccagcattcatctattttgtaattctggctttaaatgaaattattgggcttttagacggcaaatctttaaagattggtgacttgaatttgtcaaatataattccaatagtgttgattgtattgtgcatgttttctgcattttcatttacaagcacttttgaggataatttagactttaatgactataagatagttgcagattatttgattgattatgatggggattatgcatcaaaggacattgctgtatttaagcaaagaacctttaattggtggttaaaggattccactattgctgttaccacagatcagttggatttcttggaatcaagcaatataacttactatatctgtgatgaagacttaaaactggagaactatacaaagatttataattataaagacatattcttatatgaaagagtaaataattag

SEQ ID NO: 1883 - DNA, 882 bp, Methanobrevibacter ruminantium
  source 1..882: mol_type = genomic DNA
atgaacccatatttagaaattattaggccgggaaatgcagttatggcagccatatcggttgtcttaatgatgattgtaggccattattacgacttgccaatcattctttgtgcagttatcgtctttgtttgcactggcgctggaaatacaatcaatgatgtattcgattataagatagatgaaatcaataagccaaacagaccaataccttcaggaagaatcagtctgaagaatgcaagaaactattcctaccttctttttgcaatcggaatcatcctaagctttgtgattgattatatgatcaattccatatggccttctgtaattgtcgttccagcagttgtaatcatgtatctttatgcaagaaaccttaaggcaatgcctttgattggaaacatcacagttgcaaccttaacagggttctgctttgtaattgcaggaactgtaatagcttgtgctacctcctctttaaggatattgtttatttcaatttatttgggattgtttgcactatttatgactttggcacgtgagattgtaaaggatatggaagatattgaaggtgacaagctagagggagcaagaacatttcctatattatatgggaaaaagattccttccatcgtttcaatcattctaatcgttgtaaccactttgatgtgtccggttctttatatatttggaatctttaatgttttctatatgattgtgatgatagttccaatatgcatgttcctatactgcgcttatagtttgaagcttaatcccccagaggaagtttgtgcaaaggtctctaagaatctaaagatagctatgctaataagctttgttgcttttgttttaggttcatttgattggtttagcatttttgctgctctttaa

SEQ ID NO: 1884 - DNA, 1371 bp, Methanobrevibacter ruminantium
  source 1..1371: mol_type = genomic DNA
atgaagaaagttattctaatagcattttattttaatcaggtaaatgaaatagcttctaagcgtttaagggctttagctaaatatttgcctcaatttggctgggaagttgttgtaatagttccagatttaggttatgaaccttcctcaaatgcagatttaagctctagaataataactactgaatatgaagacatgttttcccatatatttactaagtttaagcctggagataaaagcaagcttaatgataaatcagataatcattccacctcagacagtcaaaagctaaaggattcctcttctgtttctaatccaattgcctcaaaggcaatctctatagctggagaagtctttgcatatcctgatggaatgaagtattggtatggtcctgcttatgaagcagcttccaagatagttgaagaagaaaagatagatgccataattagctcctcttggccgattacatgccatacaatagcaaaggacatcagcgataaatataatattccttggatagctgatttaagggacttatggaatatggatccttatatttcacacacttttattagggattattttgaaaaaagattagaattgaagacatttgaaaatacggatgtattgacaactacaacagatttggctgctaaaacattagcaacattgcatcccaataatcgtatagtgcctattttatctggttacgatgaagatgactttaagtttttagagagtgttttagaggaaaataatgattctgattctagtgaagattctgtttctgctggggattctaattctagtgaaggttctgtttctgccgagaattctaattctagtgaagattctatcactacagttgattcaactgatagaaaacttaaacttatctatgcaggttccttatatggtgggaaaagagatccaacattattatttaaggccattcgccaattagaagacgaatctaaattggatagttcaaatatttccatagagttctatggagatagcggcaatctggaagagattgctcgtgaatattctctgcttgatattatcaaaatcggtggcaggatctcccacgaagaggttttaaaaaagcaattagacagtgatgttcttttactcatatcatggaataatgaaaaggagaaaatgtttattccaggtaagatctatgagtattttgctttgcaaaagccagttctatcaatagggtataaggaaggatcccttaaggacttgatagaggataccaatgtaggatatcatgtctcagatttagaatctacaaaaaaggttattttagatatttataatgaatttataagccttggcaaggtggaatttaaaatcagaaattaa

SEQ ID NO: 1885 - DNA, 1095 bp, Methanobrevibacter ruminantium
  source 1..1095: mol_type = genomic DNA
atgagtaaaattaaaattgcgattgtaggaatcggaaactgtgcaagctctcttatacaagggatttactattataaagataaaaaccctgaagatgcaattggacttatgcattggaaaataggagaatgggacccaacagacattgaagtggtagctgcttttgacattgacaaacgaaaagtgggaaaaaccattgatgaagccatctttgcaaagccaaactgcaccactgtattccaagaggaaattcctaaaagtgatgttaaagtttgcatgggacctgtccttgatggtgtaagcgaacatatggctgactttgaagaggattatacctttgtagtggcagatgaagaaccagttgacgttgttgaagtcttaaaggaaagcggtgcagaaatcttgctcagttacctgccagtaggttcagaggaagctgccagattctatgctcaatgtgcattggatgcaaatattgcttatatcaattgtatgccagtatttattgtaagtgacccagaatgggatgctaaatttagagaaaaaggaattcctattgtaggtgatgatattaaagcacaaatcggtgcaaccattactcatagaacattaagcaatctctttaaagaaagaggagttaaattagatcatacttatcagataaacaccggaggaaataccgatttcatgaacatgcttaaccgtaaacgtttagactctaaaaaggaatctaaaactgaagctgttcaagcggtccttgctgaaagaatggaccctcatgacatccatatcggcccaagcgattatgtgccatggcaaaaggacaataaggtatgtttcttaagaatggaaggcagaacctttggtgacgttcctatggaaattgagttaagattaagtgtggaagactcaccaaactctgcaggatgtgttattgatgctattcgctgctgtaaattaggtttggaaagaggaattggtggacagctaacttctatctcttcctatgttatgaaacatccacctgaacaatttacagatgatgaagctgctgcaaaagtagaggcatttatcaaaggcgaaattgaacgttaa

SEQ ID NO: 1886 - DNA, 1722 bp, Methanobrevibacter ruminantium
  source 1..1722: mol_type = genomic DNA
atgaaagtaaaaataactgaaaccgcattcagagatgctcaccaatcccttttagcaaccagaatgagaacaagagatatggttcctattgctgaagagatggataaagtaggatatcatgcaattgaagcatggggcggagcaacctttgacacttgtataagatttttaaacgaagatccatgggaaagacttagaatattaaaagaaaactttaccaacactcctctacaaatgctcttaagaggtcaaaacttactcggatacaaacattatgcagatgacattgtaaccaaattcgtagagaaatcctatgagaacggtgttgacatctttagaatattcgatgctatgaacgatattagaaacatggaacaatccattaaggtagctaaggctcaaggagctcatgttcaaggaacaatcagctacacaatcagcccagttcatactgtagacaagtttgtggaatttgctaaagagcttgaagcattggaatgtgattcaatagccattaaggatatggcaggtttaatcagtcctgctgttgtctttgaattggtttcaagattaaaggaagaaactgacttgcttgtcaacttgcattcacactgtacaagcggtatcactccaatcagttattacgctgcttgtcaagccggagttgacattttagacactgcaatctctccattggcttggggtacttcacagcctcctaccgaaagtattgtagcatccctgcaaggaactgaatatgataccggattggaccttaagacattaaaccaaatcaagaaatactttgaaacccttagggcaaaatacgaaggctatattgacccaatcagtgaaagaatcgacactgacgtattgatgtatcaaatccctggaggaatgctttccaacttaatttcacaattaaaacagcaaaacgcattggacagataccaagacgtattggaagaaatgcctcgcgtaagagaggatatgggatatcctccacttgtaactccaacaagccagattgtaggtattcaagctgtaatgaatgtaatcaatggagaaagatacaaaatcgtatctaacgaagttaaagattatatgaaaggttactatggccgtgctccagcaccaatcaatgaagaaatcgccaaaaagatcattggtgatgaagagcgtatcacctgcagacctgcagacttgattgagcctgaatatgacaagttcaagaaagaggctgaagaccttaagaacttcgagaaggaagaggatgttctcacccttgcaatgttacctccagtagctaagcaattccttaacggagaaatcaaggaagaagacttcccagagaaaaaggttatagatgatggcggaatcagtgccattcctactgaatactctgtagaggttgatggtgatgtctttgatgtaaagatcatgccaaccggatacataaagattgatggagaaggcagtgagccagctccagttatcgaaggtgctattactgcatccatgcaaggtatggttcttaaaatcaaggtaaacactggagataaagtacaaaaaggctctgttgtagcagttcttgaagctatgaagatggaaaacgatatttatgccgaagaggatggtattgttgaacaaatattcgtagaagaaggagacactgttaacgcaggagataatataatggtaattaaaggattagatgaataa

SEQ ID NO: 1887 - DNA, 606 bp, Methanobrevibacter ruminantium
  source 1..606: mol_type = genomic DNA
atggataaaagaataaattttgtatcaatctctagatttaccctccttgtggctatttttctattgataataaataagatacagtttcatgcaaagattttagattatatggccttagctttagccatatttgctataatttgtattatcatctttatcatacaatttaaaaagggattggttgagtttcctattaaagttgttgttgaaactaatgttgataaggctttggctgatggggctattactgaagagcaagcggaaaatattccaaagagggttgttcttaatgcaaacgatatctttttaaatttagtctttaatcttgcaattgccaatcattttgatctcttgcctgtagacgttcttagggagtatataccagacattcctccagctaatcttatgagattgtatgaaaagtctagagagataagtgatgatttgaatgattactttaggtctcaaaagttcttaaataaggccgatgttattacccgttctgatgagataaaaacatatttgagagagacttatccttggatggatgatgttactttggataatacttttgattacttctttttaggaattggtaatggataa

SEQ ID NO: 1888 - DNA, 1275 bp, Methanobrevibacter ruminantium
  source 1..1275: mol_type = genomic DNA
atggtttttattattgaccctcaaaatgcaggaatatctgggaatatgattattggagctcttgttgatttgggagcagatggcgaaaaggtcaagaaccttatggaagatgtggcttacgactttggagaggtagaggtttccataactaaagtcaataagtcaggtatcgaagctaacttctgcaatgttaaaacaatccatgatgaagatgaaaataatcatcatattcattttccagactttattgataagattgattcactaaaggagcttgatattgaaaacttgactgatgaaatcttggatatggctaaaaatgtctttaagcgcatagccatttctgaatctagagttcatggaaaatctttggaggaagttcattttcatgaggtcggggcagctgatgctgtggcagacgttttaggtgcaatctgcgcttattttgacttggatatggacaaggaaagggttgttggattgcctatttctgttggaggaggcactgtaaagacagcccatggaataatccctgttccggcacctgcaagcttggatattcttaaaggcttgaatgaggatgaattcaatgacttctataagggagaggcacaatgccgaggagggcctgttgaaagcgagcttgcaacacctactggttgcgcattgtatatggaattctgtgatgaattccttgagtttgctccaatgatgtctccagagagaatcgcctatggctgcggctctaaggaatttgatttccctaatgtcataagagtcataaagtcaaaggatacaaatgagaagcatagagtttgtgttattgaaaccaatatagatcatatgtctggggaagaattaggattcctatttgacttgttgcttgatgctggagcttccgatgtttctatggttccaatagtgatgaagaagaataggccagggcaattgattaaggttatctcaaagccacttcttgtagatcatctagtgaatatattatttaagcaaaccggaacattaggcattagggtttctgaaaacactcataggggaattgctgaaaggcattttgttcctttagacattaatattaatgataggatttataccattaactttaagataggtcttattggggatgagattatttcccataggccagagtatgaagaccttaaaagaatctctttagaagaggacattcctttaacagagattaaggaagttgcaaatacaatgattcgtgattttttagagaataatagagaataa

SEQ ID NO: 1889 - DNA, 1218 bp, Methanobrevibacter ruminantium
  source 1..1218: mol_type = genomic DNA
ttgtctaaaaaaaataaggctaataaaaacaagaaaaagaaagaaagtgaccaaaccattcatgaattagagattggaaaactgattaaaaacgaagatgtgctatacataaacaatccagattactttctgacattcagcgacctggagataagcgatggaatagacataattgaaaacatcatgattctctctaaagattatgttagctttaataggcaatatgaagatgaaaagattagtgacgttgaactgatggaaattactgaagaatataaggaaaacaacaatatagaaggaggatacataagccaaagctttgataactcccaattcatcataaattcctacaatgacataacaataatcacagtaatttctaacgatttggaagtccagaagttcacagacaatctgaaagttgtaaacagctggaaaggattccacaatgcaaagataaactttggacagatcattctaatagaccatgcattaagccctaagctgctcattcagctttataagaccgcaacaaagcaaaaggcaaaattctttgaatcccttcacatgcccctccatataaacaatatcctaaacaatgaagatttcttggttattgcttccaatctgccagaagagaccttaaatcaggattatataatggaaataggattggacatcacaaatatggaatatgaagatgacaaactggaccttgaagagtttcaagaaagaattgaagatggggtcaccataagctgcgaggacgcaataagaaagatcaatctgaatattggaattctagattactttgttagcgaaggaattttaattggagatttggtagagcttggaatggaacttttagaaaacacagagcctacagatgagctaaaggaaaagctgaaaaagcaattgcttaaatctgtcagtgacagaaacattaatgcattgattatggctgcaatacgactggaagatgattttagaaagcaaagagttcgtgagatagatttaaatgaaaaattagttcatttctatccagatgagattattggagtagcaatagccaatcaaatatccggaactaaaggagtcttaaattacagaagatattcaaggcataaaccaggtatcttgtatggattaggccctatattatccaatacctttgcaggacttgttgcaggttgtatgactaaaatattggaagaataa

SEQ ID NO: 1890 - DNA, 837 bp, Methanobrevibacter ruminantium
  source 1..837: mol_type = genomic DNA
atgaaagaaaaaaacaatgatgactattttgaaaagcaaaacccttccattttacgctcaattggaggattattcacattttcaaccatcctgccattaaatatctacacaacaattgatgaaatggcaaaaatgacatggttctggccagtattaaatggaattgttggtttgatagctgcaatcatcgcatttatcctatgcagatttgcacatttggacggattggtcattggagcaataatttatggattcctattaataatcaacggatataatcactttgacggattgatggactttggagatggagtaatggttcatggagatcctgaaaagaaattaaggattatgaaggacccgatgactggagttggcggaatagccacaggatttatcgtcggaactataacaattgcattatattcatcattgattgattattcctatatgataagcccagatttcattttgctaatcatagttgctgaaattgcagcaaagataggattaacaacctgttgcatcacttcaaaagcaggaaaagaaggaataggcaaatactttataaaatatatgaatattaagaactatattgttggacttataatttgcttaatcattgcatccttacttagcatgaggataggatcccagataggaattttaggaataatcggaggagcatttggaggtgctttaactgcactaattgcaaaaagacatcttaagattgcaaatggagatgttcttggaacttctaatgaactaggaaggttattttcattgcttgcgatgctaattgcaatttcaatgcattttagtgtattaatataa

SEQ ID NO: 1891 - DNA, 558 bp, Methanobrevibacter ruminantium
  source 1..558: mol_type = genomic DNA
atgacaataaacgttttaagattagatcacagaattggaagagacacacgtattacaacccatgtatgcctaactgcaagagctttcggagcaagcaaagtatggttagcaggtgaagaggaccacagcatgatgagaagcgttagagacattgcagacagatggggaggagactttgaaatcgaatataacaattcatatatggaagtcataatgaactggagagaaaaaggtggaaagatagttcatttgaccatgtatggtgcacaggcccatgaggttgtagatgaagtgcgtgaaagctctgatgacattttaattatagtgggcggagcgaaagtgcctacaaaagtatataaaaacgcagactggaatgtttctgtaaccacacagcctcactctgaagttgcagcacttgcaattttccaacatttattgatggaaggaaaagagtttgacttggaatttaaagaccctgtatttgaggttattccaacagcccatggaaaaacagtaaatgttcataatgaaaatagaaaattaaataaaaaagaataa

SEQ ID NO: 1892 - DNA, 1122 bp, Methanobrevibacter ruminantium
  source 1..1122: mol_type = genomic DNA
atgcaaagaagaggtacaaccaatctgccactacatggaggtcatacgccacgttggctatttgatcgtatgaccaagctttcaggtgcaattactgaagtagtaattgacgaatatggtcctaatgaatttttaaacagaatctctaatccttactggtttcaggctttttcctgtgttctgggctttgattggcactcttcaggtacaaccaccacaacccttggagcgttaaagtcttcaattgaccctgaaaagcatggaatttacatctctggcggaaagggctctgcttcacgaaagacccctcaagggattgtaagggctggcgagatattcaatctaaaaagctctcatgtggataatatggtaaactccagcaaattatctgcaaaggttgataattcctgcattcaggatggctatacattatatgttcataatttcttcataaccgaaaagggagattgggctgttgtgcaacagggaatgaacactgaaacaaagtatgctaggcgctatcattggatgggggagaatgtagacagtttcctgcaagaccctcataatggaatttcctgcgataaaaaggaaaaggaagctttgaatatggcttcaaaggatagtgttgaggctcaaaagataagcgttgatttaatcaatgacaatcctaaccatttaagggactattttaaaagaaaagattcaaatcagcttcttttaactgatttcagcattagccaagagaatacccttacccttcctcctcatcatcaggtattggatatggatttgtctgataaggaatttcaagtattaaagaatgcttgggaaatacagcctgagaattatgaagagcttattttattaaatggaataggtcctaaaaagattagggcattggcattgatttctgatttggtatttggtgagcctgcaagctggaaggatcctgttaaatacacattcagtcatggaggcaaggatggatttccttatcctgtggatagggatgtctatgacaattcaattgcaactgttaaggatgctctttatcaggcaaaattagataagtatgataagatgaaggccttaaagagattggatgattttatttcttaa

SEQ ID NO: 1893 - DNA, 501 bp, Methanobrevibacter ruminantium
  source 1..501: mol_type = genomic DNA
atgaaaagaataactactccaattagtgatgatgatattaatgatttaaaaataggggataagatttctctttcaggaaaaatgtattgtggaagagatgcagttttgcctaaattatccaaatctattgaaaatggccaagaggataagtatccatttgattttaaaggcatggcaattatgcatactgcatttagtgtagcaggtatagctccaactacaagcaataaggcagaaattgaatcttctatggaagcattatcatctgctggagttaaatttcatataggtaaaggttccttatctgatgagactaaaaaaactttggataaatataattctatttttattgtaactcctcctgttgctgcacttttaacaaataatgtaatttctaaaaagtgcgtcgcatatgaagaagaaggtatggaggccttctttgagctggaagttaaggatattccaggtattgtagcaattgctcatggaaagtctttataa

SEQ ID NO: 1894 - DNA, 1167 bp, Methanobrevibacter ruminantium
  source 1..1167: mol_type = genomic DNA
atgaataaggaacctattagcgaagaagaaatttttaaggaattggatttttaccaatctcaagattgcaaatattcagatggtagaattcttggatctatgtgtactcaagcacatcctattgctcaaaaagcttttattcaatttttagaatctaatcttggagaccctggtctttttaaaggaacaaaagccattgaagataaggttttaaaaatgattggttctttcttatccattgagaatcctgttggccacattgtaactggaggaactgaagccaatattatggccattagggctgcacgtaatattgcccgtgatgaaaaaggaataagtcaaggagaaatcatcgttcctcaatctgctcatttctcatttaaaaaggcctcagacattttaaatcttaagcttagggaaatcgttttagatgattcctatcagttggacgctagttttgtagaggatgaaatcaatgaaaacactgtagctattgtaggagttgcaggaactacagaacttggaatgattgaccctattgaagaattgtctaatattgctttggaaaataacattcacttgcatgttgatgcagcctttggaggattttccatacctttccttaaagagataggatatggccttccagaatttgacttttcattgaagggagtcaagtccataacagtggatcctcataagatggggcttgcccctattccagctgggggaatcctatttagaaatgaagagtatttagactccattagtgtaaattctccttatctaaccataaaacatcaatccacaattgtaggaacaaggatgggagcaacatctgctgccacttttgctgttatgaagtatttaggaaaggatggctatgcaagattagctaaggaatctttagataatgcaatatttttagcagagtcagttaagcagttaggttatgagttggtagtagagcctaaattgaatattgtggcattcaatcatcctaaacttgaaacagatgacttggcccaattgattgagaagagagattggaaagtctcttgctcatcttgtcctaaggcgataagagtaattttaatgaatcatattaaaagagagcatatcgttgaacttatatcagacttaaaagacatttctgaatctatttag

SEQ ID NO: 1895 - DNA, 2271 bp, Methanobrevibacter ruminantium
  source 1..2271: mol_type = genomic DNA
atgtatgttataaagtttgaagacttaggtaaagatgacatcggtattgctggtggaaaaggtgctaatttaggagaattgactcaagcaggcattcctgttcctccaggatttgtagtaacatccgaaacttataagaagttcatgatggatacaggaattttcaatagtgttatggatatattggaccaaactgatatcaacaacactaaagagctccaagaggctgctgaagaaatcaagagaatcgttatcgaaactccaattccagaagacatttccacttacatcattgaagcttacaatcaattatcccaaaaggtcggcgtagatgaagctgatgtggctattcgttcttccgctactgctgaagacttgcctgaagcttcctttgcaggtcagcaagacactttcttgcacgttcaaggaattgacaatgtaatcgaatatgtaagaaaatgttgggcttccctttttgaagcaagagctatcttctacagggaagagaacaactttgaacactctcaagtttacattgcagttgtagttcaacaaatggtcgattctgaaaaggcaggagtaatgtttaccgtaaacccatccactggtgaaaacattgccttaatcgaaggatcttggggacttggtgaatctgttgtcagtggaactgtaactcctgataactatgttgtctcaaaggaaaacaatgaattgttgaatatcactgtcagtgataagaaaaccatgtttaccaatgacgaaaatggaacctccattcaagtggacgtccctgaagataagagaaatgaaagggtcttatctgatgaggaattagaaaaattagttgaaatggctaaaagggttgaaggtcattacggcaaacctcaagacaccgaatgggctttccatggcggaaacctattcctattgcaatcaagaccaattaccactcttggagacgctgaagaaaaagcttctgaagaggatgttgacttagaagtattgattaaaggtctcggtgcaagtccaggacttgcttccggtactgtaaaggttatcttaagccttgatgagcttgacaaggttcaagaaggtgatgtgatggtcactaccatgaccactccagacatggtacctgctatgaaaagggcaaacggtatcgtaaccgatgaaggtggagtaacctgtcacgcagctatcatctcaagggaacttggaattccttgtgttgtaggtactggagatgctaccaccacattaaaggaaaacgacaaggtaactgctgacggtaagaaaggtttagtctacaaaggaatcatcaaaggagaagaacctgctgaagcagctgcagtacaagtttctgcaactcctttaatcactgtaaccgaagtaaaggctaatgtaagtatggctgaagcagctcctaaggcagcagcaactggtgctgatggtgtaggattacttagaaccgagcacatgatgttatccactggcgttcacccaagaaaattcatcttagatggcgaagaagacaaattagtggatgttatcgctgaaggcgtattgaaagttgcagatgaattctatccaaaaccagtatggtacagaactcttgacgctcctaccgatgagtttatcacccttgaaggtggagaggatgagccaagggaacacaacccaatgctcggttggagaggtatcagaagagaattggatgagcctgaaatcctaaaggctgaattcaaggctatcaaaaagcttcacgataaaggttacacaaacattggaatcatgattccattgtcacaacacccatctgagcttagaagagcaaaggaaatctgcagagaagttggcttggaacctcaagtggatgttgaattcggtatgatggttgaaattccagcggcagctattctcattgatgaatacattgcagaaggaattgactttgtaagccttggaaccaatgacttgacccaatacactcttgcagtggaccgtaacaatgaatttgttgcaaaacactacagagaagagcacccagcagtaatggcattgattgaaagaacaatcaagcactgtgcggcagcaggtgtaacatgcagtatctgcggtcaagcaggaagtgtgcctcatattgttgaaaagcttgttaagtttggaattacaagtgtttcatctaatactgatgctgttgaagaggttagaaagactgttgcaagagctgaaaagaaaatcatgctcgatgcagctagaaaacaattataa

SEQ ID NO: 1896 - DNA, 483 bp, Methanobrevibacter ruminantium
  source 1..483: mol_type = genomic DNA
atggttcgtgcttattcaagaagagaatatattagaaaaataccaaataacagaattgttcaatatgatatgggtaatttatctgaagatttccctgtaagattatctttagctgttaaaaaaccagctcaaattagacacaatgctttagaagcagctcgtattgcttccaacagatacatgcaaagatctgctggtagattaggataccacttaaagttaagagtatatcctcacaatatcgtaagggaaaaccctatggctaccggagcaggagcggacagggttcaaagtggtatgagaaatgcattcggtaaggctatcagtgtagaagctcttgtaaagaccaatcaaaaggttatgtctattgacgtaaaccctaaaaacttcgaagatgctaaagttgctttaaaaagagctggaatgaaattacctgtttcctgtaaaattgttgtagaaaaaggtgctgaattaattaaataa

SEQ ID NO: 1897 - DNA, 237 bp, Methanobrevibacter ruminantium
  source 1..237: mol_type = genomic DNA
atgaaaataaaatcaaatataagacttaaatataataattcaaaaaatgctgaaattgtatataaatctttagaagtggataatgagggatttttagaatctgaattaaattcagatgaaatagaatacaatatcaaaagcgacaagcttggaagttttttaaatactgcagatgatttaatagcttctgagatattaatagaggatccttttaaaaaacaacctaaaaaagattag

SEQ ID NO: 1898 - DNA, 1230 bp, Methanobrevibacter ruminantium
  source 1..1230: mol_type = genomic DNA
atggaatgttataatcaccctgatagagaagcagtcactacttgttctgtttgtggaaaggccgtctgtccagattgtgctatggaaattgcaggaaatgtctactgtaaagattgtgttaatgaaattgtaacacaaagcataatggaaaaggcaagcactcaagctcctaaagaggcagccgaaccaataactgaagaagttcaagaagctgaagcagttgaagaagctatcgaagagcctgttgaaatcatcactcctgttcaacaagaggaagttgaagagattatcccagaaactccgaaaaaagctcctgaaaactttgagcctgaagttgaatacgaaacagaatatgtagagacatatgatgaagacggtgtggaagacagctattatgaaaatcctgaaataattccagaacctgaacctgagtataaggaaagagaaagaattgttaaagaggaagcaaaagctaaagaggaagaggaaataattgagccagttcataaaactgaagacattccaaaagaagcctatatggatgatatggaagcagacttttatgaggaacaacctagcaaagctccaagtaaggaccttgaagccaaatatgagaaatatttggaagacctttattacgatgaagatgaaatagaggaagaaatttacgaagctccaaaaactcaaaaaagacgttcaaaacctagaagacctcaaagagaagatagttactatgatgaagaccataaaagaagtcctagaaactattccaaccaaggagaatactacatcaaccctagagaagaagaatttgaggaagaagaatttatcactccaagccatagcagaaaaagagctagaagcgaagaaactgaaagctatgaagagttaaaaagaagaatcgaaagaaattatgctaaagagcaagaagctaaagaaaatcgtagattcagaaggtctaaaaagtctaaaaaacaaaaaagacctgactatgaatatgatgaattagaaaacatacaagaaatgcactcattcccagagtatgaaaaagaggataagattggtatcttagatattatcttagcaataatccttattgttttaattatactgcttatattgtatgttatttatttattcagattaaatggagagtacttcagctttattgactcacttttaggattagtcagagatcctagcggttatataagctatgtacttaactaa

SEQ ID NO: 1899 - DNA, 771 bp, Methanobrevibacter ruminantium
  source 1..771: mol_type = genomic DNA
atggcaatccaagatggtgactttgtaagagtagactttactggtagtattaaagaaactgatgaaatttttgataccacttctgaagacattgctgaagaagctggtattttagtagaaaataaaaaatatggtccaattccaatcattgtaggtggaaatcatttattacctgcaattgaagaggcaattatcggatctgaagctggtgaatctgttcatgtatcagtcactcctgaaaacggtttcggtcaaagaaaccctaatttaattcaattaattcctatgaaagagtttaaaaaacaaggcatgactcctgtaagaggcatgaaaatcagcactgaaaacggtaacggtaaaatcatttctgtaaatggcggaagagtaaaagttgatttcaaccatgatttagctggtaaaaacttagaatatgatgtaactgttgtagaactcattgaagatgatgaagaaaaaattaaaagcatgattgagttacattactcctatcctaatatggattatgataatattgaaattaaattcgatggaagcaccgtttctattaaattagatgagatcactagattcgatcaacaatcctatatggatgtaacttttgctagattcagaatttctaaagacatttgggacaatatggattacgaaaaagttcaattcgtagacgaatttgaaaaaatcgtagaagaagctcctgatgaagaagtagaagcagaagtagaaactgaagtagaagcagatgcagaagaataa

SEQ ID NO: 1900 - DNA, 1188 bp, Methanobrevibacter ruminantium
  source 1..1188: mol_type = genomic DNA
atgccttcaattgattttataagaaatattcttaaagaagataagaaaacattttgcaatgattataaaaaagctcaaaagtctttatctgatgatgatggatattctaatggctcttcacagtcaaaacagtcttatgaaaaaactaatgaagaatctacatccaatcctttaattgcagactttactgagtattctccccttcataatggtcattttcattgcatgaaaacagcaaagtctaaaattccaaacggtctttttgttgctattgttccaggtctttttgagcgaagcggtcggggattgccttatatcatgcatagaaatgtccgggcagaaatagctattgaagttggggcagatattgttgttgaaggacctccaatgggaataatgggatccggccaatattcattatgcttatgcaagatgtttcaagctttaaacacagatttcattccacgaggctataggccttttgatggctatgatgaaatcttaaaaagaatttctatgggacatggtgtagctccaaaaccttataaaatcgttgatatggatacaaaagaaactattcttgaaggaaagcttgaggaagacaattatgttatcgtttccttttccaaatctttaaaaagaataggctttgattttaaggataaatttatttttgtccctcgtattgaaggtgttagcggaactttaattcgaaaagcctgctccgaaaacaaattggaagatgtagagtcaatgcttcctccggaaacattaagaattttaaaaagagaattggataatgataatgctcctttacatgatcagcgagattatgaagtgattttaaactcagcaaacaacttgtcctatgatgagctaattaaattaaacttcttcagtgaaaaattggctaatgaatttattgaaaaacgggaaaataaggagtttgaatctatctctgaaatagaggatgctattttttatggatttagcagccattataaaaatagggttttaagcattttggaaactcaaatgagaggggatgtcatctctaattatattaatacctatccatttaatgttagggttttaaattataagaatgagacagttttaacccaatttgaggaaaaggttttaaatgatcatccttttgtaaattcaattgaattgactaatgaataa

SEQ ID NO: 1901 - DNA, 198 bp, Methanobrevibacter ruminantium
  source 1..198: mol_type = genomic DNA
atgtctgaagaaacaaagattaaacgagtaactatacatgttgaaagtgagttagattatgaatttaggcgattagcttctcagaagtttcgatttgagccgaaatggtacagtaaggcgattaaggaagccattttgttatggattgagaataatccagaagaggactttgaagaccttcctgaagaagatacttga

SEQ ID NO: 1902 - DNA, 1254 bp, Methanobrevibacter ruminantium
  source 1..1254: mol_type = genomic DNA
atgtttgatttggtcttaaaaaacttaaagcttgtaggagagtctggagaattttatattgctattcaggatggaaagatagcaaagatgtctaaaactccaatttcagcagataacgagatggatattaaaggacaatatgtcttgccaggacttatagaccctcatgttcactttagagaccctggactcacctataaagaagattttaaaacaggttctatggcagcagccaatggaggatttacctttgttatggatatgcctaatactcttcctaaaacaaacacatacaaggcatttaaggataagttagaaatggccaattcaaagtcagttgttaatttcggccttcattcaggtcattcctcatttgaagagatggaaagaatactggaattgaatccaatgtcctttaaggtttttatggatcttgaaagtgatgaacgtcttagggagatatttaaaaacatttctaatcttgatggaaatcctattttaactgttcatgctgaaaagcaatccattgttcgagaaaatacagaaagattatctgaggacttagaacttaaggataagccaatcagctatagctatgcccgttctgccgaatctgagatagaatcaatctctcaaacgatttccctttcaaaagaatttggaaataatttgcatatatgtcatttaagcacaaaaaagggaatggaacttgcaaaggagaacaacattagctatgaattcactcctcatcatctattgtttgacaatagttattttgataagtttggcacaatcgttaagaccaatcctcctttaagggaatctaaggataaggttaatgtttcagatattgattcagattcaatgattggtacagatcatgcacctcacagcttggaggagaaaaataaaggtgtgtgggattccagtccgggaattccttctttagaaacagttctatcattattattgactgaagtgaataaatccaatctggatttcaatttaattcctaaaatatttgctgaaaatccagctaaaagattcaatctaaaaaataaaggatttattaaggaaaattatgatgcagactttgttgttgtagatttaaataaagaaggaactttcaatattgatgagttttatacaaaagcagaatattctccatttgatggaatggactatcaaggggctgctacaatgactattattggtggagaggtaattatggaggataatgaattatttatttaa

SEQ ID NO: 1903 - DNA, 1233 bp, Methanobrevibacter ruminantium
  source 1..1233: mol_type = genomic DNA
atgatagtattcaatgaagatagctgtattaaatgtggagcatgtgaaggagtctgtcctacagcagctattgaagtaggcgatcatatcgtttactgtgatacttgcagcgaagaaccaaaatgtgcagaagtctgtaccaaaggtgctttgcaagtagacgacatagctattgatgaagaaggaaacactcaagtaagattaatctttaacaaaacaaaatgtgacgaatgtggagactgtgtagacgcatgtccttctaaaactcttaaattagatccagaagattctcaactccttaaaggattctgtgtaatgtgtcaaaaatgtgtggacatctgtcctgttgacgttatcggagttcctggaattaaagaacctgcttctagagtaattgaaccagaaggcgcggtatacattgatgattgtaaaggatgtggagtatgtgttgctgaatgtcctgtagatgcaatcaccttatctgcttacggagaacctatcgaagtggatgaagacaaatgtatccaatgtggagtatgttcacaatcctgtccttggaatgcaattttcatcgctggaaacgcaaaacctgcaaaacgtagcaaagtaatgaaatcctttactttagacgctgatgcatgtattggctgtaattcctgtgttgacgcatgtcctggtgacttcattagtcctaaatctgacttgactgtagctcttcctgaagcatgtgctgcttgtggtctttgtgtaaatgtatgtcctgtagatgcaattgatttagatgttgaatatggcgcatctaaattcgattcaactgaaggaatctgttgggatggcgaaaaatgtctctatgatggaggctgtgctttaaaatgtcctactgaagctataagagtagtgactaagagaggaatggaagtaccttcccgtcagaaagatatgggcgaacaatctttcatcatgtgtgtaagatgtggtgcttgtgcaaatgtttgtcctaacgatgcattacaattagactatgttgacaaagagattgatggcgagactgtcatgagagacagaatcatattcaacccatccaaatgtgacgaatgtggagaatgtattgacgcatgtccatatgatatgttacataaagcatacaaagttaacttgccaatcgcaggtttttgtaccctttgtgaacaatgtcttgcaaaatgtacccctgaagcacttagcttaaaatag

SEQ ID NO: 1904 - DNA, 1413 bp, Methanobrevibacter ruminantium
  source 1..1413: mol_type = genomic DNA
atggaacctgtaactcgtattgaaggtcacgcaaaaattactgtacaccttgacgaagcaggaaatgtagaagacactagattacatgttatggaatttagaggattcgaaaaattcttacaaggacgtccagctgaggaagtacctcgtattgtacctagaatctgtggtatttgtgatgtacaacaccacttagcagctgctaaggctgttgaccaaatctacggatttaacgatgatgacatcttacctgctgcttacaaaatgagagaattaatgaactggggatcttacatgcactctcacgctctccacttctacttcttagcagcacctgatttagtagttcctaacggaaccagaaaaacaagaaacgttttccaaattatccaagatatgcctgaagttgcacttcaagctattaaaatcagaagaaacggtttagacatcgtatccgcaaccggtggtcgtccaattcacccaacttcctctacccctggtggtatttccaccgaattagatgaagaaactcaagctgacttattagcaaaagctaaagaaaacgtagaattagctcaagctaccattgaattagctgtacctatcttagaggaaaaaatcgacttagtcaaaaccttaggttacttcggtgacacccgtcactgtggtatcgtaactaaagatggtgactgggacgtatacaacggtaaagtaagaataaaagacaaagacggttctatctacactgaatacagaaacctcgaatacaaagatattgttgcagaacatgtaaaaccatactcctggttaaaattcccttacattaaagaattaggatacccagaaggtatttacagagttgctccattatcccgtattaacgtttgtgataagatgcctgatgcagctcctttagcacaaggtgctttagaagacttcagagacagattcggttacgcacaatacccattattattccactgggcaagattaatcgaattattagcttctgctgaaatggctgttgacgcattagaacaagacttatctggtgacaaattccctgacgcattagaaagaactgctggtgaaggtgcaggtatcgtagaagctgcacgtggtactttaatccaccactacacaactgatgacgaaggattaatcacccaagcaaacattattgtagcaactatccaaaacaaccctgctatggaaatgggtattcaacaagtagctaaagactacatcaaacctggtgtagaagtagatgataagattttcaacttaatggaaatggttatcagagctcacgacccatgtttatcttgtgctacccacactatggacagtcaaatgagattagctactgtagaagtatatgacagtgaaggaaacttaataaacaaaatctaa

SEQ ID NO: 1905 - DNA, 927 bp, Methanobrevibacter ruminantium
  source 1..927: mol_type = genomic DNA
atggcagataaagctaaagtaggaactatgtggctcggaggatgttccggttgtcacttatccattgcggactttcacgaatctttattagatgttttagaattagcacaattcgaattctcaccagtattatgtgatactaaatacgatgaagtacctgaattagacgtactcattgtagaaggtggaatcagaaacgaagaaaacagagaattagcagaaatgttaagagaaaaagctggcctcgttattgcatatggtacttgcgcagcttacggtggtattcctggtctcggtaacttacacactgttgaagagttaacaaccgaaggttacattaactcctgcagtactgtaaacccagaaggaatcattcctaacgaagatgtaccaaccttagaaagcagagtaagacctttaggcgaagctattcaagttgacttattaattcctggttgccctccaaaatctgacgtagtagcagaagctattcttaccttattaaacggaggaactattgaattacctaccacaaacctttgtgaagtatgtcctagagaaaaaccacctgctggtctcgctatggacttcattaaaagacaatttgaaatcggtaaacctgaagacgacttatgtttaattgctcaaggtttagtatgtatgggacctgcaaccgtatccttatgtggagcacaatgcccaagtattgctatcccatgtagaggttgctacggacctactgcaaaagtaaacgatgcaggtgcaaaaatgatttctgcgattgcatctgactacggtgtaaacgaagataagaccgtagaccctgaacaagtagctgatcaattagatgacattgtaggtactttctacacttacactttaccagctgctttagtccctgctaaaatgcaaaaaggaggaaaataa

SEQ ID NO: 1906 - DNA, 426 bp, Methanobrevibacter ruminantium
  source 1..426: mol_type = genomic DNA
atgtctgaagatgtaaaaattgtaatgttttgttgtaactggtgttcctatggtggagcagatactgcaggtactgcaagaatgcaatacccacctaacattcgtgttataagagtaatgtgttctggaagaattgaccctcagtttattttaaaagcattcagagacggtgctgacggtgtattcgtagcaggatgccacatgggtgactgccactacgatgcaggtaactataaacttgacagaagaatgagattagtttataaattagtcgaagatatgggaatcggaagagaaagagtccaccacgactggatttccgcttccgaaggagaaaaattcgctagttctgttaaaatgatggtagacagaattaaagatttaggaccttccccattaaaagcacaattagatgctgaaggatag

SEQ ID NO: 1907 - DNA, 420 bp, Methanobrevibacter ruminantium
  source 1..420: mol_type = genomic DNA
atgagtaaatattttttggatgccaatttcataattgcaattttccgtgaaatcgaaacaaacaatgaactggcaatttccacttgtgaggagctcttgtccaaccatgaatgttatataagcaatggggtcttcaatgaaatcattacaatccttatgatgaggacaaaggatattgaattgacagtcaaagcatactactttatgaaggacaatctaactattatcaatgagttcgagataagtatgttcaatgatagggtatttgagatgtttaaaagatacaattcaaaatcatttaaagtgggatttacagactgttccattgcttttttatataaatattatggcttggattatattgttacctttgataagaactttaaggtatttgatgatgtgaatctattggatttatga

SEQ ID NO: 1908 - DNA, 246 bp, Methanobrevibacter ruminantium
  source 1..246: mol_type = genomic DNA
atgatagatattatagcaaataccaaaatgtataaaaacaagcaaaccataattcccagtgaagttagggataggttcaatgtagatgaggacactatcattgaatggggcgtggatgagtttggagatttaagaatcactttcagaaaaaaagttactttaaaggatgttgcagggatgattaaaaaggaaaatgatgttgaaggggattggaaaattgataggggagtttatttaaatgagtaa

SEQ ID NO: 1909 - DNA, 1224 bp, Methanobrevibacter ruminantium
  source 1..1224: mol_type = genomic DNA
gtggcaaatgatgctttaagggcaaaggataaaaaggcagctttaggtactgatatagttattgaaaacttctctaaagaggaagtaaatgcttttgatgtccttgatgatattgatgacgttgacaaaaagaccaaaaggacattattgaaagttggtgttgatacagagtctgaagaaagggcagggtcattcctccagatggatcagtccaatgtattctccagttccatttccaattctgtagaggtcatgaacactggaattgcacttgaaaagtattcctggctaaaggattacatgtggaatgctgtaaagcctgatgcagacaaatacactgctcagactgcacttcgtgaagtggaggaagagtcatatagcggatactttgtaaggtcacttcctggaaccaaagaggttttcccagttcaggcatgtatgtttattgcagatcaggatgttatgcaaactgctcataacattattattgcagaggagaactctgagcttcaccttatcacaggctgtgcaacaggggaagacgtttcatcagctctccacgttggagtatctgagatgtatcttaagccaggttctaaaataacctttacaatggttcacaattgggctgaacaggttgaagtacgtcctaggactgctattcttcaagcggagaataccacttatattaataattacattttgacaagccctgtcaattcaattcaatcctatcctaccacccattgtaatggagagaatgcaagggcattgttccagagtattcaaagcggaacaaaagattcaatcattgatgtaggttcaagggctcttttaaatgctcctaacaccagcgctgagattatttcccgtgctgtagcaaatgacgaatcaagcatctattcaagaggtcacttggctggaaacgttcctaatgtaaagggacaccttgaatgtcatggattggtattggatgatggctcttcaatctatgctgtgccagagcttgaggctaatgctgcaaaccttgaaatgtctcacgaggcagctgtaggtcaaatcgatgaagaggagatttattaccttacctcaagaggacttactgaagaggaagcagcttccatgattgtaagaggtttcttaagcatggatattacaggtcttcctgatgaattggctgctgagacccaaagaatgattgatatgagtttggatggtatgtaa

SEQ ID NO: 1910 - DNA, 759 bp, Methanobrevibacter ruminantium
  source 1..759: mol_type = genomic DNA
atgttgcttgaagtaaaagatttagttgttgaagttgaaggcaaacgcgttttaaatggcgtaaaccttgctataagagaaggagagactcatgtgctcttaggccctaatggtgccggcaaaagtacattattcttaactattttgggatttcctaaatatgaagttgttgaagggtccattatcttcaatggagaggatatcactggtttaagtactaccgaacgtgttcaaaaaggtcttggagtaagtttccaaaaccctcctgcaattcgtggggtaagcgttagggacttgcttaagttcgaatccaagcaagatccagatgaagacttgaatccaaggatgcaagagcttgcaaagaaattaaagttcagcgatgagtttttagaccgtgatgttaacagaggattctccggaggagaggttaaaaggtctgagattcttcaattgcttgctcaagagccgctatttacaatgttcgacgagccagactctggtgttgacattgagaatgttgagcttttggctggagagttgaatgtattattggataaggataaaaagcctggccaaagaaaaagagcagggcttcttatcactcacttaggttatattttaaacttcgttaaagcggacaaggcacatgtgttgatgcatggtataattgcctgttccggtgaccctgatgaaattttagaagatattagaaaagaaggatttaaaggatgtgttggctgtgcggaatgtggcaaatga

SEQ ID NO: 1911 - DNA, 270 bp, Methanobrevibacter ruminantium
  source 1..270: mol_type = genomic DNA
atggaaaatgctgttgctaaacctaaccctcacagaagggaagaaaaattatggagtgaaattaaaaattatcaagtagctactaataatgcacgtattttaggagttcttgatgaattgattattaatgaaaaaacaggtaaaattgtggatattgccgttaaaatcgaaagtggacgtaatatccatgtaaaaggtgctaaacgtagaggagacttattattaataccttttacaaaattgagaaagttggagaattcattattgtaa

SEQ ID NO: 1912 - DNA, 633 bp, Methanobrevibacter ruminantium
  source 1..633: mol_type = genomic DNA
atgattatagctttggtaatggctggtggaaagggtcttagactaaaatcaaatatagaaaagcctctttttccaatcaatgacaaacccttaatggattatgtcttggataatttaaaaaagtccaaatacatagaaaagacagttgttgccgtaagcccaaatggggaaaacaccaaatcctatttaaaagatgatttgaatttttctgatttccatgatgatttttacaatagcacaaaaaccgatttttatttagacaccaaaggaataggttttgtcgaagatctctctgaaatcctcacttgttttgaaaatcattcaaaagatgacatcttacttttcataaatgcagaccttcctttagtggatgaaaatataattgactacatcattgaatactatctagaccatgacaagcctgcattatccacattggtgccagtagaaatatttgaagaatatggcattccttatacctatgattttaatggaaaagtccctgcaggaatcaacatacttaggagtgaaaatgtcgttcaagaggaggaagttttaattattccaaggtatgagttagtttttaatataaatactatcgagacatctatattagccagtaaatttttatga

SEQ ID NO: 1913 - DNA, 1479 bp, Methanobrevibacter ruminantium
  source 1..1479: mol_type = genomic DNA
atgtcttttttagataaaatttttaataagggacctaagccaattattgctgaaagtcaatcaagggatttaagtattttaaaagcaggtaacaggcctcaaggcccaggtgttatggtagcacaacaggatgaatattatgtcactgcttctgtagagttaggaaacaccactaccaaatgtgttattatggctactaacctaaacaacagccaatcttatctaatcaataaaactgtgaatatgacaagggatgttagagcccctaaacctgatgaagaggtcttcggtaaaacagtttggggtattgaactttctaaagaatctgttgcagatatgattaaagacactgtattagaatcacttaaaaaagctcatgtagatatggatgaagatttagactttgtagtaagatccactggggtaactgcaggttttgccactactcaagaagtggggcaaatggtaaaagctttagcagatggctgtttggatgcaggaatatcccatacaaaaatggctccagccatgtcttcagcacatcttccaaaaagacttcaaaaatacactctcctggataatgtaatgtttgatggagcggtagtaagtgtagttccaccaaaaggtaaggaagttgtagcaaatgaaatggaaggtgaacttgtaactgcaggaatcaaattaggtgctaaatggactgaagtagactatagaaacccttgtgtatctttagactttggttccaccttagcaggacgtattgtaaacaaggatgagccttatgcaagcactgtaggtaacttcctaggtttggctggtgttatttcagactcattagctaaaggttccaagcaaatcgaccaaaagaatggtgcagcattggacctatttgatcctaaactacttaaaaaggcagatggtaagaaacaccaagaaaaagcaaaacaatatgctaaagaagctcatgagctcattaacatctgcaaggttccagaaggaatcgatagattcggtactgtcccattagacgctgcaggagcaaaggcagcaggtacatgtcttataggatgtgatgtgggaacaaatgcagacggccttgacggattggttgaaataggagcaaagatctatgaggatgaaggaattccaacactccttgccactatggaccacgtaagcgcaaacatcgtatacagagttcttgatgttgcatttgaagagaaccttatccttgacggttccattttaggagtcactggaagagctggaataactggtaagaagccagagcttattttagagtatgctcaagacaagttcaaggatgttgtatttgttgaggatggtcttgctctcggttctgcaatcatggctcgttgtatgaactccatgggaactcaaaagaaccctcttggaggaaaccaaggagaaagatgtattttaaagaagagaatgcaagctcaaggtactatagaataa

SEQ ID NO: 1914 - DNA, 882 bp, Methanobrevibacter ruminantium
  source 1..882: mol_type = genomic DNA
atgggaggacaacctggagaataccctaccgttttagcaggaactatcttttacggcggacacaaaattattagtgatgaaaaagcaggagactttgataaagacgctgctgaaggattaattaaaacaatggaagaaatgtctgatgtaaccggaaacccttgtgttgtacaaactttcggtgctactgcagaagctatggttaaatacttagaatttgtaggggacatctgtgacaaacctttccttatcgactcaactgctgcagctgcaaagattgcaggtgtagaatacgtacaagaagcaggattagctgaaagagctgtatacaactccttaagtatggcagcagaagctggagaaatcgaagctgtagctaactctgacatcgacgcatccattctcttaggtttcaacccaatgacccctggtgtacctggtaaactcgaaatctgggaaaccggtggatctgttatcgacgaaggtattctcgaaatggcagaaagatgtggtattaccaaaccttggatggacgtagcagttactcctttaggtcaaggtgcaggtcctgcagtaagaacttcctacgctgtaaaagctaaatggggataccctgtaggttccggtattcacaacgtaccttccgcatgggattggttaagacaatacaaaaaagaacacaaagaagcatggcctgtatgtgatataggttctaacatcgtacaacaaatggctggtggagacttcgtacttttcggtcctatcgaaaactcaagactcgcattcccagcatgtggtatggcagatattatgattgctgaagcagcaagagatatcggtaccgaacctattgaagcacacccattgaacttgttattataa

SEQ ID NO: 1915 - DNA, 252 bp, Methanobrevibacter ruminantium
  source 1..252: mol_type = genomic DNA
atgtctgaagaagaatcagtacctcaaattattgtatctaccgatgatatggcagctgcaattaataaattggatgaagctgaagaaaaagtagaattcgctgttggtgaatacttccaacgtttaggacaacaaaacggtagagatattggtattttatatggtattattttaggtcttgtaattttaatagtatctattgaatttggtttggtaagtgcaatgagtactatgcttacaagcttagtctaa

SEQ ID NO: 1916 - DNA, 207 bp, Methanobrevibacter ruminantium
  source 1..207: mol_type = genomic DNA
atggttagattttcaaacaaaccaaatactcgtggtattagaaatgcttctaataatgtagaataccgtgcaaagctcttaggtagagaaggaagattatttgctggcgtaatcagcaccagattttctggaatggctattggtattggattagctcttgctttagcagttgttattccatacttagctaaattatgtggtttatag

SEQ ID NO: 1917 - DNA, 738 bp, Methanobrevibacter ruminantium
  source 1..738: mol_type = genomic DNA
atggctgacaaaaaacctgctgctgataactggcctgtagtaagtggagactacattgtaggggaccctgaaagtcctgttgctgtaactaccttagcttctcacaatgaagatattccagctgctgctggagcagctattgctggaccttgtaagactgaaaacttaggtattgaaaaagttgttgcaaacattatttcaaacccaaacatcagattcttaatcctttgtggtgctgaagtgcaaggtcacattactggtcaaagtatccaagcattacatgaaaatggttgcgaccctgaaaagaaaaagatcactggtgctaccggtgctattcctttcgtagaaaacattcctatggaaggtgtagaaagattccaacaacaagtagaacttgttgacttgatcgacaacgaagacggtggagcaatcactgcaaaagtaaaagaatgtatcgagaaagatcctggtgcttttgaagaagatgctatggttattgaagtgaaagaaggagatgacgacgaagatgaaggtgaagaaattcgtcctatttccgctgaaactgcattacttgaagcaagaatcagaaacattgacactcaagtaaaattagttggtgctgtacaaagaaatatggcaggtaactattcaggaaaagtccaaggtatcatgattggattaatattcactttagtaatcggtttcttgttattaatggcaccattattaggtgcataa

SEQ ID NO: 1918 - DNA, 321 bp, Methanobrevibacter ruminantium
  source 1..321: mol_type = genomic DNA
atggtattacctttaatacaatttattcctgaattaaacttaaatcttgatcctgaaaccggtcttctcggtgcaggtggtggagatttaatcattctttcaatggatgagataaatggagaaatcgcaaaagtcgaagcggctgctgatgaattaatgaattccttagatcctaattccgcaccattaggttccttcccaggaagagaaggtaactttgttattgcaggaacattgaccaatatggtttatggatttattataggaatgttccttatcatggcagcaatgcctatattaacagctatgggggttttatag

SEQ ID NO: 1919 - DNA, 819 bp, Methanobrevibacter ruminantium
  source 1..819: mol_type = genomic DNA
atgtctgctggaggaagtggagcacctgcagaaggtgctgtaaatgctaatgtaatgttagcagttggtattatcggtggattaattggtatttatgcgtcaagttttgagcctactattggaccagtcattgcatgtcttggtgcagtttgtgcaattctttggggagttcttgctattcgtagtgtagcaagttacggtttaggtactggtgtaccttctattggttacatgtctttaggtataggtgtaatcggtgcattagcaggtgtaggtataattgcagcatttaaattaaaaggattagaaatgctcggaccaatacttgcattagtatttgcaatgctcattggtttattagttgcaattgttgctaagaagattgttggaatgaaaatccctgttatggaaagatgcacagctgaaatcgctggtgctgctgctttagctgttctcggattctcctctgcaattgcaggtggatactctattgatttattattaaccgctgttgtagctcctggattcattgctctcttttacatattagttactatggctatccaacacccattcaacgcatgtttaggacctaacgaagatcaagttagaactcttaaatgtggtgcatccactgcattcttaaccatgattattactggtattctcgcaatttccgctggaggatacgcatggtttgcaattttagttgttggacttatcggctggtacgtctcatttaaaatgtttgttaatgcttcctacgaagctgcagcatctgttaaatggtccggattatggccaaaagttgaggaataa

SEQ ID NO: 1920 - DNA, 702 bp, Methanobrevibacter ruminantium
  source 1..702: mol_type = genomic DNA
atggatcttttaatatttattatatgtgttgtaatcgcaggtattattatgggtggaggtgtacacttcattcctgtaggtggtgctcctgcagctatggctaccgctaccggtgtaggaactggtaccgcaatgttagcagctggtgcaggattaactggactaattaccgcagcttctatgaccggtcaaccagtatggttaatcgtattagcaggtgcagttggttccatgttaatgatgggtatcaccatgcttattggtaactttatttatattttcggtgttggtgtagtaccagcatctggtaaagcagcagtcgacccaattactggttggaaccaagaaaaatacaaaaccccaggtaccgaaggacacggtattcctaccgtctgttacataagtggtatcatcggtggtttacttggtggtgctggtggaggattagtctactgggcaattaatgaatttgctactgcaaacttaactggatttgacgctactgttatcgctggtttagcagctattctctctgtaggtatgttctttatcaattcagtaactgcttcctataacattggaggtactattgaaggtttcgtagaccctaaattcaaaagactcccaactggaatcctcgcttgtgctgttgtttctcttgtagctgctattttcatggttttaatgataggaggtatttaa

SEQ ID NO: 1921 - DNA, 873 bp, Methanobrevibacter ruminantium
  source 1..873: mol_type = genomic DNA
atggaccctattacattaggtgtagtcgcattgatgggtgcagcagcaaccattgcaggtgctgcagaggacttagaatctgacatcggttcacaaagtaaccctaactctcaggttcagctcgctccacaaatgggacacttacaccgtatgataaataaggcagcttctggggaaccagtagcatacggatgctggtgtggtatttccggtgctattgcagctcttgctatgggtatgggtattatacctatagtggcaattgcaatgggttctactgtcgctgcacttgttcacgcaatttatacagtcacatcacacatgggaaggattgtcggtcaatctcaatttgaacaaccattatttatggacgtattaacccaatccttaggccctatcgcagctcatggttttatagctagtttcggtattgtaggaatcgcttatttaatgactcttccattagacggacttggacacccattcccattaccattactcgctgtactttggggaattactattggtgcaatcggatcatccacaggggatgttcattatggtgcagaaagtgaataccaaaaattcgactacggtggaggtactcctgtagcgattcaaggggatatcgtaactaaagctcctctcggtgctaaaaactctatcgatgtaggtaacttctgtgctaaatatggtggacctttaaccggattctgttttggacttattgttttcgtaagcttctggattactgttgtattcggagctttaggaggacaaattgtaggtattgtcatcgttattttattaatcgctgctaattacttacttgaaaagtctacaagagcaaaattcggaccatatgaggaataa

SEQ ID NO: 1922 - DNA, 1653 bp, Methanobrevibacter ruminantium
  source 1..1653: mol_type = genomic DNA
atggctgataaaaaattcttagatgcaatgactaaaaagttcaaagaagctccagaagaaaaaactactaccttctataatatgggcggttggactcaatctgaaagaaaaactgaatttgtaaacgaaggtaaagcaatcgctgaagcaagaggaattccaatgtacaacccagacattggtaacccacttggtcaaagagctttaatgtcctaccaattatccggtactgacactttcgtagaaggggacgacttacactttattaacaacgcagcaatgcaacaagcttgggacgatatcagaaaaactgtaatcgtaggtttaaacactgctcacaacgtactcgaaaaaaggttaggtatggaagtaactcctgaaaccattaccaactacttagaagttgtaaaccacgctatgcctggtgcagctgcagtacaagaacacatggtagaaaccaacccattactcgtagacgactcctacgtaaaagtatttaccggtgacgacgacttagcagcagaaatcgaccctgcatttgtattagacattaacaaagagttcccagaagaacaagctgaagctttaaaagctgaagtaggcggagctatttggcaaattgtaagagttccatctgttgtaggtagagtctgtgacggtggtacaacctccagatggtctgctatgcaaattggtatgtccatgatttccgcatacggacaatgtgcaggtgaaggtgctactggtgacttcgcatacgcatccaaacacgcagaagttattggtatgggtacttacttaccaatcagaagagcaagagcaggtaacgaactcggtggtgtcccattcggattcatggcagatatctgtcaagcaaccagagtaaccgacgaccctgtagaatctgcattagaagtagtagctttaggtgctgctttatacgaccaaatctggttaggttcttacatgtctggtggtgtaggatttactcaatatgctaccgcagcatacaccgataacgtattagacgacttctcttacttcggtaaagattacgtagaagacaaatacggagacttatgttccgcacctaacgacatggacaccgttcttgacgtaggttctgcagtaacattctactcattagaacaatacgaagaatacccagctttacttgaaactcacttcggtggttctcaaagagctgctgttgtatctgcagcttcaggtatttccactgcattcgcaactggaaacgcacaaaccggtttatctgcatggtacttagcacaatacttacacaaagaacaacattccagattaggattctacggttacgacttgcaagatcaatgtggtgcagctaacgtattcgcaatcagaaacgacgaaggtttaccacttgaattaagaggacctaactatcctaactatgcaatgaacgtaggtcaccaaggtgaatacgcaggtatcgcacaagcacctcacagtgctcgtggagacgcatttgcagttaaccctctcgtaaagattgcatttgctgacaagaacttaccattcgacttcaccaaagtcagagctgaattcgctaaaggtgctttaagagaattcgaacctgcaggtgaaagatctatcatcattccagcaaaataa

SEQ ID NO: 1923 - DNA, 753 bp, Methanobrevibacter ruminantium
  source 1..753: mol_type = genomic DNA
atggcacaatattatccaggaacttctcaggtagctgaaaacagaagaaaatttactaacccagatgttgagttagaagttttaagagaaatatctgatgaagatgtagtaaaattattaggtcacagagctccaggtgaagaatacaaatccgttcacccacctctcgacgaactcgatgaacctgatgacattattagagaaattgtagaacctattgacggtgcaaaagcaggagacagagtaagatacatccaatttgtagactccatgtactttgctccagctcaacctttcttaagagcaagatcctacgtatacagatacagaggaatcgataccggtaccttatccggaagacaaattatcgaagctcgtgaaagagatgtagaaagaatttctaaagaaattttagaaaacgaatactttgacactgcacgtactggaatcagaggtgcaggtgtacacggtcactctttaagactcgacgaaaacggtttaatgtttgacatgttaagaagacaagtactcaacaaagaaaccggtaacgttgaaatggtaaaagaccaaattggtcgtgaattagacgaacctgtagtattaggtgaaccattagacgaagaaactctcagagctaaaaccacaatctacagatgtgatggtgaagcttataaagacgacgaagacgctgtaactgtcttaagacaaatacacgtcactagatctcaatttggttacaacccagaatattaa

SEQ ID NO: 1924 - DNA, 597 bp, Methanobrevibacter ruminantium
  source 1..597: mol_type = genomic DNA
atgattggaagatgcacacatcttgtagactgcagggaaacaagaggacttggtgaaggaggaggaattgcccaaagaggaacttttgcagaatgtggaagcgatgttttggcagttgcaatgtctccaggtagaagacacattaccaagccagtctgtgaaatcaccttcggtcttcgcgaagccaacctattgaccagcaccatgatattggatgcaggaagcggcgtaccgcatgatgctcctgctggaggtgccggtaatgcattcggcttgactgacaaggaagtcgagcagatgcaaaagttcaaggtcattgtggttcatttaggtggagtgagaaatcatattacatacaaagcaagacttatcttgcgtaacgttaacaaaccttgtgttattatttgtgaatatcctgtagactttgaagattttgcaaaaatcggtgtcaaaaccgcaaaggtcatgcctgatgaggtaaagacagaaggtaaaatcatgaacatagtatcaggggttattaggggacaaacagtctctcaagaaaaattagatgagattattagaaaagttagattaacattaggagatgcataa

SEQ ID NO: 1925 - DNA, 456 bp, Methanobrevibacter ruminantium
  source 1..456: mol_type = genomic DNA
atggatattgaaatatttccacacagaattttaggtacagacacaactgaaaaggtattaaatgatttagaatctttagattcagttaaaagaactgtaattcaagggccaagactcccaccacaagatgagattgacagaatctatggagatcgcagaatcattgtggtaaatggcgaagaagttgaattaaaggttaaaactggtagaatttttgtagaactctatgatgaatctggtattgaggaaattagagccatatgcgataagcatattgacactggttttgatattaatactagcaaggctcaatacatccgtaagcaaaaaacagttactgatggattgaaatatggtgaaaatacagaaattcctgaagaactgattggtatcgcagatacccgttctaaatttaatgaacatgtctctattctaagaaaagatggtctggaataa

SEQ ID NO: 1926 - DNA, 1332 bp, Methanobrevibacter ruminantium
  source 1..1332: mol_type = genomic DNA
ttggcaaagtttgatgataaagtcgatttatacgacgacagaggttcattagtcgaatctgatgtaccaatcgaagctctaagtccgttacgtaaccctgctattaagaacattattagcggtgttaaaagaactgtagctgtaaacttagaaggtatcgaaaaatctttaaaaactgcttccgttggtggagcaaaatctaaaatcttaggaagagaaatggatcttgacattgttgctcaagctgactccattaacgcttctttaaaagaaatgcttcaagtaactgaagacgatgatactaaatgtgaaatactctctggtggaaaaaggattttagtccaaattccaactatcagattagattcttccgcagaatactccgtagcaaccttagctaccgcaactgcattaacccaagctattatcaaagagtttgacgtaagcatgtacgacgcaaacatggtaaaagctgctatcttaggaagatacccacaatctgtagaatacatgggatccaacttaaaaaccatgttagacgtaccacaaaaattagaaggtccaggttactctttaagaaacattaaagcaaacgacttcgtagctgctaccttaaagaatactttacaagcaactgctcttgcaagtatctttgaacaaactgctatgtttgaaatgggtgacgcagtcggtgcatacgaaagaatgcacttattaggtttagcttaccaaggattaaacgcagacaacatggtattaggtctcgtacaagacaacgcaaaagaaggaaccgtaggttctatcgtacaagacaccattgctaaagctgaagctgatggtgttatcgctgtagaaaaagaattaaccgactacaacatgtacgcaaccaacgatgcagctaaatggaacgcatacgctgctgctggatgtactgctgctattatggttaacgtaggtgcagcaagagctgctcaaggtattccatctactattttatacttcaacgacaacatcgaattcgctaccggtttacctggtattgacttcggtagagctgaaggtgtagctgttggattctctttcttctctcactctatctatggtggaggaggtcctggtttattcaacggtaaccacgtagtaaccagacacagtaaaggatttaccatcccttgtgtagctgctggtatggctttagatgctggtacccaactcttctctccagaagcaacttctggtttaattaaagaggtatacagtgagattgacgaattcagagaaccactcaaatatgttgctttagcagctgctgagattaaaggtgacatctaa

SEQ ID NO: 1927 - DNA, 1251 bp, Methanobrevibacter ruminantium
  source 1..1251: mol_type = genomic DNA
atgcaagttatagctgatcttggtggaactccggggaaggattgtagaggttattgcaagttttgctactttagaaaggtaaagccattaaccgaagctttaggatgtcagcactgccctccaaacaaggtgggatgtgagcgatgtcttgaaggagttcaggaagcaggcaagccatttcaacagccattcacagtcttaagcgaagtacaaatggctttgatgatgaaccctgttcgtgacgctaatcttaaggtcaatatcagcggtggtggtgatgtaagctgctatcctcagcttgaagagcttatcgcttcattgtaccaatggcaattgccaatccacttaggatatacaagcggaaagggaattgacgatggagatattgcaagcagattcctaaactatggcgttaatgaggttacatacaccatcttttcagttgacccggctcttagaaaacaatggatgcttgatcctactcctgaagagtccctaaaggcagcccaactctttgcagaaggggctgacttgcatgctgcagctgtaataattcctggagtcaacgatggacaggctttggtggatacctgcaataagcttgaggagtggggtgcaaaggccttgatgatgatgagatttgcaaattcctacgatcagggattgatccttggaaacgagcctgtcattgaaggagtcgttccacatgagccacttgaatttgaagagcttgtaaaggagatcaattctgaatatgatatgagagttaccggaactcctttaggggaccctactattggcgctccttttatcatagctaaggatgagtatgaggagtttttaggaatcctgcctgaagttaggggagaggcaactcttttaacctctaagattgcagctcctttcctaaagaagatctttgataagattgctcccgacaatgtaaatgtagttgcaactaaaaaggacattgcctgccttatgacaaagcaggaccttgaggctttagacttggatgagctaaaggatgctgtcattcttccgggaagagctttcattcatatattggatgctgaaagaatcctatcctctgatggaaagcaacgtttggtgggatttggccctgataccttaagtgttgacggagaattaagcagtgggatgagtgaagaagaagtcattgaacatgaattaggttcatttattgaattaatagaagctattaacttctttggtatgcgtaggttataa

SEQ ID NO: 1928 - DNA, 222 bp, Methanobrevibacter ruminantium
  source 1..222: mol_type = genomic DNA
atgaaaattagaaaaagaataaagaaactaaaaagaataaagaaactgaaaagaataaagaaactaaaaagaataaagaaactgaaaagaataaagaaactgaaaagaataaagaaactgaaaagaataaagaaactaaaaagaataaagaaactaaaaagaataaagaaactaaaaagaataaagaaactaaaaagaataaaaaaattagaaaaagaataa

SEQ ID NO: 1929 - DNA, 915 bp, Methanobrevibacter ruminantium
  source 1..915: mol_type = genomic DNA
atgtatgaaacattaacattcacaggtggaattcacaaaagtgaggaattaaaggaacttatagaggatttaggcggttttgtactccaatccaatatattgcagatggagcttgtcttaaacatggcagttcctattgatgatgttaagattatagaggataaggcaaatgagcttttaggagagctctctgtagctcctatggctggctctgagatagctatcgtctcccctacccttgcaagacatcaccttccacatgctgcctgtgacatctccgaataccttagacgttatggtgcaaaagacaatatgatcggtctggcccgtgggcatggaaagggaaccgctggaataagcgaaaccgaaaaggcattgattgaagagcatgacatagcaatatttgctcttggaagctttaagcagtgcattgtggataaggcttatctttataatgacattgacattccagtgattgttactggagctcctgaaattgacttggaagagcttcctggtgttgatgcatatgttccagggcttggtagaattcctcgcagattaaaaagaggggaaaacataagggctttaaagcatcttgttcaaacaattgaagaccttcttgaaaaacgtaaaaaggaattggctcaagaccctcctatagtcccttcaattctagttaaaaatgagatagaaaatcaggtccctgcaattgaaggggttttctctccaacacctgttacaagccaattaagcggcttgagggtaaaattagattatgacaattatcatgaagagattgagaatgttgtaatcggagagcaaaagctaaaagacattgcaaacattaaaaaatcacatttctatgattatatacttgtagaactcttgactgagagttctttagttgattaa

SEQ ID NO: 1930 - DNA, 1665 bp, Methanobrevibacter ruminantium
  source 1..1665: mol_type = genomic DNA
atgggtgttaatatgtatgcagaaaacaatatattggttggagctaatgagaatacagaagtttacttattatccaaattagctaatcgtcatggcttaattgccggtgcaacaggtaccggtaagacagttaccttaaaaacacttgcagaagctttcagtgacatgggagttccagttttccttgctgatatgaaaggagacgtatcaggacttgcaaagataggggaacctagctcaaagacaactgaaagaatggaaaagtacaatcttgcagataagggattcatcttcaagtcatatcctgttgaattctgggacctttacggcgagaaaggattgcctattagagttacaatctctgaaatgggtcctcagcttctatcaaaaatattgaaccttactgaagcgcaggaaggtgtcttgaacattgtattccgtgtggcagatgatgaaaatctccttctaattgacattaaggacttaaagtcaatgattaaccatgtaagcgacaatgccgaactctatgaatcaaaatacggcgcagtggctaaaaagtcagcaactacactcctcagatcattgcttgcccttgaagagcaaggaggagacatgttctttggagagcctgcacttgagcttgaagacttcatgcaatgcgacgatgaaggaaaaggaataatcaatatcttagattccgtaaagctttctaccgcacctgaactctattccacattcttgttatggatgatttccgaactctatgaaaagatgcctgaagttggtgacatggacaagccaaaattcattttcttctttgatgaggctcacctcttatttgacgatatggctccagcggtacagaagaaaattgaacaaatagtgaaacttatccgttcaaaaggagtgggactatacttcattagccaaagcccatccgacatacctgatagcgtccttgcacagcttggaaacagggtacagcatgcattacatgcctacacccctaaagagcaaaaggcagtaaagactgctgctgaaacattcagaccaaaccctgcattcgatacaaaagaagtaatttccaatttaggaactggtgaagcattggtttccgttcttgaagagaaaggtgctccaagtgtagtagagcaagtggacatactccctccacaaagctatatcggagcaatcgaagacaatttcagagcagaacttatgagcatttcgcctttaagaggcaaatataaggaagcagtcgatagggagtctgcttatgagatgctattaaataagattgataataatccaaacattcaaacagagatacctccagaagcccctattagggatattcctaatcaggccgagcaagctccaagtcagccacaagcacagcaagcccctcaacaggcacctagtcagccacaagcacagcaagcccctcaagaagaggctcctaaacagaaaggattgcttgatgatgttattggaatagctgttggaactgctgtagaccaaatgacaaaacaaaacaagactacaagatctagaaaaaccactaaacagacaactgttgagaaagcaacttcaactatggtaaatactgcagcaagagaggttacaaaaggaattattagaggattatttggaaatatgaaataa

SEQ ID NO: 1931 - DNA, 369 bp, Methanobrevibacter ruminantium
  source 1..369: mol_type = genomic DNA
atggtggaattagatagagaagaattatacagacaactggaagaaatggaaaacgatttaagactttatcccattgaagaaggattggaagatgatataattgattatatcaatggaaaagaattaagtgataatgagaagtgggaccttgaaaacagacttgaagacttcttctatggtgccaaactcaaatgcagaaagccaacctactactttacagacggatttgagttttatgttacagaaatctatatagactttagaatattggagcacgttcgtaaatcttttcctaaattcaatcaattatctgtatcatctgaaatagaacagggattttctacattgtctgttaaattgacattataa

SEQ ID NO: 1932 - DNA, 798 bp, Methanobrevibacter ruminantium
  source 1..798: mol_type = genomic DNA
atgaagttgaacattaataaagagacttgtactggatgtaaactctgtgagactgtctgcattagggacaatataattgttgtggataaaaaggcagtggaagtggataatggggattgttttgattgcggccactgtttagccatttgtccatcaaattctatctctttaaagggctttgatggtcaaaaagaccgtgttggcgagtacaatcctaaagagattccagtatcaagcgaggattatctgaatctgttaaagcaacgaagaagcattcgctggtttaaaaagaaaaagatagataaagaaacctttaataagctctttgaagcagcatattacagtccaagtgctcaaaatgctcaagatgttgaatttgttgtacttgataatgaattggatgaatttatgcatcttgtttatgatataatcagtgctgaagaggataaattctttagaataaagcaatttggcgagtatttgcgtggagaaggagattataagaatcaccctcttctttgggaaggccatcaaatgattttagccttttctagaaactctgccaatgccttgattgcaagtacaaggcttgagctatttgcttatacaatgggccttggaggattctattcccttttcactcttaaggcagatgagttggatcatgatagattgatggaatttttcccagggatagattcacacaagcatatgtattctgcttttgtaataggttatcctagagtgaaatacagaagaacagtgcctcataaggggattgatgtttattataggtga

SEQ ID NO: 1933 - DNA, 540 bp, Methanobrevibacter ruminantium
  source 1..540: mol_type = genomic DNA
atgtcaatatatgattttgaagtaaaagacatcaacggaaatatggtatctcttaaggagtatgaaggacaggttttattgattgtaaattcagctacagaatgcggtttcactccacagtacaacgaattgactcagatattcgatgaattgaatgaagaaggatttacaatactagattttccttgcaatcaatttggaaaacaagctccaggaactggagaggaaattgcagaagcttgtagagcaaccttcttagtccaataccctatatttgaaaagatagaagtaaatggggaaaacgaagagccattgtacacctatctaaaatctgagcaaccatttgtagacattacaggagaagatgcagaaagattaaaaggaatccttgaaagcattaatccagattatatggacagcaatgacattaaatggaactttaccaaatttttagttgacagagaaggcaatgtagttgcaagatttgagccaactcaaagtttggatgatgtaaaagctcaaattaaagaattattataa

SEQ ID NO: 1934 - DNA, 459 bp, Methanobrevibacter ruminantium
  source 1..459: mol_type = genomic DNA
atgagtattttagtagcttattattcaaggacaaatgttacaaaaaaggtagcggaatccattgcaaatcaattggatgcagatattgaagaaattgtccctaaagtcaagtatgacggcaagataggttatatgcgtggcggtaaggatgcaatttcagaaaagatcattgatttggattctttaaaatacaatcctgcggactatgacttgatttatttaggaactcctgtatgggctgggagggctgcaactcctgtgattagctatatcaagcaaaacgaaggcagcttcaatgatgttaagttctttgtaactgcagggggaagtggatttgaaggcaccattgaacagcttggcaaatatgtggggaaagctccattgaagactttgtctcttaccaccaagcaggttaaaagagatgaatttaaagatgaattggcttcctttattgaataa

SEQ ID NO: 1935 - DNA, 1113 bp, Methanobrevibacter ruminantium
  source 1..1113: mol_type = genomic DNA
ttgacaataatttcaaaaaaggtagaattgattgaactcttctatgatttaatattcgtatatgcaatatcaaggcttacttcaattataagtgaacctgtcaatggaggaatagctccattcagtctatttgcatatattatcacttcctttgtcattttacaggcatggctctactttactaactatgtaaaccgttatggccaatggaagtggtatgaatatgtcattgcaatcataaacatgattgccgtaatctatatggcaaataccatatcctcgacttggaacaattattttgtatttaatgtttccatgctgataatgctctttacggttgtatttttgtattctgttcatgccataaaggaaaaatcattaaagggagctgcaggtaattcaatcactattctgcttgttgtatgttccatttatattatatccacattatcaattctatttgggcatatggatgttgtcatttggctcaatgtccttgctatcttgactggagcctttttgccgtttttccttaagggaaaattcgataagtcaattatcaatttccctcatttgatagaacgatttgaattgctgacaatcattacttttggtgaagctgttgtgggaataacacatttctttaatgtaaacaactttgattttgttccaatacttgtattcctgattgtcataggcatgtttggatcatatgttcttcaaattcactatctagtcgatcatcatagggaagagagaagcctaagattgatgttcagtcattatttcattgtaataagcattaatctggttactgttgcctttgaattgattcacagcggggagataaactattggataccgagcctgatggtgataatttcattgattgtcttctatctctccattatggccaataaggaatattattatgatggcttagaattaagaaaaaaggacattgcattaatggttttgattagtttaataggaagtattgctattttactatctgttggcagcatttatgggttcttaattggggcattgattattacattagccaattttggagttttgttgaataaatatcagaagtttaatgataattaa

SEQ ID NO: 1936 - DNA, 351 bp, Methanobrevibacter ruminantium
  source 1..351: mol_type = genomic DNA
atgttatttatttactacccaagatgcagcacatgccaaaaggcaaagaaatggctagatgaaaatggattcgactatgatgagcagcatatcgttgatgacaatccagactacgaacagttaaaggcattgtatgaaaaaagcggacttcctcttaagaggttctttaatacaagtggtaaaatctatagagagatgcaattaaaagacaagttagctgatatggatgaagaagaacaattgaatcttttagctactaatggcatgcttgtaaaacgccctataattgaaactgaggatacatgtcttactggttttagacaaaaagagtgggaagagaagttaaagtaa

SEQ ID NO: 1937 - DNA, 831 bp, Methanobrevibacter ruminantium
  source 1..831: mol_type = genomic DNA
atggattatattaggcagacagaagttatacaatggaatgacggagcttatcagaccatcaatgaggaaagtgttgaagatgaatatacctatttgtttatagattatttgcctcctcgtaagttttcaacatatccaaaggatttagaggattttgcagtgggatactgccttggtgaaggcttgattaaagattattcagatatcaaatcaatccagttggacggcacaaacattttagttacaactacactctctcatgaccctgaagaggatttggagcaggaaggaatagttcaggagaaaaaaggcaattgcgaacatgcctgtgtatgccgactattggaatatcagggggtcaattcagataatgctggaggaattcgttctgaattaaagacaatagagcctaacacctctgacttaaagattgatgcaagccaaatcattaaggatatagagcatttgactgatgaggctaagatttggcaaaggactgcaggagttcacgttgcacaattgaagtatgaggataagatcattattcgagaagacgtaagtcgtcatgttgcagtggataaggtgataggagctgcatcaagagaaggatatgacttttcaaaatgctatatttcttatagtggaagaatgcctgcagatatgctgattaaggtcattagggttggaattcctataattttatcaaatgcggcacctgcagcttcaggtattgatgtggcccaaacaggaaatataacaatgattggattcattagggataagagattcactgtttttacagctcctgaaagggttaatttagatgcttga

SEQ ID NO: 1938 - DNA, 1206 bp, Methanobrevibacter ruminantium
  source 1..1206: mol_type = genomic DNA
atgaaatacaattttgaatctataatcgatagaaaaaacaccaattcactaaaatgggacttgtttggtgatgaatatccaatgtgggttgcagatatggacttttatgcagctccattgatttacgaatctgtaaatagaaaggcaaatcatggcgtctatgcatattcatttgtaaacgaggatgtctatgattcttatattaattggtggaagaaatatggtcttgatatgaaaaaagaggaattgttgtttgcaactggagtcatgccttcaataacaagcattatccgtgcctttacagagattggagataatgtactgattcagactccagtttatcatgtcttcttttatgtcatattggataatggtagaaatgtggtggaaaatcaattgatttataatccagactctgatgatgttgaaactgcatatgtgattgattttgatgatttggagaaaatattcaaagatcctaagacaaaactgatgctattgtgtaatcctcataatcctgtagggaagatttggaaaaaggatgatttggaaagaattgctgttttagcaaagaaatatgatgttatagtagtttcagatgagattcattgtgatttgacagatccagacatgacttatattcctttcgcatctttagatgatgatctgtccaaaaatagcataacttgcatttctccaagcaagacctttaatattgcaggtcttcaaagctccgcagtattcactcaaaacaaaggtttttatgaagttttaaaaggacagcttgcaactgacttcttcagccatcccaacatattttcaatagatgccacaattgcatcatataaaagcgaagattggttaaatgagcttagagaagtcttattcaataataaaatgattgtgaaagaatttttagaggaaaatattcctgaaatcagattggtgcctgcaaatgcaacttatcttttatggctggattgcagtaaattgaataaaaatgaggatattgaatcttctaactatgaattctctaagactttatctgagtttttaagagaagaggtcggtttattcttatctccgggagtacaattcggccaaaatggagacaatttcctaagaatgaatattgcatgtcctaaggatttattgattgaaggtttaaatgcattaaaagagggaattgataaatttaagagttaa

SEQ ID NO: 1939 - DNA, 519 bp, Methanobrevibacter ruminantium
  source 1..519: mol_type = genomic DNA
atggctgattttgaagagataattaaaataaggcgcagcatacgtgagtatgaagataaggaagttgaagatgaaaagattgaaaagatcttaagggcaggaatgcaagctcctggaagcaggcttggtgcagaaccttgggagtttcttattataaaaaataaggaagtattaactaaaattggggaaatcaagcctagggtgaccaatgctccagttgccattcttttgattgcaaacattgaaagggctttctataagactgtatggcaacaggacatgagtgcagcagctgaaaacatgcttcttgaagctgtaaaccttggcttaggaggcctttggaacggagtggctcctgatgaggaaagaatgggcaagattgcagatattgttggattgccaaaagatgataatctaaagccattctgcataataactcttggatatcctgcagaaggctgggaaaacaagtttatggataagttcgatgaatctagaatacattatgagacttattaa

SEQ ID NO: 1940 - DNA, 573 bp, Methanobrevibacter ruminantium
  source 1..573: mol_type = genomic DNA
ttgaataagcctgttttctatgatgctgactgtttggaatgtttcctatttgttgatgccacttatattttagaagagctattttctaaaataattattccagagcaagtttataatgagattatggaggaaaacactccctcacttgtaaaaagaaattttaaaaaattaaaggagggatttgtagaaattcaagaaatgccttttggttcttcccagtaccttgcttataagtcaattgaaaagggattttggagtaaggcaggtcagatttgtgggtctggtgaatcagcagcaatggcattggcccatttgaataatggaatcatagcaagtaacaatttaagtgatgtggaggaatatattgaaagcttggacataggactcattaccagttctatgattttaactaaagcccttgaaatggaaatcatttcagaagatactgcaagttcattatatcttgcaatgatagaaaggggtatcaagttacctcaggacagtttttgggagtattttgataaactttatgaaattgattgcaaaagattcttaaagaatgattttccataa

SEQ ID NO: 1941 - DNA, 723 bp, Methanobrevibacter ruminantium
  source 1..723: mol_type = genomic DNA
atgaatagcacagttttagctgaaatcttaagacatgaatggggcattgaaagctttgcttcagtaaacattcgttctctggtctataataatataagaaatctgactgtgctctggtttccaatgaaagccaatatcagtggctgttgctcaaagacaaatgaggacaaggtaatattcatcaacaccaaccattcaatcggtagacagaatttcacattggctcatgaattataccacttgctctatgaggatattgatgattttatcgtttgcggaatcaatatgaacacaccaagtgaaaggaatgcagatgaatttgcttcaacattattaatccctgacagtgccctatattggtttagaaataaaaatcaaattgatgattggtcagttgaggatctaatcaagtgcgagcaatactatcaagtcagccgttccacaatgcttaatcgcctaaaaagcttgaattggattagtcaagaccaatatgatgaatttggattaaatgttgttgctgaagttaatagattaggctatgagacaggtctttataagccatcccctcaagaccagaaatattcctcaattggagagcttgtgcgattgactgaaaaggcatatggtaagaaaaagataaccgggggaaaacgcaaggaaattttattaaaatgttttagaaatgatattctttatgataatgaggtgaacaagcttgaataa

SEQ ID NO: 1942 - DNA, 327 bp, Methanobrevibacter ruminantium
  source 1..327: mol_type = genomic DNA
atgattgatgttgtagcaaaaaatctaaaagatttaaggaagaaaaacggttatactcaagaacaggtttctgattatttgggaattactcaaagcaatctttctaaaatagaaaatggagaaagaaactttaacatgactttgcttgataaattgtgtttattatacaattgctctccagaatatttgattggtgaaacagatctttatgaaaagtcaactatagcttttagaagtgatgaaaaggtggatttaaatgtggttgcaaaaatgaatgaaatcactggatttttaaagcttttaagaagtttagatggggttgattag

SEQ ID NO: 1943 - DNA, 822 bp, Methanobrevibacter ruminantium
  source 1..822: mol_type = genomic DNA
atgaaaagatcaatcatatttttaacaattatattatccttatttttagtaattggctatgcaagcgctgggctttttgatttttcaagtgatgatgctggttccggtgaaaatactgatgatgtatttgttgttggattcaacagccaatttccaccatttggatataaggaaaatggtgaatatacaggatttgacattgaactggctaaagaggttgctcgaagaaacaactggacattcaagccagtgccaatcatcgattggaacactaaaagatttgaattggacagcaatgaagtagactgcatctggagtgaatttaccattgacggaagagaggacgactatacatggtcccaaccttactttaacaatacaaagcttgtcatcgttagaggggatagcgatatcaatgaccttgacgatttgaagggcaagacccttgaggttcaacagggaagctccattctaaacacaatcgaaaagaatgagactttaaagagaaaatttgcaaagattgagcaggtggatggctatgacactgcattcatggacttggaatctggagtctgtgatgtgataatcatagacagcggtcttggaagatatctagttagcgaaaagcataatgacactaagatattgaatcagacaatttccaatgagaaatatggtgttgcatttgaaaaaggaaacactgaattaagggataaggttcaaaagacattggatgagatgtatgcggatggaaccgttgaaaagatagctcaaaagtacagcaaatacggaattccagatggtgtaatctatcctgaataa

SEQ ID NO: 1944 - DNA, 444 bp, Methanobrevibacter ruminantium
  source 1..444: mol_type = genomic DNA
atgtttataatcttcccattatttagcgctaacctaatttccatcattattggaataagcgtattgatatttggtataggattggcatattcctcattcattacacatgaaatctcaggtgccctatcttcagttatgggaatctttgggattgtaatgataatctttggattatgtttcatatttgcaatcaatgcaatttccttccttgtaggattgcaattctacattgtagcatttatgctgattatgattgctgtagtcggattcctttcagatagcaatgttgctagaaccggcgctttattgtatttggtcctaggtatagttattttgcttattgcaatgtttgctgcagaaaaccctatactaattacaattattttaggtgttattttaatagcacaaggaataatgggattaatatatggcaatgaaatataa

SEQ ID NO: 1945 - DNA, 1278 bp, Methanobrevibacter ruminantium
  source 1..1278: mol_type = genomic DNA
ttgttagatataaagctatttcgagaaaatcctgatttaatatttgactctgagaagaaaagattcagaagcactgaaaatgcagagaaagttattgaatatgacaccttatggagagaaggtgaaagcagattgaactctcttagggcagagaagaacaaattatcaaaatcattcaaacaagctaaaaaggacggaaacattgaagaggtaattgcacaatccaaggcagttgctgaagagatcaaggaattaggtcctaagattgaagagtataagcaattgcgtgaagattacagatacaaggttggaaacatcattgacgaggatgttccagtctctgacacagaagatgacaaccttattgttaggaccgttggagaattgccagactttgattttgagcctttaaatcatgttgatttgattgaaaagattgacggtgcagacattgaaactgcagcaagcattgcaggtgcaaggttctactatcttaaaagggacatcttgcatcttaacttggctttaatccagttcgcccttaacgagcttgaagagagaggctacattccacttcagactcccttctttgtaaaaggggaagttgcagcagagacatctgagcttggagagtttgaggaaaccttatacaaggtggaaaatgaagacttatacctaattgcaacagctgagcagacacttgcagcattgcatagggatgaaatcatcaatcctgaagatttgccaatgagatattgcgccctttctacctgctttagaaaggaggctggatctcatggtaaggacactttaggaatattcagggttcatcagtttgaaaagattgaacagttcattttctccactcctgaagaaagcaaaaacgagcatcacaggttattggaagttactgaggacatctataagaaattaggacttccttatcaaatcgttgccatagtttcctcagcattgaatgacaatgcagcaatcaagtacgaccttgaggcatggttccctggttcaaagacctatagggaattggtatcctgtaccaattgtggtgactatcaggcaagaaagaccaagaccagatatggtagggcaggatctggagatgcccagactttacacaccttaaacagtactgcaatagcaactgaaagaactatgtgctgtatattagaaaactatcagcaggatgatggaagcgtaaaggttccagaggttttagtgccttatatgggtggaaaaacagtaatcgaagcaagaaagtaa

SEQ ID NO: 1946 - DNA, 582 bp, Methanobrevibacter ruminantium
  source 1..582: mol_type = genomic DNA
atgattgttgtaactactccaatgtgtaagcaaatagtggaatgggctggacttaaggaatttaaagttaacaagtttccagatgaggaagaaggggacttggctatactgctttctgaaagcaaggtcaaaatgaactctttaactcttaaattaaataccttttctcaaataagagaaagcattttaaaagtttccaattattgttttgaacatgatttaacagatcatcttcttagtgatgatgatattgacgatatcttttcatcttatgatttgaagtacgctaatttgggcgatgatgattttgataaaatcagggaatcaaactctaataagaaagttaaggtctattctgagtttctaaaggatattgttttggatattggggctcttgttgttgatgaggattattcatatgtcgtttatccggactatttaaaggacattgtagataagaatgaggactttacagactcttccattgtctttatagagatgccaagtcatggaaaggtttctaaaaatcctcttgagaggactgaagagagatattctattttaataaatagtttaatatag

SEQ ID NO: 1947 - DNA, 783 bp, Methanobrevibacter ruminantium
  source 1..783: mol_type = genomic DNA
atgcaaattataaaaacaagcgaaacagaggccgaaaaagtgataataaatttaagccaggaaaaaagccatagcaaagacgtttcaattatggtagatgctttaagagcaagtacaaccgtaacaatagctttagactactttaaagaagtaattccagcattcactccagaggaggcaagagaactttccctaaagcataacgctgtacttgcaggtgagagaaagggagttaaattagagggctttgatattggaaactcacctggtgaaataaaggagtttgaaaccaacaagaaatccatggttcttacaacaagcaatggaataatgacaatggaaaatatgcaaaaccctaaacatgtcttagttggaggattcataaatgccaaatccgttgcaaaggcagctgtagagctagcagaggaagagattgaaatagtcatgggaggatacaaccatgaatttgcaattgaagacttccttgcagctggagaaatactcttttatatagaaaaagagctaaaagaaagaaacatgactccaaaagaaaatgatggatccaattatgaattgaaggatagggaaggctttagcgaatatgcaatatctgctatcttagcaagcagaaatctggaattaaccaatgaacaagtattaaaatccaaatctggaaagcgattaagctatttaaactactctgatgatgtagaattatgcatgaagcgaaacataactgaaaatgtaggcattttaaaagatggaaagatagttctatactga

SEQ ID NO: 1948 - DNA, 1167 bp, Methanobrevibacter ruminantium
  source 1..1167: mol_type = genomic DNA
atgagaagagaatgtttaaaaatcataggaactgcacacgtgtctcaaaatagtgtggaagaagtaaaagaagctattttagaagacaaaccagaagtagtcgctattgaattagatagaggaagatacattagattaatgaatgaaagaaatggcattgtagaagatgaccaaatccatattaccaaaatcataaaagaaaacaaagtaggggttttcttagttacaaccatcctttcctatatgcaaaacaaaattggagatgacctagacatcaagcctggctctgaaatgatcggcgcaattgatgcagctgaagagacaggttccagaatcgcattgattgacagagacataaacatcaccttgcaaagggttctaaaccatatgagcacttgggaaaagcttaaattcatttatggaatcatcggaggcttgctctcatcagatgatgaggaactggatgtagaggcattgaaggaacagtctgcaatcgatgaggcaatgggatactttaaggaaatatctccaggagcatatgaggcattggtaaatgaaagggatgcatatcttgcaaacagcatattgcacattccagaagaccatgtcatagcggttgtaggtgcagggcataaggaaggaatcaacagataccttgataatccagaaacaataccgcctcatagcgaactgattgatatggacaagaaaggaggaattccttggcttaagataatccttgcattgattcctatctcatttgttgtgatattttttcttgcttggatgaatggaatccatatagaaggagacattgttcaattcattgtaataagcatgataatgggatttttaggctcaattctttcaggatcaaagctagcctctgcaataatcggaggattagttgctccactcactattatccaccccctccttgcggcaggctggttttcaggacttgctgaagcaaagttcagaaaggtgagaaagcaggacattaataatataggaaaaatcgaaagctttagagacttatggaacaataacatattcagaatccttcttgtagtggttggaaccaatttaggagttagcttggcaaccttagttattttgccttcccaggtctttattccactctttatgaaaatcttcggaggataa

SEQ ID NO: 1949 - DNA, 276 bp, Methanobrevibacter ruminantium
  source 1..276: mol_type = genomic DNA
atgtatgtaatattcagatgcgattgcggaagagtgctttatgcaaagcaaggtgtaaaaacaagaaaatgcacctgtggaaaaacaatcaaagtgaaaagccgcagaatccttcaaaaagtagaaacagcaaacgatgcatcattggcagttcaaaagatgcaagaggaaatctatggaggaactgcatttaagactgctgacgagtataaggcaaataaattcataaatcagcttgatagaagaatgaaggaatatgaagatggtgacttttag

SEQ ID NO: 1950 - DNA, 1347 bp, Methanobrevibacter ruminantium
  source 1..1347: mol_type = genomic DNA
atggaaatggactcgataatcataattagtgaaatactaataatcataatattaatcgtacttaacggacttttctcccttgcagaaatcgcagttgtctctgcaagaagaatcagaatgcaaaaaattgcagatgatggagataaaagagcattactcgttttagactctatggaccacaccagtgaattcttatctactgtacaagtgggcataacctttacagcaatcatcacaggggcattaggtggaactactttttcagaacctttaggaaactaccttagccaattcataccttacagctatcagataagcttcattatcgttatccttctcacatcctactttacaatattggtaggtgagatcgtacctaaaagaatggcattgaatgaccctgaaggatatgcattgagcactgcaaagttcatgcagataagctcaataatatgcaagcctattgtaaagctccttgacagctctacaaatcttgccttaaggattgttggcccatcaccaaaagaggatgtcgttactgaagaggaagtcaagctccttatcgaagagggcattgaagacggaacaatagccgaagaggaagaggacatcatcaaaagggtattccgtttagatgaccaaaaggtagatatgataatgacccctagaaacgagatcatctggctagacctagaagatgagattgaaattaacaaggctaaaatcattgcaagtaaaaggtctattttccctgttgcagatgcggaattggatgacttcatcggtgttgttcaagctaaagacctactcagcaaaatatttgaaggagaagatgttgacattagagctaatgtcaaatctccattagtagttcctgaaaatatgctttcaatggacttgcttaaggaatttaaggaaaacagagaatatgtacatatggttcttgtagtggatgaattcggaagcgttgtaggactcatcacattaaacgaccttcttgaaggaattgtaggagacattccaggaatcgatgaagaggacgatcctaaagcggttgaaagaaaagaccatacttggctaatagacggcagattctctatagaagactttaaagacctatttgaaatcgaaaaggaaatgcctaatgaagtggaggacggatacacaaccattgcaggattcatcctttcacatgcaggtaaaatccctgaaaccggtgaaatattccatgaagacaagttcacctttgaaatcgttgacatggatggaaaccatatcgataagatcctggtaacaataaacgaagaggatagcgataaattagaccttgaaagcaaggaagactaa

SEQ ID NO: 1951 - DNA, 942 bp, Methanobrevibacter ruminantium
  source 1..942: mol_type = genomic DNA
atggaactaattattcaaataatcttactaattataggatttgtgcttctaattaaaggtgcagatgtctttgtagacggtgcaagtaatgttgcatacaacttaaagataccaaccataattgtaggactcacaatcgtcgcatttggtacaagcgctcctgaagcagctgtttcaattacctctgcatttgccggaacaaatgcgatttcccttggaaacgttgtaggtagtaacatattcaacatattggcagttgttggtgtctctgcattgcttggaacattgacagtggataaggtattgataaaaagagatttcccatttttggttgtatcttcaataggccttcttctaatagccaccatatttggagagataagcagactctgcggtataatcttcttgataatcatcattgcttatgtctatgtccttgttcaagaggcaagacaggacaaggaagcaatgtctgaagagattgaagtaaagctttcaataccaaaagcggcaatctacattgtcataggtattgccggaatcataatcggttccgatttggttgtagactcatcaagctatattgcaagcgtattcggattaagcgatgtacttattggtcttacaattgttgctataggaacttcattgcctgagcttgtaacttctattactgcacttaaaaaaggagacaatggtattgtaattggtaatgtgcttggatcaagcatattcaacatacttttcattttaggtatcagcggagcaataatgccactcccaatagcacctgaaatggtatgggacatacttttaatgacagtgattacaatcattggcgcagcctttgcatacaccaaaaatgaagtggataaaaaagaaggtgccgttttagtagcattatttattctctatatggcatttgtcattttaagaaattaa

SEQ ID NO: 1952 - DNA, 504 bp, Methanobrevibacter ruminantium
  source 1..504: mol_type = genomic DNA
atggattctaaaaaactgattttagtgactgcattggcttttttagctattgtttccatagcttcagttagtgcatgggacttgtttggaacagctgatgagactagttccacagcaaagactaccattgcaggacatgatttcaatatacctgacggatatcaaaaaaatgagtcatatgtgttggataatgaaactaccaactcaaatggggctattttttattcaactgcagagagctattataagggtgcagatgatataatttatattcaggtagcagactacagttatcctggttatgaagctaatctaaccactgcccaacttctaaagtctggattgggagataaagaaaccatcaatggtcatgaaggtttaattgcagaaaatgaatttgatggcttaaaggttcatgcatttttctatgctgaagatggagattgtataactgtaataacttcagatgataatttatttgaacaaataattcctgaggcatga

SEQ ID NO: 1953 - DNA, 1356 bp, Methanobrevibacter ruminantium
  source 1..1356: mol_type = genomic DNA
atgaatgtgaataagaaaatatttttacttgtaatctttataatatctatttcaatagctggagtatattgtgcagacatccatcaggatagcgatttaaccgcaattctaagcaatgaaacagatagtggtttaacagctatcatgagcaatgaaacagatagctttggctgctgttcaattgtcctccaattagatggaaatgaatccataatgtgctacagacgtgattccaactatacagcagatgtatttattgaaaaggtcaattggcatggaaagcctgcaataaagcaatataaaactgacaataaatacttcaaccatgtcataatcacaaatgatggctggataataggattaggtggaatagacgatggaatcgacagtgaaatctgtgaaaacatcactgcaaagatgattacaaaggattacagcatctcagaagattatctaactcaaatccaggagattaaaaagaagtatggaagaggtcatgttgtaattaaggctcctaatggaaattacggctttgcaacacctacaaagctcaagacagggacattaaacgttggagaatacatatccatcccaaataattatgagctttccagaagaggatatgtctcactggatgagccagataaaatagaggcaatgataaatctatctagaactgacctttatggagatgacagacgtgaaataattacttatgacgttcatttaaatggcaacaacaatacaaccgacatttacatatccaatgaagatggatcacttattggaaaagactatactggctgtgttgacaatgtaatcttcaataatgtgactatagaaggaaaagacattcctatagctccaaactataaaagcctaggttcaatgagctttgaagtagataaagtcaatcttagcctaacagatttagcatttatagttgtaggagtagttctagttatagcactcttattcgtcttattgctaaggctcataagatttattaaaacaagaagatccagaagaagtgctccgagaagaactagaagagaaactccaagaagctccagaggaagcgccccaagtagaactagaagagaaagtccaagtagaactagaagagaaactccaaggccaaatctaagaaatgcaagaagaagagatacagaagaagatagaagaagaaatgatctaagaagaaatgtattgcaaaatatagtggaagataaaagaagaagcgagcctagaaggaatgtaagaagaaatacaagaaacaatcgaggaagaagaagaggacaaaatcgaggaaggcagcaaactaagagacctccaacattatataggaaagaataa

SEQ ID NO: 1954 - DNA, 858 bp, Methanobrevibacter ruminantium
  source 1..858: mol_type = genomic DNA
atgagcataaacaaggaagaattcaatgaaaagatattctctagaatcaataatctaatagacgattatcaattgattaaagagggtgaaaagatagccattgccttatccggtggtaaagatagtgttttaactcttcatgcacttaaaaattataaggatagtgctgattttgactttgagcttgtggcaattttagttgatgagggaatagatggctatcgccagcatggaatagatgctgcagtaaataatgcccagcttttggagattcctcttatacaaaagtcctttaaagaagaggagggctttgcattggatgatatctattcctattttaagagcgcttgcattccttgtggggtatttaggcgcaatatcttaaataaaaccgcttatgaaataggtgccgacaagattgcaacaggacataaccttgatgatgagattcagtcatttctaatgagcttttcaaggggagacactgtaaagttctctaaattcggtccggagcttgatcagattcatgaaaaattagttccaaggataaagccattgtggaacactcctgaaaaggaagtagggatgtgggcgattctgaatggtgttgagattcatttggatgaatgtccttattctaatctgtctttaagggctaaaattaaggaatttttaaataagactgagtcaaagcatcccggcactaaggagaatgttttaaactcatttataaagacacttgatgttgagaatgtaaggactgttttaagtgagtgtgaaaggtgcggagagccaacatcaggtagggtctgtaaagcctgtgaaataaaggacataattagtgaaaatagggattaa

SEQ ID NO: 1955 - DNA, 276 bp, Methanobrevibacter ruminantium
  source 1..276: mol_type = genomic DNA
atgggaattgaagagtcaggagtaggggaatacgtttcaaaggcagttcaaataatcgaagagagcggtttaaactaccaaataaccgctatgggaacccaaatagaaacagacaatctaaataaattatatgaagtttgtgcaaatgttcaagaagccatctttgaaatgggcgttcctagagtttatactgtactaaaaatagatgatagaagagataaggaaaataggacattgaaagagaaagtaaaaagcgttgaagatagaataaaatag

SEQ ID NO: 1956 - DNA, 474 bp, Methanobrevibacter ruminantium
  source 1..474: mol_type = genomic DNA
atggctcctgttgttgaacaacctgtagaagaatgggacaaagacattgcaatcgacttaaccggtgtattctactgctgcaaagcattcggagaatatatggtcaaacaagaatacggtaaaatcattaacatgggttcaatccactccagagttgcattaaccggaggattaattaccggatatacctctgcaaaaggaggagtatacaaccttaccaaaacattagcagctgaatgggctccatacaacattactgtaaatgcaatcggtcctgcatacttcgaatccgaactaaccgctgatgttgttggcgatgaacaattcgacatgttaattaaagcattctgtccaatgggcagatggggtaaagaaggagaattagatggtattgcaatctacttagcatctgatgcttccagcttctgtaccggtcaattaattaacattgatggtggatggactgcaatttag

SEQ ID NO: 1957 - DNA, 1104 bp, Methanobrevibacter ruminantium
  source 1..1104: mol_type = genomic DNA
atggcagatattaaagtttctatagctagtcctataattgaagaagaagagatcaatgcagttgttgaagtaatgaagtctggtatgattgctcaaggtccaaaggtaattgagtttgaaaaggaatttgcagactttgtaggtgcaaaatacggaattgcaactaattctggaacttctgcattgcatgttgcgcttttagctgctggaattggaaaaggggatgaggtaataaccactccatttacatttgcagcaaccggtaactccatcttatacactggagctcgtcctgtttttgttgatattaatgaagacacctttaccattgacccatgtaaaatagaagaggcaataaccgataagaccaaagcaataatgcctgttcaattatatggtcaagctgctgatatggatcctataatgaaaattgcaaaagaacatgatttgattgttattgaagatgctgctcaggcacatggtgctgaatataaaggcaaaaaggttggaaatcttggtgatatggcttgctttagtttttatccaactaaaaacatgactacaagcgaaggtggaatgatcaccaccaataatgaagagtttgcagaaaacgctagaatctatagggctcacggatctgctaccaaatatcatcatgatgtattgggatacaactttagaatgactgacattggtgcagctataggtattgaacagcttaagaagatagatggattcaatgataagagaatagaaaatgcaaaataccttaatgaaggattggcagattgcgatttggttgaaactcctgttgtagaggatggatataagcatgtctaccaccaatacacagttaaggtcaaagacggcaaaagggatgccctttctgactatctgattgaaaatggcattggcaatggaatttattatccaatcccattatacgaccaggtattgtatacagatatgggatataatcaaagccttgaagtaactgataaaactgttaaggaggttttatcacttcctattcatgcaaagcttactaaatttgacttggatttaattattgaaaaggttaaaaaggcaagtaaagagttataa

SEQ ID NO: 1958 - DNA, 1218 bp, Methanobrevibacter ruminantium
  source 1..1218: mol_type = genomic DNA
atggaagaatataaagacaattttccccaagaggaattgaaaacatacactgaagatgaattaaagatcatagaagaaggtaaagtcaaaataaaatttccagactttgataaggtctcctcagatgctccagtcttctataatccaaagatggaatttaaccgagacaattccatattagccctgcaagcctatcaaaaggaagttgaccgtgaaataaacatctgtgacctttttggcggaagcggaattaggggaatcagatataaaaaggaaatagaaggagttggagaagtatctgtaaacgacatcagccctcttgcaaacgaatttacaagaataaatgcagagcttaacgatgttgaagtaaacatagaccaaaaggaagcaaacatagagcttagaacaaacatgggacttttcgatgttattgacatcgacccatttggaactccttccccatttgtagactcagcagcatacaatctgaaaagggattcattgctctgtttgactgctacagacacatcatgcctatctggaacttatccagaaccctgcattagaaaatacaatgcaaagccttataaaagcgaatactatcatgaaaatggaattagaatcattataggatttgccgccttgacacttgcaaagtatcaaaagcatatagaggtaaagatgtcccacagcacagagcattatatgagagtctaccttaagatcataaaaggttcaaaggcaactgacaaatccttaaaaaacataggatacatcagccactgcaaaaactgtctatacagaacagaatcccatggacttgcaacaagcgttcccgacatatgtcctgaatgcggtgaaaagcttgttactgccggacctctttggctaggacctattcaaaataaggaatttattgaatcaatgattgagatagcagatgaaaaggaactcaataccaaaaagaaagtattgaagctactgaattcatgcaagatggaagcagatgcacctgccacattctatgacatccataagatatgtcgaagtcttaaaatcagtgcccctaagttggatctggtttttgacaagcttaaggaaaatggattctatgctgtcaagacacattacagccctttaggaataaaaaccgatgcaagcagtagagaattgatagaaatcgttaaggaattagctgaagaagtggaaaataaataa

SEQ ID NO: 1959 - DNA, 480 bp, Methanobrevibacter ruminantium
  source 1..480: mol_type = genomic DNA
atgtgtgcaaaagttaatgaagatattatacaactagatgaaactgacattagcatattaaaaatcataaatgatgatgttagaatttcatacagacagatctcccgcgatttaggaatttcagtaggaactgtacacaatcgtattgacaaaatgcttaagactggagtaattgaaaaatttgcacctgtcctaaaccataagaagttaggatatgcccttacaagcattattggagtaaatgtcaaaggtcaagaattagaacaatgggaacatgacatttccaaaaacaagaatgttgtaggcctttatgatgtaaccggtcagtacgatgcaatagtgattgccaaattcaaggacactgatgaattagacaccttccttaaggaattgcttaaaacaggatgcattgaaaagacaattactcaaactgtacttaacattgtaaaagaggacgtcggatctgctgacatcctttaa

SEQ ID NO: 1960 - DNA, 942 bp, Methanobrevibacter ruminantium
  source 1..942: mol_type = genomic DNA
atggtagtttgtctcccagacacacaagatgatgcacctagaatacctatccatttaagcagagtaggtgtgacaggtgttaagaagcttttaactcttaaaaggaaagaaaaaagaccaatcatattattacctacttttgacgcttttgtagatttgccaagcgatcaaaaaggtactcatatgtctagaactcctgaagctatcagtgaagtagtagaagaagttgctcaaagctcccaaaaaggagtggaatccctttgcgcagacatagtcacaagaatgcttgaaaagcatgaatacgctaagcgtgttgaagtgagcatggtcagcgactatatgttcatgaaggactctccagtaactgacaacaggtcccaggaaatgggcaaactaatagctaacgctgtcggtatccgtgaagatgacgacacaatcagcatcagaaaaagcattggtgctgaagtcattggaatgacagtatgcccttgtgcacaggaatctgtaagggaagtggataagaacaacttactaaaattcttagatgaagaaacttgccaaaaagtattggacactgtaactttcgcttctcacaaccaaagaggagtgggaaccattcttatagaagttccagaggatgaatatgtcgatggggaaaagcttattgaaataatcgaatcatcaatgagctcacctatttcagagcttttaaaacgtcccgatgaaaatgcagtggtaatgaatgcccacaagaaccctgtttttgtagaggattgtgttagaacaatgaatgaaaaaatcgtaaaagagttttcacatcttccagacgacactcttataaccacaagacaggaaaatcaggaaagtattcacagacacaatgcttttgcagaaaaagtttccactttaggttcccttaaagaggaacttaacataaattag

SEQ ID NO: 1961 - DNA, 282 bp, Methanobrevibacter ruminantium
  source 1..282: mol_type = genomic DNA
atgatatttatggaaaatttcgaaaatcaaaagttttgtcaatcttgtgcaatgcctatgactgaagaactctatggaaccaatgcagacggttctaaaaacgatgagtactgcatctattgctttaaggatggtgaattcacttcagatatgactatggaagaaatgatgaatttctgcattgaaaagatggtagaggttcatccggagatggacaaggaagaagcttctaaaatgatgaatgaagtatttcctatgttaaaaagatgggctaaggattaa

SEQ ID NO: 1962 - DNA, 1185 bp, Methanobrevibacter ruminantium
  source 1..1185: mol_type = genomic DNA
atgaacgtattagtttgttctatgtcagctatggctgaaactgcaggtccttatgggagagctagagctcttgttgaagctttaaaggcatctggtattgatgtagctacttgcatggcggaagacattaattataagccaatcgatgggataaaaaattattatttgaatgttcctatgcctcttggacttcctaagccaattgcaactaggacctttcctattgcacagaaattgggaatcattgaaaggaagaatgtaggaagctttgaagatgttctccattttaccggaaacattgactataagtatttgtgtgaaagtgtggctaatataagaaaggcaatcaatgacttcaatcctgacataatttactctgaatttaatatctctgcaatattggcttctaaacttgaaaataagagattatatgcaactataagctatcctacacaaactgaatatgcttctaatcccaaatatgctaaaggactaaagaagtttttaagagaaaataatcttccagatgttaattcctcattggatctttttaattgggcggataagtcatttgttccaagcatttatgaattggagccaatcgataaggataatgtgactttctgtggaacttggaagaatcttaatgaaggctctgtctttaaggaaaatgatgaaaatatggattctacagatgagaggaatgcaattttagtctatatgggaagtgggactatatctccaaacaagatgtttaaagaaatcaaagatgcatttattggaacagaatatcaagtttatattgcatctcttggacttgagaagtcagattttgataatattcatattgataagcgctgggatttctccaagcttttaaatgaatctgttctctttatcaatcatggaggtcaaaacagtgtggttgatggatttatttatggagttcctcaattgatttgtcctggaagagtctttgaacggatttataatggaaaatcagttgaaaaggttgatgcaggtaaaatattggaaattactgattttaaaggggagattatcaaatctgaaagtgaaaaaatcattaaggatgactcttttaggaataattccaaatcaatcggagataagttaaaatcactaaatggtattgatttgattatagattctatcaagaaaggctaa

SEQ ID NO: 1963 - DNA, 1344 bp, Methanobrevibacter ruminantium
  source 1..1344: mol_type = genomic DNA
atgaaaatgtataaaataaatgtttcaaatatttcacgattaaggacttatactgacggggatggtgtttcaactttaattgggtccatgggttgtcctttaagatgtgcatattgtttcaatcctttttcttgggacggttcccttgaacctaaaacttatgctgttgatgaattatatgaagaagttaaaagagacaatatctattttttatcaactggcggaggcttggtttttggtggaggggagccattgctctatcatgaatttatcaaggaatttattaagaaatataaatcaaccggttggaaattcacattggaaacatcactttcagttaaaaaggatattttaagggatattattgactatattgatttttttatagttgatacaaaggatatgaataaaaataggtatgaattatatacaaaaggagattatgaattattcttatcaaacttaaaatttcttattgataaagttggatctgatgggattagagttcgggttcctaaaattcctaagttaaataccgtagatgatgttaaaacaaattatcggactcttaaagatatgggcttttctaatatagatgtctttaattatgtggagattgctaaacacagaaaaatctctcgtgttgctctggaaaataaaaaagattttgatgaaaggctatatgaaaataagattaaatttgtagaggattatatcttatctgagattatgcttaaggttcctccgattttggattttcatataaagaaattcccaaattcctttaataaaaaatttgaattcttatttgaatacgattctatatttaatgacgacctgttctttttaaaggaagtcgttatttctaaattacaggagtgttatgattatttggatttaaaatatggcttctttgtaattttttaccctgttggttatttggaaaatagattagatgattcttgttttgatttgagtattatgaataatctagtaaaatcttttgaaggtttagatgaaattgataaggaaaaacatgcattggagttatgggaagaaaataaatgggaatatattgaatttaagtatttctgtcatgatttaaatcatttaaaaaatttttatgttaattttaaagatcatggctataaattagattcaaaatatattttatcaaatgcgtatgatgtttgtccatctgattttgtagtccatattaatcttagaaaaactggtaagacttataatatagtcgaagaagattattcaacacatcttcttgttcagaaatttgataaggatatgaatctaatttctcaaagcatttttgaaaagggaatataa

SEQ ID NO: 1964 - DNA, 270 bp, Methanobrevibacter ruminantium
  source 1..270: mol_type = genomic DNA
atgaaaggaaaagataaatgtgagttgcttaaaaatattagacaaaaaattgcagatgaaaataatatcgagtatacggctgtagagtgtacatttcaaggagattgcactggaacttgtcctaaatgtgaatctgaacttgaatatttggataaggaacttgagaaaaaacaaaatgctggtgaaaatataaatattaagaatatattttcttcagacgattttgataaatcagaatatggtcttcttgatgaaaatatattaggttag

SEQ ID NO: 1965 - DNA, 426 bp, Methanobrevibacter ruminantium
  source 1..426: mol_type = genomic DNA
atggtagatgaaatagacagattcgatggaaaatacctgtttttaagtaatttttatatttgtgacgttgaatatgatggaatactttatcctcacacagaggcagcatttcatgctcaaaaggtcttcgatgatgagactaaaatgaaatttactaatgtcactccaaagcaatcgaaaagattgggtcgtaaggtaaaattgcgtgaagattggaatgaagtcaaggacaatataatgtatgaagtctgtaaggctaaatttgaacagaatccagacattcgtaaattattgcttgaaactggcgatgcaaccttgattgaaggaaacacttggaatgatcaatattggggtgtttgcagaggaaagggcagaaaccagttaggaaagactttaatgagaattagagaggaattaagagaataa

SEQ ID NO: 1966 - DNA, 1533 bp, Methanobrevibacter ruminantium
  source 1..1533: mol_type = genomic DNA
atgaatgaaactaaaaaacaagtatcctggatgccattaatcctagtggcttttgcatcatttattatagctcttgatgccacattcatgaatgtatcaatatccccacttgttattgacttaaacacagatgttggaaccatacaaaccataatcagtttttataccttgattacagcttcattgatgcttataagctcaaagatgcaggatgtctttggaaagaaaaagatattcctaactggagcattggtctacggcttaggagcattcattgcctcaatcagccaaaatgcaataatgctctttatcggatggtcactattggaaggtattggcggagcattgatgacacctgctacaatatcaatcataagtggaacatatgacggccagatgcgtacaacagcccttgcaatctcaagcgcaatcgtcggaattgcagcagctatcggaccattgtttggaggtgttgtaaccacattcctatcctggagatatggatttgtatttgaactattaattattcttataatatttatcttccgcaagagaattccaaactttgcatcaactgcaagcaaaaaggatttggacattacaggatcccttctctcagccataggattaatattgcttgtcttaggagttttaatgatttcaggaaagacaatcggattaagcataggcctaatcattgcgagcataatcgtgctaattggatttggactctttgaaaagagaaggaaggcaaatggaaagatgcctttatttgatgtaagcctcttaaaggatagaaatctatcccgcggcacattgattagacttataactgcaattgcaatgggaggctcattgttttcaatatcaatctaccttcagacagttctcaagctctctgcattcaatacagggattgtcctattgcctctcacctttggaatgcttatattttcaataatggcaccgaaattcgcaatcagactaagccataaatatgcaatgataatcggtttttcaattgctattgtgggatgcctccttttaagctatcagtttacactaactacaagattcatcgatctccttccagggatgtttatctatggtgcaggacttggttttccaatggcattaagcgtagatacagcacttataaacacccctcccgaaagccaaagcagtgcatcaggatttgtaagcacaggacaaagtctgggaatgtctatgggaactgcaatcattggaatcatcctaatcgttggagcagttggaggaatgcatgatgcaataaatacctatgctccagataaggtcacaaaccaagaattccatgataatgtgcagggctactttgaaaaattaggaaatgttaatacaacagagcttaagcatgaaaacagcctaaaggaaaagattgtgagcaaggtcgtacaggatgctatgagattggtaatgtatgtgactgcattgctgcttgcaataggaggagcattgacttttaccttaaaaaaacaaaaaataaaaggataa

SEQ ID NO: 1967 - DNA, 1590 bp, Methanobrevibacter ruminantium
  source 1..1590: mol_type = genomic DNA
atgggaaataaagaagaaaagaaagctgcaagacaacgttttgatgagatcatcggcgttgcaaaaagacaccacttagcaaagctattaacaaataacgaagacgatgaagactttgaagtttcagacctaagatatgcaatggaagagctaggtcctgcattcatcaaattaggtcagcttttagctacaaggcccgatatggtaggaaatgatattgcagatgacttaaagcttttaagggacaacactccagcaactccttttgaagaaatgagaaaggtcattgaaggagagcttggaaagccattggaagaagtatactctgaattcaatgaagaaccattaggctctgcatcaatcggccaggtatatagggcaacattaaaggaaagcggcatggaagttgcagtaaaggttcaaaagcctggaatctatgacgtaatcgtaccggatgtaaagatcttgaataacctagctggaactgtagacaaacatgtatccggttcaagaacctataacttacctgcaatggctaaggaatttgaaaggtcaatattcaaggaattggactatatggaagaagtaagaaacatcaataagataacaaataactttaaggatgttgaatacattaagatacctgaagtctatcctgaatactgcagttcaaagctcataaacatggagctcattgacggatacgaagttacagaccttttcgacaatgagattgaaggcatcaacaatacagaaattgcccaatatggaacccaatcctacctaaagcaagtattgattgacggattcttccatgcagacccacacccaggtaacctctttgtaacaaaggatgctaagctttgctacatcgactttggtatgatgggagtggtaaacgacacattcagatcaaacttcgcccaattgatattgctcctattggatggaaactcacaccatttaatcaatcaattgctctatatgaatatcatctccccagaacagaacactgacgagttcagggaagatgttgatgacctcttaaacagctacataggcgtagaccttgatcaaatggatggaatattcgataaccttatgaatgtaatgatcaaccacaatattatccttccaagggaattcatcatgatcggaagaggaatattgctcattgaagatgcaggaaacagattagaccctcacttcaaccttacagccgaacttgaagaattcgctaagaaaatgattaggaccaaattcgagcctggaaaccttgtaggcggaggattcaactatattgtagagattgaacacttattaaaagacttgcctgacaggcttaacagcacccttgacaaggttgaaaaaggtgaattagaattaaatatgaaccacacaggtctcgatgacttgaaaaaccaattatccattgcattgattgtatctgcattgcttgtaggttcttcaattgcaattctagcagacaaaggtccaaaagtatgggacatctctgcaatcggattcttcggattcctattcagcgcaatccttggtgcatatttagttattaagtacattagaaaataa

SEQ ID NO: 1968 - DNA, 468 bp, Methanobrevibacter ruminantium
  source 1..468: mol_type = genomic DNA
atgtataaaaaattaatgatactggcactattttgttttatagtcattggctcagcaagtgcagcagactttaaaatcaatgatggctttaacagctcactgtctgattattctttttacaatgaagaccaaaacatgtacattaatatctgggattatgatgatgagattcttagcgaagcatatctggaaaacagcagcagctatcgcatagtttcaggagaaaacaatacatataactttgtttttgacagctataacgatatggatcatgtaatctcctatattaccaaaggatatgttgccttagactgtggagtattggaaatagctgaagttgatggcaaaaagcaaatcattttggtttctaaagagggaacaaatgtagatagcttgaaaacatgttatgatgaattaatgaaattcaatcagaacaataatatagagccaatagcagatgctatataa

SEQ ID NO: 1969 - DNA, 1938 bp, Methanobrevibacter ruminantium
  source 1..1938: mol_type = genomic DNA
atgagaattaataaatctttattaatgatctcactgcttcttatttcaattcttgctataagcgcagcaagtgctgcagatgacatggtagacgcagatattgacctagcaagttcagaaattagtgaagtaagtgtagatgatgtacaagctacagataaaaatgttttatctgatgcagatgaagtttcagtagttacacaaaacactccttacaatgaaaatgcaactattgatatcagcgtcaacggcactttagctgatgacagcaccataaaacttttcattgacggtgaagacaaaggagatttaaatctatcagcagaaggaaaagcaagttatgttattccagcaagcactctcgatgtaggaaaatatttcattgaagcagtagtacataatggaacttcctcatttggaggcagatccaccctcaacattactaaagtcactcctatcgtaagcgttagtgatgtaactgtaaaaagtggagattatataaccattccatttaatgtaactgatgacaaaggtaaagcaatccctggagatgtcattgtaacaatagtctgggaaaatgatgtaataagcaaacatattaaactaaacgacaatagctctgcaggatttaatattgctgatattattggaatatttggcggaaacagcacaggtaacggaacaggaactggaataggtgacttattcaacagaaacggaaccaacggaactggaaacggaaccggaataggtgacttattcaacagaaacggaaccaacggaactggaaacggaaccggaataggtgacttattcaacagaaacggaaccaacggaactggaaacggaacaggcatcccaggtattggcggaaacagcacaggtaacggaactggaaacggaaccggagacttcgatattgcaagcattctcgcaatgttaatgggaggaggcaataataccggcgctaaatttgcatatgtctttgaaaaaggagtctataatgtaagcgttgaatacttaagcaacagaaactacaatggagccattaacgacactgcaaaactaaccattactcctttagaagatgttttaatcaatgcaaccatcgaaactgctaaaaacatgtctgacaacacaactgtatccatccttttaaccgacggatatgaaaaaccaatagctggcggagaaatcaatgttttcctaaacggtgaagacaaaggaaaagtcactgccaatgaggaaggtaaagcaagcattgcctttagcaacttacttaaaggtgactatgaattattactcaactataaagaaaccaacaaaaccttcgacttctttgtaaatgttgaaagaatgggaaccgtcattgaatatgaagacatgaacaccacctctgtaaacgaaaaagtcgatggcagaatcggtgaatacttccaagtcactttaaaagacaacgaaggaaaagctttagctaacagattcgtccaaatcggattcaacggtaaaatctataacagaaccaccgatgataaaggacaaaccaaattgcaaatcaaccttttctacactggtgattacacctttgctgtatgttacttaggagatgacgcttataacgcatcattcattgttgcaaaaatcaaagtaagcaaacaaactccaaagattacaactaaagatgctacatacaaagcagatgccaaaaccaaaaacattaaggttacattaaaatctgcaaaagacaatgcaattaaagataaaaagatcagtgtaactgtaaacggcaaaacctacactgctaaaacagatgaaaaaggtgtagcaactgtaaacgtaagcttatctaagaaaggaacttacagctttactgcaaaatatgccggtgacagcggatacgctcaagtcagcacaaaaggtatattaaccttaaaataa

SEQ ID NO: 1970 - DNA, 246 bp, Methanobrevibacter ruminantium
  source 1..246: mol_type = genomic DNA
ttggaacttgttatcttcaaggcagaaaacaaattagaggaaatcttcttaaatgcacagttaaaaatgcaaaaggctaaaaatgaattgattaaaaacatggaaaaagacatcgagaaagctattgaattagctgctatcgaagttgaaacccaaataatcaaagaaaacattgatattgctgtagatgccttagaagaaaccattgaagaagaaaaagcagacttagccgaaagatttgaataa

SEQ ID NO: 1971 - DNA, 462 bp, Methanobrevibacter ruminantium
  source 1..462: mol_type = genomic DNA
atgtcagaaatattaccaaaaattacaggacaaataataggacatttcaatgcatttaaaggatcaagaccagcatttcatggtgaacacaccctcattgtaagaggaataagccgtgacaagattgaaatagaagaaatggaacctaaattagcagagcttgaagacattcttaaggcaagagaagttgatgtattatctgatgcaggtaaaaactttgtagaaaaagtagattcatatataagagatgcagaatccattgatacagccccagacagtggagggctccttagaatgaaagagcaattagaaactatgggattgcatgtggaatacaagctattcttaatgccatatgctggagcatttgtagcaatctggaaagacaaatctggatttggtccattatatgtggaagttacagcatctgaaagggaagagactgataatgatatgaaataa

SEQ ID NO: 1972 - DNA, 1092 bp, Methanobrevibacter ruminantium
  source 1..1092: mol_type = genomic DNA
atgtctaatttatccaatattgattttgaaaaccttagtcgcaacgacctaatatccattttagaatgcaaaaaggaagacattctaaaaatcatggatttagctaattccaaaagggaaaacactttcgtcacatattcaaaaaatgtctttatcccaatcacaaagatatgtaaaaatgactgtggatactgtgcattcaagcaaagcccagatgatcctgatgcaaccatattgcttgaaaaggaagagatattagccactttaaaggaagcagaaaaatatggctgcaaagaggcattgtttacaatgggagaggatgcagatgaagaacctgctgtaaaaatcaagcttgagaaattaggctatgagaatatgccagattacatttatgacatctgtaaaatgacagtagaggaaacagaccttctgccacacaccaatgctggaaacttctcatatgaagatatgaaaaagcttaaagaatacaatatctctatgggaatgatgctggaaaactcatcagaacgattgatgaatactattgcccataaaaagagtcctggaaaagatcctaaaatacgtcttgaaactatagaaaatgcaggaaaacttaatattgcatatacaactggaatacttattggaatcggtgaaacaaaagaagaaatagctgattccctacttaaaataaaggaactttgtgataagtatgggcatattcaagaggtaatcattcaaaactttacagtaagtcctggaattgaaatggaaagccatgaagagccaagccttttagatatggttagaaccgttgcagctgcacaattgctctttgatgaggatgtttcagttcaagtgccaccaaacctcaactatgaaacaagccagatattccttctttgcggaacagacgactggggaggagtttctccattaagtgaagactatgtaaatccatcctcaccatggccaacccttgaaaggcttgaaaagctaacaaacgatgcaggataccagttaaaggaaaggttagccatttatgataaatatattaatgaaaaatatattgaaaaatcctatattaattag

SEQ ID NO: 1973 - DNA, 1323 bp, Methanobrevibacter ruminantium
  source 1..1323: mol_type = genomic DNA
atgactaatgaagataataaaaatatgacaattattggagctagcagaggtctcggcaaatggatagcccaacacttaaaagaagactttaatatcaccataacaagccgaaatcaagcagaagggcaagaagtggccaatgaactaaaggttagctacaataatgacaatattgatgcaataaaggatgcaaatataattatcttcagcgtgcctatagagcatatggccaccaccataaaggaagtggctccccatgcacctaagggatcattattaatggatgttgcaagcataaagaaagagcctgctgaagcattggaaaaatacgctcctaaagatgtggagatattgccatgccatccaatgtttggtccaagagtccctacccttaaaaggcagatagtggtattgactccaattgaaaacaggtcaaatagttggacacttgtaaaggaatatctagagaaaaaggaatgcgaaatcgtcattacaagccctgatgagcatgacaaatatatgagcatcgttcaaggacttacccatttctcattcataagccttgcttcaacaataaagaagctaaacataaatgtcaagaagtcaagatcattttccagtccagtctatagcctaatgcttgatatgataagtcgtgttgtctatcaaaacccttacctttactattcaatacaaaagaacaataaggaaactgcatatgcaagagatgcattgattaaagaaagcatgcgcctatcaaaactgatagaagagggagacgaggaagactttgtaaaggccattgcagaatcagcagagcatattgatgaaatcgaagaggctttggtacgctcagataaggcaataagcatgttgaatcaaaaggcaaatatcctaacaaaattaattggagaagaagtgggattggaagatgcattctccaaaaaggcatatataggcattgttagaaaggtcagctcacagactgttacaatagagaatgaaaacaatgaagagattgaattgaagatttcatctattgacataatggataaagatgagctcttccaatggaaaaagaagaatttgaagttggaatcctttgatttaacagcaaaattcccttcaagcgctaatgaagactatttgcttaagatgtttaaaaggattgaaccagttattgatgcaaatatcatctttaaagacaaagagattgaaaaagatttaagaacttataagttccattattccctattcaataagcaagaaaaggattatgttgaaaaatacattcagggaattggtggaatcctaataaaataa

SEQ ID NO: 1974 - DNA, 771 bp, Methanobrevibacter ruminantium
  source 1..771: mol_type = genomic DNA
ttgaagtggaaaaagataggggacattctcatcattgatgataactttgatttggacttgaatgatgagaagactttaaaagatcttgcacataggcataaggtcaaatccataatccggattgaaaagattgaaggtcaaaagagagagcctacaattgatatcttgtatggtgaggatacagaaaccattcataaggaaaacggatgcctgtttaacttggatttgtctaaagtgatgtgggctaaaggaaataataatgagcgattaagaatagccaaactagtccaaaaggatgagactgtcttggatatgtttgcaggaatcggatacttttctattcctattggggttcatagccaggcaaagcagatctattcgattgaaataaatccaaattcctatcattttctaaaaaggaatattgagttaaataaaatcaataaaaaagcaggttatgataggatgattcctattttaggggattgtgcaatagaagcacctaaatactctgcagatagggttttaatgggttatgtgaagacaactcatcacttcttgcatccggcgatggaatgcgttaaggatggtggcataattcattatcatgagaccgttccggataagctgattgaaactaggccttatgagagggttaaggaaatggcatggaactgcggtgaaagggaagttgaggttttaaatattcagcgtataaaaagatatgctccaggtgtagagcatatagttctagatgcaaggatttattaa

SEQ ID NO: 1975 - DNA, 624 bp, Methanobrevibacter ruminantium
  source 1..624: mol_type = genomic DNA
atgagtaataaaaacacttttgaaggtactacaaccgttggtattacctgcaaagatggtgttgtatttgcaagtgaaagaagagcaagtatgggaaaccttgttgctcacaaagtagctgaaaaaatattcaaaatcgacaatcacattgcagcaaccattgcaggatctgtagcagatgcacaaaccttaatgaaagtaataagtgctgaaacttcattgtacagattaagaaatggaaaagacattagcttagaagcagctgctgctgtaagctctaacatattacactcctcaccagcatatgttcaaactcttatcggaggagtagacgacactggagcatcaatctattcattagatgctgcaggtggtatgattaaggataccttcatttctaccggttccggttccacatttgcatatggtgtgcttgaagacagattctatgaagatatcactgtagaggaagctactgaagttgccataagagcaatcaaagcagctacagaaagggataccttctctggaaacggctttttagtggcaaatgttactaaagacggatttaaaatgttagaaaaagaagaagtagacgctattattgaaaagatcaatagctag

SEQ ID NO: 1976 - DNA, 1911 bp, Methanobrevibacter ruminantium
  source 1..1911: mol_type = genomic DNA
atggcttccaatgttttagaacaaattaaagaagaaattacaaagaaacttccagaagaggttaaattagcaaatattgaatttgaaggtccggaagttgtaatatatacaaaaaatccagacatcattgcagacaatggggacctaattagaaacctcgctaaggacttaagaaaaagaatcatcatacgttcagacaagtcagttttagactcttacgaagacgcaatcaagaaggtagaggaaatcgtacctgaagatgctgaaattaacgacataaaatttgatgaagttacaaatgaaattgtcatagaggcaaccaagccaggacttgtaattggaaaatatggagttacctcaagagatatcgtaagaaacactggttgggctcctaaaatcttaagaacccctccaatgagatctgaaattatcgacagaataagaaacacccttttaaacaacagcaaagaaagaaaaaaattcctccaaacattaggtgcaagaattcaccaagggggaaaatatcctagcgactgggtaagattaactgctatgggaggatttaaggaagtaggacgttcctgcatgttgcttcaaactccaaacagtagagtattgcttgactgcggagtaaacgtagcaggccaagatgacaaaacctcattcccaatgcttggagttcctgaattttcaattcaagacttagatgctgttgtcttatctcacgctcacttggaccactgcggattcatcccttacctttaccactatggatacgaaggccctgtttactgtacaagtgcaacaagagacttgatgacattattgcaaatggattatattgatatcgctcacagagataacaatcctctcccattcaatgcaaagcatgttcaaaaggaagttaagcatacaattacattggattacggagtggttactgacatttccccagacatcaagcttacattgcataatgcaggacacatcataggatctgcaatgtgccacttccacattggagacggagcacataaccttctatacacaggagactttaaatatgaaaaaagcagacttcttgaacctgcaacaaccagattcccaagagtggaaagctgcattatggaaagtacctatggaggacatgaggatgtaaccccttcaagaaacaatgcagaaaaggaattgatgaaaaccatctacaaaacaattaaacgtggcggaaaagtattgcttccagtgtttgctgtaggaagggctcaagaattgatgattgtgcttgaagagtatatgcatcatgacataattgaaaccgtacctatacatcttgacggaatgatttgggaagcaactgcagtgcatactgcaagacctgaatacttaagcaaggaattaagagatcaaatccttcatatgagccgtaacccattcatgacagaatcattcaatcaggttcaaaacaatgcagaaagaaaggaaatcgttgaaggagagccttcaatcatattgtcaacttctggtatgatgactggaggaaactctgtagaatacttcaaatggttatgtgaagacaaaaagaacactcttatctttgtaggataccaatctgaaggttcattaggtagaaaaatccaaaaaggacataagcaattaccatttgaagatgaagacggtaagacaagggttttcaatgtagaaatggaagtcaagaccattgaaggattcagtggtcactccaatagaagacaattgatggaatttgctaaaagactacacccaagaccggataagattattacctgtcatggagacccttataagactgttgacttggcttcaagcattcatagaagctttaaagttgagacaaagactccagtcatactcgatgcagtaaggttacaataa

SEQ ID NO: 1977 - DNA, 1020 bp, Methanobrevibacter ruminantium
  source 1..1020: mol_type = genomic DNA
atggttacatattcagaatcaggtgttgacattgaccttgaagcattgactgtttctaaacttgcttcaaaattaaaaccaacattagaatacagaaatatcattactgacagtggacattttgcagctttagtagaacttggagataaggccattgcaatgagcactgatggtgtagggagtaaaatcttagtggctaaaatgatggagaaatacgataccgttggaatcgacatgattgcaatggtagttaacgacattctctgtgtaggtgctgagcctatagcattagtggactatttggcagttgaagagccagatccaaaagttgctgaagagattgcagacggattagtcaaaggagctaccgaatccaaaatcgcaataatcggaggggaaacagcatcacttccaggaattgtaaaggatttcgatttagctggaaccggaatcggctttgtagacaaggacaaaattatcactggtgcagacatccaagaaggagacatcttaatcggacttagaagtagcggaatccacagtaatggattaagccttgcaagacgtgcaatattcgaagatggaggatttactgtcgatgacaaaatgcctaattcagacaccacaatcggtgaagaattattaaagccaacccaattatatgttaaagcaatcattgaccttctaggacaaggatttaatataaaaggacttgctcatatgactggtggcggagtaaacaacctttcaagacttaaagatggaataggctttgaaatcactgattatccagaacctcaagatattttcaaattgatttaccaacaaggagttcctttagaggaaatgtataaggtcttcaatatgggaataggatttacagtaatcgcaagccctgaggaagctgatgcagtccttgaagcattaaataaaaatattgaaagttatattgttggaaaagttattggcgaagagaaaatagttgtaaaaacctttgaaggcactgaaataacttattaa

SEQ ID NO: 1978 - DNA, 990 bp, Methanobrevibacter ruminantium
  source 1..990: mol_type = genomic DNA
atgaatattagtgttaataaagaacgagaactagtaaaagaaatattaactaaaatcggagtaaaggaaaaccaagctgatgttgtaacagaagcaacaatagactctgatttaaaaggattcacttcacacggacttggaagattcccacaatacataagaggaatcaaaagaggacatattcaaattgatggggaatatgacatagtccaagaaactgaatcaatcgcattgattgacggtaaaagtctttttggacaatacatagctcatgaagcaatgagcttagcaattgaaaaggctaaaaagacaggtattgctgcagtaggtacattcaatgctaaccactttggaataactggatattactctgatttagccattagaaatgataccatcggtattgtaatatgtaatacagaacctggagtagcacctcttggaggtaaaaaagcaattcttggtactaacccagtggctataggaattccttccgacacttatattgctgtagacatggcaacttctgtcagcgctcgtggaaaattattggaagctcaaagaaaaggtgaagagattccaccaaacactgcaatcgataaggatggaaacccaacaaccgatcctgaagctgcattagaaggttccatcttaccatttggcggagtcaaaggatatgcattaagccttatgattgaaatcatgtctggacctttagtaaacgctgcatttggtacaaaagtaaccggaactgcaggtgactataaggaaaactgtaataagggagacttattcgttgctatcgatccttccaaatttgttccaatcgaacagttcaaggcagacgttgaagaattcgttactgaaataagagaatccggtgacacattcataccaggagaccttgaagtaaaaagaattgcagaaaacgaagtcaaaggtttagacatagatgaaaaactctatgacaccttagaaaacaatttgtga

SEQ ID NO: 1979 - DNA, 393 bp, Methanobrevibacter ruminantium
  source 1..393: mol_type = genomic DNA
atggtaaaacctgttaaaattcatgacaataatctttgggataagtttgttaaagagactgaatcctattgggctgttttaagtccaggtactgtgattgctatatttattggcgaaactgataagaattttttattgattgagagaaaagaaggaactgttgagtctaaattcaatataaataattctcttaatatgatggatactggtctctttttcacaataactgaagaggatgcatccgatttattagatgattccagtttattgactacttttattaaagaaggtaaattaggcatattctgtttagtggatgattatgcaatggctgaaaagggtcttgatactttattaagcgatttaggctttgcaccatcttgtgctatttaa

SEQ ID NO: 1980 - DNA, 384 bp, Methanobrevibacter ruminantium
  source 1..384: mol_type = genomic DNA
atggaagaaaaaattgctttagctgcttgcagtggtatgagtccaaatggtttggttgcaagagttgcagttcatgatttggctattgacgatcatgagattttatctatttgtatgggttcaacttctgcaaatgtggaaggatttacaagagttcttgataaatatcctattttagcaatcaacggttgtgaaggcaactgtgttggtaaaatcttaaaggaaaagggtgttgatattgtaggagaacttaatgttggagatattttagcagaaactgaatacaaggctaatgatgctgcaaggttagatgatgaaggagaaatctgtgtaaagattgtaaaggacattatagaggataaaattaatgaattaagtgaataa

SEQ ID NO: 1981 - DNA, 1917 bp, Methanobrevibacter ruminantium
  source 1..1917: mol_type = genomic DNA
atggttaaaaggaatattgttcttttagatattgattatataactcatgacgaaaaggcagtcatccgcctatttggcaaggtaaagggaggagaatctaatgacatcatcgctatagatgactcttttgtcccttatctttacattttgcctcttgaggatatagataaatgcataaaagacataaacggtctaaaagaagaaggagaaattgaatttaccaaattggaaaaggtaaacaagaaagaccttcaagttcctaaggaatttattaagatgaccttaaaccatcctcaggatgttccaaaatacagagacaaaatttgggacttaaactctgtaaagcaattaagggagcacgacattccattttatagaagatacctgatagataatgccttagttcctatggctgaattggagcttgaaggagagcttatagactcatttgaaacagtcgattctgacgatgaatcccttgaaatacttaagctaagctgccctccaaagactgcaaacactgattttcaggaatttcgaatgatgagctttgaccttgaggttcgaaaccctcatggaatgccaaatccagatcaagatgaaatcattatgattggaatcgacagcaatgtaggtgttagaaaggtcatctcaacaaaaggggatgaatttgatgatgatgaggaaatggactttattgaaattgtggaaacagaaaaggaaatgattgaacgcttcgttcaaacggtcaaggatgccaatatcgatattataataggatataactcagataattttgacttcccttaccttagggatagggcaaagagatgggaagtggatttggatttaggtgttgacggctctggacttaaatttttaagaagaggctatgcaaactctgcagcctttagaggccttttgcatgttgatttatatttggttatgagaagatacatgtctcttgatagatataccttggaaagggtctatcttgagttctttggagaggaaaagatcgatgttcctggtgagagaatctatgaattctgggacaacggcggagatgagctgaagaatctctttaagtattccttggatgatgtggtagccaccttaaagatagctatggaaacattgcctctaaaccttgaactgacccgtatcgttcgtcagcctttctttgacgtaacccgtatgtctacaggccagcaagccgagtggtttttagttagaaaagcttatgaggttgatgaggttgttccaaacaagcctaatatgaccatgaataacattcgtgaaagaggcagcaattctggaggctatgtaaaggagcctgaaattggtttgcatgagaatcttgttcaattcgactttaagagtctgtatccaaccttgattatttcaaaaaacatctctcccgatgttttggtaactgataatatttcttataatgccaagtttgaagactttgagacaggatatgatgaaattgacagtgttttggaagagactccaagtgaggatttggatgaggaggattattatgtctgtcctgaacacttctttaagtttaaaaaggagccacaaggtttcattccatcagcaattgaagacgtattgaatgaaaggtttagggtaaagaatagaatgaagcaaaccgaagatccggtactcagaaaaagtctggatgttcagcaacaggccttgaaacgtttggcaaatacaatgtatggagtttatggatttttaagattccgttggtattcctttgaatgcgctcaggctatcactgcatggggacgtcagcatattaaaaaggccatgaaggaagctgaagactttggatttaaggccatttatgcagataccgatggattttatgcaaaatatgttcctgaaatgaaaaaagaatga

SEQ ID NO: 1982 - DNA, 1086 bp, Methanobrevibacter ruminantium
  source 1..1086: mol_type = genomic DNA
atggtccttttaggtgccatgattgcatatggtttgacacctattgctaataagattcaaacaaagattaaatatccttcgatttctatctttttagcattgatccttgttgtaattccattgatactgctatttgcatatgtattttatgaaattacagtttttgcagatgtattctttaattctagtgatttggctggaatggatataaataatgccctaaatgccttcgttggtaatttgccagttgaattgcaaggcttcattaaaccttatatgggttctctatctactggtttggaaagcgctttatcttatgtattggcttatacagttaaattggtaaaaggattttctaatgttttaattcaattatttgtattaatctgttcaatttattactttactcgtgatggagaccttatatgggaaaatatctttgtatttatccctaatgagcataaggctttctttgatagaactttctatgaaattgctaatgtattgaagtcaatattctacggtcactttttgactgcagttataattggtgttatgggcggtgtaggatattacttattaggctataaatttgctttgtttttaggaataatcactggaatatttcagttgattcctatatttggcccttggattgtatattgggctttagccatttacgccatatttgtagccggagatattgttcaagcagtcttaacagttttgtggggatttgttctcagtttaagtgatatgtatatacgtcctgtattggcaagtaactatgcagatatgccttctttgattcttttggttggatttatggccggcccttatgtatttggaattgtagggtttattttaggtccattaattttaggagtttgttatgctgttattaagtctttaaaagaagaattagaaaaggataattggaactctggagatgaagagggttctgatgatggtgatagtgaagatgtaaaagaaatttctgataatcttgatgaagtttctgatgataaaaaggattctaatgaagattcaaaagatttggatttgggaattgaagaaaaaatttaa

SEQ ID NO: 1983 - DNA, 810 bp, Methanobrevibacter ruminantium
  source 1..810: mol_type = genomic DNA
atgaatgtgccacaagttttagaaattaaaagaatcatagaagaaactccttcaattaagacttttatttttgattggacaatggtaggtgaaaacattccaactccaggccagtttgtaatggtttggaatttcaatgacgaaaagccaatgtccatttcctatattgacatagctaaaggagaattgggaattacagtaaagaatgttggggaatttaccaatcagctccacagccttgaagttggagacagattaggtcttaggggaccttatggtaatggctttgacactgatttaagagacatgaaagtcttggcaattggtggaggagtaggaatggctcctattgcttcatttgctgaagaggcattgaaaaacaaggcgattgttgatgttgtatgtgcagcccagacaaaggacgagctcttatttgatgaaagattaaaggaaaaaggggcaaccgtttacacttgcactgatgacgggtcctgcggatttaagggatttgcaacccatagggctatagagctaatggctatgaaaaagtatgattgggctgttgtctgtggtcctgaagttatgatgaagccgttatacggcacattggaatcaaatatgattgatggagagtattccatggaaagatatatgaaatgtgccattggagtatgcggccaatgctgtgtggacaatacaggatggagaatctgtgttgaaggccctgtattttctacagatcagatgtctgagataattgaattcggtgagttccatagaaccgcttctggattaaaagagttttattaa

SEQ ID NO: 1984 - DNA, 837 bp, Methanobrevibacter ruminantium
  source 1..837: mol_type = genomic DNA
atgttaaaaactaaattatgcggaattagtttaaaaaatccattaatgcttgctgcaggtgttttgggaagccatgcatcttctcttaattggattttaaattctggtgcaggtgcagttgtatcaaagtccttctcaaaggaaccaaacgaaggatacaaaaatccaaccactgtagctgttgagggaggtatcataaacgctatcggactttcaagccctggcgttgatgcattcatagaggaattggaatctgtaaatagaatcaaaggcagatcaatcgcttcaatctatggagcaactcctgatgaattttcatatgttgcaggcaagattgaaagtttggttgacatgattgagatgaacatatcctgtcctcatgcaatggaaggatatggggcttccatcggtcaaaatcctgatttaacaagagaatttgtctctgcagtaaaggatactgtcagcgttcctgttcttgcaaaattaaccccaaatgtaacaaatatttctgaaatagctattgctgctgaagaagggggagctgatggtttgaccttaatcaattcattaggccctggaatgaaaatagatattataactggaaatcctattttggccaataagtttggtggaatgagcggccctgcaattaagcctattgctgttagatgtgtttatgacgcttatgaggcaacagacattcctattgtaggtgttggaggcattcgcaactacactgatgttgtagagttcttgtatgcaggtgccagtgcagttcaaataggaacatccattatgtatgaaggtcctgaaatatttggcagaatccgcaaatga

SEQ ID NO: 1985 - DNA, 1281 bp, Methanobrevibacter ruminantium
  source 1..1281: mol_type = genomic DNA
atggaatactatataacacaatttattgcaggatttattgcttttgatgaggatttgaaaatagccaattataaattatttgatgatgagaatattgtttcaaataatcttaaaattgaaaataaggaattattagaagaggagatagaattaattaatgaactgtcttctgatgattctacaatcattatagaaacaagaaaaagaagatcccaatataaagagcttgacaattatgaaaatataatagttgagactccaaataaaggtggagaacacttaagaaataatttagagagcattctattggaaattggctttttaaatgatgataaagagaatatcgatgatgtagaagaaaatataagtaatttagaagagccaaaccaagaaaaatactctgaaattacaaaaatttatgaggacatagctagcctaaaagtaaaagagtcctcacaagaagaagataaactacttattcaagcaataaacactgtagatgaccttgatgaatcaatcagcaaattagtggaacgtattcgtgattggtacaccatctacttccctgagatggacactataggaagcaatgaaacatatatcaaattaattgcagaaagcgaaaacagggaagacatcattaaaaaccataaagagcactttgatatagacttggatttcagcactggagcagacatagaagaatatgacttaattatggtaaaaagctttgcagagtctatctattcacttcaaaggtctagaaaagacttggaaaaatatatagatactaaaatggaagaaattgcacctaacttaagagatttattaggccctacacttggtgcaaagcttatcgctcacattggaagcataaaaagattagccacttatcctgcaagcaccgttcaaataatgggcgctgaaaaggccatattcagacatttgaaaactggagagagacctccaaagcacggtttgatattccagcacccaagcgtaagaggtgcgaaatggtggaatagaggaaaagtcgctagaaatctagctttaaaaattactttagccgttagaaaggatgtctttagtggagaatatgatccaaaaatagctgaagactacttgaaaaaggtagaagagatagaaaaagaaaatcctttccctaaaaagacaagcagccgaagaaagtctgaaagacagatggaaaaagataaaaagtctaaaaagtacaagggaaataagaaaaataagaagaataaaaagagaaagaaaaggaaatag

SEQ ID NO: 1986 - DNA, 651 bp, Methanobrevibacter ruminantium
  source 1..651: mol_type = genomic DNA
atggaaatatttttaaaagatcaagacatagtcacaaggaatctaaggcctggaatcaaggtctatgatgaaaagctaatccaagaagagggtagcgaaatcgaatatcgcagctggaatcctagaaggtccaaattagctgcggcattattaaacggtttagaaagcttaaaattagaaaatgactctaaggtattatatttaggagcatctaccggtacaactgtctcacacatttcagacattgcatatgacggattgatttatgcagtggaattctcacctgtaagcatgaaaaagctaattagactctctaagcaaagaccaaacattgctccccttcttgaggatgcgaccaagccaaaaaattatttaaacaaggtcgaaaaagtggatttggtctattgtgacgttgctcaggaaaaacaaagcgaattattcatgaataatatgaaattattcctaaaggaagatggacaaggcctcattactataaaagcaagaagcatagacgttgttcagaaacctaaaaaaatcttcaaggaagaggagaaaaaattaaaagctaatggttattccattcttgaaaaaattaagttagaaccttatgaaaaagaccatattgcttttttagttgaaaaatctttctaa

SEQ ID NO: 1987 - DNA, 1221 bp, Methanobrevibacter ruminantium
  source 1..1221: mol_type = genomic DNA
atggaaattgtattatgtgtaacaggcagtgtagctgcagtggaaactgttaagttagctcgtgaatttaagcgtcaaggccattcagtcaaggcatttatgacccaagaggctacaaagatcattcatccaaatgctttagagtttgcaacaggtcaagaggttgttctagagctcactggaaagattgagcatgttaaatattctcaagcagacctaattttagttgctccagccactgcaaatacaataagtaaattcgcttatagaatttcagataatcctgtaaacacccttctgataactgcctatggccatgacactcctatcgtatttgttccatctatgcatgattcaatgtatgatgcagtgagtgagaatgtggcaaagctaaaggaagagggaattgttttcttaaatcctcgcttggatgagggcaaggcaaaattcccagctattggggatattgttcttgaatccattcgcactgttaatcttgatagggttaaaaagaatttaactgacgattctttagatgaaagcgaaattgaagatttaaatatggaaatgctttctaaaattgcaggattaaatgttttgataagtttaggtggaacatttgaagagatagatcctattaggggaatatccaataggtcctctggtaagatgggtcttgaattggctaaagaggcttataggcttggagctaatttaaaaatccttgctgcacatcatgaagtggagattcctaaggtctttgatgtgattgatgcaaaatccagtagcgttatgagcgaaaagacaattgaattggttccagattttgatgtattcattgccactgctgcagtttcagactttgctcctattgttaaggaggattataagatttcttcatcattaaatctttccttagagttcgaacctgttgccaagattattcatcagataaagaagattaatccagacatatttttagttggatttaaggcagagtataatattccagaggaaagaatgattcaatgtgctaaaactcaaatgcaagacgcaggtacagatttggttgttgcaaatgatgtttataagaagggctgtgagtttggatctgattccaatgaagtgattcttgtaagtgatgagattaaaaaagtaggtcttaattccaagtctgagatagctaaatcaatatttaaggaaatcgctaataaaatttaa

SEQ ID NO: 1988 - DNA, 564 bp, Methanobrevibacter ruminantium
  source 1..564: mol_type = genomic DNA
atgaaaaagattattggtattatttttataatagttatattggttattggaggttctttagtttataaaaactataaggactctcaaaatactgtagataagtcccaagagtctatagagataagcaaaaatggaattacaatgttaattccaggtgattgggtggaagcgaaatctgaatctaatactacagctatagcagctgcagaccctgcttctaaagactcagcgggttttagtagtgttaatataaatattgaaaagaaaacaagttataattctctttcgtatgaattcaataataattataaagctttaggaagagactcttcttacgatattctatatgaaggaaatgtgtcaattgcaggtaccgaaggtatggaagcaggttatacctcaagtaagaccggttttttaaaacagcataaggccatttggtttaagcaaggggatgacctttatgttatcttatgtactgcgccacagagcaagtttgcagaggaagaaagcacttttgactttataataaataatcttaaatttaataattcaacaaattag

SEQ ID NO: 1989 - DNA, 735 bp, Methanobrevibacter ruminantium
  source 1..735: mol_type = genomic DNA
atgaatcaagataaaatgaagcttatgcagattttaaagaatcttgaaagagattataatgatggtctgatttccgaagagaaatacatctatctttcaaaccagtataggcataagatcgatacaattgatactagcaataggataaggactatgcaaggcaaaaagaaggtttctcctcgcccttattcaaaatatgaagatgctaattatcaaaaaagtcgtgatgaggatgaacgtttagttgaaaaatacatccacaatcctgaatcttataatattaattctagaggaaagaaaaccaaaagcggaggaactagcccgtggtatattgctttagcagttattttcttgctttttgcatttggtgctggaattagctttggaatatttagcgaaaatacaaatagtgatgtaggagatattattacagctagtgcaacaattaatgacacagcttttcctgaagtaaaacagacttataagtacaatcgtacttcaaattatactaaatactcctcaaactcttattcaagcgattattctagtggaagttcttataattcttataattcctatggcggatcaggttattcaagtggaggctctggttattctagcggaggttctggctattcaagtggaggctctggttattctagtggaggttcttcttactctagtggaggttctggctattccagtggtggttctggttcggtatcgattgattag

SEQ ID NO: 1990 - DNA, 828 bp, Methanobrevibacter ruminantium
  source 1..828: mol_type = genomic DNA
atgataaatgataaagttgcatttttaggccctcaaggaacattttctcacgaagctgcatcactgcttagcgataatttgatttcatactgttccatacagtctgtaatggatgcagttgagcgaggggaatgcagatatgggcttgttccaattgaaaactctatagaaggtccagttagtctaactttagattcattgattcataattttgatttgaagattagaaatgagataatcattccaatcaatcataatctattggcggcctctgatatttcagtggatgaggttgaaaacgtttattcgcatgctcaagccttagggcaatgccagccttatcttgaaaggcacaatatggtcgcccattatactttaagcactgcagctgcagctaaacatgtggctgaaactggggaggatgcagctattggaactttgaaggctgcagaattatatgatttaaaggtcattgacacaaacattcaagagaattataataatgagactcgttttgtggttttggatactgaagattctccaattaccggaaatgacaagacttccatctccttttcattatttgaagataagcctggtggactttatgagttattgggttattttgccagtgaaaacattaacttgactaaaattgagtcacgtccatctaaagaaggattgggccattatattttctttgttgacttggaaggtcataggttggatgagaatattgctaaaattctaaataatttggaggacaacacttcattttttaagattttaggctcttatccagtttattctagagaactattcgattaa

SEQ ID NO: 1991 - DNA, 819 bp, Methanobrevibacter ruminantium
  source 1..819: mol_type = genomic DNA
atgaaaatcaaaaatataatgtcagaaaatgtggtatcaattgataaaaacttaaatatctgtgactgtctaagaatgatgtataaggacaatttgtcaagaataccagttaccagtaccaatgaaaacaaaaaatctttagttggaattatctcagaaaaagatatagctaataaattaggatcagttaaatatggtaatttagctccttctcatttccatgtatctacagttatggtaaaagacttgattactgtagatgcagatgatgacttgacagatgtggctaatattctaattgaaaagaatataggtgccattcctgttttatcagatggtgaaatggttggaattgtaactaaatctgatttcatatacctttgtaaggcaaaagcttatgaaaaggtttcagttaaagatattatgacaccagatattatttcaatatctgctaatgaccgtttgattcatgcaagaaaagttatcatggactctggagtcggacgtctattattgactgaagataacgaacttgcaggaattattacttcaaaagacattgcaaaagcattggtttcatttaggaaacacactcctgaaaagcatatggcttccaagattaaggaactggttgcaggagattatatgtctacaaacgttcagacaattagtgaagatacaagtattcctgaacttgcagatgcaatgttggagactggatataatggttatcctgtagttgattcaaatgatcagattataggaatcgttactcagtcagaccttttaaaattaatttatgagatggaaactcaataa

SEQ ID NO: 1992 - DNA, 885 bp, Methanobrevibacter ruminantium
  source 1..885: mol_type = genomic DNA
atgaatcgtggttctgttgaacatgaaagcaaagtggctgaaaatgaaggcgaaatcatgactttagctaaaaaagaagtcattagcattcctcaaaccaagacaatcaaagaagctgctgaaatgatgatagaacatgaattcagaagattgccagtgactcaacctggttcaaataaacttttaggtatcgtaacagctatggatattcttgatttccttggaggaggaagtaaatttgacataatagaaaagaaacacaatgataatttcttggctgcaatcaatgatcaagtcaaggaaattatgactcgtggagtaatttctgttggccctaaggctactattagggaaagtgtcacaaaaatgactgaaaatggtattggatctttacctatcgttgataaggaaggtaaattggtgggaattgtcactgaaagagattttgctttagcacttgcaggctccttgaccaatgaaactgttggggacctcatgattaaagatgttatcacaactacttgcggaacccctattgaaagttgttctaagattatggttagaaacaacttaagaagaattcctgtagttgaagaagacaagttagtaggtattgtaacttctactgatattttaagattcttcggtgataaggaaatgtttgcatccatgacctcaaacagtggtttggatgtattgaaaaggcaaatctctgatattgtgaaacctaatatttcagtaactgaatcttatgttaaattaggagatttatgtgatttattagctgaaaagaacattggtggtgttcctgtagtggatgataacaagcttgtaggaattatcacagaaagagatattttaaatgctgtacttagtaaaaagtag

SEQ ID NO: 1993 - DNA, 1113 bp, Methanobrevibacter ruminantium
  source 1..1113: mol_type = genomic DNA
atggctgaaataaaaaaacaagttagaacaagagatttcataattagtacagacggattattattcgcttcaacaaactacattcaccctgaagatagaatcatttcattcttaagatacattccagacgagaacggagacagagaaaaggatggaatcaaatactcaaaggtaggctcagatgaagcttatgcctatttaagggaaaaccacccggattacttatatttctgcgatgtgacaaatgttgaaatgatgggagttccaatagataaggtcgaaagaatcatcaagcctgaagagagacttaaaggtcttagggaaacctatatcccaattatcaatgaaaagctagaaaagggagaggatttggattataaggaagaacttatgagcaagctaatagatctttcagactttttccactatatggctagcattgactacaacgaccttggaatatcaggatcaatattgcctggccttcaaaaggcaggaacctcagacctagacttcgttgtattcggtcttgaaaatcatagaaatgcaatcaaggcatataaagaaaacaaggacaaaccagtatacattgaagagctagacaaggaaatcacattaaacagaatcaatgacgacttctgggactttgtctatgacaaaagaataaaggacgatagcctcaccaaagaagagtttgcttggtatgaagaaagaaagagcaatagaggccttatcagagaaacccttttcgatatcttggcaaccagaaactatgatgaaatcgaaggaacctggggagacacagtatatgaacctgaaggatttgccaaagtcaactgtacaataaaaagcgcattaggagcatttgacaatcctgcagtatatacaatcgaagatgtggaaatacttgaaggacctgacattgaaatttcagagcttgcatcattaacccacacctatgctggagaggtaatcgacggagaggaagttgttgcaagaggaaaaatagaaaaggttcttaaaaatggagagttcgagaaatatagaattcttgtaggaaccactagagaatccttgaatgaatatataaagttaagagaaagccctgtataa

SEQ ID NO: 1994 - DNA, 4497 bp, Methanobrevibacter ruminantium
  source 1..4497: mol_type = genomic DNA
atgaaatacaaaaaagaattaatattcatttgttttattatttgtatgttaagtatggctagtgtatgtgctagtgatgttaatgatacatacataaatcaaaatgatttaaaaatcgataatcaagataattgtattaattatgaaaaagtagtttatacagaggaaaacttagaaaataatttaatttcaactgaagattctttggaggatagcaattctattgaaccgtctgattcatttaaacaaaaaaattcccttaatgaaggaaattccgatgaacgtttaaatccagaaatagatgttgctttgaattcaatccatgttaacgaaactgctgaagtcaatgttacagttagaaatgctagcggatatgttttagtctcagtggatgatcaatcttttaataaagaccttactgattatcaggctagattcaatattaccggacttggctttggaaatcacaatattgcagtctattatggaggggacgataactatcttccaggatttaaattggaaactatctctgttgaaaagtaccaaacccaaataagcgagattgaaatcggtgaagtttattatggggaagatgccattattgaagtcagcgttcccaatggtgttgaaggggatatcacaatcaaaatcaatgacactctccaaacagtgattactgaagccattcatgatggaatggcattattttcagtttctggtttggctgtaggcagctattctcttgatgccacatataatggaaatgattattatgaaaacgatactgcatctgccgaatttgaagttaaaaaagcagatccgaatttaagcgtggtatcatttgaatgcactgtttatgacaatgctacaatactggcttcaatcaatgaagagattcatgacgagtttgtaaacattactgttggagatgagaaatatgaggactgtcctattgaagattatggtatgatagcatttacagggggagttctctcaaatttttcctcttaccgcattctcatagaatatgggggcaatgagaatttcgaaagcgctatgatcgaagcctttgtgactccgaaaaagatcactacctatggccttgatatcattgcccagaatatttccatcaatgatgatgaaatcatttctgttgtagttccagaccatgttgacgatgtggtcgtttgggtagacgggcaaagctatcgcaactgttcctttgaaaacaatgtggctgtctttaacgtcacaggtcttggcgagggggtttatacagttaccgctacagtcaatgacacagagtttgaccataagaactttacaagcatctttactgtaagcaaggttcttccttcaataggcatttcaatcaatgaaactgaaatatatgtgggggacaatgttaagattattgtaagccttccaatcgatgtatctgaaaatgtctccattgtctttgatgaccgtgaactttcccaaaagccagtggatggaaatgccacattctacattgattgcttaagttatggaaacaagtcagttccagcaatctattatggtgatgaaaaatacagaaccgctgttgaatctattaatttcacagtcaataaagtgccttcatttttaaatgtggctgtggagaatatttcaattagcgataatgaagtgattaatttttcattggccaatgatgcaagcggcaacattacagtgattgtcaatgatgaaacttatatcgttgctgtaagcggtggaaagggaacccttacagttccaaaattgaatcaaggagtttattctgtaaatgcaagttataatggtgatggaaaatacctcccttctctaaacaattctgaaagctttaaagtgctggtcaacagtggtcaaatggagattatcgatgagagaaacaatacagtttctgtctatctatgggatggggcaacaggaaatctaagcgttaagattgatggaaaagtctacaatgcaactgtggtcgatggctttgcccaagttgtgataagcaatgcaagctatggggctcatcatgcctatgtgctttacgaggacaatgaaagcgatttgaaattggaatccgtcgttgatgtgtttgttccaaaatatctaagccctattggcataaactcctcaattttaaaggttggggatattggatacattaatgtgacagttcctatgggggcaagtggaaacataagccttgaaattgacggcaaatcttatttaattgctattgacaatggaattgcagagtttgaagttgagaatttaactgcaggggataaaacaatatttgtcaaatattccggagataaggtctatagccaaaattcaacatctgaaagcttgacagtattcaagcaggaatcctctacccattgctctattgaagatatctctgttggagatgtggctcaaattaaaataactggtccaagtgatgttttaggtacagtgattgtaatcataaatggaagcgagtacactgcaagcatttcaaatggagagggaatattgaatgtctataatttgcagaatggagattatgacattgaattaagctatttggaaaattcaaaatatttatcctctgaatatagggacaatctaagtgtttctaaaattcaaacagccatatcctcttctaatattgtttgccaatacaattatgaaggatatttgaatgtaagcttaaaggatattaaaggcaatccaatatcctgtgcagagctttctatcgatcttgatggagtgaaaaatttagtttccgatgtcaatggtcaagtaaagattccaactaaggatttggatgcaaatgattattctgtgcttataagttttgcaggagatgaaaaataccttccttcaaatgctaccgttaatgtgactgtaaataaggatattcctcagatcattgcttcaaatctaattgcagattataaatcagatgattatctcattattggattggaggatagtcaaagcaatcctttggctggctttgatttgtctattgctttgaatggaattgatggtgattatgatgtttattcaaccgattccaatggtattgtgaaagttcctattaaggatttagctgcaaacgactatattgcatctattgtttttaagggcaatgcaaattatgatgctataaattccactgttaaggtgactgttgaaaaggccctttcctctttatttgcattagatctagttactgttcatgaatctgatgattatatgatcattgctttgaaggattcttgtggcaatcctttggtcggctttgatttgtctgttgatttgaatggaattgatggggactatagttttaatgaggtttattctaccgattccaatggtatggtgaaagtatctacaaaggacttggatgccaacacttatgatgtaaaggttaaattcgatggaaacgaaaactatacagaatcaaatatcactggaagcattattgttcgcgaagacataatcatagttcctaatgcaagcattgcctttactgccaatgatagttctgtatcagcgattctttccaatctcgatggagtccctatttccaatgcctctttggatattagtgtaaatggcgatgaatccacacttattacagatgcaaatggcagggttgcaatcaaaataaatggaaacagcactgtgattgcaagctacaaagacgaaaacaatctaagcactacaggataccttaatgtcatcgtcaaagataatataactgtagtcgaaaagaacaacaccatttatgtaaatcagactgttgaggttcctgtctatatcaatcagactgttgaggttcctgtctatatcaatcagactgttgaggttcctgtttatgttaatgtaactcctaatagaactgcaactatgattgtttataataatatgactaccgttgcagttgctaaagtggatggaagagttggagaatacttctatgttagcttgaaggatgccaaaggaaatccattggcaaataaactggttcaaataggattcaatggaagggtttatgatcgtacaacaaatgctacaggtggagttggactgcaaataaaccttggaaacgaaggcaaatacacttttgctatttgcttccttggagatgataattataccggttcctttgaagttgctctcattacagtaagcaagcacagtcctaagctcactgcacctgcaaaatcatttaaagcaagtgctaagacaaaatccttgactgctacattcaaatccagcaatggcaatccaatcagtggcaaaaagctaagttttactgtaaatggaaaaacatatactggaacaacaaacgcaaaaggagttgccactgtaaagatctctttaaataaaaaaggaacatatagttgtactgttaaatatgcaggagatacaatgtataaggcaacaactacaaagttcaatgtaaaaatagtttag

SEQ ID NO: 1995 - DNA, 939 bp, Methanobrevibacter ruminantium
  source 1..939: mol_type = genomic DNA
atgttaagtatttcaacaattaagacatatatgttttgtcctttgaaactctattttcaaagtgaaatagatgaaatctatgacgaagaagagtattttgttccaaagaccttgaaagatctaagaattgacattcaagaccttttacacaagaacctaagacttgtaaaaaaggatatggaattaaaagaaatcgaagagacattgtcaaaaggagttttcaatcaaattgaaactaccttcgagataattgaagagctaaacgaaactaaaaaagaaaaagaaagaagagaaaagtcttcaatctataaggattcaaatatagaatttttagacgaagacagacagattctcaatgcatcccttgaagataatgatggaactcttgaagacttggataatgaagaagatgaaatcaagaagctgaaagatgaaatcatcgatgaagtaaacttaaatctaaaaatcctctcattgaaagcttcacaagctatgaagaaccttgaaaaggatggaaacgaaattcagaatttattcttccaaagttccatgtacaacactctaattagggatttgggaatagatttgattggagtcatagacaaaatcgaagtggaaaagggaaaatatttcccaattttattaaaaacttcaaatcctccatcaaaaggagtttggcagtcagatgaaatagagctaattgcaaatgcattgctggttgaaggagaattcaatacatacattactgtaggattcgtagaatatttaaaaataggcgaacgcagacctatagtcattgacacctttgcaaggaaaaagttctttaagcttttaaccaaaattaacaaaattgttgaagacggagagattcctcatgtgaaaacaagtgttaaaaagtgcagaaactgtgaatacagagagttgtgtgaaaaggcttaa

SEQ ID NO: 1996 - DNA, 660 bp, Methanobrevibacter ruminantium
  source 1..660: mol_type = genomic DNA
atgagtagtatttcattaacaattacaactaaagaagagaaaggagttttagatgagataactgatgttctcaccagtcatggagtcaacatatcctatgttcatctttatgtcaaggaggatgtaggaactttaaatcttgaacttgaaaatatcaatgagcttgatgaacttataagggatttaaaatctaaggatttcattttggatatagaaattcatggctcattaaatgatattttcggtaaaagggttcttatctttggtggcggtgcacaggtttcccaagtagctgtaggtgctattacagaagctgataggcataatatacgtggagagcgcattagtgtagacactattcctttagttggcgaagcaaatattacagaagctgttgaagctgttagtcgtttgcctagggtaggcgtattggttcttgcaggttctctaatggggggtaagattaccgaagctgttagaaagataaaagaagaacatgaagatattattataataactttaaatatgcctggcagtgttacaaaagaagcggatttgattgttacagatcctattcaagcaggtgtaatggctgttatggcagttgctagtactgcagttttcgatgtaaaacgtttaaaaggaaataataaattctag

SEQ ID NO: 1997 - DNA, 264 bp, Methanobrevibacter ruminantium
  source 1..264: mol_type = genomic DNA
atgaaatttgttataaggccttatcatatgatgagtcttggaggatatattgtagaatatgattttccatatagggacatcattattgtaaacaagacctctgagcacattaaattcgagattccggtatttgatgagtcttggattgaagaaaccagagcattaggtcttgaagttattcctgttcgaaaggaagacagttatttaaatatgtatagaaaagctcatgctgatttagatgcttttaaggcaaaactagattaa

SEQ ID NO: 1998 - DNA, 999 bp, Methanobrevibacter ruminantium
  source 1..999: mol_type = genomic DNA
atgtcttatgaaatatcacttatttcaattttagaagtcgttttaacactgataatagccttattcatcggtgttttgattcctggaattgaaagaaaatatgttcaggcaagaattcagcaaaggattggacctcccgttacaagccctggattatgggcatctataaagttcctgtataaggagaatatccagccaaattcaatggctccaggattatataaggcaatgccagttctttgttttattgtagttttagctatattcttagtattaatgccatataactatcaatttatggccttttcaagtttaatcgcaattgttggatttttaaaggttgaagaggttgcttatgttcttatgggttccttatctgaatctgtgatgtctgctaatttaaggttccctgatcatataaagggggctgcaagaccagattcattggtttcatccattgaagacatcagttcaaaaagatccttaaggatgattgtatttggttcattcccattgtatttggctttatttgttccggcagcattaagcaaaagcatttatttagcagatattgttgcataccaacaagccaatggcccattcctattcactttggcaggtataatcggagcagtggtgttctttgtcggatatatgatcattttgaatgaatatccgttttcatatattaaagcaaaatctgatgttattgaaggaccgtatatggagcttgcttccaaatatcgttcatttgtttatgtgactagaggatttttaatattcactttaggattggtattttcagtattgttcttgggaattcctccagttttattctcttggaagtttatagcagctgttattgtatccttgatattgcctgttataatggcatccatcagtgcattctctccaatatttactaataaacagttatatcctactattttattagtttctgctatgggagttttagctattgtgattgctttattctaa

SEQ ID NO: 1999 - DNA, 1176 bp, Methanobrevibacter ruminantium
  source 1..1176: mol_type = genomic DNA
atggaagaaaagaaagctaaaaagcaggagattatagaaacagagattcaaatgggtactgttcaccctgctgctttagaaccttatagggttagatttttcgtagaagacgaaatcataaaagatgctgaaatcactattggagttaaccataggggaattgagcgtgtcatggaaggtctccctgtagaaaaggctaatatgcttactgaaaagatatgtggaatctgttccaattcacatacatggaattcagtgcgaactgctgagaagggtcttggagttgaagttccagatagagcagtttatataagagtgattgtaggtgaactggaacgtttgcatagtcatttattgtatttaggtcatggttgtgaaacattggctcatgaaaccttctctatgagagtgttttacattagagaaaccattatggatcttttggcaatgattggcggaaaccgtgttcaatatggctgttcaattattggtggcgtaaggccaagatgtgaattggatgacaatagaatccaaagaatattggacggcatggaccttgtggaaaagaacgttctagactttgcaaataggtttgtaaaggacagcgttgtagcatcaaggatttctggaacaggatatattccacaggaacaggctcttaaactagcggtaagcggccctactttacgtgctacaggtgttaaaagagatttaagaacagatatgtatgaatatgataactttgattatgatataatcacccaagatacctgtgatgtacaggcacagcttcttatgagagtgtttgagatatttgaagcaataaaaatcgttcgtcaggccatcagggatttgcctgaaggcaaaatcacagacaggtcttgggaaatgattgatacagaccttattgaaagctatatagaggttccaagaggaacattgtatcactcctatgccattgaggacggaagggttcgccattgcattataagaactccttcaatgagtaatattggagcaatgcagtatgcttgtattgacaatcatataactgacggtcagttatgtatcgttcagtgcgatccatgtttcacttgctctgatagggcaatagaggtttatgatacaaattataataaattagacaagtctatattgaagtctaatattcattaa

SEQ ID NO: 2000 - DNA, 447 bp, Methanobrevibacter ruminantium
  source 1..447: mol_type = genomic DNA
atgagtcttaaaacactttcaagatcaaaagccattcatatcatgttagtttatacaggaggatgcaatggttgtgatattgaaatcgtaaatgctgttttatctcctaaatttgatatggaacaatatggtgtattcttaacttggaatccacgtgaagcagatattctagtcgttacaggtcctgtaacctatgacaacagaaagccattggaagacatctacaatgcaattccaaatccaaagcttgttgttgcagcaggttcctgcgcattgatgggtggtgtctataagaactgtcatggagacattccttctgaagagattgaaggaccagttgagaatgttattccagtggatgctaaggttccaggttgtgctgtaagacctcaagatgttttagcaggtgtagttgcagccttgccacatttattaaatgcggattaa

SEQ ID NO: 2001 - DNA, 669 bp, Methanobrevibacter ruminantium
  source 1..669: mol_type = genomic DNA
atgaaagatgtaataaaaattatgcttaatggaacttatacaaattttaaaagaatcctctttgcatctgacagggtaactgatatggaactccgtaatgctatccttactggaacagttgaacctgataagaaggttgatgagcaggcttgcattggctgtggaggttgtgccaatgtctgtccgactggcgcagttacaatgaagcctttgcagactcctgtaaagattaaggaaggttgggtaaagacagaagttccagagctagatccttttaaatgtgttgtatgctattggtgtcatgatttctgtccgatatattcattctttgaagaggcaggaaccattcaccctggaaatgtaggtgagataaatatagacacagctgaactgcttagcgaacctattaagatctctcaagaaaagatatcattcattgcccaatatctctctgacaagtcattgttgtctgaaaacatcgtatcagatgcagatgagattgagaatgtgggagcaggcttagaaagagtttccaagataaaggacatacaggataatattaatgagaagtatgaaaaggatgctaaaagaagttctgctttagctgatgattcaaacgagagttctagcgaatcagatgaaagttctaaaaatgagggaggtgaataa

SEQ ID NO: 2002 - DNA, 1461 bp, Methanobrevibacter ruminantium
  source 1..1461: mol_type = genomic DNA
atgtatttaacaactaataagtgtgatggacaaggagattgtataagaaattgtcctactgaagcaatacgctttgtagataataaagcctttagctgtatgtgttgtggtgcttgcttcgaagcttgtccgaatcatgccatatttaaaaataaatacggaggatatgttgtagatagggcaaaatgtaatggctgtggtgtttgtcaattcacatgtcctatagaaagcattcatattgataacggaatcgttaaaggaatctgttcacgttgtggagtttgtgaagacgtctgcagtagaaatgcaaggacagatactgataatctggttcttgacaagcaaaaagtcttgcttaactccatgaagatggttgcaaacactgtcggatatcgtgcaggggtaaagaagattgaaaatatgaagcttcctgtaaagtctgataagtctgcagatagggtttgcgtaagcacagacatggaaaaatgtgtgaaatgtggtagatgcgcatattactgcccgacccgtgccatagaggtcataattcaagatgagggattctgtgttggatgcaagatatgtgaagacctttgtccaactggcgccttaaaggatggccaatatgataaaaacctctgtacattatgtttggcttgtgttgaaaactgcataaatgatgcattaaaggttaaggactttaagattgttcgaaacataaaagacagctctatggacaatcctttatgttcaaacactaaaggaaccattgtcagttgcctcaattgcggcttatgtagggaaaagttcgacagtcctgcattgattaaaaaggaaaatgctttaagatatgacccttcacaagataaggacagtgaagagaataatgagaaacgtcttgaagcgatttacaactgtcctgtttcaacattaagcgaaaatgaggataataagctcttcggatactgtgtatcctgcggcaaatgtacccaagtatgtaatgaacaagccagaagcttccaaaccatctcttgggatggggaagtcagtgacgattgtatttcctgtggaatctgtgctgagctatgtccaaaagaggcaatcagccttaaaagaggaacaatcaatgttgatttagataagtgtattatgtgtgagacctgtggaattcactgtccaactgatgcaatacctaagacaactagcacaaaatataagatttccggcggattcaattacattgacgagaacttatgtgtaaaatgcggcttatgtaaggacatttgtggcgaagaggctatctatacagttgacatatcaaatgaagatgtaaatcttggaactaagaataaaaatctgagatttgttgtagatgatgataagtgtatttattgtggggcttgcatgaatatctgcccatctaaatcatttattttcgaaagagagtttaatagggtgaattag

SEQ ID NO: 2003 - DNA, 279 bp, Methanobrevibacter ruminantium
  source 1..279: mol_type = genomic DNA
atgtttgttctagctaatctcttaattggtccgataattatctctgttatatttggattcgttctaggttctagaatccatctggatgagaaaaatagttttaagtttaccgcaagcggaatcattgctcttattattggtgcattaatagtgtcatatggaattggacaattcccttactataatgatttgccaatagcaactacatttttaggagctttattcggccttttgattggtagtgcattactgggaggacgagcaaaaggagatcattaa

SEQ ID NO: 2004 - DNA, 525 bp, Methanobrevibacter ruminantium
  source 1..525: mol_type = genomic DNA
atggctgaagataaagatttaaaaaccacaaagaaatctccaaattggaataaggatgaaagcagtcctatattaaaaatcatggtcttgcctatttcattcattatagcttctttaggaatcatggttattttaggaggacatataactccaggaggcggtttccaaggtggagccatgattgcaggagcaatcatattgtctgttgttgtttatactgtaaatggaagtccattaaaattatctcatagattcattagccttttggaatctgtcggagctttagcttatgtcttgcttggtttggcaggacttgcattgacaggctcattcttatataatgtaggaggaaacctttatgggcttgttccacaggctattgcagcaatattcaaatatcctgatttaacaaatgctggaatggtcccttatttaaatatagcagtcggactaaaggtacttgtaggtttaagtgcaattgtaattgccttttcccaatttaaaaaattagcggaggaagaataa

SEQ ID NO: 2005 - DNA, 396 bp, Methanobrevibacter ruminantium
  source 1..396: mol_type = genomic DNA
atgtctgataaaacaagcattagatctatattgatggtagttgcaacaataatctttgcatccagcttattcgacgccctttatggatttaaaaacttaattcagccgggaataagtttggtttatactgctattgggactcagcttgctccaaacatggttacattagttgtatttgattggagaggattcgatactttaggagaatcattgatcttagttactgcagtgcttgtcgtattgcttatctttggaaaaggtaagattttggataagaatgtaaatgcagataatgggactgcagattctaatttaacccatgaagcagatttagaaattggcgattctgatttagaacttgatggtgctgatttaaatgaaggagatgatgaataa

SEQ ID NO: 2006 - DNA, 336 bp, Methanobrevibacter ruminantium
  source 1..336: mol_type = genomic DNA
atgactttgtatcaaaaattcttagactcagtaaaggagttaaaatcaagtttctctaaagatcctactactatgaacaatgtttcaggagcaatggcagcagaattcttaatattggttggtctaatacttgctgctttgttctttagacatatcaatattgctgcatgcatagttgtagttattctagctgcaatattgttctttacaaacatgcctcttgcaagcaagataaagtcagaacaatccgattcattggaaaaaatgttattttatgtactcattgttcttggaatccttatttctgtaatttactgggggttgaaatatgtctga

SEQ ID NO: 2007 - DNA, 1482 bp, Methanobrevibacter ruminantium
  source 1..1482: mol_type = genomic DNA
atgaattacttgattccattaatggtcgttattccaatattggctgctttaattgttaacatattaggcggaaaggacaagacagtgaaggctttctccattattgtaggacttgcaattcctataattgcaattcttgccgccattggggttcaatacttcggaggccacgatccaggtcttcttgcaaattcattgccttctaatctagttggaacccttgttgcaagctataatacaggtatcgtttatatttttgacaatatagaaagaatattcatattcctaatgggtatcgtcgcattcctttcaatatttacctactttacagagaagaaggaagtctcagggccttacctttaccttatctttatgggccttgcctctgtaattgcattgcttctatctaacgatatcttcaatatgtatgtattctttgagataaccgctttgactcaagtgggtattattgtagcctcaagcacagaggacaattatgaaatcgcattgaaatacctgattttaggttcaatcggcggaccgatgcttttattaggtgttggatttgttcttggaacaataggttcagtgaatattacagacattatatatgcaatcagcaataactttgtagatccttactctccaggacttgtaatcggatttgccttaatattgttcggatggctatattcagcaggattgccaccgttccacactataaaatcagcggtatacagtaaggcaagacctaacggttcagcaatacttcaaggattttcagtattgtgcatgcttgcatttggaattgctatgtataagatatttgcttatattccaggattcaatacagccataattgtatttgccattcttgcaatggttttaagcattgcaatgtctgcaatggaggtagactttagaagaatgatagcatttttagctgtaggtgaattaggatttatcgctttaggttttggtattggaactcaaatgtccattgcagctgcattgttccaggcagcaaatgaaatagtcattactgcaatgctatttattggattcggttcaatctattatcttacaaatacttcagatacccgcaagctaggaggattgattggagttgactcacttatgggagttatgattttgcttggcggatgcgcattggcaggtgttccaccattcaatggatttgtaagcaagctgatgcttgttcaggccgctttagaggcaggatatacagagcttgcaatccttgcagttattgtaagtgtggttatcttctttacatttgtcaaggcattccatagcgtattcctagagcctaagccaaaggacttgaagtttgtaaatgagaagattccaagggtcacagtattttcagtggctgttttgcttataatctgtttggctttaggtcttttcccgaatattgtcactgatgtatttattccatttgcaggaggattgatctaa

SEQ ID NO: 2008 - DNA, 369 bp, Methanobrevibacter ruminantium
  source 1..369: mol_type = genomic DNA
atgattatggatattcaattagcttccctatttgcttcaggcgctcttattattataggattgattgcagcaatcttcattgacaatatcataaagaagataataggtattgcatttatcgaagagggcgtaaatctattccttatctgccttggatacaaggctggaggggttgtgccaattttcttacctggcatgactgcagactggtttgcacagaattccgcttatccattgccacaggcattggttcttacaagcattgtaatcggtgcaagcacattagctgtaatgctggctttagcaatggtcttatacagaaagcatggaacattaagcgcaaaggaaatattgggggatgaaaaatga

SEQ ID NO: 2009 - DNA, 231 bp, Methanobrevibacter ruminantium
  source 1..231: mol_type = genomic DNA
atgattgaatatattataattattgttgcggttataagtgccatcatcgcacttttacaggaagacttgctaaaatcagccattctagttggaatatctggtttcttcattgcagtgctattccacttattgcttgctccggatgtggctttgactcaagccattgtagagggagctatcgtgccagtatttatcgctttggctgtttataaaacaaaaggaggggcttaa

SEQ ID NO: 2010 - DNA, 567 bp, Methanobrevibacter ruminantium
  source 1..567: mol_type = genomic DNA
atggctttaggtctagagggtatgaacttaataactattatccaatcaattttattaattatttctgcacttataattataattgcagctattgggattttaagaatggataaagacatgcctaatgttgtatatgcaaggattcatattctgggaatgatagatgtagctggaataatagcatttattggattaggtcagcctttatttgctcttatctatatattcttggctccgctacttgctcatgcattagctaatgcttatttccatgcagaagatgatttaaataatcctgttcttaatcctaatttattaaatgaagaatctgatgaatctgaattggaagaatctgttgatgtggcagaacaagatggtgaagaacctgaagaatctgttgatgtggcagaacaagatggtgaagattccgattccgaagaaacttcagaaaatgtagaagaagattctgattctgaagaagaagcttctaatgaagatgtggataataaaactactgaagaagatgtcgagaacttaaataatagtgagggtgacgacaatgattga

SEQ ID NO: 2011 - DNA, 267 bp, Methanobrevibacter ruminantium
  source 1..267: mol_type = genomic DNA
atgataatggaacttttattgatttcagagtgttttttaataattgcattggttgttttcttatttgcatctatgagaatcattacttacaaaactgtctctatggggcttataggtacttcttcattaactttagcaattaccttgattctaatctgcgtcggtatgatgtggggcatagaattctttaaggacattgctttggttttacttttattaggaattgttggaacaatagcttatgcaacatttttaaggagggcttaa

SEQ ID NO: 2012 - DNA, 315 bp, Methanobrevibacter ruminantium
  source 1..315: mol_type = genomic DNA
atgtttttatctagaatttattatgcaattgcttatttggtagtgcttattttggagattatcaaagctactatagatatggctggtaggatatttaaaggagaccagtatgatcctattgtcattgatattgataccgaattaaaaaggccaatatctcaaactatcttagcaaacagcattaccttaactccagggactttatctgttgatttagattcagaaagtcaagtgattaaggttgcagttattgctccaagagacgtaaaggatatcattccttttgagccttatataaaggggatgttagaatag

SEQ ID NO: 2013 - DNA, 738 bp, Methanobrevibacter ruminantium
  source 1..738: mol_type = genomic DNA
atgtcatcttataagggacacacaatatttgcttttatcttatcattgctcatgttttatgacccttttgcaattgcacttgcagttatcggagcaaatatccctgactttgaccatgaatttaagcgaaaccatgttttaatcattatttccattggaatgatcttaagcatctttctttatttattgaatctgcctatttatttagggttgataatcgctttattagggcttattttccttttatcctctcatagaggctttactcactctattttaggagctgtagtaataagcattgccatatttttattggtctattttggaatggatctttcttcttactttaatttgaacactattactaatattccattaaactatgttattttagtcggaattttaatatttttagctgtcctattcttgaataagcaattggcctctattttcattcttttaatgcttttctttatcactttggtttattttggaatagtccctgtctttaagataaacgtttattctctaatattctctgtgtttttaggtctattcagccatatgattttagattcatttagtccggctggaataaagccattcagtcctttttcagatagaaaatgctataaaaaattaggattgcttttatttgctttgataattgctctttatttgattttatttccaaataaattagatttctatcttaatcttctcccacacttttattaa

SEQ ID NO: 2014 - DNA, 747 bp, Methanobrevibacter ruminantium
  source 1..747: mol_type = genomic DNA
atgactcaagaaaagaataatttagatttagatcatatttcttatgagaccggaggtttcatctctgctaataagaacatattaaataatttaaatcttacaaaaaacactaaatatatattaaaagagtcaataaaaggaactcctataatcaaacttggaactaactatcccaaggtcatgatggttgcaggaattcatggaaatgaattggctcctcagatttctgcattgaatcttatcgaccagattcatgacttggaccttttaggaactgtttatattgttccatttgcttgtccaaaggcatctatgcttaattccagatactttgacggtaaggacttaaacaggacatctcatatcgaggggtccgttggggaccttattttaaaaaaggcagttgagcttgaagtttcagccattggagactttcattcatcagccccaaattcaaatccaggtaaggaaggggtattttgcactgaagttcctactatggcaagctttagattggctgatttcatttcaaaggtgacaggctctgaaaagatagtctattcctctgctggaattccgtttaagggggctttggaggatgaagccaacctaaagggcatacctgctgtaacctgtgaggtcttatctgcaattggctatgcaaatgaaaggatttgctataggtccataattcaaatgaaggcatttttgcaatactttggattctttgataggtatatggaatag

SEQ ID NO: 2015 - DNA, 1176 bp, Methanobrevibacter ruminantium
  source 1..1176: mol_type = genomic DNA
atggaaaaagttgttcttgcattcagtggtggattagacaccaccgtatgtgtaaaattattagaagaggaatacaattacgaagtagtaactgcttgtgttgatgtaggtcaaccgcaagaggaattggaaaagtcacaaaattctgcagacaatataaatgcaggaaaacactatatcattgatgcaaaagatgaatttgcagaagaatatattgcaagaggaatcaaggcaaatgcagaatatgaaggctatccattaagcacagctcttgcaagacctttaattgcaatgaaaatcattgaagttgctgaaaaagaaggggcaactgcaattgcacacggatgtacaggtaaaggaaatgaccaattcagatttgaagcaatcatcagatccatgtctgactttaaggtcattgctcctattagagaaatgaaccttacaagaactgaagagcaagcttatgcaaaggaacatggacttaacctatcctatgataaaatctacagtattgatgaaaacctttggggaagagccattgaaggggatgttcttgaagaccctgccaatgagccacctgaagagatttatgaatggaccaagtctgctgaagatgcaaaggacactcctaccaaagttgctattgaatttgaagaaggagtccctattgcaattgacggagaaataatgggtcttgtagacctaatcaataaggctaatgagattgcaggtgaaaatggagtaggaagagttgacatcattgaaaacagaatgatcggtcttaaaagccgtgaaacctatgaagtacctggagctaaattattgattgcagctcaccaagctttagagcaattggtcttaaccactgacgagctaagattcgcacagtacatgagcggattatatgcagaccttgtctactcagcgctatggcaagaacctttaagagaagacatcgatcaagcaattgaccatatgcaaagaagagttagtggtaaagttgtaatgaagttatttaaaggctccattcaaccattaagcagagaatcacctttcagcttacacagcattgaacagataacctttgaagataaggaaactgaacagagtgaagttgaaggaatgattaaataccacggacttcaagctgcaaattaccaaaaattaaatagataa

SEQ ID NO: 2016 - DNA, 663 bp, Methanobrevibacter ruminantium
  source 1..663: mol_type = genomic DNA
gtgccaaatacaggtagatgcaaggagcttttagttgaagatgcagttgtataccttcgacctagtgacaaccctaatagaaagactaaatattctctttattatgttgaaaacaatggtgctttagttgctatgttctctcaggaagccaataaaatcgtttttgatgcaattaataagaataaagttaaagaactttccaattattcaatcatagagtctgaaaagactattggtagttctagaatagatatttatttagcaaaccataagagcaattttaaggataatgctgattccaaatctattggagaagattctaaagaagatattatagatgaaacttatgttgaggttaaatcagttactctcataaaggatggtgttgctcaatttcctgatgctcctacagataggggtcgaaagcacttggaagaattgatttctcttaaaaaagaaggaatacgtgctgtagtgttctttttagttgaacatcctaatggaaacagtttcagaccaaattgggaaaatgatcctaagtttagtgaaaccttggtgaaggcatatgatgagggtgtagagattcttgtctataaaactagaaatgattttgagggtattgaacttgttggggactgtttagattttaatttaaataaatag

SEQ ID NO: 2017 - DNA, 1569 bp, Methanobrevibacter ruminantium
  source 1..1569: mol_type = genomic DNA
atggatccaattgatatgatggctacagattataattgtgaatatttaggcctttcaaggctttgcttgatggagaatgcaggtaaatcaatatctgatgaaatcgctattctttctacttataaatactcaagaccagttaagatagtgatttttacaggctctggcggaaatggtggagatggctttgtagcagcaaggcatcttttaaacaggggctttgaagtggatgtctatgccttaaacactgcagaccaaatcaagtctggtgatgcattggataaccttaagattttaatgaaccttgaaccgagggtctcaaggctatctgtccaattcattaaggattctgctgatttggataaaatcaagcttgacaataattccccttgcattgttctagactgcttgcttggaactggcatcaagggaaagcttagggaaaaggttagaaagacagtagaacttatcaatgcaataaatggcttaagggtggctatcgatgttccttcaggtttggatccattaactggagagatagcagacattgccgttgatgctgattataccgtttgcttccataaggtcaagactggagttaagcttgccggtgaagggaaggttggaggcataataacctgtgatattggaatccctattgaagctgaactatttgttgaaggaggagatcttcttagattaaataataggccctcctcatctcacaaaggaaacaatggtaagatcttgattgttggaggaagccttgattattacggggctcctgcaatatctgctaaggcctcaattgcaacaggagcagatttggtttatatttacactccaaaatctgcagcacttccaattaaatcattctctgaagactttattgtaaaggaagctaaaggagattatctctctattgatgatttagatgatattctagaaatggcttccaaggtagatgcagtgctaataggtccaggttctgctcaaaatgaggatacaatgaaattattcaatgttttggctatgaaaatcgataagcctttggttttagatgctgatgctctaaaattggttgatttttctttaatcaataaaaaggaagatattatcataactccacattattcagagttcaaatccttctttaagaaccagattccaagagatattgaaaggaatttggataatattgtaaatttgaatgatgatagtgattttgttaaggtgaatgataagattgatgctttgcagagcataacagcttcctttgatggatcagttattctaaagggacagtatgattttattttcaacaagaataagttaaaaatcaatagaactggaaatcctggcatgactgttggaggaactggggatgcattggcgggaattgctgtaagtctgctctcacagggattggacagttggacttctgccatattggctccttatttaaacggaaaagcaggagatttggctatggacgctcaaggatatggatttggagcacaagacctgactcaatatttgggagcggttatggctaatttgattgattaa

SEQ ID NO: 2018 - DNA, 1161 bp, Methanobrevibacter ruminantium
  source 1..1161: mol_type = genomic DNA
atgaaaaatagaaatgtatggagaatcattatgagtgaaattaaaaaatatatggaggatttaaagaaaaataaaaccggattaaaaggaatcctcgttattatcctaatatttgcttatggaattttagggtcttactatataatgaatctcaacataaacaattctatctattatacaatcataaccatagccactgtaggatatggagacataatccctgtaacccctctggaaaagttcttttccacaagcttggctctaacagggattggattgattgcatacatatttacaattatcattacttcatttgaagaaaacttgcacgacatcaggagtggaagacatatggaaaagagattggctaaaatggaagaccattatattctatgtggttttggaagggtaggaaccgcagtttatgaagaactgatgaaaagaaatcaaaaggtaataattattgaaaagaatgaagacaagctggaagacattgaagagactgaaaatgtggtcccatttaatgcaaatgcaacagaggacaagacccttaagaagctcaatattgacaagtcattaggggtgattgtaacaacaggaagcgatgtagacaatctattcattgttcttacaacaagggaaatgaataaggacgcttggattatttcaagggcaagcaaaaaggaaaatatcaaaagattaaagcatgctggagcaaataaggtcatatcccctgaggtaagcggaggaactgacatttactttgctgcagtgcagcctaatttagttcatataactcaaaagcatggcattgattatcttgaaagggaatttgaaatacttaaaaagcacaattgccatttggaaaacatagaatatcattttccaggaattaagacaccagttacccggaccattggagttttagatgaggaagagaaggatcacttcattgatatggttaaaaacaatccagaagtccatgaatccatggatgtgatgtatgaaaccgttaatggagttcattcccattggatttccggacctgataaaagtcatgttgatatggtgattgaagagctgaaaaaagaaggaaaccttttaggggttaatctagactttaaggaaattaatgagtttactaaacagtttaaggaataa

SEQ ID NO: 2019 - DNA, 567 bp, Methanobrevibacter ruminantium
  source 1..567: mol_type = genomic DNA
atgaaagaatacttaagcgaaacaaaaagcatagattatatgaatccgatcatccaagaaaaggttaaagaactaaaggagcaatcctctgacgatgcagattatataaaaagagcattcctctttgtaagagatgaaattccacattcatgggacatacagacaaatacagtctcaaggacagctagtgatgtattgaaaaacaagacaggaatatgctggacaaagtcttgccttcttgcggctcttcttagggcaaatgaaattccctctggaattagctatcagctactgacaattggagaagacgacagctttggccatatgattcatgctctaaacactgtttatatggatgatttggataaatggattagaatggatgctcgtgaaaatgtaggagatgatgatgaggaatttagtttggataaggactatttagccttctcaccaagagaagaattcggagaagtagattatcaggataataatcctgatttggatgaaaaattgattaatctcttggaaaaaactgaaaatcttttggaaatggaattggatttttag

SEQ ID NO: 2020 - DNA, 888 bp, Methanobrevibacter ruminantium
  source 1..888: mol_type = genomic DNA
atggaaattaatggtgtagaaattaaagaaacttacgcagaaggattcggaattaaagtaactagaattttagtaactgcagcaactgcaaaacttgcaaaaattgcagcaactgaagctactggttatgcaacttctgtaatcggatgtcctgctgaagcaggtattgactgttttgtaccatctgaatgcactccagacggaagacctggttacgcaatcatgatttgtcacgcttctaaaaaagctcttgaccacgaattaatggaaagaatcggtatgtgtgtcttaactgctcctactgcagcagcattcaacttactcgaatctgaagacgaattaaaaaccgctttcaaactcaaatacttcggtgacggtttcgaaaaagactgttgcattgacggaagaaaagtacactccatcccaatcatgtctggtgacttcattgtagaatccactttcggattcaaagcaggtgtagctggaggaaacttcttcattttagctaaagaccaaattactggtgttaaagctgctcaaatggctgttgcagctattagaaacatcccaggtactatcactccattccctggaggtatggttgcatccggttccaaagtaggatccaacaaatactcattcttaccagcatccactaacgaaaaaatgtgtgtaactttaaaagaccaagttgactctgacattagagaagatgctgaaggtgtatttgaaatcgttattgacggtttagatgaagaatctgtcaaaaaagctatgaaagcaggtattgtagctgcttgttcagttgacggagttcttgaaatcagcgcaggtaactttgacggtaagttaggtgcatacatcttaaacttacacgacttattctaa

SEQ ID NO: 2021 - DNA, 1272 bp, Methanobrevibacter ruminantium
  source 1..1272: mol_type = genomic DNA
atgaaaaacaagaaattgataatttttttaatatttggtttggcaatcatggccgcaatgctatacttcatcggtatagatcaggttgtcgacgctctcaaatattctaacctttggtttgttttattggctgttttattacagatttttacttatttcctctacacatggagatggcagattataaacaagagtgcaggcatgaccttgggaatctggaaattgcttcctatggttttagtaagcctggcggtaaacaacatcactccaagcggacgtggtggcggagagcctgttcgggcttatcttttagcaaaggaaggtcattataagtttgaagacaccttcgctaccgtaatcgccgatagggcattagacacatttccatttgtcattctagcaattctgacaattatagcaattattttcagcgtctctttacctgtctattggatagtcatattggttctttgtgttgtaggaatcactgcaatagttattctattgctttatgtctgtatcaatgaggcatttggcgtaaggcttacagaatggattctaaagattaccaaaagattctataagaattataatgatgctcttgaaaaaaggattgttgaggctgttgcaagttttcaatctacaatgaacgcattgattagggataagaatattatttattatgcattgcctttatcctttattatttgggtttttgagattttaagagtttatgtggtctttttagcctttggtgccaaggtatcccctataataattggtgaagtgtttatattggcatcccttgtgggaatggttccactgcttccaggaggccttggggctattgatggtgtgatgattttattctattcaaggtcaggaatcactgcctctttaagtgctgctgcaactgttgtggaaaggtcaatctcatttggaatgactacaatattaggtctgatcttcctcatgaagtatggaacttctattttggatgcgtcatttaaacttgcagaaagcgagaaagctgaaaatctggaagagatcactgaagatgaacagaagatattggaccaattatctgaagatggcgataaatctgaggattctgatgaaaatagggaagaagcggttcttgaagttttagatggagagccatctattgaagtcgttgacgaagaaccgactattgaagtcattgatgatgagccaactattgatgttcttgatgaaaaagaagaagccatagatgagaaagttaaaaactaa

SEQ ID NO: 2022 - DNA, 1491 bp, Methanobrevibacter ruminantium
  source 1..1491: mol_type = genomic DNA
atgaaaaggaaatatattactaaagcagatttgttcatcgtactccactatcttggatacataatgcaaggattaggagttgtattaatagtcccaaccttagttgcattaatatacggagagtacgaccctattgctccttttatgattccttgttttgtatcatttgtcttaggaactgcttttagtaaaaaattcaaagactataccaagcttaggcttaagcatggtatgctaatatcatcctttgcatggctatgggcctcccttatcggagcctcaatcatggtcctttcattaggcatcccatttgtcgatgccatctttgaaaacatgtccgcatggaccggaagcggaatgactttttttgtaaacgttgaagtattgcctaaatccatcctattcttaagaagcctagaacaatggctaggtggattaggaattgtaattatctttatcggaattctaattcgagcaggtactgcagcatccagattatataaatcagaagctagagaagagaaaatcaagccaaacattacaaacaccttaagaaaagctctagaaatctatttaatctatacagcagtgggaatatttcttttcatcttggcagggcttcctatctttgatgccataaacatcacattcacaagcatctcaactggaggaatgtccattaagaatgcaaatgtgggattctaccaagacagcatagtctacctaatcagcatgtttctaatgattttaggtgcaacaagctttacaatacattataagattgtaaagacaaaaggaaaagcactttttaaagatgttcaattccaattattgattaccttaatcatagttgctggtgcattctttatagcgacaaataagatggtccctatagaagaactctttaccatagtttcagcagtgacaaccacaggggcaaatgtggttgatccccatgtgcttgcaacatggaacgggtccacattgattgttctgatggtcttgatgcttattggaggttcatcaggatctacaggaggtggattgaagctcattaggattattacagtgcttaaaggaatgaacttgactgtaactaacctagtttcacctgaaggaagagtggtaaataccagaataggtggaaaaaagataaatgaaagggaaatcaaggaagcatctgcatatatcgtgactttccttatgtttttagttttcggatggataattatgacaatgtatggatatgacccattcactgcattgtttgacgtgatttccattcaaagcaataatggtttaagtacaggaatcgtgtatggaggattgccattgcctcttaagctaacattgatattcctaatgtggataggcagattagaaatcatacctgttttagtattatttagaacattttatggtttagtcaaccctaaacgaaggattaagcaaatgaaaaaaacaaatggaaatgataaaaaaacaaactaa

SEQ ID NO: 2023 - DNA, 675 bp, Methanobrevibacter ruminantium
  source 1..675: mol_type = genomic DNA
atgtatattgtgattatgggtggaggtcgtgtagggctatcccttgctgaccgtttgattattcatggatatgatgtaacaattattgaaaataatgacgaattatgtgatcacgcatccgaagagttagatgcaatgattatctgtggaaatggaactgatacaaaaactttagaagaggcgaacattgaagaagctgatgtttttgtagcaactacaggtaacgacgaatcaaacttattatcttgcattcttgttaaggaatataccaatggaaagatcattgcaagagtaagcaatcctgaccacgaagaggcatttaaaaaggttggaatcgataaggtaatcagtcctgagagaactgctgcaggattccttgaaaaagtcattacaagaccaaatgtggctgacttaatggcattcggtgcaggaaacgctgaaatattggatatgaccattcaaaatccaaaggtattcggaaaaaaggtttcagagttttctccaactaaggattatataataatttcaaaaaacaatgacaatcatgaattggaaatccctcagccagatgatatattaagcaatggagacaaaatttccattcttgtaaaaagaaatgcctttgaaaaagcagaaaagaaattcatgggtgcaggaggactattcggattttaa

SEQ ID NO: 2024 - DNA, 648 bp, Methanobrevibacter ruminantium
  source 1..648: mol_type = genomic DNA
atggagaaaatcaaaaatgtctattgtatagaaggactgatggcagattctaattcttatttgattgataataatgatggtgatggggattataattatatactggttgatacaggaactggacaatctaatgcattcttattttcacaattaggtgaaattggagtcaaaccagaagatattgacttgattgtaaacacccattgtcattttgatcatgttggtggaaatgactttttcccaaatgcaaaaatagcaattcataaaaaggatgctgtggcattaagggacccagatagcgaattgacagtctcttctctctttggtgcaattgttagaaaacatgatgttgacattgaacttgaagagggagataagatagctaatttcgatgtcattttgactccaggacacacttctggaggaatatccctttgggatggagaaattctcatttgcggagataccatatttgcaaacggtggtgttggccgtatggacattggtggtagcccaattgatatgaaggactctttaatgcgtttgaaggaatttgatgttgaatacttgcttccagggcatggtccttgggtaaaaaatggtaaagagcatgtaaaaatgtcttgtttaaatatgggaataagataa

SEQ ID NO: 2025 - DNA, 339 bp, Methanobrevibacter ruminantium
  source 1..339: mol_type = genomic DNA
atgcgggctccagcatctggaggagcaactaaaaaaccattgcctgatgttgtagctggaaatggaaagatttacttggcaattgaagtaaaaacaactactaaagataagatttatatcgatcatcctcaaattgatgcattaattgagttttcagatatttttggggcaacaccttacttgggtatgaaattcaagtataccaaatggcttttcttagcacctgaaaatatccttaagaccaaaaatgggaactataaaatagaaaaggattattgtttagaaaaagctttagaacttgatgaaatctgtggatttgatacacaggttaaattttaa

SEQ ID NO: 2026 - DNA, 1032 bp, Methanobrevibacter ruminantium
  source 1..1032: mol_type = genomic DNA
atgaactttttaaatgaaaaccattatcgtgatagcatgaatgaaatagacagcatagaaactctcgaactaatcaataaagctaacagccttagcctaaagaaaggatatacagaaataagtcttgaaagagctgtttttctatcatggtggtgcgataagggagattgcaaattctgctatatgagcacccagaaagataaaatcaaagatcctaaaaaggccagaagaagagtaaacaacatattggctgaagctgaaatgtgcagtcgcctcggttggaatatagaatttctctcaggaggatacaaatcattcaccacaagcgaaatcaaatccattgctgaaaacatccattcaataacaggggatggggtttggctaaacaccggaatcacagatgagcttgaagagtatggaaaggaaatcaaaggaatcaccggagccgtcgaagctgcaaatcctgaatttcaaagggaagtctgtccaagcaagccattgaatcaaatcagcaatatgctggataaagcaggagacctaggatttaaaaaggcaattacaatcatattaggtcttggagaaagccttgaagatgttgaatatctaaaagactatattaaagagcataagatagacagagtaatcttttattccctaaatcctcatccagagacaatctatgtaaacagttcccagccagcatctctctattatgcaaatgtggtatcaagcattcgccttgcatttccagacattgaaatcatatgcggaacatggattgacaatctggcaaacattggaatactcatcttaagcggagccaatggaataaccaaattcccattatttaagatgtttggcacaaaatatggaaaaagagttgaggaagaggtcaaatggactggaagaacattaaaaggaacctttacagataaagataagttaggtcctgaaaaaagccagataaatccggaatttgaccaatatataaaaagatacattaaagagtctttaaagaacaaataccaataa

SEQ ID NO: 2027 - DNA, 1356 bp, Methanobrevibacter ruminantium
  source 1..1356: mol_type = genomic DNA
atgatgtgtggacttgaaattcacgtacaacttgaaactgactcaaaattattctgtaactgccctacaaactatcaggaagcacctgcaaacacaaacgtttgtccggtctgcctaaaccagccaggggcaaagccatttccaaccaatgaaaaggcaattgaaaacgcattaatgatttcattaatgctaaactgtaaaatcgataagaactttacctatttcatgagaaaacactacgattatcctgatttgccttgcggatatcagaaaacctctgtgcctataggatatgaaggagaattgaatggcgtaagaatcagagaaattcacatggaagaagatccaggacaatacaaacctgacagaggtattgtagactttaaccgttcaggaattcctcttatcgaaatcgttaccgaacctgacatgcactctccagaagaagctcgtaacttcttaaaagaacttatcagagtattgcaatacagtggaggagcacgtggagaaggtactatgagagctgatgtaaacgtttccatcaacggcggaaacagggttgaaatgaaaaacatcaactccatcaaaggggcttacaaagcattgaactttgaagtcatcagacaaaagaaccttatgaaaagaggagtggaagtcaagcaggaaaccagagcataccttgaatcacaaatgattaccgtatcaatgaggatgaaagaggatgcagatgactacagattcattccagaccctgacttgccacctatgaaaataagcgacgagcaaatcgacaaggttcttgacatcatgcctgaagctccgcacaataaggtaaaaagatttgtaacagactatggcattgatgaggaatcagcaaaagtccttacctccgaacttgacttagcgcaatgctatgaagaagttgctaaggaagtagacccagtatttgctgcaaaatggatgagagacgaacttaaaagagttcttacatacaacaaacttgactttgcagacagtggaatcctagcagatgacttgattgaattattcaacatgttacaaaacaaggaaatcactaccaaagcaggtcaaagagtcattgaacaaatgccaaacagcaaacaaacccctagagaaattgcagaggaaatgggattgattggtgttgtaaaagatgatgaagttttagcagctgccaaacaagccttagaggaaaaccctaaagcagttgacgattaccacaacggtgaaaaggcttcattaaacttcttgatgggtcaagtcatgagattaaccaaaggtaaggcagaccctagagaaactgttaaaatcttaagagacttacttgaagaataa

SEQ ID NO: 2028 - DNA, 852 bp, Methanobrevibacter ruminantium
  source 1..852: mol_type = genomic DNA
atggagggaaaaactatggagcaagaaaaagccgctgtaagagattacatgaccaaaaatgtaattacagtaaggtatgactctctcaacaatgatgttattgcattaatgaaagaaacaaagcacgacggttatcctgttgttgatgaagaaggacatattgttggaataattactgcttacgacctattgctaaaagattgggaaaccgaatatgtcaaaagcataatgtctcaggaagtaattgtagctagagaagacatgcacatcaacgatgcttccagagtaatgtttagacatggaatttcaagacttccagtcgtagataaggaaagacatgtcaaaggaatcatgacaaatacagatatcgtaagatcccatatagaacgttccactccaactaaagtcagtgcatttagagagactatggaaaagctttatgatattaaaaccactttaacaagagaacaagtcccagttgataagataaaacctactcaagacagggtttatgctgatgaacttcaaggaagaacctatgaacttgaaaaaggattggcagagccaaccatagtggtgaaaactggagacagatatattttagtggatggccaccacagagcagtggcaaccgtacaattaggattggataaaatagactcatatgtagtggactttaatcaggacattactttaggaatggaaaaaactgcagaaaagcaaggattaaagacattcaatgacattacaatcattgatgatgatcagcatcctttaattgccttgactgaaaccattaagactgcaaatcagaagcaaaaaatatctgaaataacaaaaaataaaaattag

SEQ ID NO: 2029 - DNA, 288 bp, Methanobrevibacter ruminantium
  source 1..288: mol_type = genomic DNA
atggatgaaaaaatccttagagaagtttataatgttttagaaagtcgtagggactctcctattgattcatacacttctaatatcatgaaagacagcgataaaaaagcagaagacaagatattagaaaagatagctgaagaatgcggagaaaccattattgcttctaaaaatgatgaaaatttagtttatgagtctgttgacttaatatttcacacattgctccttttggtttacaaaggagttgaatttgatgaaatcctagaagaatttgatagaagaagaaaataa

SEQ ID NO: 2030 - DNA, 648 bp, Methanobrevibacter ruminantium
  source 1..648: mol_type = genomic DNA
gtgtttatattgatttttagagattttgacccagagattcatgatgtctataaggtggctgaactgatctatgatgttgattatagaacatttgttcatgttttcaaatcaaaggaagaaggtgtggaagccattaaaaatagattgacttttgaatttgctgaggatagggaggatgaaaatgaacttttctatctattctttgatgatgaggatacagaagaaaaggaaatcattggaatgttcaatggaggtaaaggagttcagcattccttattcaaggatatcctagaacaatttaaacatctgaagtttagtgaggccttagggctttcaaaagtctcttttatggataattttgtcttggttgatgtaggggatgatgacttttatatttgcgaattggccatctgctccaatcagagaggaaaaggctatggaaccgaggccttggaccagttgattcagcttgcgcgtgacttgaactgtaaaagggtggttttagatgctgactttagaaacgatggggcatttaggctttatagttctaaaggatttaaggtatttaataaaaaatcatttggatttccaggcaaaaaaagaggaatgcgtaatatggaattgattctggataacgctagagaatag

SEQ ID NO: 2031 - DNA, 816 bp, Methanobrevibacter ruminantium
  source 1..816: mol_type = genomic DNA
atgatgaaaaagattctaaaacgtttggctgaaggtgagatttcaattgaggagtgtgaaactcttcttagggcggagaatattcgtcaattggatgatatagccaatattgatatttccagaaaggataggacaggttttcctgaggccattttagcggacagcaaagattatgaagatcttttagccattgttaaaggcttctttgatgatgaatttgacctaaaggataatataatcatcacacgattgtccaaggaacgttacggcttattaagtcaggatttgtcttatcttttggataatggcattaaatttgattataaccctagagcaagaattttagttatatataaggataaattagttgattttaatccagaatatggtaagattgggattttaacagctggaacctctgacatacctattgctgaagaggctaaggtcatcgttgagcaagggggatgtgaggtcttaagctcttatgatattggagttgctggaattcatagattgtttcctaaaattgcttatatggttgaagaggacgtttctgcatttattgtctgtgctggaatggagggggcattgccttctgttgtagctggactggttgatgttcctgtaattgcagttccaacttctgtagggtatggcgttggagcagatggaaaggctgctttgtattccatgttgcagtcctgtgctcctggattgtctgttgtcaatattgataatggatttggtgcaggggtttatgctttaacaatagtgaaaaacattgctaagaaggtaaaaatgtctaaggaataa

SEQ ID NO: 2032 - DNA, 2448 bp, Methanobrevibacter ruminantium
  source 1..2448: mol_type = genomic DNA
gtggagtcaattaaagtattagtagaaggaatcgtacaaggagtgggctttagaccctttgtatatagaatagctaccgagctggaactggtaggatacgttagaaacttaggaaacgtagttgaaataatattacaaggaacagacaatcaattagctgactttatatacaaactccagaacgaacttcctccaatagctaaaataaataatttaagaactgaagatatagaaattgactccccatatactgattttacaatcaaggaaagttcagacagcttttctggaacttctgttatccctcctgaccttgcaatatgcgataagtgcctagaggaaatcaatgacccccaaaacagacgctacaaatatccattcaatgcatgcacagactgcgggcctagatttacagttattgaaaacgttccatatgaccgggacaagaccacaatggatgactttccattatgcgatgaatgtgaaatagaatataaaaatccattggacagacgttatcatgcagaagcaagctgctgtgaagtctgtggaccttcattaaaactaatgaaaaatgaaaccgaagaaggaatctctacagataaagaaggaaatgaaataaaagcaatgaaacgaacagcaatcgatacagaatccaatgacccattaaaagacactgcaaggcttcttgatgaaggaaagatatttgcaatcaaaggaattggaggaacacaccttgttgcaaacgttaaggatgaaaaagctgtaagcacattaagagaaaggttaggcagaaagaaccaagcatttgcagttatgagtccagacattgaaactgtaaggacatttgcaattgtatcagatgaagaagagaaaacattgctttccaaggaaagacctatcgtaattttaaaaaaatcaaaggattacgactttgcagagtctgtatccccaagacttcacaatattggagtgatgctaccttatgctcctttacatcatctgctctttaatgaaacagatagccctgcatacatcatgacatcagctaatgtccctggagagcctatgatgattacaaatgaggaaatccttcaaaaccttgatgaaatagccgattattacctcattcacaacagaagaatcctaaacagatgtgacgactcagttgcaagattcagaaacaacgaacttgctttcataagacgctcaagaggatacacaccagagccttatgacttaaagggaaaatacacagatatcaatccagactttgacaatctgaacattcttgcccttggacctgaattggacgtcacatttacaatattaaagaattcaaaggcatatgtatcccagcatatcggaaatacaaacaaatacagaacctatgaattccttcaagaagctataaagcatatgatgagaattaccaaaacagacagcttcgatgcaatcgcctgtgatttgcacccacaattctttacaacaagattagctaaggaatatgctgaaaaatacgactgcccattgattccagttcagcaccaccacgctcatggaatctccttattgaatgaccattatgatgataatgatttgaatgaaatgattattatcgctgcagatggagttggatatggtgctgatggcaattcttggggtggggaaatcctatacacagacataaaaggatttgaaagaatggcttcccttatgcctcaaaagatgcctggaggagacttatgtaccaaatatcctgcaagaatgatggcatctatcctatcaaaccctgaaagcgactatgagaatgagaaatacacaaaggaatacatagaggaattgcttaacaacaattacttagactcctttaaacatggatctgttgaaataaaaagcctatttagacaaatggaaaccaatcttaatgttggaataaacacaagtactggaagagttcttgattccgtttcaacagcactccatatctgtgatgagcgcagctatgaaggagaagcatccatgaaactagagtcatatgccttcgaatataaaggagaaggctctcttgatgacttcccaataattgttaaagagtatgaagatgaaaatggaaaacggttgattctagatactacagcaattctaagatacatcatagacaaaatagaagaaggagaagacctccacaagattgcagctgcaggccaaaaggcagtaagcattggacttgcaaaacttgccattgaatctgcaaaagaaaaaggaataactacaatcggagcaacaggaggagtcttctataacgaagccattacagattacatcaaaacatacatagaaaaagaaggctttgatttcattcaacacattaactcatgtcctggagacggttctgtctctttaggccaagccattgtagcaggaactaatttgaataatttttaa

SEQ ID NO: 2033 - DNA, 498 bp, Methanobrevibacter ruminantium
  source 1..498: mol_type = genomic DNA
atgaaaagaaaagtaattatgatattggcaatattgcttgccgttggaatgacacttactgcagtaagtgcagaggacagttggagttttaacttctccagcgaagaaaactccgacggaggatcaataaactttgaaaatggaaaattgacaatacaaggtattgaatttaccattcctgacggatatgaaatggatgaatcatcaaagaaagtagctgaagacgctgaagattttgatgcaaaatattcagcatgcaaattcactaaaggcgatgatgaaattgttgtaaatgtcttctttacagatggggatttcgaaaaccttagcgcaaataatgccgaccaagtcgaaaaaaccttaaacgacattaaaggtttatacgaagaaaataaatatggcgataatactccaacattcacttatattgaagatggtaaagtcgttaaaataaatgcccctaatgatgaaatcattgaatcagtaatgggaaaataa

SEQ ID NO: 2034 - DNA, 843 bp, Methanobrevibacter ruminantium
  source 1..843: mol_type = genomic DNA
atgaaaaaatcatcaataattatattttttgcagtttttgaaataatagccatcctattattcattacattaaatgatattttctacctattcaatttcacatacataggagcctgtctatcaatcggtctttatttgtacaatgtagatagcaaatattcaaaatacgctagaaactttattcaattggccatcggactatatatgctggtttatcttggaataatctccagagaaaacatgatgatagagggattctggtattatctctttttaggggtctttgaagctgcagtgatccactatctcgttgcaaagatcttaggaccattcctttttggccgtggatggtgtggatatgcatgctggactgcaatgattcttgatcttttgccttataagactccaaacaaaaaccttgaccatgaaagaaagaattttggtttcatcagatatattcttttcattgcttccttaataggtgttggattgctttttatgatgaatgtgcctaatttaagcacagtgatgttttatctgtttatagcgggaaacattgtttactacacagttggaatcatccttgcatatgctttaaaggacaatagggctttttgcaaatacatttgccctaccacagtctttttaaagataggggcaagatactctttattaaaggtaaagtacaaaagggaaaattgtatcagttgcaataaatgctatagggtttgtcctatggatgttgatatttgcaataatgataaaaataagaaaaacggtacagaatgcattttatgcttaagctgtgccaaggaatgtggcaatgatgctctttttctataa

SEQ ID NO: 2035 - DNA, 516 bp, Methanobrevibacter ruminantium
  source 1..516: mol_type = genomic DNA
atggaaaatgaagggcagaatcaacaaaatctaaatgatgttgatatggaagctattcttgatgttatgggatgtaagactagacgtgacatcatggatctcttaagggaagagccaagatttgttagtgaaatatctcaagagctccaaataggacagaaagctattattgaacatttaagggctatggaagatattggtattttaacttcttcaaccaaaaaggtagtgaggggccgtcctagaaagtattatgacatgcctaatgatgtgaatgtgaatattacaattaccaaaaatacatttaatgtggctatctctcaggatatgttaaatgccaatcacgttcctcaattgccttcaggtgatgaatggtctaagttgttggacattgaaaagagaattgatcaaggtcatactgaggcgattgaagagttgaaaagtcagatacgtttgtatgacaacctaaaagaaagagcagaatacattttagaaaggacttataataagtattag

SEQ ID NO: 2036 - DNA, 693 bp, Methanobrevibacter ruminantium
  source 1..693: mol_type = genomic DNA
atggctaataaaaaagaagaagaaaaggaagaagaatctgaagatgctaaaaaaagcactaaagataagatcaagtctaaaatttcaaaatcttcagatgattcctctagtgacaatgaagaatcctctagcgataaagaggaatcttctaaggatgacgaaaaagacaaggaattagctaaattaaatgaagaccttgaaaagaaagatgaagaaataggagaacttaaatcccatatccaacgtcttcaagcagatttcgacaatttcagaaaacagaacgacaagcaaaagcaagacctaatccgctttgcaaacgaaggtcttatcgtaaagttcctggatgtctatgaagatatggaaagggctcttgaaaattcaaagactgaagaagaacttagagaaggtttagaattaatttattctaagatgaaaggcactttagaaaaggaaggagtcgaagaaatccctgcagttggagagaaattcgatccattcaagcacgaagcattgcttactgttgacagtccagatcatgaaaacaacgaaatcgttgatgagctcatgaaaggatacactctcaagggtaaagtgattaaatattctaaagtaagagtttgtaaaaaagcaaaaaaagctgaaataaataaagctgaagaagcaaaagatgatgaggataaaaaagaagaataa

SEQ ID NO: 2037 - DNA, 1896 bp, Methanobrevibacter ruminantium
  source 1..1896: mol_type = genomic DNA
atggctgatgctaaaaaagaaaaaatcattggaattgacttaggaaccagtaactctgctgcatccgtacttgtcggtggtaaacctaccgttatcccaagtgcagaaggtgcaagccaatacggtaaggcatttccaagttatgtcgcatttactgaagacggacaacaattagtcggtgaacctgcaagaagacaagcagtaaccaaccctgaaaacacaatcagtgcaatcaaaagaaaaatgggtaccgactacaaagtaactatccaaggaaaacaatacactcctcaggaaatctctgcaaagatcttgcaaaaaatcaaaaaagatgcagaatccttcttaggagaacctgtagaaaaagctgtaatcactgtaccagcttactttgacgataaccaaagaactgcaaccaaagacgcaggtaccattgcaggccttgatgtagtaagactcgtaaacgaacctaccgcagcaagccttgcatacggaattgacaaacaggatgacgacgatgacgtaaacatccttgtattcgacttaggtggaggtaccttagacgtaaccatcatggaattcggtggaggagtatttgaagtgcaatccaccagcggtgacacccaactcggtggtaccgacatggacaatgcaatcatgaaatacttggcagatgagttcaaggctgaaaccggaatcgacttaatgaacgatgatcaagcagttcaaagattaagagaagcagctgaaaaagctaaaatcgaattatccacaaccttaaccagtgaagtaaacttgcctttcatcagcatgggtgcagacggcaagccacacaaccttatcaacaacttaaccagagcaaaattagaagagttagtggatcctatagtaaacaaatgtggtcaaccaatcaaacaagcattagacgatgctaaaatgaccaaaaatgacattaacaaaatcatccttgtaggtggacctaccagaatgccagttgtacaaaaattcgtagaaaactacataggcaaacctgtagaaagaggaatcgacccaatggaatgtgtagcaatgggtgcagctatccaaggtggagtactcgctggagaaatcaaagacttagttctcttagacgttaccccattatccttaggtattgaaaccttaggtggagtatccactaccctcattgaaagaaacactacaattccagctaaaaagtctcaaatcttctcaactgcagctgacaaccagccttccgtagatattcacgtagtccaaggtgaaagaaagatggcagcggacaacaccacacttggaagattccaattagtgggaatcccacctgcaccaagaggaatgcctcaaattgaagtaaccttcgacattgacgcaaacggtatcataaacgtaaccgctcaagacaagggaactggaaaagaacaatcaatcacaatcacttcctctacaaaactctcagatgaagagattgaaaaagctgtaaaagaagcagaaatgaatgctgaagcagacaaaaagaaacaagaggaaatcgaagttagaaacaatgcagattcaatgatctacactgcagaaaagaccatcaatgaggaagaaatcaaagacaaagtctcagatgaggaaagaactaacatcgaaagattggtagctgaacttagagaattaatcagcggtgacgacatacctgcaatcaaagataagacagatgaactcactaaagtcgttcaagacatcggtgcaagaatctatcaggaagctgctgcagcccaacaagcagcacaaggtgcagctggaggagcaggccctgacccaagtgcaggaccttcaaacgatgatgatgacggcacaatcgatgctgaattcgaagaaaaagactaa

SEQ ID NO: 2038 - DNA, 1176 bp, Methanobrevibacter ruminantium
  source 1..1176: mol_type = genomic DNA
gtgagaaaattggcagagaagcgtgactattatgaagttcttggagtagatagaactgctgacgaaaaggaaatcaaaaaagcttaccgtaaattagcaagaaaataccatccggatgtagctgaagaagacaagaaggaagaagctaccgaaaaattcaaagagataagtgaagcttacgcagttttatccgacgaagagaaaagacaaagatatgaccaatttggacatgcaggtatggatggcttctctaatgaagacatatttagaaacgttaactttgaagacatcttccaaggcttcggcggtggcggaggctttgaagacattttcgatattctattcggcggaagcagcagatctcgccattataatgcaggacctcgcagaggcggcgacatctacactgaaacaacaatcactttagaggaagctgcaagcggcgttgaaaaggacatcaaaataagacatgatgtcttatgtcctgaatgtggaggtagcagagcagaacctggatctgaagttgagacatgtcccgtctgtggaggaaccggtcaaagaaagcaaatcagacaaagcctattcggacaagtaatgaatgttgtccagtgtggcgaatgtaagggaaccggtaaaataatcaaggagccatgtcacaactgtaaaggaaaaggaactgtcaaggaagacaagaccatcagcgttaaaatcccagcaggagttgaaacaggcaaccgtttaagagtttcaggagaaggccatgctggagatcttggaggaggaaacggagatctctatgtagagattaatgtaaaaccacataaagatttcgaaagagatggcgcaaacctctactatgaaaagcaaatcagctttgttcaagcaagccttggtgacactgtagacatcccaaccatagatggggcagtggaactcaaaatcccagcaggtacccaaagcggaactgttttcagattaaaggaaaaaggtatgcctcaaatgagaagaagcaccaaaggaaacctttatgttacaataactgtcgtagttcctcaaaagcttaataaagaacagcaaaagcttttaagaaaattcgcacaaataagcggagatgaaatctctgtctataaaaaaggaatttttgataaagtaagggatgctataaacaacccttag

SEQ ID NO: 2039 - DNA, 771 bp, Methanobrevibacter ruminantium
  source 1..771: mol_type = genomic DNA
atgaaacttatgatgtatagtataaaaatgcgttcagctaaaggagggcctcatgaagagggtggaaaacacatatcaggtgcagaacgtattttaagagaagatgaaatagaagaagagctaataaatgtctatagaagagctatcacacacgaaaagggaaagccagactttatcaacctcaagatagaagccatagacgaagacaagatactctataagaagaggctaaatataattcagcacaaagtaagctcaaaggaagagggattaaagctagcaaaagaacttcttataaaaaacactgtaagcgaagaggcagctaaagaaggcatatcaagcatacaaaagctcaaggaaagcatccatggagccatgctacttgacaaggacagcggaaaaagaattgatgataaaggaattaaaggagtccgagttacaggaatagccagtgcagacataaagaaatataaagaatcccttaaaagggacggcagggaaggactgcatcttgaagaggcactaatccttgcttcaaagatagcaagctgtaaggcaatagttgccgaactttgctggtcagatgatccaagctatgtgattggatatgttggcacaaaagaaaactatcatcgcatccctatcctaaaagataagggaaatccagtagggggaagggttttctttgttgatacaagccaattaaatgacaattacaccttagaggacttaatagattatctagaaaaacaaatagtcttaatcgaataa

SEQ ID NO: 2040 - DNA, 1245 bp, Methanobrevibacter ruminantium
  source 1..1245: mol_type = genomic DNA
atgaatccaaatcttgaaatgaaactaaaggaagagttagaagagcttaaaaacaataatctaaatagaaccatagatgacttaagatttataagctctacaaaggccatagataaagatggcaaggaatttctagtatttggaactaacaactatcttggattgactcaccaaccagatgttataaatgcatctaaaaaagccagcacatatggaactggctccacaggttcaagactcacaacaggagcatcatttgaagcaagagagctagaagaaaacctatccaaattcaaatcaaccgaatcaactcttatatttaacaccggatatatggccaatctaggaattatctacacactaacaaaggaagatgacattatattcagtgaccaactaaaccatgcaagcataatagatggaacaagaatatctaaggctaaagtcagagtctataaacataaagacaccaaagatttggaaaacctaattcaaactgaaataaaagaattaaaagaaaaaaacataaactcatccaatttcttcattgtaacagatggagtattcagcatggatggtgacatagcacctcttccagagcttgtagaaatagcaaacaagtacaactgctgccttatcattgatgatgcccatgcaactggagtcattggaaaaacaggcaaaggaacagttgaatattacaaggataaaactggaatagatttaacagaatctgttgatttgcagataggcaccttaagcaaggcccttgcatcagaaggaggatttgtatgtggaaagaagacctacatagactatctcataaacaaatcaagaccattcatattctctacagcactttccccatctacaatagcaagtgccaacgctgcattaaatctattgaagaaaaatagcaatgaatatttaactaaacttcaaaataatacaaaacttatgagaaatctgctaaaagagggcggattgaatgtgattgatggagaaacaccaatcattccaattatcataggccctgcagacttaacaaacaagttttcaaaggaattagaaaaagaaggaatcttagtctctgcaataagaccgccatcagtacctaaaggagaaagcagattaagattaactgttatagccacacatacaaaagaagaaatcacttttacagccaaaaccataataaaaatctggaatgatttaaaaaaaaaactagaatatgaaaatcattaa

SEQ ID NO: 2041 - DNA, 9531 bp, Methanobrevibacter ruminantium
  source 1..9531: mol_type = genomic DNA
atgaataagcgaatatttctatatatagcactgatttttattatttccctgctttctttttctgcagtcagtgctaatgaagacatttcaagtgacaatctcatcttggatgagaatgtttatgatgagaaaatcattttagatgatgttcaagataagaatatcatatctgataatgattatgacgatgtcattccagttgaaaatgctaatgataatgcaattttagctggaaatgatgaagaacttattttagatgagaataacagtgaaataagtgaggataataaaaatgataagaccaaactctccgatccaaacacatattcttttacccggctgaatcaagccataaatagtggagctagtgtaataaatttaactgacaattatcagtataccgagggggatgaatcattcattcatggtatcatgatcagtcgcagcataacaataaacggaaatggcatgacaataagtggttcaggcgttgcccgtatttttgaagtatttacttctaatgttatcatcaataacattacttttagagatgcatatgcggaaggagatagtaatcgtcaaaattatggtggtgctatctttatgtatggttcagacagcatagtccaacattgtaaattcattaacaacaatgcaaataatgctggtggcggcgctatcgtattggtgggttcaaacagcagagtagaatattccgacttcaccggcaacaatgggcaaaatggtggagctgtctatttgtatggtaataacaccaaggcgatatattgtaacttcaccagcaacaatgcaagcgagaaggggggtgctgtttatacctacggatcagatatcacagtcgaattctgtaacttcaccaacaactctgcatatctagagggtggcgctatcgattgggaaggtgaaagggggactgtcaaacattccagcttcgccaacaacactgcaaacaataatggtggtgctatctcatggtatactgccaacgggactgtagaacattccaacttcattaataaccgaatggcaacttttggtggcgctatctggtggtatggtgaaaaaggaaccgtcaaacattctaacttcaccaacaatagtggaagaaatggtggcgctattcaatggtctaaaaatgacggaactgtagaaaattccaatttcactaacaacactgcaattttagctggcgctgtaagatgggtcgctgacaacgggacaataaaatattctagattcattaacaatcatggttatagcgctggtgctatcgactaccatcttacatatgccaatatttctggatgtttatttataaacaatacttcagattacagagcaaacgtatatgaggacctgtttgagtctaaatcttattctaattttaacaataacattttgctaaacaatggaggtaatgaaattaattttaatacatctgagggcttcaatgcagactataactggtttggagataattcacttaattaccttgacaaaccaaatatttatagtaatacttggttgtttttacagccaatagtaaaccatgatagtgtcttccttggcgaaagttgcgaaatcacttttagattatactcctatgatggaacagaagttcatgaatatgataatgcccttgtataccctattaaattaactctaaattctaactacggcaacgtcaatgataccgtaggattggaagaaaaggccatattcacccctcaaactcttggatatacctcagtagatgtatatgcagaaggcagttacattggctcagtaccaataaatgtttatgtgccaagctttagcgacttgaacagaaccataaatggcaacgaagactccataataactttaaataaacattatatatttgatccagagaccgatgctgctttcataaatggagttatcataaatcgcactgtaacaataaatggaaatggctttacaataaacggttctaacaatgcccgtattttccaagtaactgcctctaatgtcgccatcaataatgtcacttttgcaaatggatatgcaaatggcagcactgatgaggataaagatggtggtgcaatccattggtctggcgcaaatggtaatattgaaaactcaactttttataacaaccatgcaacaggtgctggaggagcaataatctggcaagcccaatatggaaatgtctctacttgcctattcataaacaacactgcagatgatggcgctaacgtataccataacaattatccatctgattcccattctaattttaacaataacattatgttgtacaatggaaataatgaagttcatttcacagtctataacggctccaatgcagactacaattggtttggacataactcaagcaattacaatgacgcaacaactggcataattggagatatatggctctttttaaatgcaacagcaaacccagatacaatcttaatttcaaacagttcagaaattagctataagttatatgcttataatggaagagaaattcaagaatatgataatcatcttttatatcctatcacattaaccttaagttcaacaaatggaatagtcaatgataatgtcgcactggaagaaaaagtcatattcacccctcaaaatcttggaactgccacagtaacagcaaaagcagcaggcactgacatccaaacaatatcaataaaggttttcgaagcaagtttcagtgacttaaacagaaccataaatggcaacgaaggctttgaaataattttagataaaaattatgcatatataccagagatagatgctgctttcataaatggaatcaacataacccacacagtaacaataaatggaaacggaaacacaataaacggtttagataaagctcgcatcttccaagtaactgctcctaacgtcactatcgataacattactttcataaatggatatgcaaacgatgatggtggagccatcaactggcaaggcccaaatggaatcatcataaactcagagttcattaacaaccatgcaactagtgctggaggggctatccgctggtttgctcaatatggaaatgtctctgcctgcctatttataaacaatactgcagatgatggtgctagcgtatattataatgattatccgtctgattcccattctaattttaacaataacattatgttgtacaatggaaataatgaagttcatttcactgtctatgagggctccaatgcagactacaattggtttggaaataatctaagtaattacaatgaaagaccaacaggttttgatggcaacgtttggctctttttaaatgcaacagcaaacccattgacaatatcaatctcagaaagctctgaaataagatataaattatatgcctacgatggaagaaacatccttgattataatagaactcttttataccctattaacttaaccctaacatccttaaatggaaatattgaggatattacagaggataaggccatattcgctcctgaaaatcttggaattgccacagtgactacaaaagcagaaggcattgacatccaaaagatatcaataaatgttttatatggaacaatcttttatggaagtttcagtgacttaaacagaaccataaatggcaatgaagatgctgaaataactttagataaaaattatgcatataatccggagattgacactgccttcataaatggaattgtcataaacagaacattgactatcaatggaaacggttttacaataaacggttccaacaaagcacccatatttcatataaccggggataatgttaccatcaataacattagttttgttaatggatatgcaaatgcatatgtaaatggctatgatggtgaagatatgaggggtggtgccatctactggcaaggtagaaacggcaaggtaacatactctaacttcaccaacaacaatgcaaatgatggtggtgcaatttattggtttggtacagatggtattgtagaatattcaaatttcattaacaacaatgcaaatgatggtggtgcaatttattggtttggtacagatggtattgtagaatattcaaatttcattaacaacaatgcaaatgatggtggtgcaatttattggtttggtcaaaacggaaatgtcgaaaattccgtcttcacccaaaatcatgctggctcttatggaggtgcgatttattgctctggtgctgagagtattgtagaatattcaaatttcaccaacaataatgcatataatggtggtgcaatttattggtttggtcaaaacggaaatgtcgaaaattccgtcttcacccaaaatcatgctggctcttatggaggtgcgatttattgctctggtgctgagagtattgtagaatattcaaatttcaccaacaataatgcatttaatgggggtgcaatttattggtttggtcaaaacggaaatgtcgaaaattccgtcttcacccaaaatcatgctacctttgctggaggtgcgatttattgctctggtgcagagagtattgtaaaatattcaaatttcaccaacaacgatgcaattaagggtggtgcaatctattggaatggtcgaaacggaaatgtcgaaaattccgtcttcacccaaaatcatgttgacaatgatggaggtgcattatattgggatgatagtgaaggtaaagtcacttcttgcatatttgtaaataatactgctgaaactaagcatagcggacatcttattttgcctatgggaagaggtggtgcaatctattggaatggtcgaaacggaaatgtcgaaaattccgtcttcacccaaaatcatgttgacaatgatggaggtgcattatattgggttgatagtgaaggtgaagtcacttcttgcatatttgtaaataatgctgcagatgttgaggccagcgtatattataatgaacggggtgcctattccaattttagcaataacattatgttaaataatggaaaaaacgaaattaaattcaagatttttgatcgctcaaatatagattataattggtttggaaataatctaagcaattacaatgaaaaaccaggaggttttgagggcaatatttggctatttttaaatgctacagtagaccctaatatgctcttacttggtgaaagttctgaaattacttttagattatatgcctatgatggaacaaatgttattgaatatgacaatgatttaatatatcctattaacttaactttaatttcatcaaatggaaacatcaatgaaactgtagggttggaagaaacagcaatattcactcctcaaaatgtaggaactgccatagtaactgcaaaagcggaaggctttgacatccaaacagtatcaataaatgttcgtgcagcaagcttcagtgacttaaacagaaccataaatggcaatgaagatgctgaaataactttaggaaaatattatgaatttgatccagaaacagatggtgctttcatacatggaataatcattaaccgcacagtgacaatcaatggaaacggcactacaataaacgcatcaggcaaagctcgtatcttccaagttatcgctgataatgtaacactcaataacattacatttacaaatggaaatgcaagcggcgagggtgctgataggagtggaggcgctatccgttgggaaggtgcaaatggtattatatcatactccaatttcacctttaaccatgcatacctaactggaggggctattatctggtccggtgaaaacggtactgtcaaacactccagtttctctcaaaatgatgtagatggttctggtggagctattaggtgggctggtgcaaagggcactattacagattccgatttctatctcaacagtgcaacagatgcaggtgccatctggtggcttggtgcatatggtacagtcaaatactccaatttaatcaacaaccatgcaggtagtcgtggtggagctatcatgtggagtggtgaaaacggtaatgtgacatactccaatttctcactcaataatggaggaagtggaactgggtatgatggcggtggcgctatcttttgggatcatttaaacggtactgtgtcatattccaatttctccaacaaccacataaatggtcatggaggagctatcgcttggcatgaacaatatggaaatgtatcctcttgcttatttgtaaacaacactgcaactgacggcgctagcgtataccataatgatcattcagaatcatattccaatttcaacaacaacatcttgctaaacaatggggaaaatgagattcattatgatgtatatgatggctccaatgcagattataactggtttggaaacaatggaagcaattacaatgagaaacctgcaggcagcgttggaaatgtatggcttttcttaaatgcaacagccgatccaaacccaatatctattttaggtagctcagatgtaagctttaaattatatgcctatgatggattagaccttattgaatatgacaataatctattatatcctatcatattaagcctaagctcatcaaatggaaatataaatgacactgctggattggatgaaaagataatattcactcctcaaaatattggaactgccactgtaactgcaaaggcagaaggcatcttccaaacactatcaataaatgtttatcctccaagctttagtgacttaaacagaaccattaatggaaatgatgatgatgaaataactttagacaaatattatgagtttaatccagagttggattcagctttcatacatggaatcatcattaaccgcacagttacaatcaatggaaacggaagcacaataaacggttcaagcaaagcacgtatcttccaggttatcgctcctgatgttgtcctcaataatattacctttgcaaacggaaatgcgaatggtgaaaatgaggggggctatggtggcgctatcctgtgggaaggcgataacggaagagtcgaagattcaaccttcatcaacaacaatgcaagcggatacggtggagcaatctttggaggaaactgctcagataatgttattttccaaaacaaccacgcaggcatagaaggagatgactggtatgtccctaaacctgtaatatccgtcaatgacttcacatccacatataaatcaggagagaagctatatgtcaatgtgtcctatgttggtactcaaatagatggaatcaatgttacaatctctgtatttgacagttccaaccaattaattggcaactattcctgcctaagcggtgacggatggactgtagatttggatgctggaaactataacgcattagtatttgtagattcagatgaatatggctatggagaggagacaattgcattaacaatcaataagcgcgcttctcaaatttcagctaacccattgaacacaacatacaatggaaacgaaaacattataatgatccttaaagacaattataatgaatccattgccaatgcaactgttttggtagactttaatggtgagaaaaacctaacaaccgatgagaacggtcaaattgttgtgtccgctaatggaattgttcctggagaatactgggcacagttcatcttcgacggcagcaaaaactatgatgggtcagatgaaaaggttaaagtgattataagtaaggcttctacaagcctaagctcagagaatatgaatgttagctataatgaaagcaaatacctgattgctacattaaaagatcaatattccaatcctttagctgaaatcagcatagaattcaaatctaattcatcaactgttaaaaatgagaatactgacaataagggacaagctaaactcttaattgacttcaacccaggaacttataatattgatatcagtttcgctggaaacagcttatatgatgcctcatatgctactgtgactgtggtagtaaacccatctgatgatagtggaaatggcactgaacctagtggcaatggaagcagtggaaacggtactagtcctgaaggaaatggtacttctccaggtggtaatggaacctctccgagcggaaatggtacttctccaggtggtaatggtacttctccaagtggtaatggtactagccctggtggtaacggtactgatcctggtggtaatggtacttctccaagtggtaatggtactgatcctggtggtaatggtacttctccaagtggtaatggtactagccctggtggtaacggtactgatcctagtggtaatggaacctctccgggcggaaatggtactgatcctggtggtaatggtacttcttcaactgttaaagatactctaataggcattagcacatccacagtcatatatggaaatgatgagcttatcaatctgaccttaacaactgcagacaaaactcctattgatggggtcattgagctaagagttggcaattctatctataatgtaactattacaggtggaaaaggttcaaaggctctttccaatcttactataggaaactacacagtaactgcagactataaaggagattctgaatacaattcatccactgcaagctctagtttcaccgtgagagaccgtatcgaaaccagaatcatatataacaatatgaccactgcccctgtaggtgcaaatgatggcagaataggtaattacttcagagtcaaattggttgatgaaaacaatcaagcactagcaggagttcctatccaaataggcttcaacggaagaatctacaacagaacaacagactctgaaggcggagcaaaactacagataaaccttgcaaaagaggatggatacacctttgcaatctgcttcaaaggagacgacaactacaacgcatccttcgaagtagcaaaaatagacgtaaacaagaaatatccaaaaccaaacagtgcaaattcagagtccgccgaaccagcaaacaaaacacaaaagaacacaagactcgaaacctccatcctctacaaggacatgaaaaccgaatcagtcctaaaagctgaaggaagagccggaaaatacttcgaaatccaactagtagacaacaacaaaaaggctttagccggagttcctatcaaaataggattcaacggagtagtctacgacagaataacaaatgccacaggaggcgcaaaactacaaataaacctcctgaaagtaacccaatacacattcgctatcgcatacctcggagacagcaaatatcaggcatcattcgaagtagcaaaaatcactgtaaacaaacaaaccccaaaaatcacagcccctcaaaaaacatttaaggcaaaagcaaaaacaaaaacagtcactgcaacacttaaatcacaaagaggaacattactaagcggcaagaagatcaagtttacagtaaacggcaaaacctacactggaacaaccaattccaaaggtgtagcaagtgtaaaggtctccttaagcaaaaaaggaacatacacagcaactgccaaatttgatggagatgccaatacaaaggcaaccagtgtaaaattcaaagtaaaaattagttaa

SEQ ID NO: 2042 - DNA, 342 bp, Methanobrevibacter ruminantium
  source 1..342: mol_type = genomic DNA
atggcacgtcataaatctaataagcgtttgaataagggtgaagaagaagatccaatgtctggagcagcaaaccttgtggatgctatgttagttattgcagtaggtctattggtctttttagttatctcttggaacatgcagggaatcgttttcaatgaggacatgactccggaagagaagcaggaagtaatgcaacagatgcaacaggtaactgaacttgaagagggtcaggaattgaatgacactccagatgtaagtaatagttcaggtaagggctatacagagatgggtaaggtctataaggactcatctactggtaagctgattatggttgagggctaa

SEQ ID NO: 2043 - DNA, 645 bp, Methanobrevibacter ruminantium
  source 1..645: mol_type = genomic DNA
atggtaacagttattcctggaagtgacttactaacttccgcattaaatgttgtttctcaaagtttacagatacctgtaatagtatttttattaatttttgcagtgtacgctgtaattactgtaggggggcttatctcagaatacagttctcgtaagaaagtacccgttaaagtaatcaaggatttaatatacgcaatatctagaagtgaggatgttacagaattggaaaatatccttaagaatgcaagaattccaaagaatcaaaagagggttttaatcaatatagcaagatctggagagttaaagaaagactccagagaggcattagctgaaaaattgattgaaaatgaagaggacatcattgagaaaaagcttcaaaagacagatatcgttacaaagattggtcctacccttggtttgatgggtacccttattcctatgggtccaggtcttgctgcattaggtagcggtgatgtgacaaccttgtctaatgcgatcattgtagctttcgacactactgttgtaggtattggatccggtgcagttgcatatgttgtctctaaggtcagaagaagatggtatgaacagtatttatctaatttagatgctttatctaaggctgtattggataggttgaatgaatag

SEQ ID NO: 2044 - DNA, 726 bp, Methanobrevibacter ruminantium
  source 1..726: mol_type = genomic DNA
atgttttgtggtgagaaaatggatacaattagtatgctatggcaatttggaatattggcagcagttcttgtatttggtatcaagttaggtttggctgttggtttggctaacctctcaaagaagtatctggctactgtctgtattggatatggtgcaggagtactcattcttgctcaaatttcctcctattttgctactgaaattactgagcttatctacacatataactctctgttctttattataatggctgttataatgattctagcaggtatctttacaataagggaatggaaggtctttgaaaagaatactacagctgccacttgtgctgcagtgattgccccttgtccatgctgtttcggttcaattattgtcagtatcttgttagtggctcctacagtcggtttaggtgctgtggatttaagcgtatatgtggcagcagctttggttttaactattatagttacttactttgcttcaagcatattcgttcgatatgttgataagccttatccgattgtacttggaaacttcatgttcttcttgggaatttatttcctcttgtctgcattggtcattccgaacattgcagcaatcatgaataagtcaatgggatcaatcagcatagtttcaatggaaagtttggctggctctatagttgctttagtgcttttagtagttattggcatagtattttcaagaaaaaacaatattctaagctaa

SEQ ID NO: 2045 - DNA, 5628 bp, Methanobrevibacter ruminantium
  source 1..5628: mol_type = genomic DNA
atgaaatataataaaaagatattctttttatttttattattgtgtctcataattcctcaagctatttatgcaggggatgttgatgatttatcggatgctggtaattacactagagataattcacctttaacaataagttccacttatcaaagttctacttatggatccgatgggggatatgatgataaaaatgagaatatttatattttagataaagttagtgatggggataaatctaaaacatgctgttctaaggacctttctttagataatgcttgttctatggataaatcttcttgttctaagagcaattcagcttgttctaagggcatatcttcagataaagattcatctaacttgtctaatacatatttagtttctgaaaataattataatgattttaatgttgatatagatttaaatgataaactttcagatttggatttaaacaatgatttaagtcttaataaagatttaactcttaatttaaattcaaataacgatatggattatttaaatcttgaggaagttattcagacagatggaactttaacttatgagggcgatttggatcaaacttatttaaacgatgagtctttaaatcaagatgttcaaaatgatgattctttaaataaaaacgatttaaaatccccattaagtgatgaaaacacatttaatatttttataattagtgataatacaggaaataatctttttgatgcagtggcatgtgaaatcttagacaattccaatttttctaatgtcaaattcaatataagaagcggaaaccaaataaatgcaatgagcgaggatgaaatctatgaactgatggctccttgcgatgcattcatcggccagtgggtaagctccaatgtggatgcagtattaaccagtcttttaaacaatcatcctgaattgtcaaataagaaactgttccttatcttggaaccacctactggaaacatcaattcaagctccagttcattgaatttggttagaaactctacaattgactataagaagatattcaatggaatttccaatgacgatttgataaattatttcaaggctaccaaaagaggaaacaacttcgaaagcattcaagaatacattgacaatgaaggaagctcttttaatagcatctttaataatttggttctctataaggatataaacgataaggcaaatcttaaaaacgaattgctctatatcctttatctattgggacatggatgttcctatgagtctgcaaactttacaggagtacaggcatctggaatattccgtgacaggtggtattcatttgatgaatacgttctcaccttcttcaatgagtccagaaatcgtaccatagggattttggaaagtacaatgtatatccaatcccaacaattggatttggtaaatgaaatcacagaacgccttgaatcaaaaggatataatgtcattcctatttactgtccggcaggtaacgccgaacagctaaatatcatggtgaaatattggaccagtgcctgttcaaacatcagcggattcttagagaatccacaagactttgacatttatgtggatggaattatttccatggttgcatatggtgtcggtggagagaacttcaccaatgccacaaaattctttgaagatgcaaatgtgcctatattcagagcggttcactctgaatacattaccaatgagcaatgggaattaagccctgtaggtctctctaccactaaaagtgataaatggtggcacgttacaattgcagagtcccagggaatttttgatgctacatatgttggtggtgttgactcttatatttcaaataggacaggagcaatcatattgacttttgttccagttcatgagaatatagaactcttgactgatagggtagacgcttgggtggacttgaagtatactccaaatgaggataagaacatatccatcgtatactacaactaccctcctggtaagcagaatatcggtgcaagctacttggatgcaatcacaagtgtctataatatgctttataccttaaaggatgaaggatactatcttacagacttgccaaacaatgtttcagaacttgaagatatgatgattgcctgcggtataaacgtagctaactgggctcctggagaagtcgaaaagttagctaaccgttcaggtgtcgctcttcttcctgtagatgaatacttggaatggtttgattccttagacgatattgttaaagtccagattaccgaaggtcctgttgcctatattggccagatggttaggcgtgcggttctaatcaactacaccgatgaggtggagacaatggtcaatgattggtacaatcaaatcaaggcattgcttcctgaaaatcagactgttgctgcaacaaatatattggataagcttgtaaacagcctgaagctctatgcaaacgcatcttccgatggcgatgaaaatgcatccctttactatgatgaattcttaagatattatgatgagtttaaaagtttgaatgtttctggattaaacggatggggtgaagctcctggaaatatcatgctggttaatcggaatggaaccgattactttgtaattccaggtcttacattcggtaatgtcttcattggccctgaacctcaaagaggttgggaggctgacattgaaaacctttaccactgtacagctgtagctcctactcaccaatatttggctgcttactattatatgcagaccaggcaatcaaatgccatggtatttgtcggaaggcacgcaacccacgaatggttgccaggcaaggaagttttattatcatataatgattatggttctattgttgtcggaaaggttcctcaagtatatttctatattactgatggtttagcagaggctatacaagctaaaagaagaggatttgcagtattgatttcccacttggattctcctaaatcatatactcatttatatggtaatctaactgtattggcaactctattggaggagtatgataataatcatatcattatagagtctgattctgataaagataatcaggctatcacttatcaggtaatcaaggataatcagactatcacttatcaagtaatcaatcaagagttagaggacaatctaacaagagcaatcaaggacttggtaattgcaaacaattactaccttacaattggattcactgcagaggaattgaacaatactgacatgttctccctaagctcaactttaaatgctttcttaaagaacactcaaaataccctatatccattaggacttcatgcaataggtcagaaatggacagatgaggatttggcgaacaccgttgcaatcatagtctctcatgactttgaatatggcggcaagaagaccaatctattcgatcagctatccttgtattactatggggaaaaatattccaatctgactccattgaagcgtgattatatcctaaacaggtcagtggatgtctgtaaggctttaatctattgggacacagagacagtgtctgatacaattggtataggaagtccagagttcattgagtcattaaacattgcaaagaaatacattgacctttacaatcaatgtatcagccttgagctggaagagatggtttccgccttaaatggaggatatgttccagtcaatataggcggggaaagtgtgactgtccctcaagtgctccctacaggagcaaacatgtaccaagaccagtcatctgagcttccgactcaaaaggcttgggattatgctaagacactctcacttctaaccttggcagaccttaatgacactacagaaaagataatcatgggtatctggtgtgtagagactgcaagggatgacggtgccctagtctctacagtgctctaccttttaggaatggagcctgtctggcataactcatcaagtgcaggatttgacgaagagggcattcctacaggtaagaaagttgaggacttgcctaatgtcatagcattggaaaacctcacccgtcctgacggatgggctaaaaagagaatagacgttactgtgattaccagcggattgttccgtgatctatacagttcacaggcacgtcttatggacaatgcatacaggatggctttagcttgttcatattacactatcgtaaacaataagacaattatggatagcgaatatgggcctcaagtctatgatgcacttagatccatcatgagaagcattagcttcaagggaatgtcaaacgaatcattagaagacaattatgtcgctaagcattggctagaggattgcatctattatctaagcctaggctataactctacagtctctggagaatatgcaataacccgtatctttgcacctcctaacggggattatggtgctggaatatcaaagcttgtgtcaatgtcatggacctggaacgatacagatgagctttcagagttctatattggcagaatgggaaacatgtattcaaaatattactggggagatacaaaccctgtcgtattcatgagggcgctatccgatacagaccatattgtggtaagccgtaataccaaccaatacggagtattggataacgatgacttctttgattactggggaggtctctcaatgacagttgaatacctatccaacaagactcctacaatgaatgtattgatgtatgcaaataaggacaatgcatatgttgcaacattcgagaatgttttctataacgagcttaatacaaggtatctaaaccctgaatggatcaagggaatgatgcaggaaggctacagcggttccagatatatgtccaacaagttcatttccaacctatggggatggcaggtaaccagaccttcatctgtctctgaaacagtttgggatgacgtttacaatacctattataaggacaaatacggattaggagtaaaatcatggctccaatctggaaacaatgcatattcattgatatccatgagcggaacaatgttgaattccgcatattcaggatattgggatgcagatgatgctacattaagtgatatagctaacacttgggcacaggctacagttgcaaatggggtagcatgctgtgactgcagctgcggaaatgtggcaatgatgcaatgggcattcaagtatgtgaatgctgatttgcttgctaagttgatgcctaagttgtatgacgcaactcaaaatccgctcttctatacaaatagcagtgatatgcctacaaactcttcgaatattgaccgccgaactacaaacagcagtgcagagtcaaacaatactgaaactgttcagactaactcaagctctaacagtcagcaaagcgctaacggaaacactaatattccaggagcaagcggcggctatatggtaggtacagaagcggatgcccaatcagatatggccagtgattcagatgcaggaatgaacgatgcaaatggagaaggcagatctgtagaggtcactaagagcacaagcactccagtggctccaaaggacgtaagtatgcctatagctattattgtttgtgttatttgtttagtggcattaataggattcggttatttcagaaacagaaaagacgacgatgattattataatgatgatgacgatgatgattatgaatataaatag

SEQ ID NO: 2046 - DNA, 5418 bp, Methanobrevibacter ruminantium
  source 1..5418: mol_type = genomic DNA
atgaaaacaaattataaaattattctaatttcaataattcttctcggtttggtcatgtcttttggagctgtctcagcagctgacctaaatacagtccagtccggtgaggtttcaggtggagttgacatagccagctcaaatcctggagtcgaaaatggagaattgacttacgaaattccagatagtgttgaaaacattcagtatgcagggctctttgttgacagctatactgcaggatcctctaatttggtatatggatccgaagcaaatatcactttgacaaaaaacggcgaaagcgaacagatagcaagtgaaagacttgttgcaagtgtgggaagtgcagacggtgaggtatatgtcattaacgaccacacaacaaaatgctttgcagactatatgatgacctataaccttacagacagacttcaggatgcaaagggaaatatcacaatcactgtaaatgccactcctatcgaaggatacacattctataataaaatcaagctgataggccttgtatttacatatgatgatggagatggagaccaattccattattgggtaaatgcaggttcatcttgggtaaagacagatagcggagagacaagcaaggctacatttaagcttggaaacgtgaattacgacccaactgtagccacccttgataactttgccctttcaagccaggatggtgtctataccttcaatggcaaggagatggatgagtccatagtcactgaaacaggggtatactattatatccatcacaagtttgacatattggataagattaagaacatgacaaacacccttgtatacactccaggggaaggctcatactcatttagaaatgttctttcagtggtaaagctggtaaagacagttccagtctatgctaaagtcaacataagctctgaatatgatgacattgtcttttcaggaacagaaaatctgcttaaggtgggcataaccaataatggtacaggctctgcatcctatctcttggatttatatgccgatgggaaaaaggtaaacagttctcaaatctcattagctgcaggaagggaagctgtaatatccttgattgacaatacaattaggccatctgcagcagacactgtaagcggtgcagataataagaagatcaattacactgtagttgttagcgataagaacactggagaggttttagatgaatccagcatcttccctaatctcctctataacggttatttaggcaagggcttggcttatcctgcagaaaagataagttcatttaagaatatcacagttaatggaggcatgatcattgagagtctaggtgattccacttatcttgatgcttcaatgactggcaaaaccgattcttggactattgatctgcctgatggcgctttcttcactgatgcatttgtctatgtgccatataatcttgataatggaaatgttcctatgttcacaagcacattcaatggggcggcagttaatcctatagcttcatatagggatcagccaaatataggagaaaatgctaaaaacggatacggattgcttgtttatgatgttggagagctcattaaggcaggtgtaaatagctttgccttatcaaaggaagcaggtattgctggagtttatccaagcaccctaattgcattttacaatctaacagattcagaccttctaacaagcgcattcatattcaatggggcagacctattatccaatgaatacaattcacttggaagagatgtttcaagcgataatatattatccatcggcgcttttgatggattggtaagtgctaagcttcatgtatttgctgccgattgccaagctggagagggagacttgactgttaatggcaaaagctataagaatgtatgggccggtacaaatagaagtgtcggcgattatgtggttgatttaggaaaatccactaatgcatcaaatgaggtgtcatttatttccacagcctcaaatattctagcccttcagcaattggctgttgttcaatataatgtcccttcagttaaggcaagtcttgtctctgaatattcaaacgctgtatttgcaggtaccaacaatgtcttgtctcttaatataacaaataacggtaaatttgattctatctatactgttgacttctatgtggatggcaaaaagcaaaacagcactgaaatttccctaaaatctggtgctaataagggattatatcttattgatgatacaataaggcctattgatgcaagcacagtaaatggggcagacaatcctaaggtcaattatacagttgtcatcattgacaaggaaaaatcaatggtattagatgagattaccataactcctagcctcttatataatggaaatctaggaaaggacttggcttatccggcagagaatatcacttcatttagaaatataactgtaagcggtggcgtgattgtcgatacattagatgattccacatatattaactctcaagcaacaaacagaacagatatttggaatgtaaatgtggctgatggcgatgtatttacagatgcctttgtttatgttccttacaattgggataagaccaacggatacatgccagtttggaatgcaagattcaatggtgttgcagtttcacctcttgtctcctatagggaccaatcaaatataggattcttcggcaagaacggatatggattggtggtctatgatgtgagcaagcttatcaaatcaggggaaaacactttcactttagaaaaagaagctggaatcactgctgtatatccaagcacccttatggcattctataatgcaactagttccaatagcttaaagaccatttatatctataatggtgcagacctattggcaaatgagaataacttcctaaacaggactgttgcatctgacagtcacttagatatctcctcttttaaggaagtaattagcgctaagctttatgtttttagtgccggtgctcaaaaaggtgaaggaaatattatatttaataataaaacatataaagatgtttggaatggtactgtaaacagtgtagatagtttcatcattgatttaggcaagtctccaagtgtgtccaatgatgtgtcctttgtctctacaggctcaaccattatggcacttcagcagctcattgttcttgactattatgtatcctctgttaaggcaaatgtgtcctctgaatattctggtgctgtatttgcaggtaccgataatgtattaaaagttgacttgaccaatgacggtcagggaggatctgtttatgtgcttgacttctatattgatggcaagattgtaaacagcacagaaattcctcttgatgcaggtaaaagcactgaaatctttttagttgatgataaaataaggcctgttgatgcaagcactgtaaatggtgcaaataatgccaaggtcaattatacaataactgtaactgataaggccagcggacttgttttatatgaggccagtctcaatcctattgtattatataatggaaatctaggaaaggacttggcttatccggcagagaatatcagcttctttgatgccataactgtaaatgggggcgtaatcattgatacattagatgattccacctatcttggagcaaaaaccaccggcagaactgatgtctggaaggttgaaattcctaaagatggaaagatagttgatggatttgtttatgtatcatacaattgggataagaccaatgggtctatgcctatttggaatgtaagtttcaatggagtatcagtttcacctgtggcccactatagagaccagtccaatatgggtacttatggcaaatatggatatggacttgtcgtttatgatgttggggagcttatcaaatcagctgaaaacaagtttaccttagaaaaagagaatggaactactgcagtttacccaagcactcttttagcattctataatcgtacagaatcaaataatagaactaccgtttatatgtacaatggtgcagacttattgtccaatgcaaataacttcttaggtagaaccgttgcaagcaatgccgctttagatttggccttgaatccaaatgatgagattaaaagctcaaggctttatgtttttgctgcaagcggccaatctggagaaggaaagctcattgtcaacaacaagacatttaacaatgtctacaatggcagtgcaaatagtgtggatgcctatattattgatttaggcaagtcccctagcgcatctaataatgtgtcatttatagctacaggctcaaccattcttgctcttcagcaattcgttgtggttgatgctatacaccagtccagtgaagagcttcaaaagatgatcaattcagctagggcaggctctacattgaatttgggaagcaacgtattcaaggatgtctcaaatgtaatcatcaataaggaccttacaataacaggcggaacaatatatgcaagagagggagagaccatcttcgttgtcaccgaccgctctgcaggaggtcctaaggaagtgaatatcactggagtcaagttcgttttagataatgcaaacacaattcttcaagcaagggctgtaaacggctccacaccaacttcaattgatgtggcttcaatcaacatcaaaaagaataatatctcttttgttgatgatgatgtggttccagaatcaataaccgttcttgaccttaagtcccaaaggtcttcaattgccccaactagaaacttgaccataagcggcaataatctaattgcaggtatctgtccattcatgtttgaagtaaccagcttcaatggaaaggactctgtagttgttccagaaggaggcaatatcccagataaaaaagcttctgtaatacattatgaagacatggttacaactgccatcaatacaaatattgaaggaagagtgggcaaatactttgaagtgaaccttacagattccaatggaaatccattgaaggataagaaggtccagataggatttaatggtgttgtatatgataggacaacaaatgccacaggaggagtcaagctccagataaaccttggatacaagggaacatacacctttgcaattgcattccttggtgatgattattataatggcagctttgttgtagctaagattaaggttaacactcaaaagacaaagatttccacttcttctaagacatataaggcaagtgctaagaccaaagccatttctgccacccttaaggatgcaagcagtaatcctataagcggtaagaagcttagtttcactgttaatggaaaaacctatagcgctacaactaattcaaaaggcactgcaactgtgaatgtaagcttaagcaagaagggaacttatagctttactgtaaagtatgctggcgatgatatgtatgctggggccacttcaagcagtaaggtggttataaaatag

SEQ ID NO: 2047 - DNA, 10356 bp, Methanobrevibacter ruminantium
  source 1..10356: mol_type = genomic DNA
atgaagaatagaaaatttttgatagttagcttaattcttattgttctaatgctggccttaggatctgcttatgccgcagatttaagtccagtgactaatggaactgtttctggaggtgtggatgtggcaactgccaatccatacgcttctcaaacaggaggccaagaaatacaatctggagaattaagctatgatgtcccggaggatgttagtgatgtccagtatgcaggactctttgtaaatgtttatggagggtctgcacagggagactatggtgcccagtccaatgtctcaataacatccaatggtgagacaagtcaaattgcaagcgaaagtttaaattatactgatggcagtggcgacggcactgtctatatagtaaatgaccacatcaccaaggtctattccgactatcagatgatttataatatcactgatagggttcaaggtgcaaccggtcaaataaagatcaatgtaacaaacaccaaacttgaaggatatgctaattttgatggcagaatcaaattaatcggtttggtctttgcttataatgacggaagcaataatagatttgattattgggtggattccggtcaggcttggtcaaatagtgcggattcagttaccaaagctaattttactgtgggaactgtaagtcctttcttaagtgctaacataagaaatattgcactttcaagcactgacggtaattattcattcaataagcaagagttaactggtggggaactcatctctgattccatgttcaaataccataagtgggatgtaactgacctcttaaaaaacaagacaaataatttaacttttaattcaaccaaatcttttaagaatgtactttctgtcttgacagttacaaagaacttagaggaaatatttgtaagtcctgacggtactggaactggtactactgcagatgatcctaccactatggataaggcagctcctgctttggctaataatggtataatccatgtattggatggtacctacacccaatccaaacgttatgacattagggcaaactactcatccattgttgcagtaaatcctggaaatgtaatattcgatggaaacaattctgttgcaaacattagagtatatggtgccaatgtaactttggacggcttgacttttacacatggtaaaggaactggagggggagtttatttcgatagcgatgcgaatggcggccttgtgacaaattgtattttcaaagacattaataataccggagctggaggagctgtttacatatccggttctaaaaatgttatgattgaaaattgtaaattcataaacaccacttccacaggtactggaggaggcgcaatctacattgctggagacaatgccaccgttaaggaatgcagctttgaaaatgctactggaaaggatggtggtgcaatccgtgtaaattctagagattttgcggttgtaagagactctaacttcactggttgtgttgcaactaccggcggagccattagttgggtaggaaaatatggaaatgtaaccaattgtacatttacagacaatcaagctactggttcaagcaatggtggaggagctatctattggcaggaaaactttggattaatcaataactgtacattcataagaaataaggctcaagtttatggaggcgctgttaattgggctgcaggtaaaatcaacggtacaatagtcaacagcatctttaaggaaaattccgctggaagagatggtggcgcatattattccgctgcaggtgcaaatgaaatgctaattatgtactgctcatttgaagacaatgaggcagatgcaaacggaggtgctatgggcttccgtgcagaccaatgctaccttcttgattgtaactttaccagcaaccatgcaaaacagaatggaagtgctgtaatgctctattccaatgtagccaatttccttggtattggaaactgtaattttgtagataactctgcagacgtattgaactattccattgttaacaatgcaggaaaattaaaattatctgaaaataacatcacaaccaatgatcttcgtgatggaatctacacaaacggttcaatattgactgacgtttatttatatctcattgtcaatgaaaccaatgatgctgcatccaatgtagtatatgcagacatcggcgatgaagtgcctattgacgtttaccttgtagatgacaacagcaatctcattaacggcataggcttaagcgtagagatcaatggaaccaacatcactgaatttgatttggatggatacacatataagacaagctacacaccaagtgaaataggtacttattatgtaactggaaactattccaaggctgagcttagcaatatcctaacaggatcaatcgttgtgggagaggaacctgtttctgctatagaaattgcttttagaggcgaatatgtaaataccacttatgcaggtgtggaaaaccttattgcagtttcattgcataacaccggatctttagatggaaactatcttgttgaattttatgtggatggcgagcttgcaggaactgaagaatctaaggtaaatgctggctacacaagcgatattaactttattgatgagaaaataagggatctaaacgaatcaactatattgggacatgacaatctacaggctaattacactgtaattgttaaggataatgaaacccaagaagttataggggaatccagctatttcccatatgtcctatacaacggttatttatctaagaaatacgaatattcagatgaattcataagctcattcagaaatgtcaccttcaatggaggctatttcattaacaccactggaagctactctggaaatagcaaccctggattgactgacatttggactcttcctgctcttggcgaaggggcaagctttgcaggagcttatgtatatgttgcatatacctgggataagacagaaaatggaccatctgactgggcctccagctttaatgatgagtccatccctattgtagctcaatatagggaccaatccaatatgggtacaagcggttcatatggatacggtcttgtggtctatgacgtttcctctttgattaaggaaggacaaaacaaatactcattaactaaaggggacacagctatatatccacgtacccttgtggcattctataatgtgactgaatcaagcactgtaaaaaccatgtacatgtataatggtgctgatttattatattacggtagctataatgttttggaaagacttgttatgacagattctgtattgaacattagtacagagggcaatgtcctcggatctaatttgtatgttttcgctgcaagcgctcaagcaggtgaaggtaacttgcttgtcaacggcgaaaaatatgaggatgtttggaacggtactaccagctctgtagaagagaaagtctttgatttgggagacaatcctcttgcatccaatgaaatctcctttgtatctaccggatctaccattttagcacttcaacaattcgttcttgttgaatatgaagcttactctgctgacgttacaatagcttctgaatataatggagcttgttatgctggtactgaaaatgcattgaaagtcaatgtaacaaatgacggtttggaaaaagccaattatttgattgaattatatgctgacggtgtaagggtcgactatgaacatgttgaaatcgatgttggcgaaagcaatgtcctaaccttaatcgacgacaccatcaggccagtgactgaagacactgtaaatggcgcagacaatcaaaaggtaaattacacagtctatgtaagtgctgctggaagtcttttagctgaaaagacaatcactcctaccatatggtataacggttacttaggcaaggactacgcttatcctaatgagacaatcagctatttcgacaccattacagttaacggtggagttatcattgaaactttaaatgataccacttatatgggcgctacagttcttaacagaactgatgtatgggagcttgatgtcccagatgatgttgaatttgcagatgcatttatctatattggatacaactgggataagaccggtgcaaacatccctgtcttgaacttaacattcaatggagaaactgttgctcctatggaaagctatagggatcaatccaacttaggcagctccggcaaatacggatacggattaatcgtttatgatgtgtctgggcttgttgaagctggagaaaatacattattaatagaaaaagagtttaacaagactgcagtttacccaagcactcttgtagcattctataaccaagaggtccctgatgtcattacaacagtttatatgtatcatggtgctgacttgttatataacagctacaacctattaggaagggacgttgaaagtaacagcgttttagaagttgaattggttgatgaccttgcatctgcagaccttttagtatttgctgcaagcgctcaagcaggtgaaggtaacttgattgtaaataatgaaacatatgagaatgtctggtctggaagcacaaacagcactaatgtatttggtgtcgatatattggacagtctcaagcaatccaatgaagtctcctttgtttcaactggaggaactatcctagcacttcaacaattcattgtcttcgaatacgatgtcacttctgctaaagctaaagtaagcacagaatattcaaattccgcatatgccggaaccgacaatgtattaaaacttgatttaaccaataacggtacagtagacactgtctatcatattgacttatatgctgatggcgacttggtagacagcatagaagctgaaatcgattgcggtgaaaacagtacactatacttgattgatgatacaatcaggccagtgactgaaaacactataaacggaaacaacaacgctaaggtaaactacacagttgtaatcagtgataatgcaaccgatgagatattggatgaaattacaataactcctgttcttgtctataacggttacttaggtaaggactacgcttatcctaatgacacaattcaattcttcgacgctatcacagtaaacggtggagtaatcattgacactttaaatgataccacctatcttggaactaaaacaaccaaccgtaccgatgtatggactgttgatgttccaaatgatgcagaattcgttgaggcctttgtctatcttgcatacaactgggataagaccaatggcacctgccctgtcttcaataccacattcaatggtgaaactgtcactcctatagctcattacagagaccaatcaaaccttggaaccagctctgcaaaatacggctatggattgcttgtctatgatgtttcagagtacatcgctgcaggcgaaaatagctttgagcttctaaaggattatgatgtcactgctgtctatccaagcactcttgtagcattctatgatgttgaagactcacctatattgacaactgcttacatgttcaatggcgctgacttattatacaatgcatataatttcttaggaagacctgttgaaagtaacagcgttttatatattgattcagttgacgatatcgatgaagcaacacttgtagtatttgctgccagcggtcaagctggagaaggtaacttgattgtaaacggtgatgaatacaccaatgtttgggaaggaacaagcaatagtgcagctgcttatatgatcaatctaactgattccatagctgaatccaataatgtgtccttcgtttccactggaggaactatcctagcccttcaacaatttgtcatagtttcagaatacgccccatacgctaaggctgacattatctctgaatataagggcgttgcatttgcaggcacaaacaatgtcttaaaggtcaatgtaacaaacgttgctgaggaagatgctgtcttcaatgtaaccctttatgctgacggcgttgaaataggcagtcaattgattgaagtaggcgcttatggcagtgccattgcaatgtttaccgatgagaagatcagaccggttacagaaaacacagtcaaaggggcagacaatgaaaaagtcaattacactgcagtcgtaagagatgttgacgaccttgttgaggatgctgaagctacaatcactccggatatcctctataacggtaacttaggcaaggacttagcatatcctgctgaggagatcacattctttgactccatcacagtaaacggtggcatttacattgaaatccaaaatgattcaagctaccttgcatctggagctaccaacagaactgacatatggaacattgaagcacctgaagacgctgatttcgtagctggatttgtatatgtggcttacaactgggataagacctctgcaggaatccctgcacttaacatcacattcaatggtgtatctgtcgctcctgttgcacattacagagaccaatccaatatgggaacctatggcaaatatggatacggacttttagtatatgatgtaagcgaccttttagaagcaggggataatgtattcaccttaacaaaagatgctaacatgactgccatctatccaagtgttttggttgcaggctacgaccaagaagtatctgacagcatgaaaaccatttacatgttcaacggcgcagacttattgtccaatgcaaacaacttcttaggaagagttgttgcatctaacagtgttttagacattgaattgcctgatgatgtaattgattgtgcacttggaatatttgcagcaagctctcaaaaaggcgaaggcaatctaatagtaaacggagaaagctttgaagatgtttggaacggatcttccaactcagtccaagcttgcgtatttaacttgacagatgatatcgaagaatccaacacagtatcatttgttgcaaccggaagcactatactagcccttcagcaattcatctttgtggaatacgagcttgtttctgttgacgctaaattaggctctgaatacaataacgttgcatttgctggaaccgacaatgtcttagaatttaacattaccaatgacggaacaattcctaccgcatacaccattgagttctatatcgatggcgaattggcagacactttagaacttgaacttgcaaacggtgaaagcgacagcctataccttgtggacccaaccatcagaccagttgatgaaaccactgtaaacggcgcagacaatgctaaagtcaactacactgttgtaatcacagacaattcaactggagatgtcttagatataatcactatcactccttctgtactctacaacggtaacttaggcaaagacttggcatatcctgctggagaaatcactttcttcgatgtaattacagtaaatggagatatcattgtcataggaatgaatgattccacttatcttggctctaagacaacaggacgtactgacgtatgggacttaaccactaatgaagatattatctttgcagccggatacctttatgttgcatacaactgggataagacccctgctggaatgcctgtatggaacaccacattcaatggcgtaactgtcactcctgttgcacattacagagaccaatccaatatgggaacctacggcaaatatggctacggacttatcgtttacgatgtatctgaccttattgtagctggtgaaaacacattcaccttagaaaaagaaaatggaaccactgcagtatatccaagtacccttgtagcattctataatatgcctgaatccagcacttatgtaactacatacctatacaatggcgcagacttattatccaatgcaaacaacttcttaggaagacttgttgcatctaacagcacattggatatcgattcatttgacaatatagtcggcgctgaccttttagtatttgcagctagcgctcaagctggagaaggtagccttgtcataaatggcgatcttgtagctgacatctggaatggcagcagcaacagcgtagatgcatatgctattgacttaggcaaaaaccctaaggcatctaatgaggtatcatttgttgcaaccggatctaccattctagcattgcaacagttcattgttgttgaatacaatgttccttcagctgaggcaagcctcgttagcgaatattctaatgttgcattcgctggaaccaacaatgtattgcaattcaacttaacaaacaacggcgctcttaacacttcttacattgtcgacttctatattgacggcaagaaggtaaacagcactcaaattgcactcaactctggcgaaagctttggccaatactttatcgatgatacaatcaggccagttgacgcaagcactgtaaacggcgcagccaatgctaaggtaaactacacagtcttagtcagcgataaggataccggacttatattggatgaagtgaccctcactccttctgtattatataacggtaacttaggcaaggacttagcacatcctccagaagaaatcgtcctatttgacacaatcactgtaaacggtgatgtgattatagatacattagatgattctacctatcttggagctaagacaaccggacgtactgatgaatggaacttaaccgttccttcagatgctgatttcgaagtggcatacctttatgttgcatacaactgggataagactgcaagtggaatgcctgaatggaacaccaccttcaatggtgtaaatgtcactcctgttgctcattacagagaccaatccaatatgggaacctatggcaaatatggatacggactttacatttatgatgtatcagacctcattaaggcaggtctaaacacattcaccttaggaaaagaaaacggaactacagcggtatatccaagtactcttgtagcattatataatgttaacgagtcaaatgtacttactaccgtttccttattcaacggtgcagacttattatccaatgcaaacaacttcttaaacagaactgttgcaagcaataatgtcttagaattagatttcactgtatttgatgaaatcctatccagccaactctatgtatttgctgcaagcgctcaagctggagaaggaaaccttattgtaaacaatgaaacattcactaatgtctggaatggaacttctaatagcgtagatgcttatattgttgatttaggaaatgaccctagcttatccaatgatgtatcatttgtagctaccggttctacaatccttgcattagagcaatttgtcgttgtaaaatccaaatatcaaaccagctctgacttgcaaaaactcatcgatgctgctgaacctggatccaccttggatttaggtgacaacgtattccaagatgttgctaatgtagtaatcgataagaacttaaccatcaaaggcggttccataatgggcaaagctggagagaccatctttgtaattccagcaaaatccgctaacggtcctgatgaggtaaacataactggcgttgactttattgtggaagatgcaaatgtaattgttcaagcaactgctgacaatggaagcagcccaacttcaatcgacactccaaacatcagaatcagtgacaacttcattgacatgatagacggaagcgttgtacctgaatcagtaactgtattgaaacttgacagcgaaagaggagtccttgcacctaccggtgaactcaaggtcactgacaacgcaattgcagctggaatcaaaccattcgagtttgatgtaactggcgtatccaacggcagcgacaccaatattccagaaggcggtaacattcctgctaaacaggcttctgtaatccactatcaagatatggaaacaactgctgttaactctaagattgaaggaagagtgggcaaatacttcgaagtcaacttgacagacacaaatggaaacccattagcaaataaatttgtccaaataggtttcaacggtgtagtatataacagaacaacaaacgaaaccggcggagtcaaactccaaatcaacttaggatacaaaggaacttacacctttgctatctcctaccttggagatgactactacaacggtagctttgttgtatctaagatcaaggtaagcacacaaaacaccaagcttactactgctgcaaaaacctataaggcaagcgctaagacaaaaacattaactgcaacactcaagtcaagcgtgtacaacaaaccaatcaacggtaagaaagtaactttcacagtaaacggcaaatcctactcagcaactacaaacgctaaaggtgtagcaactgttaaagtaagcctttcaaccaagaaaacctacagtttcacagccaaattcgctggagacgatatgtacaccaaatcaagtgttacaggtaaggtaactataaaatag

SEQ ID NO: 2048 - DNA, 351 bp, Methanobrevibacter ruminantium
  source 1..351: mol_type = genomic DNA
atggctcgtcgtcgttgcaatagacgttttgaaagtgaggaagaagatcctatggcaggaaccgccaaccttgtagatgcaatgttggttattgctgtaggcctgcttgttttccttgtgcttgcatggaacatgcaaagcgtgctctttaatgagcagctcactcaagaggaaaagcagcaggtcatggatgctatgaatcaggagatgactgaggttcaagagggtcaaatcttgaatgagactccagatacaagcaatgcaacaggtcaaggttatactgagatgggtaaggtttataaggatccgtctacgggtaaattgattatggttcagaataattctgcttaa

SEQ ID NO: 2049 - DNA, 747 bp, Methanobrevibacter ruminantium
  source 1..747: mol_type = genomic DNA
atgacattagctattggaaatacattgatttttgcagatgaagctatttatcagggagccaacaatggactattcgccatcttctcaaatacaaacggaactggctttccatttttagatagttcactaactgctataacacaagcattacagatacctgtaatcattcttttactcatatttttagtattcgctgtagtaactttagggaagcttctatcagaatacctttctcgtaagaaagtacctattaaattaatcaaagaaatgatttattcaatctatgatgcacagtctgctgaggaaattaaaaatatagtaaatagttcagatattcaaagttcacaaaagacaattctttgtgaacttgctgacagtgaacatcttggtaagaaatcaagggagacattagctcgtagattgattgataatgaagaggataagattactcaaaatcttcaaaaaacagatattgttacaaggataggtcctacacttggattgatgggaacacttatcccaatgggtccaggtcttgcagcattgggtacaggggatgtgacaacccttgcaagcgcaatcaccattgcattcaatacaactgttatcggtattggagcaggtgctgccgcttactttgcatcaaagattagaagacgatggttcggtgaatatcttgctaacttggatgctttgatggatgcaatattggacaatatcaataaaagggatgataggctagaataa

SEQ ID NO: 2050 - DNA, 4113 bp, Methanobrevibacter ruminantium
  source 1..4113: mol_type = genomic DNA
atgaattctaataagacttatgcagtattaggattattgctcttattaatcttatccataggcgctattagtgcagaggattctatagatgatatgagtttaacagacattaattctgcagataattctaatattaatcaaataaatgcaattgataattcaattgatacaagtacagattcttcaattgatacagacaattcaattgaaacaaatctggatagttcaattgaagataaaaactctacagatgcaaagaacacactttcctcaaacagtcttgcatctacatataagataactgaaaaagactacttaacttactttgataaagatggaaacatattatcaggcaaattaaaaagtggagatactatagatctctccggaacctttagtaaaaaggcttttgtcataaacattccacttaccataacaagtagcgatggcactgcaaagctcttgaactccaacataaaccttgtaagtggcgctcaaggttctatggtgtccaatttaaatatgaatacaagcgttgaaaagactcctgcattaagcgctgtcaatgttacaaaggtctcctttgtaaataacacagtactttcaactgcaacaggctcttatgccttattgctcaatactgtaaacaattcagatgttctatttaacacattccaaaccacatgctttgtggagggctggggacatccttctgctttggtattaagcggttcaaactataacaatatctcatcaaacaatgttattgtaaacgattcaaatggaatctacttgaccggataccttggcggaggaagcatgggagattccacccaaggatccaatacctacaattatatatacaacaacacagttcacagcgtaagaggagttgaatgggcaaaggataaggatggaaacaagcctctcccatcttcattctgttatggtatccaagttatgggtgcatataacgaaatcattgaaaacactgtatataatatgtacagaggcataagcgctacccaaactggaaataaggtagtcaacaataatctatcaaatatccatggaacctggtactctggaggtacaaatgacgatggagcagactatactatatatgtaactaccaactctattgtaaaagacaattcaatctctgattccaaaattggagactccactgcagcaatccatgcggcagcaaacactaatgtaactaataatgtcctctccaatatagaaggaaccggcgtcttgattgaaggaaacaatgtagtctgcaataagaatagcttattaggcttaacaaatgacggaatcatagctaaaggaaatgtaagcaacattgatatttcaggcaatataataaatgcctcagaaaccgctgtttcccttgtaaaaacctcaagatctcttgctcctcatgacattacagtaagtgaaaacacaatattcactacaaaggaaaacccaatcagctatgaagaggcttactctaccaacataactgtagaaaacaacagaataatcaaggaagcttccaatggaacagatcctagcacagaaggtaacggaacctactacattatagattccaacttctataattatttcgacaacacaggataccttaagagcacaatcaaggaaaacgacatcttaatcttcgttggcccaatagaaagcaaggacaaaatctacataaacaataaggtaaacatcacaggtattgatgcagtcttcaaggacacaaccataattgttttagacgacggcgttgtcattgatggaatcacaatcaacaatccaaatgaggctaaaaacgaccgtgaatggggtattcaagtaaatggagctaaggatgtaacaatcaaaaactgtaacataactatctatgatgcattctcagcatatgcagtatatctcattgattcatctgattgtaagctaataaacaataatcttgaagctaaaggagattatttaacttctgcagttttattatacaatacaaacaacacagtattaagcggaaattcattaaagacaataggaactggtcaaaattacactttcctaaatgaatcctgcttggatggttgtcttgatggatgcctcgatggctgtttagacggttgccttgacggatgtctcgatggttgcttggatggttgtcttgacggctgtgcagacggatgcgctgatggctgtttagatggagcacaaggagtaaaccacataatctctggaatattcagaacctatggcttattcatggtatactcatcaaacaacaatgtaacagacaacaaagttgatgtaagctctgcattagaaaaaggctatgctacttatatagaatcaactaatgctattggaggaatcttcatccaccacaatagcaataacaacatcattaaatctaataatataacattaaatggtaatgatccattcatgtatggcgctggagtggttggaggaaattcaaaccacactgattatgtttcctcaaacaaccaattcgaatccaacgccatcaatgtaaaatccccttactatgctatcggcatattgcttggatacaactcttcaaagagcactttaaaatccaataagatttccctaagcgcaaacaattactcttacaatatagcttcatacaagagcagtgaaaacactgttgatggaactgtaactgtcctaaaagacactatagttacctccacaaacataactgcacagtcaaacagtcctattgtgctaaacctcactgtattggatgaagacaataagacagtaactgtaggaagccttttggcttatgtaaacaacactcttgtaaattcaacatctatcaagggccaaagcacctcacttggaattggcgcttatcctaaaggaacctacgaccttgtagttctttatgtaaatggaggaatctacagagtaggagctggagcatgccaattcaatgtaagcgatgtaattaatactggaaacggcacaaaagatattcaaaacgctttagataatgctaaggatggtgcaactgttgatttaggaaaccaagaatataacaatgttgtaaatgtgcaaatcaagaagaatgtcacaataaccggaggaaagatctctggagacggaagcaatcctatatttgtcatcactcctaaatccaaaggaggaccaaataatgtaagcataactggagtcgaattcaatcttggcaatggaaacattgttgcccttgcaactgctgataatggaacaagcccattatccatagacactgcacaaatttcaatcaagaacaatgtcttcaacgctgttgatggagctgttccagaatccatcaaggtccttgagcttgacagcgaaagaggagtcctatctccaacaaacgacatttccgtcaagagcaataccttatcaagcggaatcaatccatttgagtttaaagtaacaagcgtagccaacaacaattcaatcaatgttccatcaggtggaaacctggctcaaaagcaagttagccaaatccaataccaagatatggaaaccatggctgtaaacgctaagattgagggaagagtgggcaaatactttgtagtcaacttaactgatgatgcaggcaagcctttagcagataagttcatacaaatcggattcaacggtgctgtatatgacagaacaaccgatgaaaagggccaagccaaattgcagatcaaccttggatacaagggaacctacacctttgcagtttgcttccttggtgatgataactacaacggaagctttgttgttgcaaaaatcaaggtaaacactcaaaagactaagcttacaactgcttcaaagacctataaggcaagcgctaagacaaaatccatttccgcaacacttaaggatgcaagtggcaatgcgataagcggcaagaagcttactttctcagtaaacggtaagtcctactcagcaactacaaacgctaagggagtagccaccgtcaaggtaagcctctcaagcaagggaacttacagtttcactgcaaagtatgccggagatgatatgtacgcatcttccacagcaagcggaaagataactataaaataa

SEQ ID NO: 2051 - DNA, 3495 bp, Methanobrevibacter ruminantium
  source 1..3495: mol_type = genomic DNA
atgataaataaaagaataattagtcttagtctgctgattatattggtctttctcattattggattaagtgcagtcagtgctgaagattcttcaaaagctgctgatttggacttgaattctagttcagtttctaatattgatttaagttctaattctgttgctattgaatctaattccaattctattgctagtgaatcaagttctaatattgtcttggataataaatcttcagacactacagatattcaaacagattctgattctagttcagatgataatctaaatcacgattctaatagtaaaatcaaatcagacaattctaaaaaggttcatactataacagaatctaattattcactctattttgattctaacggctatctaaacaattcattagtgtcctctaatgatactattaatttgtctggtaatttttcttcaaagtattttcgcttttcaatacctttgaccattacaagcttagaaaacgatgcattcctaagaaactctccaatcataatcactggagtttccaacgaaaactatgtatatgatgcaattgtctctaacttgaccattgaatcagaccttgctaacatatctgccgtttgggtgattggttcaagcaatataaaggtcttaaacaataatatattcacaacaggtcataacggatatcctatcgctttggatagctttgtatataactgcattcttgcaaacaatacaatcaagacaatagttcctgtcagcgaagcgatgagctcaaaggatatcgatgaggacaatcaaacaaacaattccgacaatagcagttggcagcattcaggaattagcctaagggatgcccattacaatactgtcgttgacaatgacataactgttgaaaactcctatggagtctatctctgttatggggcttccatatcaaactataatgtcattgcaaacaatacaataagggcaacctctgaaactccttcattttggtgttatggtgtttatatcactggaaactacaatctgatatatggaaacgacttctatcacctttatcagggagtccattcaagctatccatataactctatagtttccaataatttctatgacattgacggattggatgacaactatggtgccggcggtgactttggcatatatggaggaaacaacacacttatagcaaacaactccatctataatgccaaattgtataatgcaggaattcttgtaggtacaaattctgaagtttatggaaactacattcaaataaacagctccggagagggaatcagaataggtgataaggaaggaggatcctattcaaaggtctataataatactgtagacttccttgacggtaaaggcatatgcctatacggcgagccaaatagcactcttgtttatgataacattctcaattccatatcttcaattgattcactagacttatcagctgaatctaaaggttctgggctaggaattggtatctattcacattaccaatcaagagccaaaagaccttataacatttctacctgcaacaatacaatatatacttcaaatgactatgcaatagacatttcacagtcttccactaaggcctatacctgctatggaaacctggtctttggaaagggcatcatctatcctatggaagttgtatatgttccagattatggggaaggaaatgtatatgaagtgagcgaagataatttttacacttacttcgactcttccaataagcttagcgataaggtaaaggatggagacagtctcatatttgttggagagttctctcctaagggcaagataaccttaaataaggaagttaatctttttggatacggtgctctcctaaagaataccactgtattcattaacgctccaaactgcagggttcacaatttcacaatcgtcaacaacggcattgatgaatataacctttggggagtctatgtctttgaggcagacaatgcaagcattgtaggaaacaatataagcattttggataagaacacatcctatggaatctatctatgcgattcctatgacaataacgtttcagacaataccatttcctgtcaaggggacaatctggtcttcagccttcttacatatgaggcttatgacacattatttgaaaacaataagatattggctattggaacagatgagctctacccttattatgaaaccatctgtatcgatggcgttcacagtatttcagagctatcaaagacctatggggttattctggattcatcctctagaaaccagttcattcacaatgacattgaggtgacatccacccttgaaggattccatgttccttataatccttcagttaacattctcataggcttatacatctattatgcctcaaactacaataacataagcgaaaacaatgtttatgttcacggacatgatcctttcctttatggagtcggttcatcaggagacgacacaagtaaatcagtgacctatgcttgcgaaaacatattctcacacaataatatcacagttgaaggtgattattttgttatgggaatgattctaaggcataattcaaaggacacaatcgttgattccaatcatttcagattgaattccaataattatacctatggaataacccttgaaatatctgaaggggctaaggtcacaaataatgtcttaaacagcactggaaatgcaggaatctatgcaatggagctttatgcatcaaataataacgatattaaaagcaatgagatttatgcatctgcaagctacagcagcgttgcattatatgcctcaagcaataataatgtgactcataatgtaatcaaaacctatggaaataaggttcaggaacctgctcaaggacctgagcacccagattctgtagatttattcaatacaggaatctcactccagaaattttcaagcggcaacaacatttcagataatattatagaaaccgatggagatgctgcagttgacttcgatgagacttcaacaggtaatacagttggaaacaatgagctttcatctacaaaaggcgggggaaatgctgctgtaaatgacaggacaggaaagaacatggtctatggaaatacaggatcaagatatgttccaaattccaatagttcctcaaactcaaacaatcagaattcaggagagaggaatacagtcccaactaatggcagctcaaaccgatataatgatggcggagaggaatcaggctcaagcgccttcggtcaagttgatttaggccttcttgccactgcaatgtcttcagtaggtgaaggcactggagatgtcggtgaaactggtgacggcgaatctgacttgattgtaagtgagttagaagaggtcgcttccaaatcaatggcaggtggattatctgtacctgtagcagctttattattggttttaatgttctgtttcagcttcttgaatgctaaggacgaggatgatgaaaacgatgatgagaatgaggaataa

SEQ ID NO: 2052 - DNA, 5055 bp, Methanobrevibacter ruminantium
  source 1..5055: mol_type = genomic DNA
atggattttaaaaaagcaatccctctatttgctttattgctattgattttatttattatcggctcttcaagcgcagcttcaagtgatcttagttcaagtcctgccgataatgaaaacttggaaattgatagttttgactcaaatgaggatttaacagttaatacgaatacaaactatattgaaagcggaaataatttggaaattgattataaatctaattctaaagaatctgttaatgcaacaaatgatataaaagaagaaactgttgattacaatgaagatatttcagttgaaaagaataatctaaagtcttctaaattgagttctgtttataaaataacagaatctaactactctaactactttaataaaagtggaaacatcctatctaatgtaaaccctggagatacattagatttttcaggttcattcaacaataaggactttaaaatagatattccattgactgttacaagcagtgacggtgctcaattcattgattgcagcttcaagttcaataagggctctgacggctctaacatatccaatttaaacattaactcttctcgcttacaaagtccgcttatctatttggattctgtcagcaatatgaatgtattcaacaacaatctattttcctgcgcttcaaaatcctatgctctttgctttagcaatgtaagctattcctctgcatatcacaacacccttcagactacagcatttgttgtaggatggggacatccttctgcctttgtcttggctggagcaaataacttaaatatctcctcaaacaatgtgatagtcaacgattccaacggaatctatttcactacatatgttggagacacaattagcgcgaacttaatcaatgaaaataattatatctttaacaataccgttcacagtgtccgaggagttgaatgggcagttgatgaaaatggaaccactcctctcccatcctctttctgctatgcgatacaagtgatgggaagcggtaataaattattgaacaatacggtctacaatgcgtataggggcataagtgcttccggatcaaatagtgtcgttgccggaaatgtggtttatgatattaagggaaattattatagcggaaatacaaaggatgacggcggagactatggaataaatgtaggaccaaattccatagttgaaaacaatacaatatataattcccattttaataaaaactctggagtggccatttctgtaggttcaaatacaactgtaaggtataataacataacaaacatcaatggtacaggggctgatttgtctaaaaacttcatagaatttagccataatcgcattgataatgtttcagataatggaataagagttaaaggccaatatggtaatactaatatttcagataacttcattaattcaacagacagttcaatcactttattgagaagctcaaaggacaaatatccgtccagaatcaatatagaaaataatgatttctatacagatgtctctcctatctattatcttgaagggtatattggcaagctgacagcaaaggacaatactctcaatggttcttccatatcagatattagtattgacgttcctagctctagcgaaactaaggtttctataaattcaactaaaatagatttcaatgaatctgttctaattatgccaactgtcagcgcctatggtctttcacttgaaggccttgtcgatataatagtcaatagccaaaagattgcaactgttcctataggatctaattacactttcactccaactgaagcaggaagttttagcataaacgctaatttcacaggtaatgaagagtataagccatctgaatctgctgttttgattctgactgtgactcctaaggaaactaccacttccataataataagcccaagcactgttgagcttaatgatactgttgtcattagtccttttgttcgctacaatggaactcttttagaaggttttgttgatattcttttagatggtgaaaagttagatactgtagagataggctctgattatagttatgttcctaatagttcaggcagtttctacatcagcgctagcttttctggcggaaatggttatggtgcatctgtttctgatatgctcatccttactgtaaatgagtccagctcaattgaggatccggatgatccaactaatcttacagtctcttcaatccttatcagccctaacactgttgaggttaatgatacagttcttataagtccttttgttcgctgcaatggaactcttttagagggtcttgttgatattcttattgatggtgagaagttagattctgtagttattggctctgattatgcttatgttccttctactgccggcacttttaacattagcgcaagttatgctggtggaaatggatatgagccatctgtttctgatattgttgttcttactgtaaatgaaaagcaaattattgataatggtacagataataatggtacagacaataacggtactgatacaaacggaacaggcactaatggaactgatactaatggtacagacaataatggtactgatacaaacggaacagatactaacggcactgaaaataatggaacagatacagatcaaattaaaataatcataaatgatgacaattactctgattactttgataacggctatccaattgatttagatgttgatggcaattatactctaattatcgactcattaaacaacaaggacataataattccatcaggatttaatataaacatcataggaaaggaaggctctggaacaataaacaacggtacaattcaattaggtgacggcacagatgaggtcggtgatgtaaagatatccaatctgacctttaataattataataaggatgctatagtcataaacgaaattgcttatgatctaactgttgaaaacaataagatcataataaatacagaagccagtcctggaaacctatactttagcgtttatggaatcaatgcaaagggctatgttgattcattggctgtaagagacaacgatattttcctaaacggttctgctccttacttatatggtgttagtttgggaggctacggtgccatagcaaaccctcagaatatattcgttcaaaacaatacaataaatatcaacagcactgcaagtatgggcatggctgagggcatttacttagacaaccctataaatgcagctgttttagacaataaaataaatatagaatcaatcaatgatgtatatgtttacggcatgcagattgcagactctgcattcagcgccataggggaaggaaagaccggtgtcaaatccccatatgacataatgattgaatcaaatgacttgaatcttaaaagcaaatatatggtttatggaataaccattcttgattatggctgtgacggcagcttgaatgaattaggtcagccaatgaccaatatgatggacttggacactacaatccaaaacaacaatctcgttgccgattctgaaaaggcagttatgggaatcgttggaaagacctacaatatgtctgttttatgtaacaatctgtctgtaattggaggatccattgaaggagttgcatcccatgatgcattaggagttgataattatgctcttggagtccaatactctggaaaggattatactgttcttgtaaaggacaatacagttagcacaaatgttttagctgagtatttaaacaataaagactatgaagcctatgtttcatttgttaacaatacaatatatcatattgatggcccatctagtggaaatgatactccagagaatggcactggtgataatggcactaatactaatggaacagatattaacggtacagacactaacggaactgacaacaatggcactaataatggtactaatggcactaatggtacagataccaacaatacagacaatataactaaaagaacagttaaagatctacaggaacttatagataatgcaactagtggttctgtagttgatttaggcaactttgaatatcttgacgtatctaacattgatataagcaaggatatttctattgtaggaaacaatacagtcatcagaactgcaggtgacggcaagccagtcttcaatattaaggaaggactttcctcagtttcaataagcggaatagaattcatggcaaataatggagatgtacttatcagagctaaagcagtcaattcaactagcagattggctatagaaacccctgaaattaatataataaataatactgtaatcaagtcagatgatggtgttgtagccgaatcagtcactgttcttgaattggattcttctagatgcatacttgctccaacaaatgatatcaaggtctcaaacaacacattggaaattggaatgaatccatttaactttgttgtggaaagcgtcattaacgctgctgatgttaatgttccagtagggggagaccttcaaagcaaagtcaaatccgtaattcattatgaggatatggataccgttgccgttgcaaaggctgatggaagggtaggaaaatactttgaggttaatctgactgacagtgatggaaatccattatctggcaaattcgtacagataggattcaacggtgcagtctataatagaaccacaaacgaaacaggtggtgtaagattgcagataaaccttggatacaagggaacctatacatttgcaataagctatcttggggatgagaattacaatggaagctttgtcgttgcaaaaatcaaggtaagcacacagaatacaaagatcactagctcatcaaagacttataaggcaagcgcaaagaccaagactcttactgcaacacttaagtcctcagttaacggcaatcttataagcggaaagaagctgactttcacagtgaatggcaaatcatacacagcaactaccaattcaaagggagtcgctagcgtaaaggtcagcctttcaagcaagaaaacttatagcttcactgtaaaatatgcaggagatgatacatactcatcttccagtgcaagcggtaaacttactataaaataa

SEQ ID NO: 2053 - DNA, 8907 bp, Methanobrevibacter ruminantium
  source 1..8907: mol_type = genomic DNA
atgaagcttaaaaagttttcagtcattttagcggtattgcttgtagcaatacttgctattggggctgtaagtgcagaatcagtctctgatactgatgtagctgctgtagctgctgtagatgatacagcaggcacagtatctgtagacgattctatagatgatgtttccgtagacactacggataatgatgttaaaaacagtctgagtgctgttgcccttgaagatggggagagtgtgagctatgaaatcaacgacacttcttattccacatacttcaaagacgatggtactgcaactgatgaattaagtgaaatgggtggctataccttaaatataggaacccttactaataaagacattcagataatatctggttctgatattaatattactgcaaaggatggtgaaggattcattaacaatggtaccatcattcttggtggtgatgaattccctggtagcataattgtatctggattgacttttaccaataccaataaagacgctattcaagttttagattatactactgatgtcagtatctatgataacaatatgaatattataggaattagctctttatcatctgatcctaatttcagtgtttatggtgtaagtgccaatgggtttatttcaggattatatattgaaaataacaccatgtctgttgaaggagatgcgctttcatatggtattgaagtaggagcatattctgatggggcttacgctctttcaaaccctcaagatattttaatatctggcaatactattgatgtatctacttccggagcaatggctgagcctatgtatttatctgatgtttgggatgtaacagttgtaaataactttgttacagcagaatcagttaatgctccagcttatggtattcaagtagccgattctgcaatgtgggcaagttatatggatccaaattatgatggtgatttatcttctcctaataatgtactcatcgatggcaatacatttattttaaacagtgactttatgatttatggtatcactacaataaattatggttgggatggtatagagatggaatcttatgctttgcctttaaacataaccgtttctaacaataatgtttatgccaactctaaaaaaggtgttatgggcattgcaggtcaaatatataaccttactgtaatagataacactgttattgctataggaggttctgctgaaggtttgtatactggtgaccttttaggcaacggtacttatgcattatatattgattatgatggcaattatgctgaagatacttactatgttgttgttaaagacaatgatgttttcacaaatgtcactaaggaatatgcattcaataatgattatgaaagagtaattttcgaaaacaatgaagacttaaagactttcgtaattgatgatgaaacttattccatcttcttcaacgatgatggaaccagtgatgtattagaggacatggaagattacactttaatgatcggtcctttaaacaacaaagacattgtactcgattcaggttctgaaattgtcattcttggtcttgatgaaggttacatcaataatggtaccattgtccttgatggtgtttcagatgtctatgtttctgacttggtctttgtaaatgtcaataaggatgcattttatattggagatgaatcaaatgaaattgtaattgtagacaatgctattgttcttgtaggtaaggctgccgaatcaactaatccttatttcagtctttacgcaatatctgctaatggatatgtcactggattaaatattacagacaattctatctatattacaggggatgcaccttattcctatggtatttctttaagtgcatatgcagctgagtttaaccctgaagatattacaatttataataacactattgaaatgagtctttcagaaggatcaagtatggctgaggctatttacttagattgtccttcagatgcaactattgaagaaaacaatattaccatagaaactgtaggaaatacttttgcttatggtattcaagttgcagacacacttcctgccgcatatgaatatgctagttatagaggtgaattaacctcacctgaattagtgactatcaaaggcaataccttaaacataagcagcgaatatatgatttatggtattaccgtacttagtgaaggtgctttagtaaacggatctggagatttagcactttgtcaatttgagttattcttaaatgtcagtgaaaatacaatctatgctgattccaccaaaggtgttatcggccttgcaggtaaggtttacaatattaccatgaataataatgatttatatgtcactggcggagatgcttcagatgtattttcctatgatgacttaggtgtaggaacctatgctgtcggcattaaatataatggcgattcagaagacggtaactactatgccgatgtgtttgagaacaatatctttacaaatgtatctgctgaatatataaacgatgaaactgtattagacgaatatgtattctttaataatttcatcccattagacttaggaattgtcttagaagctgataaagacgctcttgaaataggagacctaatcaattacacaatcactgtagtaaacaacggtccaaatgctgcttctgatgtatatgtttcctttgagctcagtgatattcttttacttgtaactgctcctgaagaatatgatgctgaatttgaactcttaaatgtttcagatttagctgtcggtcaagaaaaagtatacaatattgtagctcaagtaatcgatggaggatatctcttatctacagcttatgtggattgttatgaagatgatacctatatggataacaatactgcaagtcttgatatgattgcagttcctatagttattgatgatagcaattatgctaattacttcaatgaaaacggatacttaaaagatgacgtaattgctactggcacagttgtattgtttggtaatttaaccaataaagacttgtttattaatgctcctttacttatttctgattgtaaagacactaaattagtaaacactaccattgctcttgttgaaggtgcagacggtacattgatttcaggtttagtctttgattacactgctaaagacagcggatttgctatcatttctgtaaatgatggtgttagcgatgttttaatcagatctaacaatattactgttacagatattcctgattatgtcactgccgttgctattggagtttacggagcagtaaacggctctgaagacatcactattgaggataatttcattaacatgactggtggcaatgcttacacctatggtattaacgtacaaaactatgatcaaggttgggttccaggcgaaggtgcttccggtgttgagattctagagaataccatcatcttaagtggaactggaatggaagaagcgattttcttatctggtcttgaagatgtatatgtatataaaaacacaattgtttccgcttctttcggcgaaaatactggttgtgatgcttatggaattgctgcagctaatgtaagcgaattaataattgaagaaaatcaaatgggtgtaggatcaaatcaaatggcatttggaatagctatcactactaaatctaatgatgttgatgtcttcaataacagcattgatgttgaaggtacaggtgctattggcgttggcgttcaagatagtactgatgtatccgttacattcaataccatttgtgcctatggtgatgacttcaccagcattcaaacttacgacagtttaggaactgcaaatgcagctatcctagatgagactggagaagcactcatagaaaacaataccatttatgaatatttccctataaccattagcgatgacaactatgctacttacttcgatgaaagcggcaagattaaaaatgattccggcattgcaggtggcgatttaatcttcttagacgaattaaccaataaggcattaactatagacattcctttaaccattaaaggtgttccactcaacgcattggtcaacactacaattacccttttagctgatgcaagcggttcaaccgtcaccaaattaaatatggaattcactggtgatgaaaacaccggatctgtaggaattatctatgtccttggtgcaagcgatgttgaaattactgataatgtcattattgtccctgcctttgtagataagactggcgctaaatacggttccagcttatacgctattgaagttgaaagcggtgcagacggatgcagttatatagacatttcagacaacgtaattgacattataggttctgcaagatacctttacggtattgacgtattccaaacctggggcagcgaaaacaaaaacagctatgtggctatttgtgataacttcataagtgttgtaggtgcttccagaatgtctgaaggaatttatgcaagtggtgttgacgaattagaaatcttaaacaacacaatcacttcagtaggtcaagctgctgcatacggtatcggaactgacaccttaacagactccattatctcagataacggaatggaagtaaatgcaggaacccaagcttatggaattaccaacacctacagcgatggtgtggaaatcacagcaaacgtcatcagctccactggtgaaggtgcaatcggtattggaacaaacagtgaagatgtaaccattgctaaaaaccaaatcacaatcaacggtaatgattacactacaatcacttcagcagacactttaggaactgataatgcagctatcctagatacaactggagaagcaacaattgaaaacaacacaatcactgaaaattgtccaataacaatcaatgacggcaactatgctacttacttcgatgaaaacggcagtcttaaaaataattccggcattgcagatggagatttaatcttcttcggtgaattaagcaataagaaattcaatatcgataattacttaatcattaaaggtgctaacaacaataaattagtaaacactacaatcgctcttactgctggcgcaagcggttccactttaagcagattaaatatggaattcactggcgacaacactacaggctctgtaggacttatctatgtcttaggcgcaagcgatattgaaatcagccaaaacacaattaccgtaattgactttgtagataaggcaggagctaaatatggttccagcttatacgctattgaagttgaaagcggtgaaaacggatgcagtttcatagacatttcaaacaacataattgacattacaggttctgcaagatacctttacggtattgacgtattccaaacctggcaagctcctatgagaaacagcgacattgcaattacaaataactttatcatgatcgaccctgcaagcagaatgtctgaaggaatttatgcaagcggaattgataatgcaattattgcaaacaacactattatctctgaaagcgatgctgctgcatacggaatcggaactgacagtttagccaattccacaattgctgacaatgtcgttagagcagctgcagcaactcaagcatacggaattaccaacacctatagcacaaatgtggatattgtaaacaacactgtcaatgctgaaggtataggtgctgtcggtataggattcatgggctctgaaggtgtaactgttgctgacaatcttattgcaatcactggtggagactacacttcaatcacttcatcagacagcttaggaactgcaaacgcagctatattggataaagacaacaaaggaactatctcctacaataatgtgactgaaaacattccagtaaccattaacgacggcaattatgacaattacttcaatgaagatggttacataagaaatgattcaggatttaatgatggcgatttagtcttctttgaaaaattaagcaataagaacatagttcttgatatgcctttaaccgttaaaggtgctcctggaaataaattggtcaacactacaatcactgtcttagatgatgcaagcggatctaccattacctgcttagatatggaattcactggtgatgagaacacaggttctgtaggaatcatctatgtccttggcgcaagtgatgttgaaatcagctacaacaatattaccgtacctaatttcgtagataagactggcgctaaatacggttccagcttatacgctattgaagttgaaagcggtcaagacggatgcagttatgtagacatttcaaacaacataattgacattacaggttctgcaagatacctttacggtattgacgtattccaaacctggcaagctcctaacaaaaacagttacatagctattgctgataatgaaatcagcattcaaagtgcttccagaatgtctgaaggaatctatgcaagcggaatagagtttgcagaaatttcaaacaacataattaattcagttggcgaagcagctgcatacggaatcggaactgatactttatccaattccataattgaagacaatgacattgttgttttagctggaactcaagcttatggtgttaccagcacttacagtgacactgtaaacctaacaggaaataacatttccgcagttggtgtcggcgctatcggagttggctcaaacagcgataatgtaaatatcgataaaaacgaaatcagcattttaggtcaagactacactgcaatcacttcagcagacagtttaggaactggaaatgcagctatcttagataagggaactaaaactacaattggaaacaacacaattgaagaagttgctcctataatcattgaagacaacagctatgacaaatacttcgatgaaaacggacaaattaaagaggatgctcctataggctctggagacgtagtctatatgggtgtattaaccggcaaagatatggtatttgacattcctgtagcaatcctacctgcagataacagcaaattaaccgattccaccattaaagttgtggaaggtgctgatggtactacaatcaatggtttggacattgaatatactggagatgaaaacactggctctaagaacattattaatgtagttggcgcaagcgatgtaaccatttccaacaacaacataatagttccagactttgttaacaaggcaggatccaaatatggttcctctgttgcagctattgcagttgaaagcggtgcagcaggcactgacaatactacaatcacaggcaacaacattgaagtaaacggttctgcaaactatctctatggcattgacgcattcactacatggggagctaataccactaactctaacctaaagattgaaaacaacaacgtttccgtaaatggcggagcccgcatggctgaagcagtctatgtaagtgactctaagaatgtaacaattgataataatgatgtggaagcttcatctgaagcagctgcttatggtattgctaccgatcaattgtcccatgctaaaatcactgacaacgatgttgcagtccttgctggaaccactggatacggaattaccgctacaacctctggagaagatgtcttaatcgaatccaatgatgttgaagttttaggtatgagcgctatcggtgtaggattatccaaccaagacgctgcaattgtcaaagacaatacaattgacattatcggtggagattacagttcagtcacttccgctgataatttaggaactgctaatgcagctatcttagataaagacaacaagaacactaaccttgtagtagaaaacaacaccatgaccgaaaacggcaaagcagtcaacactacccacagcggtaacagctctgcagagcttcaagcaatcattgatgcagctcctgctggctccactgttgacttagatggcgtactctatgccgatatcagcaatgttgtaatcgacaagaacttaaccattaccaacggtaccattgtaggtaaagctggagaagcaatctttgttattcctgctaaatccgaaaacggtcctgatgaagtaaacatcaatggcatggaattccttgtaaatgatgcaactgtaattgctaaggcaactgctgataatggaaccactcctacttccattgacactcctgcaatcagcatcaagaacaataccatagacatggcaaatgacgatgtcgttcctgagtctgtaaccgtattagaacttgacagcgaaagaggagttcttgctcctaccagcgaaattgcagtggaaggaaacacaattgctacaggtgtcgatccattcgaattcaaagttactggtgtcgctgacgatagcggaaacgtagttgttgaaaaaggcggaaacattccagctaaacaggcttctgtaatccactatcaagacatggaaacaactgctgttaactctaagattgaaggaagagtgggcaaatacttcgaagtcaacttaaccgatacaaacggcaatccattagcaaataaatttgtccaaataggtttcaacggtgtagtatataacagaacaacaaacgagaccggtggagtaaaacttcaaataaacctcggatacaaaggaacttacacctttgctatctcctaccttggagatgactactacaacggtagctttgttgtatctaagatcaaggtaagcacacaaaacaccaagcttactactgctgctaagacctataaggcaagtgctaagacaaaaacattaactgcaacactcaagtcaagcgtgtacaacaaaccaattaacggcaagaaagtaactttcacagtaaacggcaaatcctactcagcaactacaaacgctaaaggtgtagcaactgttaaagtaagcctttcaaccaagaagacatacagtttcacagctaaattcgctggagacgatatgtacaccaaatcaagtgttacaggtaaggtaactataaaatag

SEQ ID NO: 2054 - DNA, 534 bp, Methanobrevibacter ruminantium
  source 1..534: mol_type = genomic DNA
atggaaattattgaattgattgctatcattattctagtggcagccattgtatttttaatctattattattttcagactgtcaatggaggcagttttgatatagatgatttaaaggatcatctcaccatttctaaaagggaagcagccactgccaccgttaatctggatgatgatgaagcggaagaaaaagtttctgtaggtaaaaagattaaatatacctttaaggacattgataaatcttattctaacactacagatgcattttccaaaagattagatgcatttttagatgaaagaagtgaagaattaatcgaaaattggtctttagtaaccactgatgacttggaaagtttggaaaaacgttgcgttactgcttgtgacagcattgatgacttagagaaaagattcagtgaatacagcaatgtaaccaatgaaaaacttgaagaccttgataaacgtattaaggcacttgaagaagattctgaacttctagaagaggacgctgaaactatagaaaaagaagcagatgaataa

SEQ ID NO: 2055 - DNA, 405 bp, Methanobrevibacter ruminantium
  source 1..405: mol_type = genomic DNA
atggctaatgaaattataccaagtgaaattttcattcttattttagtggtcatattggcttttgtagtcattatcattgcattgcaatggaaaaaggtacgccaatctgacaatactttaaaattgatggaaaaagagattgagcttaaaaagattgcgatggttgaaaaggaccttgaaaataaacgtttgatggaaaatcctatttctttacctagcgaacagcaagagcagcttactcaaatcagagattccactgctaaagtcatgagcgatgtaggctatttgcatagtgaaatcaatgaacgtttagcacgtcttgaagctcaaaccgaacttaaaaaattagaaaaaatgcttgcagaaattgaagataaagagaaaaaactcaataagggcaaataa

SEQ ID NO: 2056 - DNA, 930 bp, Methanobrevibacter ruminantium
  source 1..930: mol_type = genomic DNA
atggtagatgaaattaaatcttatgaagaagctggaaaaattgtatccaaagtcagaagcgatgcatcaaaaatgatagaaaacggacttccaattcttgaccttgtagagtttgtagaaagcgaaatattaaagtcaggggcaggaatagcattcccatgcaatgtttcaataaatgaaataaccgctcactacacctctccagcaggagatacaaacaagatggtaaccggagaccttgtaaagctggacttgggagctgaagtcaatggctacattgcagactctgcagttacaatcatggttccaggagacaacttagaagagctctttgatgaggacactctagaaaagaatcaaagaatcatagatgcctcagcagcagggcttgaagctgcaataagcactgtaagggctggagttaaagtatgtgatgtgggaagagctgtagaagaggcaatagctgaatatggtctcaatccagttagaaaccttacagggcacagtcttgaacattggaatctccatgcaggaatttccgtgcctaactatgacaacaacgatccaaccatacttgaagaaggccaagcagttgcaatcgagccttttgcaacagatggtgaaggaatagttaatgactgtccttatgcttatatcttttcatttatgcaaagcaagcctttcaggatgaaaaacactcaaagaatgcttaatcatattgaaaagaactatagatacttgcctttcagtggacgctggcttacagaaagctttaatgagcgtagagtaaatacaggacttaagcaattaggagatgctatggcgatttatccttatgccgctcttaaagagagaactggagcttgggtgtcccaaaaggaacatactatgattgttgaaagtgatggttgtaaaataaccacactttaa

SEQ ID NO: 2057 - DNA, 4416 bp, Methanobrevibacter ruminantium
  source 1..4416: mol_type = genomic DNA
atgaaagtatataaaatgattttaatatccttaattttagttatcttaagcatttcttgtgtaagtgctaatgatttaactaatgatgctattcaaggcgatttaagtgatattgattattcttttactattgatgacgatttaagcaattctgataattcattagatgtttctagtgatttaaaagaaaacagttgtcttgatgaaatcgatttggataaggaatctaaccaaaatactacaaaaatattaagttcaaaccaattagactctaatttattggattcaaaccaattagaatctgatcaattgagttcaaaccaattagattctagtttactcaattcaaaccaattaaacttatcaaatacatacacagtctcccaatcaacttattcaaaatactttgataagaatggctatgtgaagacatctgtagtggctccatatgatactatagacctgtcaggcaatataatatctaaaaacttcatatttactattccatgccatataacaagctccaataatgcaaagctcacaaactgtatgattaagtttgaaaacatgactgctgacggccgttcaagtgtctcaaacctatacataagaaacagcgtcgaatggtgtcctggagtctttttagaaggatccacaaatgtggatgtctatggcaatgacatttattgtacaggggctaacggaaaccctgtccgtgtgatatactccaattattcaaacatatttggaaacaagcttgagacatactttacaggctatatgaacctttcatggaaacgtgcaggtatccttcttggagactctcactacaataacatcttttcaaacgatgtaaccataaaggactcaaatcctatctaccttacaacatacggatttgaaaagtccaatcataatacaatatacaataatactgtaagatcatctgcaatcagtgaagatagcggtttatcaaacccttcggcatgggcttatggaatacatctgatgggagattataacattgctctcaataatacgattcataatgtatataggggaatagattctgaaggaagcttcaatatccttgctggaaacataattttcaaccttacaggaggatatttcgaaggaaatgacggaacagaaggtggagactatggaattcacgcatcctatgacaatatcgttgcaaacaatacaatattcaacagcaagcttacaggctctgcaatctatctgatgcctaataatactgcctatggaaatattgtctataatataagcggccataacggccttgaattcaattattatgccgataactgtaaggtatacaataacatcattgacgtgcctgttgaaagcccgatttatgtattcggacgtatgaacaatctgctcattgaaaacaacattctaacaagtgtagattcatcaagcatccttgtaaagaagcaatccaattcaaaataccctaccgatgtcacaataagaaacaatcttatcatgggatattcaaagaccttcaatcaaagcccgattgactatagccaaatcaaaagcgatgcaaacattatctcattcaataattcaattgctgtctataatgacacatactttaattatttcgctgaaataggaaatgtaagggattattcagattggatagacttaaataacaccataaattattcagactcttataattacaatgcattggtctttgtaggaaacttttccagcataacagacaatataacaaaaacagattatataattcctttaaaggatattgtaaatagcagaatctcagatgtctatagaaatgttccttataatgagtataaatcaatgatggaaactttaaatgaaatctatactgatattgtatttaatgggccatctcctgtagatttaagaggagtagattctggaggcaattcctcagattccaatcaaactcctatggatggaaacggcagtatgaatgaatcatctgataatggttcagataattctaccaatagcagtttagacaatctggatgatgaggtaaaggattcctatgagaatttgattgataatatcaattcaactgaaaatgcgtcagatgtttatgtcataaatgacgctaattatgctctttatttcaatgaagacggtagttttagagatgatttccctattgagtttggaaatacacttagatttgctaatcttacaaataaaatgtttaaaatagacattcctttaaagattatttcagatagcgaagactctagtttgctaaattgctttatttccttggaaggtgaaagctctaatactattatttctaatttaaaatttgaattagataatttaagttcaaatatagactttatttctataaaggatggagttagtaatgttttgatttataataatacttttaaattagatattgattcctctgattctttaatagattctcctttatctgatgatgcttccttatctgcaataaggctctacggtagcgattacatttcccgaaatattttcatagaaaacaatattattgacttcaaatctaattttggccaattatatggaatatacttatctaataagatggattatttaaattcaaaaaccaatccaagcggatttattataagaaataatgtcttctcgattgattctaatggattaataaacgcaatctattcagattctgttaaaaatttactattggagaataatttatttaatttaagctcaaatggcaatttagaggattcttcattaatttatggcttagatctagttaaagtagataatttgaccatgataaacaatcaattttcaataaattccacttatttggcttgtggaatcaattcaagcgatagttctggatttaatttatctaataatcaattttcagttgattcagcttatttagcttatggcttgaatttaaaaaatacaaataattttaatttacataataatgatttttatatagattcaggcagtttcgctcatgctttagacttggatgattgcaataacttcaatattgcaaataaccttatcaatgcaagcggagcagatattaaaagaaatctaaatgcttccaatttagctgtattcatccaagatgacttaaatgataatgtcttaaagaacggatatttatacatctctgaactaaatgggtccttaaagggcaatggattatatgaaaatgattttaagtctcctattgtccatactgataattctacacgtgaccttcaaaacttaatagactttgcagttgaaggagatacagttgagctaggaaatatggtatttgctgacttggatacaattaatatttataaaaaccttacaataaatggaggaatatttgtatctggcaattggaggcctttattccacattttgcctaatgatgagttattgaatcactcatcctctgattcatacaattcttatcgttcatttgattatttaaacattcaaaatggagcttattaccttgataatgctgatttactgatattggcagaggcatgcaatggaacagacagtctttcaatccaggttccaagcttaaacatatgtgataatgagttcatgcttttagatgattctacagtggctgaatcaataaatatcttaaagctcctatcatctagagctatattggcgcctacaaatgacatatccattgaaaacaatatattagtcagcggaatgaatccgtttgtatttgaagtaagctctataatgaccggttcagatattgatattgctcatggaccattgaatcctaaaaaagcctctaagataatatttgaagatatggttacaacagccttcgattccaatgtagaaggaaggataggaaaatactttgaagtgacattaaaggatgagaatggaaatgctttatccaataaagcaattcaaataggatttaatggaagaatatataataggaccacagatgagaacggatctgcaagtcttcaaatcaatctggcctataagggaacttatacattcgctatctcatttttaggtgatgaatattataatggctcatttgaagtggctaagataactgttaaaaagcagactcctaagcttgatgtttccaatgtcacttataagtcaagcgctaagtctaaaacatggactgctaaattgactacaagctatggatccttattaaaaaataagaaggtctatatcaccatagatggaaagacttatacaacacgcacaaattctaagggaattgctagtttaaaggtaagtttatccactaaaaagacttataagtttactgttaagtttgagggtgatgatacttataattctcttactaaaactgctaaattgactattaaatag

SEQ ID NO: 2058 - DNA, 885 bp, Methanobrevibacter ruminantium
  source 1..885: mol_type = genomic DNA
atgaatgaaaaaaatgagtccgcctttcctatacgatgtgatcccgaggatgaaatatttgttaaatgcatgtctcgaattaaagagtttccccaatatatcacaggatacgatgatatagaaggaccatatgaaagccgctttatctcttcaggatacagaaacttaaatcttgattccgtaaggataagatcagataaaagcagcataaatatagagcatcacagctcaataagccaagaggcaatgagaagaaattacgaatatgctgtaaatgtctttaatgctactggacaagcagtttatccttttatcttttacactggcgacttgcccgttgataaaataacttacatgaaccagttaaattattttcatccccaatggtttatattaaaggaaaaggatggcatgaaaagattaaataatattaaatataaaactgataatgatatagatatgcacatttttgaatttttagattacatttggcttccaaaattcaagttagaaataacaattgaggaatgcatcagggaacttgttaaattgtataacaagctttctgctgacgaatttatcttaaatttcactaaagaatgtcttgcattatgggttggaagatatataaaagaccaagatgaattaaaatacatggctaggtgtttaaatatgtccaaaatagaagaaagaccttttgaagaatcactgagaggagtaatcttcgcaagaaaactagaagaagccgaagaaaaaggtgtggaaaaaaatagaatagattttatcactaaagctttaaaacaaatgagtcctcaagaagtttccgatttgtttgatattcctatagactcaatacttagtgttcaaaatcaatattcaaaataa

SEQ ID NO: 2059 - DNA, 846 bp, Methanobrevibacter ruminantium
  source 1..846: mol_type = genomic DNA
atggcattcggtacatataaagacgtagtatcagcaagagctactgataaagcaatccaaaaagtcgcacaagatggtggaatcgtaaccgcattattaacttacgctttagaagaaaacattattgaaggagcaattgttgctggaaacactgaagatccatggaaacctgaacctaccattgcaatgactccagaagaaatcattgcagcagcaggtaccaaatataccttctctccaaacgcaatcagactcaaagaagctgtaagacaatacggtcttgaaaaaataggaactgtaggaactccttgtcaaattatgggacttagaaaaatgcaatcctatccatttgctaccagattcgtagcagataagcttgcattgattataggtattttctgtatggaaaacttcccaagagattccttaaagaccttcattgaaggtaagatgaattcctccttagaaggcgtaaacaagatggatattggaaaaggaaaattctggattactgacgttgaaggcgaatccggacttccattaaaagaaacccacggatatgaacaagctggatgtaacatctgtctcgactatgttgcagaattagctgatgtatctactggatctgtaggttctcctgatggatggtccactgtattcaccagaaccgacagtggtgcagacatctttaccgcagctgtagaagctggagtaatcgaaaccaaaccaatggatgatgtaaaacctggtttagaattactcgaaaaattagctaacggtaagaaagacaaaggtagaaaagaaattgaaagaagagttaacatgggactcccaagtcctttctaa

SEQ ID NO: 2060 - DNA, 960 bp, Methanobrevibacter ruminantium
  source 1..960: mol_type = genomic DNA
atgcttgcaagaattaaaaacagcattagaaaatttttaggacttgaagctaaaccggacgcagaagatgatgaagcaaaagctgagactcaagacaaattaaaacaagagattaaaaaggaagttgaagctcaatcaaagccagcagaagaggctaagaaagaggctgacgctaaagctgaagaagaagctcaagctaaaaaagaagcagaatcatctaaagcattaaaagaatcttcaactcaggaggttgaaaaagtggctgacaaaccaaaaataggatatattcacatgagtgggtgtactggagacggtatgtctttaactgaaaattacgacattctctcaaccttactcactgatatggtggacatcgtttacggaacaactttagtagacttatgggaaatgcctgaaatggatttggcattagtcgaagggtctgtctgtttacaagatgaacacagtgtaaaagaacttatggaagtaagagaaaaagcaggattagtttgcgcatttggatcttgtgcaatgactggttgtttcaccagatatgcacgtggtggacaattagcacaacctaaacacgaatcttttgtaccaatttctgacttggtaaaagtagattgtgctattcctggatgcccagcatccccagaaattattgcaaaagtagttgttgcattaatcaacggtgacatggattacttacaacctatgttagacatggcagcatgcaacttagcttgtggctgtgacttacagaccaacgtagtaagtaaggcattatgttgtggttgtggaacttgtgtattagcatgtccaaccagagctcttgaaatggtagaaggtagaccatcacacaataaaaacagatgtattaaatgtggcgcatgtactactcactgtccaagaacctggttccctgctgaacaaattaaaaaggacttaggattatag

SEQ ID NO: 2061 - DNA, 474 bp, Methanobrevibacter ruminantium
  source 1..474: mol_type = genomic DNA
atgccttatgatgcaggaagattagttgtaggatgcggaaacgtcttatttaaagatgacggattcggtccaatggttatacatgctttagaagattactttaaggaaaacaatcttgaaatgcctaaagatacccagttcattgatgcgggaaccggagccacacatttcatattttcaatgcctgacgacaattggaagaaggtcattgtagtggatgttgtggaatggaacgcagaacctggaacactaaagatcttcagtccttatgacatgcctaaaggaaagtatgaaaacgctcatacctggcctgtagaggaacctctccacgatttggtggatatgggtatagaagttgtaatcgtcggatgtaaaccaaaagaaatcactgcaccagatgtagatatgggcttaacagagccagtggaggcagcaattcctaaagctattgaaatgatattaaatgaactttaa

SEQ ID NO: 2062 - DNA, 1158 bp, Methanobrevibacter ruminantium
  source 1..1158: mol_type = genomic DNA
atggaaattgacgatgaagggatagttaccaaaggtagatactttagtatcacacctgtcagaggcttagagaaaatggttacaggtaaagcacctgagactgcaccagttctttgtcaaagaatctgtggggtatgtccaattcctcacacattagcatctgtcgaagcgatggatgactcccttgacattgaaattccaaaagcagctgcattgttaagagaattaacaatttctgcttctaacttaaacagtcacgctattcaccatttcttggttgctcctgattttgtaccagaagatcttttcaagactgcagtagacagtgttggaaccattaggaaaaacgcacagtatgttgtagatatggtagctggtgaaggtattcacccatctgatgtaagaatcggcggtatggcaagaaacatttccgaacttgctcgtaagaaattatacgccagactcaaagcattagtccctgtagtggacaaccatgttgaattgatgactaacttaatccttgaaaaggacattcctgaaggattaggtgtaattgacgctcctgtatttgcaagtgatgtagtatacggtaaaagagacttctttgaccttgacagatttactgaaatcgtacctgaagcttggtatgacgaccctgaagtcggtaaaagggcatgtaccaccatcccattatacgatggcgtaaatgttgaaaccggtccaagggcaagagtagacaagttccaaggttacaaagaaagaggtgttgtagcacaacacttatcaagagctcgtgaaatgaaaacttacctttccagagctattgctatcttagatgaattagatactgctgctaatacccttgcagatttcgatccaagaggtaccaacaagttaggtattggtgtaatcgaagcaccaaggggaactgacgttcacatggcacaagtaaaagacggaaaaaccgctttctacagtgcattagtaccaacaacttggaacatcccaaccatgggtcctgcaactgaaggattccaccacgaatggggacctcacgttatcagagcttacgacccatgtttatcttgtgcaactcacgtaatggtagttgacgatgaagataaatctgtagtcgaaaataaaatggtgagaatttaa

SEQ ID NO: 2063 - DNA, 555 bp, Methanobrevibacter ruminantium
  source 1..555: mol_type = genomic DNA
atggacaactccaatattataatctcagtaattatagtattatgtattgcagcaggagtaactgcatatggtataagtgagggtgataatgcagtcttcagtgatttaactggattttcaccatctagtactgattctggagatactggaataggaaatactactggaaacaattctcaaggcggcggaataaccgcaggtcaaactaatgtggctaccaacactggcggcagctcaagcggtggctcaagtggttcaggcagttcaggaagtggttccggaagcggttctggatcatctggctctggcggaagttcctctggaaatggcggaggaaatactaacccaagcccaagtcctagcaaaataagcgcagcccaagctaaaaacatagcagctggcgcaattgccgaagaaggcgcttatatcagcagcgtatcagatactggatcagcctatgtctgttatatttctaatgcagaaggtactaatgtaggttacattactgtatcatacggtggagcaattattgaaggtgccggaggcgcaccttaa

SEQ ID NO: 2064 - DNA, 603 bp, Methanobrevibacter ruminantium
  source 1..603: mol_type = genomic DNA
atggataattcaagcattcttatatccgtaatcatcgttttatgtattgcagcaggagtaactgcctatggacttacaaatgacagcaatactgtatttaatgacctctctggatttactcctgacgaatctggagataccggtataggaaacaataccacaggaggaaacggaaattcaggtagtggaataactgcaggaacaacagactctggaagtggaactggttcaagcggcactggtaccggctcaagcagcagttcaagctcaagctcaagttcaagttcaagttcatcaagtagttctaatactcagcaaaaggcttggaaacctaaagtcagtccagaaaaagcaaaagcactcgcaacaagtgcagcaagaaactcaggatggcctggagcatattgttacagtgcaacatataattctggcggatattatgtctgtcttttaaaagatgatgctggaaacactggttatgcgcatatcggttctggaacaggcagattcttggaaggatcctggagcaaacaagtaactaaagagcctaatgaagtggaagacgattataaagaaaatgaaacttccaatattactgaataa

SEQ ID NO: 2065 - DNA, 1194 bp, Methanobrevibacter ruminantium
  source 1..1194: mol_type = genomic DNA
atgttagttaatgcagatttacatattcacagctgtttttccatggccacatctaaagacatgctgatagagaacattgctccaaaatcccttgaaaagggcttgaaacttgttggaactggagacgcattccatcctaaatggttggatatcattaggcaaagcacagaatataagggagatggaatatactcaagaggggactgtgactttgtccttacaactgaggtggaaggcaagcataaggtacaccatgtgattatcattccagatttggatattgctcatgagctctctgctaagttagtgtcctctaataagtttatagatggcagacctaagactccacttgggggagctgagttattggagcttgttcgtgaatatgactgcatgataggacctgcccactcatttactccctggactggaatgtataagtattacgatagcatttacgactgttatgataaaaggcctgattttgttgaattaggactttctgcagatactgatatggctgattgcataaaggaattgtctgattttgtatttttatccaattctgatgcacattctccttggcctcataggttaggaagggagtttaatcagatagagatggatgatgtttccttttcatcactaaagaaggcatttaagcacaagactgtaaaagcaaattatggaatgcttcctaatttgggaaaataccatatgactgcatgcaccaaatgttataagcttgttgatcctatcattgctaaggagaataagatgatatgctcttgtggcggtcggataaagaaaggggttgactataggataagcgagatagcagactttagccagccaaagcatccgagccataggccaccttatgttcatcttatgcctcttggagagctgatcagtatggtttatgataaaggggttacaaccaagactgttcagggaatctggcaaaagatggtggataactttggtccggagattgatgtattgattaagactccccttgatgagatagaaaaaatagatagtgatgtttcccttgccattcaaggatttagagaaaaaactcttaatataactccaggtggtggaggaaagtatggggaaatctcatttagtgaggattttaataaaactgagaaaaaagagagtgtgaccactttagatagttttttttag

SEQ ID NO: 2066 - DNA, 564 bp, Methanobrevibacter ruminantium
  source 1..564: mol_type = genomic DNA
atgagcaaaaaaagatgtccatgggcagaagatgtagaggaaatctatgtgaaataccatgatgaggagtggggagttcccacctatgacgatagggagctctttgaaatgctcgtgcttgaatcatttcaggcaggactttcatggataaccattcttaaaaaaagagataactttaaagaggcatttgataattttgatgtagttaaagtaagtgaatatgacgatgcaaaggtagaggagcttagaaacaatgcaggaatcattaggcataagggaaagatcaattctgccataaacaatgcaaatgtctttattgaaattcaaaatgagttcaaatcattctcaaactacatttggggctttacagacaataaggttctaaaggatacggaagaaaactataagacaaattctccattatccgataagatagctaaggaccttaaaaaaagaggaatgaaatttgttggaacaaccattatctactcttatttggaagcaattggagtgatagacaatcatatccatgaatgctttaaatacaaagaggaaagtgattaa

SEQ ID NO: 2067 - DNA, 477 bp, Methanobrevibacter ruminantium
  source 1..477: mol_type = genomic DNA
atgaagtcatcagtgcttttagaggaaattaaagagaatattcaaaattatgatattgatcatataaaagaaaaccttaaaaaagaggatataaatccaatatcaaaacaggtttctgagtttaacttgaaaaattatgatgaaataatggaaacaaagatatctgaggaagatgattttgaaataagtgatgaaatgatatattcaatgaaaaatgaaatagatttgttctttaaaggatgctcacctgaaagcgaagactcctttaaaaagttcattgaatcaatttgcttatatttaagccttattgctaaaaaaccattgcatccagttggaatggattttaaaaacggcaatacagtccatgaagagattgaagatggaaatactgtttattattgcgatttaaaagaatactttggcaagcaagaaaaggattactatacttgtaaattttgcgtttgtaaaacagtttaa

SEQ ID NO: 2068 - DNA, 1008 bp, Methanobrevibacter ruminantium
  source 1..1008: mol_type = genomic DNA
atggcatttaaagacatatttaaatttaaacaaggagaaactacctttatttttgtaggcggaaaaggtggagttggaaagacatcaatttcatctgccactgctttatggctagcaaaacaaggcaagaaaacattgattgtatcaactgatcctgctcattcattatctgactcacttgagacaaagataggccattatcctgtagagatctgtgaaaatctctatgctgttgaaattgacccggacaaggctatggaagaaaagcaaagggctcttgaaagccagaaatccatggcaactgcagaccaattgttgggtcttgattttctaggtgaacagatggatttggcttctgcatcccctggagcagatgaggctgcagcatttgaagtatttttatctgtgatgacttccaatgaatatgatgttgttgtctttgatactgcgccaacaggacacacccttaggctattgtccttccctgaagtcatggactcttgggttggaaagcttatgaaggcaagatccaagttaggggctgctgcaagcgctcttaagaatatcattccatttatggatgctgaaaatgatatccaatcctctcaggagttggaagagactaaaaagcagattaatgaggcaaaggcagtattgtctgaccccgatagaactacattcaagatggttgtaattccagaggaaatgtctatttatgaatctgaaagggcaattgaggcattaaacaaatatgacattacaactgacagcataattgtaaatcaggtcatgccagatatttcagactgtgacttctgtcattcaaggtatatgcttcagcaaaaaagattggctctcattgatcaaaagttctctgaccaggtcgtagctcaagttcctttattcaaggatgaagtaaaaggtaaggaaaagcttttaaaactagctgaaatcttatatgaaggaaaagataatgatgaagttgaagcaagtgtgattcagttatag

SEQ ID NO: 2069 - DNA, 132 bp, Methanobrevibacter ruminantium
  source 1..132: mol_type = genomic DNA
atgtttgttgaagaaataccagaagagaaattttattcaaatagaattagggatgaattcatagaagaagtagtggaaaaaatagaaaataatattcttcaaaataaatatagaaaatatttggattattaa

SEQ ID NO: 2070 - DNA, 150 bp, Methanobrevibacter ruminantium
  source 1..150: mol_type = genomic DNA
atgttttatgaagagcgagttgaagatcaattttccacataccgcaatcgagaagaatttataagagaacttttggatgtggtagataataagataactgatgaagagatggaagatatttatcaattattggatattcctagaaactaa

SEQ ID NO: 2071 - DNA, 762 bp, Methanobrevibacter ruminantium
  source 1..762: mol_type = genomic DNA
atgacaatttgtatatctgcaatttgtactgagaacaatgaagagcatattgtttttgctgtggatcatatgattactactggattagggcaatttgaacacagtataaataaatacaacgttcttaatgaaaatgttgttggaatgatggctggcaatgccttattgatggattatttctttgatgaagattattctgaaaatagtttttctgaaatccttgatatattcgaggaaaagtttaaggaaaagaggttaaacattattgaaaaagaaattttagatgtttattctattgatttggatttcataagagatattttaaaaggtccgattacaaatgatttccaagcggctattttaaagaaaattgcaaaaacaaaattagaatctgcaatccttttaatgggatttgagaacaataaggctagaattgctgaagtgtccgattatggaattggaaattttaatcgtattaattttcatactattggttcaggttctattcaagctcaaaacactcttatgttccaaaaacattcaaaaaaagatgatttgagaactacattgtacaatgtttacaaagcaaaaaagaatgctgaagtaatgcaaggtgtagggcaggatactgaaattggatttttgaataatggaagtatcgtaatgcttgataagaagaatatgggcattttagataatgtttatgcccttgaattgaactggggaaaggaacacaaagaagtgggtgctttagatttttaa

SEQ ID NO: 2072 - DNA, 1080 bp, Methanobrevibacter ruminantium
  source 1..1080: mol_type = genomic DNA
atgttagaaatcaaacatacaatatgcccttcatgttctgtaggatgtggattaaacattgtctccaaagacggagcagtggtaggaacctatccttacaaaagacatcctataaatgaaggaaaaaattgttctaatggtcgtggttccattttgcaatttgaaaataagatcaatgctccttcattggtacagaatggagagcttgttgaatcagatgctgattccatcattgcagcaatcaaaaaggaattggatgcaatcgatgcaagcgaactcgcaatcatctgttccgacaagaacaccaatgaggaaattgatgctattaaaaaattcgcagaagatttcggaaccgataaaatcggattttacggatataatttccctaaattttccggagaaatagcaaattataatgatatcaataacgctaaattcattttagcaattggtgacatctatggagaaaatcctttagcagctagaagaattgttttagctaaagacaaggaagcaaaattctttaacatagatgacgttgaaaaatccataactgctttaaacgctgacgaatacatccaatttagtgataaggcaacttttgctgacgctatcgcatctgtaaaaggagagcttaacgaagaagctgtaattgtcttaaacaaaattgcagatgctgaagactttaaattagttgaagatttagcaagcgaaaccggcgctaaattactccctattttaaacggtccaaacagcaaaggagctatggataaaatagacccattaaccaaagatgaaattatagacctaattgacggctcaaaagtacttattgtcgtaaacgataacttattagactatttatctgaaagtgacattaaaggaaaagcattcattgcaaatatttccaatttcgaagacgaattcaccaaattttccaacgtagtattacctggaaaagcttgggtggaaaaagaaggaactttcaccaatgctgaaggcttgacccaaagctttgctgcatctgcagacttaggtgaaggattaagcgaaattgaaatattcgagaaacttgcttaa

SEQ ID NO: 2073 - DNA, 1155 bp, Methanobrevibacter ruminantium
  source 1..1155: mol_type = genomic DNA
atgagtgaaaatttaatgcttgcaaaaagtaaagaaaatgaaataactgatagcggagcatgtgggggagctgtaagttctatttttcaatatctattaagccagggaattgtagacggagtattaactcttaacaaaggcgaagatgtatatgacggtatcccaagactcttaaccgatgctagtgaagtaatcgaaacttgcggttcattacattgtgctcctacaatggttggagatttaatttccagttttttaagcgatcaaaaaatagctgttgcagtaaaaccttgtgatgcaaaagctgttaacgaattggttaaaagacacagaatcaatcctgaaaacatcataactatcggtttaaactgtggaggaactgtaagaccagagactgcacaggaaatgatagaaaaattctatgaagttgaccctgctgacgttgtaaaagaagaaatcgataaaggtaaatttatcattgaaatggcagacggaagcgaaaagggaatcaagatcgatgacttggaagatgaaggctacggacgtcgtgacaactgtcaaagatgtgaacttaaagttccacgtaatgcagaccttgcatgtggtaactggggtagtgaacctggctggacctttgtggaagtcaataccgaaaaaggtaatgaaataatcgaaggcgctaaggctgaaggcttcattgaaaccaaagacccatccgaaaaggctcttgaaatgagaggcaaagttgaaaacatcatgatcaagatgggtaagaggaacactaaaaaacagttagaagacgaagctttaactttagaggaatgggaaaaccaatggaacaaatgtatcaaatgtttcgcatgcagagacgtttgtccaatatgctggtgtcatgaatgtgaacttgaaaagtcatactttaaggatgacggacaagctccacctgatccattaagcttccatggtgtaagattatcccatatgagtccaagctgtgtaaattgtggtcaatgtgacgatgtatgtccaatggaaattccagtatctaaactattccacaaattgcaagtgaaatatgaaggtcagactggatatgttgctggtgtcggcgatgaaaaacctccattatacagtccacaaaaagaaaacttttaa

SEQ ID NO: 2074 - DNA, 402 bp, Methanobrevibacter ruminantium
  source 1..402: mol_type = genomic DNA
atggcagacgatattaaaatagtaggtttttgttgtaattggtgttgttacggtggtgcagatactgcaggtaccgcacgtatgcaatatcctcctaatataagaattataagagttatgtgttctggtagaatcaatccttctatggtctttaaagcatttagagaaggagctgatggtgtattcgtaggcggatgccacatcggagactgtcactacgacgctggaaactacaaatggaatagaagagcattgatgactaaagatattattgaggaatttggaattgacaaggaaagattcagattcgaatggatctcagcttccgaaggtgaaaagttccaaagaaccatgaaagaattttataataccattagtcaacttggcccaagaaacaaataa

SEQ ID NO: 2075 - DNA, 2874 bp, Methanobrevibacter ruminantium
  source 1..2874: mol_type = genomic DNA
gtgactaataatgaaatagaaaagaaatggcagaaaaaatgggctgacgctaagctatttcaatcagatccaaatgaaaaagaaaaattattcttaacagtagcttatccatacccaagtggtgcaatgcacataggccacggtagaacatacaccgtacctgatgtatttgcaagatttaaaagaatggaaggctacaatgtattattccctatggcatggcacgtaaccggtgcaccggtcataggtattgcagatagaataaagagaaaagatccatggacccttgacttgtacgaaagagtacacaaggttcctcatgacactcttccaagcctcgaagacccaattaacattgtaaaatacttcagtaatgaatatcacactgtaatggatgatatgggctattcaatcgattggagaagagaattcagaactatcgaccctacatacaagaaattcatcacatggcaagctaaaaagcttaagtcccttgggctaatcaagcaaggggagcaccctgttaaatattgccctcacgatgagaaccctgtaggcgaccacgaccttctcgaaggggaaggcgtaggtgtaaacgagcttacattgattaagtttgaagtggagcctggattatacatagtccctgcaacattcagacctgaaactatctttgcagcaaccaacgtatggctaaacccagaggttcactatattgaagttgaagtaaaaacaggtgcaaatgcaagagaaaaatggataataagcaatgaagcattcttaaatctatcaaatcaacatgatttggagattgttggagacattgaccctaagccattaatcggcaaatatgtcaaaaacccacttaacggagagccattgccaatattccctgcaagctttgtagaccctgaatatggttcaggtacagtattttcagtacctgctcacgctcctgcagactatattgcacttagagaccttaaggaaaacgaagagctaatcaaagacttcgatataaaagaagaggtagctaaagcagagccattgaatgttgttaccgtagaaggatatggagagttccctgctgttgaagttgttgaaaggatgggtatcgaaaaccaaaacgaccctaaggtacaggatgcaactgacgagctatacaaggcagagcacagcaaaggatacataagcgaccatatcgaaaaatatgcaggaaaaagagtcgcattcataagagatgaaatcaaggcagacatgattgaagcaggaagcgcagacataatgtacgactttgcagagagaccagtcatctgcagatgcggaaacaaatgtgttgtcaaggtcatggatgaccaatggttcataagatacggcgatgaggaatggactgaaaagacccaaaaggtcttagcacaagagacaattatcccagaagagatacgctcaaacttcgaatactatctcgattggcttgacgactgggcatgctccagaagggtaggtcttggaacaagagtcccttgggacgaccaatggcttattgagcctttatccgactctacaatgtacatgtcctactatacaatagccaaataccttaaggatatggaccctgaagacttaaatgaagcattctttgaaaaggtcttcttaggtgtagacagcgatgaaatcacagtccctgaagagacagtaaaccaaatccaagaggaattcaactactggtacccattagactggagattatctgcaaaggaccttgtcggaaaccacttaagcttccttatgtttacccatgcagcaatatatcctgaggaaaaatggcctaaaggaactgtagtcttcggtatgggacttcttgaaggaaataagatgtcatcctccaaaggaaacgtcattctccttgcagatgctatcgaacagtacagcgcagatgtggtaaggcttttccttatggcatcagcagaaccatggcaagactttgactggagagaaaaagaggtcagaggaacccaaagaagacttgaatggtttagagagtttgcacaaaaggtagaagacataaaaggagaaaagctagacctatccaatattgaagaagtgcctttagaacgcagcatcgacaaatggatgataaatcaattgaacatacacatcaaggaagcaactgaagcccttgaagtattccaaacaagacaagcactccaacatgctttgttcctacttaaaaaagacttagaccactatctttacagagttcaagaccttattgaagcaaaggaccctgcagtaatctatgtcttaagcacattgctcagcaattggataagattgcttgctccatttactccacacacctcagaagagctttggagcaaatatggcggtgaaggatttgtatcatttgctaaatggccagagtacaacgaagatctaatcagcaaggaaatagaaaggtccgagtcccttgttcaaaacatagtaaaagacataaacgaaatcaagaacattgtagacacagacccagaaaagatacacttataccttgctccagaatggaaatgggagctatataagatagctgatgaagttggaaaaccagacatcggccaaatcatgggcaaggccataaaggcagacatttatgataacaaaaaggaaatcgccaatgtagcaaaaagaatttcaaaagaaatgattaagacaagatacattggtaagattgatgaagagactatcttaaatgatgcaaaagacttcattgaaagtgaggtaggttcagagattgttattcatactgatgacagctatgatcctcagaataaggcaagaaatgctatgccttataagcctgctatttttatggaatga

SEQ ID NO: 2076 - DNA, 1374 bp, Methanobrevibacter ruminantium
  source 1..1374: mol_type = genomic DNA
atgaaaaaaaataaactcgaaaaaggatgtgaaaaaatgtccgcagacgataaaaaactagaccaaataattaagacaatcgaagcaaatgacataaaatttttgagattagaactcgcagacatacacggattgccaaaaagcatggcagttcctcttaaaaatgcaaatgatgtagaagacatagtaaatgacggattattatttgacggttcatctgtagcaggattagcttcaatcaatgacagtgaccttcttgcaaaaccagacataaacaccttctcaaccatcccatggagacctgaatcaaaaggtacaagcagattcatctgtgacatatacaccacagaaggaaccccttatgatggagacccaagaggaatccttaagaaaacattagaaaaagctgagaaaagaggataccaatacaatgtaggtccagaaccagaattcttcatcatcaaaaaggatgaaaacggaaactacgtccctgcagacgaagctgaatactttgacgtagagccattagaccaaggaacagacatcagaagagaaatcgtattcggattagaagagttaggtttcgatgttgaagtaagccaccacgaagtggcagcaggacagcacgaagtggacttcaaatatgcagacgctttaaaaacagcagatgcagtaattacatttaaggaagctgtaaaagcagtggctaataacttaggagttaaggctactttcatgccaaaaccattcataggaatcaacggtagtggaatgcactgtaaccaaagtctattcaaggatggagaaaacatcttctatgacccaaacactgaaactcaagtatctcaagaggctttatacttcattggaggattattaaaacacgcacaagctttatcagcaatcttatccccaacagttaactcttacaaacgtttagtcccaggttatgaagcaccatgctacatagcttacggatttaaaaacagatcaaccttgctcaggattcctgcatcccgtggattaggtacaagaatcgaatgcagatcagctgacccatcctgtaacccatacttagcattttcagcattgcttgaagctggtttagacggtatggacaataagctcgacccaggagaacctactgaagaaaacttattcgcattctccgaagaggaaattgctgaaaaaggaatttccaacttgccaacaagcttatgggaagcatatcacgcattagaagaagatgatgtaatcataggcgctcttggagataaggtattcaatcaattctacaatatcaaaagagcagaatgggatgcttacagaatccaagtattcgactatgaaagagatgaatacttaaacgtatag

SEQ ID NO: 2077 - DNA, 918 bp, Methanobrevibacter ruminantium
  source 1..918: mol_type = genomic DNA
atgtgtggaatagcaggtgtaatatacaaagataaaaaaactcaccctgtaggagaagcattaacatcaatgcttgaatcactacaacacagaggcccagattcagcaggatatgctatctacggcagcttagattttcctgaaaattattatcaattaaatatagaagtaaaaagaagaagaggagcattagacaatttaaaatcattattaaaccaaatcagtccaatatacgaagaagaaataattaaatccgtaggagactcagatgtatataaatgcaaaatagcattagatgaattctcccttttgcaaccatggataagggaaatagacgaattagaaaatgtaagggtcatcaacggatcacattcatttgaaatgataaaggacgtcggaaaagtaaaggacattgcagaaagatttgacgttcaaagcagaatgggaacacatggaataggacatacccgttttgcaacagaaagtggcgtagaccgctatcatgcacacccatatcaaagctacatcataccagacattactgtagtgcataatggacaaatcaccaattattggaaaataagagacccattagaacgtaaaggacacacttttgaatcatttaacgatacagagtgcatcgttcactatatggcagacaagcttaatcaaggctataaattagaagaagccttagatcaagcagtgattgacttagatgggccattttcaatattggtaggaacacctaacggcataggcattgcaaaggacaagcttggccttagaccaggagttatggtagaaaccgatgaagtctttgcaatagcttcagaggaaatggcattgcatgatgtcactgattctaatgagatagaacagatagccccaggtgaaacaagagcttacaccatataa

SEQ ID NO: 2078 - DNA, 648 bp, Methanobrevibacter ruminantium
  source 1..648: mol_type = genomic DNA
atgaaagaatacatcattaatgcaaaagatatggaagagaaagaattaaaccgtgctataaaggaacaggctgcacatcatgataaactcattattaacaatcctgaatcaagacacaatatttgcgcaggcttaagcgaagatgtagacatagaaatcaacggttctgcaggatactttgttggaaccatggtcaacggaccaaagatacacatcaacggaaacgcaggctggtttgccggagacaatatgaccaaaggggaacttatcatcgaaggcacagcgggagacggtgcaggacagggaatctatggaggaaccgtaatcgtaaaaggaagcacaggctcaagaactggagagatcatgaaaggaggaaccgtaatcattggcggaaacagcggattcatgaccggactgcttatgatgggaggaaagctcatcattcttggagatgtaaccgatgacgtcggggaatcaatcatgagaggaagcatatatgttcttggagaggtcaaaagccttggaaaaaacgcaattatggaagaaaccacagatgaagatttaaaggatcttgaagagaccctgacaaaatacggttttgaagatatagactattcaaactttaaaaagattgtaaatattcaatag

SEQ ID NO: 2079 - DNA, 1095 bp, Methanobrevibacter ruminantium
  source 1..1095: mol_type = genomic DNA
atgagtgaacataaaatagcaatggttggaacaccatgtgaaattatggcagcatcaaaactgcaagattatacagatagccctattgaggttaaattgggcttattctgcatggagaacttttcatacaaatactttgtaaatttcctaaaggaatatgacttaaagatggatgacattgaaaagttccaaattgacaaaggattcctattcctaatactaaaaacaaaggaaacagtgaaaatacctttatcagtagctaaaaggataatcaggaaaaactgcaacatatgtgttgagcttacatctgagacctctgatatctcaataggttcaataggttcagatgacggctggtcaacattgattgttagaagcgaaaaaggagaggaaatagtaaagggagcaattgagcaaagattcattgaagttgaagagctagaagaatccaaattccaactgcttaacaaacttgcccaaggcaaaataaacaggaatctggagcatatagaacaaagagaattcttagcaaggcctgtactataccaaagggaaaaggacgacgattcaataagcaaggaaatctcagaatctgacttctctgacttaaagtcaaatgtcatagacattggagcatgcgtgctctgcggagcctgcgaatatgcatgtccggataacttaataataatcgacgacaccaaacctagaatgaaaggccaatgccctccagactgccatgcatgctttgcagtatgtccaaggacattcatagaggaacacttaagaaatgacaatgaaaagccaatcggagactatataaatgtctatacagttagatcccttaagcatagccaaggtcaagacggttcaatcgtcactacaattctagactatcttttaagcaatgagattgtaacagaagcccttattgttgataagaaagacgatttagcttggaaaccttacgcaaagctaacaaaggacatagaccaagtcgtaaaatcaggaggaaccaaatattctgtatgtcctgtattcaagccactaaaagaaattaatgaggaatcatcaactacagaagagggggttaactaa

SEQ ID NO: 2080 - DNA, 1488 bp, Methanobrevibacter ruminantium
  source 1..1488: mol_type = genomic DNA
atgtcattcactgttgaaaggaaaatagaaatatgcaggcagaacaatgacaggccaggttgctgctggtatttatgtgacaatccaaacaagtcagcatgtaagaactgttatagctgctattctaactgccctcacggcgtatatgaggtaatcaatgacgaaccactcccaatacatcaggaaaactgtgtaggatgcaagatctgtgaagagatgtgtccgacacatgctatctatgtaaggcctttagtggatgagggaaggggaatatggtcaaactcaaccatggttgaaatcaagcgtaaaagccagaccggttcatataaggtccgtggatgcggacttacccgaagaataccaagctttgacgacttgagcatattgcctgcacaggtatcaaggccaccaatagactcatacagggaaacatgcaagacatcagtagtccttggagaccgttttgcagaaaacccaattgaaattgacactccaatcatgattggagcaatgtcatttggtgctttaagtaaagaggcaaagatagcattggctattggaagcagcaaagtcggttcaataacaaacaccggagaaggaggaatgcttccagaggaaaggcattatgcagacaagctcattgcacagtatgcatcaggccgtttcggtgtttcagcaagctacctgaacaatgcagaggctgttgagataaagataggccaaggcgcaaagtccggtatgggaggacaccttcttgcccataaggtaactgcagaggttgcaagggttagaaacattccggaaggaacctcagcattaagccctgcaagacacatggatatcgtaggtccggaagacttaggaatgaaaatcaatcagctaagggaaatcacagactggaaagtgccaatcatcgttaaattcgcatctggaagagtggagcaggacgtaaagattgcagcaaaggctggcgcagacataattgtagttgacggtatgcaaggaggaaccggagcaggccctgaagttgttacagagcatgcgggaatccctacaattgaagctatcgttaaggctgacgacgcccttaaggagataaacctaagaagcgaagtaagcctagttgctgccggaggaataagatccggagctgacgttgcaaaagcaatagctttaggtgccgatgctgtatatgttgctacatcagcacttatttcaataggatgtaaggtctgtcaatcctgttcagaaggaatatgtcctaaaggaattgcaacacaggacagagcccttagaagaagattggatcctataagaaaaggtcagcaagttgctaactatattgaggctatgacacaggaggttacttcattaacccaacaggcaggaaacactgacatagagaatcttgaacgtcaagaccttgtagcattgactatggaagcttctcaattgactggagtgcctatggtaagccaaagatattag

SEQ ID NO: 2081 - DNA, 2643 bp, Methanobrevibacter ruminantium
  source 1..2643: mol_type = genomic DNA
atggccgcattcgatagaatcaaatcaggaattccagggcttgatagcgctttagacaatattcgtttaggagacaacgttgtatggaatgtcacaaacctaaatgaattttcctattttgtaaatccttacataaagcaagcaaaagaggacaatagaaacttaatttacatccgttttgccaatcatcctccattaatagaaatgactgaagaagatttcagattgcttgaaatcgagcagaacaatccggaaaccgagttttccatgatagagcgtgacggaatcaagatatatctggttaatccatataaccaattcgagacattcacattggaagttcacagaatcatagaaaaggaaggcttcgatgcattctatgtcttcgactgcctaagcgaccttcaagcggtatggtcaacagacctgatgatgggaaacttctttaaggtaacctgtccattccttttccagctggacacagttgcatacttcccaatcatccgaggaaggcactcatatgatgcaatagcaaagatccgtgaaaccacacagctatttctaaacgtatactcaaactctccagaggaagtttacgtatcccctctcaaggtatggaacagatactcacagaccatgtttttagggcataagttcaaccctagaaccggctttgtcaaggtccttcaggacggtcaggaagtaagcaaatactataagaccatcaattcagacaaatacatgaacggacagaccttagacagctgggaaaggtatatgcttaaagtcagaagagaatacgaagagggaaagaatatcgacgaagagtgtgacaagatctgtgagctcatgatgacaaaggacgagaagatgctttccaaaatcaaggaatacttctcttttgaggactataccacaatctatgaccgcagagtgggaagtggacttgtaggaggtaagtcctgtggtatgcttcttgcaagaaagataattgaaaggaactgcccagagatatacaacaatatctttgagcctgacgactcattctatataggctcagaccttttctacacttacatcgtttcaaatgacctttgggaccttagggtaaagcaaaggacccctgaaggatactataaatatggaaaggaactggaggaagcccttaaaaacggaagcttttcagaccagaccaaaagggaattcataaagatgctggattatttcggacagaatccgattatcgtccgttcaagcagtttccttgaggatggatatggaaatgcatttgctggaaaatacgaatcagtattctgtgtaaacagaggctcacttgaagagagactggcagcctttgaagaggcagtgaaggtggtatattcaagtacaatgaacatttcagcccttgaatacagaaaaataaatggattggacgacactgacgaacagatggccctattggttcaaagggtttcaggatcataccatggagactatttcttcccgacagcagcaggtgtaggattctcatacagcccatattccccgcttccggacatggacaacagcaagggaatgctaaggcttgtaatgggtcttggtacaaaggctgtcgaccgtacaaaaaaggactatcctagaatcataaaccttgacaagcctgaagtgactatggcaaaggacattaaggaaaagcacagatattcacagcattatcttgatgttattgaccttaaggaaatcagcctgcatgacattccagtggatgaaggattgagcgtaattccaagatactctaaaaacatgttggtagagcatgacagagaagcggaaaggatgtttagagacagaggccaacgtagggaaatagtatttgtaaactgtgagggaatcgttaaaaacgatgcattcatagaaaccatgaaggaaatcatgagcaccctccagacagcatatgactatccagttgacatcgaatacactgtaaatgtgggagaggacaaatcattcaacataaacctattgcagtgcagacctctgcaagttatggtaaacaatgaggctattgaaatgcctgaagacaagaacgtattcttccatatcaaggaatcctctatgggaatgtccagaaagaacacaatagacacaatctgctatgtggatcctcataagtattatgaatatccttatgctcaaaaaagctctatttcaagagtaatcagcgatgtaaatgcatatctcaagagcaacaacaagacagcgattctcattgtcccaggaaggataggaacatcatctccagaacttggaatccctgtagtctttgcagacattagctacttctccgcaatcctagaggagtcatacagcgatgcaggatatatgccagagttatcctttggaagccacatgttccaggacctggtggaagcggatatatactacggtgcattgtttgaaaatgagaaaaaactggagttcaataaggacatggtctacgactatccgaacatattaaaggacataaatccaaacctcagcgaggagatttatgacatgatacaggtgatagactttgatgaaaacaaggcagagctctatcatgatatgaataaggatgaaaccttgtgtattttcaaatag

SEQ ID NO: 2082 - DNA, 1356 bp, Methanobrevibacter ruminantium
  source 1..1356: mol_type = genomic DNA
atgaataaaagtaaaaaatgtgcagaaaaagatttggctcatatatggcatcctgcctctcagatgaaggattatgaagactttccaccaattgtaatagaccatgctaagggagtccacctttatgatgtggatggaaaggaatatacagacatcatcagctcatggtggtgcaatatccttggtcattgcaatgaagaggtaagccaggcccttaaggaccaacttgatgagcttgatcatgttttatttgctaatttttcacataagactataatagagctatcagagcgtcttattaaggtcatgccaaagggattgaataggttttcctttgttgacaacggctctgcttcagttgaatgcgcattgaagatggcattccagtattgcgctcaaactggtagggctcaaaagaaaagattcatgtgctttacagatgcatatcatggagagacattaggcgcattgtctgttggagcccttgatgagtattcaagtgtttttgagccaatcatgattgatacaattaagattgaggctcctgattgctatagatgtccttatggtaagacaaggaatgattgtgattgccagtgctttgagcatgcagagagggcatttgaagagcatggccatgagacctgtgcaatgattatagagccgcttatacagggaagcgctggaatgaagatttatcctcctctttatctaaagaagcttagggaactttgcgataagcatgatgtccttcttattgcagatgagatagctacaggttttggaaggactggaaagttctttgcagttgaccatgccaatataactccagacattatgtgtgtgtccaagggactcactaatggatatatggccatggcagttgcatgcactacagatgagatttataatgctttctatggtgattatgaggataatatagcatttatgcacagtcatacttatgccggtaatccattggctgcaagcgttgcaaatgccacacttaagataatggaaagggataggattattgaaaataatcaggaaaaggccatttggcttaataaaagattccacaacacatttgatgagcatcctaatgttggcgagataagacagatgggtcttatcaatgcaatcgagcttgttgaggataaggagtctaaaaaaggatttgattcaagccttagaataggatataagatttatagggaagctttaaaggatggattgatgttaaggcctcttggcaatgttatgtattttaatcctcctcttgtcataactaaggaagagcttgatgagtctttagctatttgtaaaaaggctattgataaggtattattagactaa

SEQ ID NO: 2083 - DNA, 1599 bp, Methanobrevibacter ruminantium
  source 1..1599: mol_type = genomic DNA
atgacaaaatttatatttttaattatcttattaaaatttatgagaaaggaaattttaattgcagctattgcaatcatattaatattatgtggaggtgtatttgcagctagcaatatgcagatagcggatattgctacttttagtttgaatgcaattgatctcgaggataggggaagcttaatcgttgactctgaagatatcactgcttcaaagggctattataattcttcggcttctgatgagaatgtggttttggttaaaaattatagcttaagattaagcaattcaattgtaaataagactggagacactggaagctctggagatgatgcagacttttatgggattaattctgcagttcttgtaaattcaaatggaagtgtagaattatctgatgttgaaatagagactaattctaaaggatccaatggagtatttgtaacaaatgctgtttctgattctaattcaaattcttcatcctcttctggcagccctattgttgattccactgaacgtcatgatggaaagagtgatgctgaagagcctggtggtgttcctcctgaaaagcctgttgaggatggaccttctgtatatggcggttcttcaggaggtaaaggtgcccttagcgatggaaatcaatctatgcctgctccaggcgctagctcctctgatgtggaaggaagttcaagtgcagacatctcaaatgtccgaatcaccacacatggagacaagtcccgcggattggatgcaacctttggaggaaagattattgcttcagatgttgaaatcaatacagatggccaaagctgtgcggctcttgcaacagacagaggcgaaggtgaagtccatgtgaaaaactgcatattgaatactggagtggatgagaaaagcggaagaggctctccaatcatctattcaacaggaaacattacagctgacaattccgaaggctgtgcccatgtctcccagattgcctgcatagagggaaaaaacagcattgcgctatcaaactgtgagttctctgcaggtgcaggaggaaatagggaagataatggagaatatgttgatctaggaggagtgttcatctatcaaagcatgagcggagatgctgatgtaggaacctctctttttgatgcaaactgttgcgttttgtccatagaagaggattccgaatactataagactgctcctatgttccatgttaccaatacaaaggccattgtcaagcttgcaagcacagaacttaatttcggaagcggtgttcttttgaatgtttccggtcaaagccaatggggaactgtaggatccaatggcggtgagcttgagtttgatgcaagtgatgagattcttgatggggatgtctttgttgattccatcagttcattgaatatgagcttggcttcaaccagctttataggagctgtaaatccagacgatgactttggagagactaatcttgtcattgattcagattctgattggacattggatggagacagtcaccttagctcattggagaataatggagatatagattataatggacacactctttatgtggatggaaaggcttatacagagtctaatccatttaaatag

SEQ ID NO: 2084 - DNA, 699 bp, Methanobrevibacter ruminantium
  source 1..699: mol_type = genomic DNA
atgtcaaaaggactattcgtactgggaactggcacagatgttggaaagacttatgtaactggcttattgttaaagtacataagagacaatggctacaatgcaagctactttaaggcagccttaagcggcgctataagggacaatgaaggcaaactgattcctggagatgctgttgaagtgataaatatggctggccttgaagaggatacagactttttggttccatacatatatgaaacagcagtttctccacatcttgcaagccaaattgaaggaaatcctgttgaactggacaaagtcaagcatgcatacgaagaagtttcaaagaagtacgattatatagtcatggaaggaagcgggggcatagtctgccctattcgctatgatgggcaaggatgcaaaagcaatatcttgcttgaagacataatcaagtgtcttgaccttaatgtccttctggttgcagacgcagggcttggaacaataaactctgtaataacaacagtggattatttgaaaaatagggatattcaagtttgcggaattcttctaaacaattttaaggacatgcctatggaaaatgataatctcaagatgattgaagagcttggtggagtggatgtcattgcaaaaatctacaaaaatgataaaaatttatcacttgatgtacagttagatgttctaatgaattattttaaataa

SEQ ID NO: 2085 - DNA, 981 bp, Methanobrevibacter ruminantium
  source 1..981: mol_type = genomic DNA
atgtataatattatcgagcttaaggacaaagtattgaataattacaaagtcactaaagaagatgcattgaatttgcttgatgttccattagatgaactttcagatgcagcaaatgaaatcagagaattcttttgcagcaacaagtttgatgtatgcacattaatcaatgtaaaaaacggcagatgcagtgaagactgtaaattctgtgctcaatccaatcattatgatacagatatagatatatatccattcctatcaaaggaagagctagtaggtaagagcaactcccttttggatgcaggtttcaagcgaatctcttatgttgcatcaggcagaaagataagggataaggaatttgatatagttgtttctgcattagagcaattgaacaaggatagaactgatgaattccatttatgcctttcattagggcttttaagcgaagagcagataagcactcttaagaatctgaatgttgaacgaattcacaacaatcttgaaagttcaagggattatttttcaaatatatgcacaacccattcctatgatgaaaagctggataccattgatcttataaaagacaaaaatcttatggtctgcagcggaggaatatttggaatgggagagagctttgaagataggatagatcttgcaattcagttaagggatcttggagtcaagtcaattcctataaatgttttaaatccgataaagggaactcctgtagagaataataagattctttccaatgatgaggtctgcaggcttattgcaatattccgcttcataaatcccgatgcattcattagaatggctggaggaaggaccctccttggagacaatggcagaaaggcattccaatcaggtgcaaatgcagcaatacttggaaatatgctgacaacaagtggtgtggaacttgaagaagactttaaactacttgaagagcttggatttgagataacttattcaattgatgcttaa

SEQ ID NO: 2086 - DNA, 714 bp, Methanobrevibacter ruminantium
  source 1..714: mol_type = genomic DNA
atggatgaaagaggtaagaaataccttctaaaggaagatagagaattccaaactgatttgggaattattaaaaaggaacagatggaaagggcaacaattggagatacaataatcactcatttagataaagaatttaaggtcataaagcctacagtcaacgatttcattgaccttatggaaagaagatgctccattctcattcaaaaggatataggaactgtgctggcaagaacgggattaggtgcaggagacagggtcatcgatgcaggaacaggagccggtgcaatcgcattgaactttggaaatgtggttggagataagggtcaggtttacacctatgaaatcagggaagactttgcagagattgcaaagagaaacattgacaactttggaataaagaacatagaggtaaaaaatcaggacatcaaggaaggaatcgatgaagaggagattgatcttgttttcctagaccttccaaagccatttgaaatttttgaggatgttaaaaaggcccttagattaggaggatggcttgctgtctatgccccttatattgaccaagctgaagtggcttatagaattgcaaagaagcttgatttcagagaccttacaatccttgagacattagagagggaaatggaaataaggcctcaaggaacaaggcctaagacaagaatggtgggtcatagtggctatttggttttttgctcgtaa

SEQ ID NO: 2087 - DNA, 2529 bp, Methanobrevibacter ruminantium
  source 1..2529: mol_type = genomic DNA
atggttacttatatcgaacatcctttaattaggccaaatgcagcggaagctaggatttatcagcaggttttagctgcgaatgtattgaaaaatggaaatactatgattgtagctccaaccgctttaggtaaaaccatcatagcaatactggtagctgcagacagattgcagaaattaaaaggttcaaaggtactcatacttgctccaagcaagccacttgccatacagcatgaagagaacttcaagcactttctaaacctgccttgcacatctatcactggtgccgtcaagacagatgagcgtgaaaagcgttgggatgcctcttcaatcatctgtgcaactccacagactatcgaatctgaccttctaaatgagcgctacacccttgatgatgtttccctgcttgtctttgacgaatgccaccatgccgtaggctcatattcctatgtctatcttgctcaccgctatgtaaaggagtctaataaccacctcattcttggattgaccgcttcaccaggtcatgacaagtctaaaatcaaggaagtttgtgaaaatctattcatacaggacatcaccatcaagactgaagacgatcctgatgtcaagccctacttcaatcctatccaaatcgactgggtaagggttcagttgggagaggagcttgaaaagataagggatcttgtcaacaaggcattgaaggttcgtcttaaaggccttaagtctcttggggtaatcaatacggtctctgtaacaaagcgggatgttctcaaggcaaggtcacgggttcaaagaaagataggtcagtctgtaaatcctcctaaggagtgcttccaggcaatttcaatcctatctgccgtaatcaaccttcagcattcccttgagcttcttgaaacccaaggggtagtgccattcaatgactatataaagcgccttaggaagaagaccacaaaggcagcaaagaacatccttcttgaccctaacttttcaaaggcaatctattttgctaaggaggctgaagaaaagggacttgagcatcctaagatgaataagctagttgaacttctcaaattggaattaggtgttgatgaggctcagaccagactcacttcccttagaaacgactcagactcttccatggatgagaaggtgaaggaggacagcccaaagataattgttttcacccagtttagagacaccttggacatgattcatgaaaggtgtgaaagggaaggaatcaaaagtgttaggttctttggacagggaacaagcgacggcaagaagggccttacccaaaaggagcagaagaagattatcaagtcatttaagacaggaaattatgatgttctaatctctacaagcgttgcagaggaaggaatagacatacctgcagttgaccttgtcataatgtatgagccggttccatctgaagtcaggatgattcaaagaaggggaaggacaggccgtaaatcctctggaaggatgaaagtattgatcactgaaaagacaagggatgagggctactattggaccagcatgaggcgtgaggacaagatgaagactcagcttgcaactcaagaggccatcgaagagcttaagctcaatgcagtggagaagatagaggttgaaaagtcagctaaggatcttggcaagagggaaaaggtcattatcgaagaccctagagatgatgacagcagcgacaactttgaggaagaagcaaagaatgaggacattgaagagataagccttgaaaacgacaatgaagagaagcagaaggaattgatggaaaaggaggccaagaaaaagcaatctttggaagattccattattgaagagcttgcaaagtcatcaacaagcgatgaactggtggtttatgttgactcaagggaaggaaattcaagggttataagggccttggacaccataggagtcaaagtaaaggtcaatacaatggcagttgcagactatcaggtaagcgatgatgttgcaatagaaaggaaaactgcaagcgactttgtagattccattgttgataagaggctcttcaagcaggctaaggccatgatggaagagtttaaaaagcctattcttatccttgagggagatgacttctataccggtttcataaatccaaatgcaataaggggatcaatggcttccattgcaatagattatggaatcagcataattccaacaagaacccctgaggacaccgctgcaatgattaagagaattgcaataagggaacagcaaggtgaaaagaagagcatacagataagaacagagagaaagcctcagaatctttgggagcagcagctattcataattgaatccttgccaaacataggaccagtccatgcaaagaacctccttgagcacttcggttcagtgaaggctgttctccaagctgacgaaaagcaattgcaggaagtcgatggaataggtaagaaaacagctaaaagcattaaggaagttgttgatggcaagtatttgtattttaaaaagccagagaagaatgagaaattgatttaa

SEQ ID NO: 2088 - DNA, 15201 bp, Methanobrevibacter ruminantium
  source 1..15201: mol_type = genomic DNA
atgaaatttgaaaaaataagtatgttgatatcaattgtacttatatctctcattgctttaggtgcagtaagtgcagctgacgacgtcgctgcagatgatgctgttgccccagcaactgtagatgaagttcaaacaattgataatacaataacaaatgatgatatatcatatgagtctactgacataattgttaatgatactggcgactcagctgattctaaggcaaaaaccacttcccttagtgcaaatgcagtaaacgaaggggaaactttgtcttttacacaattagctgctgatgtctcttccagtccttcaatgttgtcaggtgcttattataaatatgatccatcaaccgacactgcttttgaaaatggtatcactcttaccaatggcttaacaatcattggtggcggtgcgaccattgacggggataatcaagcaagaatattcaatatccctgaaggagttagcgttaccattatgggtgtaactctcataaacggtgctgccgatgaaggtgcagctatttataactccggcaagttaactttaatgaatgctaaagttaatgacaacacagcagtcaagtctggtggtggtatttataataatggcggtgaagtattagtaacctccagtgaatttgatggtaacgatttaactgacagaacagttaatggctatggtggagcagctatttactccaatggaggttctgtaaccataacagatacaaatgttaccaacaaccttaagaacatagttcacagaggaggaactggtacttacacaggtgacttaagtagtgctgctgttacaagtaataacgctgatttaactgtaaccaactctcgttttattgctaacagtggttcctacggtggtgcaatttactctggtgagagcacttctgcaaatttattagtaagcggatctacctttgaagacaactttgcattcaatggtggagctattgatatagttggaacttcctataccatatctgattccacattcaaaaacaataatgttaaaggaactggtagtaccaattctaactacgcaagcggtggtgcaatctgtgttcaagatgcaaataacccaggtttaatctctggatgtgactttgaagctaactccggagtagttggcggtgctgtcaattgtgaaaacactatggttttagattgtactttcactgataacactgcaaattcagcaaactctgaaacctttaatggaaaaactaataatagaggaggatttgccggtgcaatttacaatgaaggaacaatcacaatctctgattgtgaatttgatgacaatgccggaagaggcgaaggtatacgtgttaaaaatgcggaaatttctgattcttcattcacaaataccagaattgacacatgtcaaaattctaatgttcttttaactaacaacacctacaataatccagatagagatgttcaagcagcaagcggtactcaagtaactgtagatgtggcagatggtgatattcctaatgctaacactgctccttatattgtaggagatttaactttcactgatttacaagcacttattgacagtggatcaagtggtatcagattaaccggaaatgttattaaaactgctgaagaggaaactacctttgcagacggtttaaatgttgataaaaccgtaaccatttacggtgctgaaggtaaagtaatccaagctaatagtggtaaaatcttcaatgttgctgaaggaaaaaccttgacattaagaaatgctactttacaaggttctggtgaaactgctatcaccaattatggaacagtttatttatatttggctgacaataatcaattcactgactgtggagatgttttaattgataatcatggcagaaccactgaaaccggtcttaccactttcactcaattaaataatcttattggtttagtaaatggtggaacagtatatattggtgagtctaaaatcactaaagctgaagatgaaaaagaagcttataaaaatggaattgttatcgataaagaccttagcatattaggttcatacaacacttattataaatatgttaagacttccatcaatgctaacaatgatggaagaatctttactgttgctgaaggtaaatctttaagccttaaatacatcaacgtaaccaatggtgctgctgatgaaggtgcaggtgtttacgtatctgaagatgctaccttaattgcagatactgcaaactttattaaaaacaccgctgtaactaaaggtggagcaatctactctgaaggtactgttgacttaactaatgttaacattaaaaataataccatcagtaaaacagatggagttatggctgatgataacggtggtgcagctctctacaataatggaggaactgcaacattagataaggtcaatgttacagacaaccaaaaaacatatgttatcggagatatcatggatggtgtagttgtatctaaaggtgctactactattaccaattcttacttcgctaacaactctggccgttggggtggagctatcactcaaactggcaccgatcaaactttaactgttgaagacacaatatttgaagaaaacacagctatctttggtgctgctattttcgataattcccctcttgttgtaaaagattgtaaattctacaacaacagtgctatcggtcctggaagtccaggtacttcaaacagtcaaggtgctgcaatattagtaatggatgacactgcttctgcagatattagtggttctgagttcattaataacactgctgattgcggtggtgcagtaagcttagcaggtgttggatctgatagtagtattgatgattgtacctttattgacaacacagcttatgctgatggtggtgcagtatacttctggactgaaagtgctagcgtaactgtaaccgattcagaattcataagtaacactgctccatatggtggtgctattgaaaatgaaggtcttggcgatttaatagttgatggttgtgagtttactgaaaacactgcatccttaagaggaggagcaataatttcaagtggagacacaagtgtttccaattcaaagttcactgataatgaagcttcaggaaacaccaatgcaatatacctttataattctggttcatcattatccttatccaacaacgttataactggtagtgatgatgcacaaatctatgtaaaagagggtattgatgttgtaactccattgaaagttaaaatattaaacaatgaaactgtaaacattaatatggttccatatgatatcacggctactgttacagatgataaaggcaataatattgttgatttagcattcagatttacagtaggtgatgatgtagtcgatggaattagtattgatgctgcaactggtgtatacacagcaacatttactcctactcaagctggagaatttgtagtttcaaccaatcttgcaaatgctgatgaagttcaaactggaactttaaacgtctttagaactttaactgacttaaaagcaatcatagatgcaaacactaatggcactattgacttggatggtaattacgcttacaatgcagaatttgacagtgcattaacagatggtattgtaattaataaagatatcgttatcaatggaaacggattcactatctgtggtgaaaactcaacaagactcttccatgtaaccagtggtttccttaccttgaaaaatgcaaccgtttgccatggtgctgctgaaaaaggtgcaggtgtatatgtagaccatggaagtaaattatctactgattatgtaactttcactgaaaacactgctgtaaaacgtggtggagcaatctactctgaaggtatggtatacataggcaactctgtattagacagcaacaacatcactttcagatctgcaaacgatgacaacggtggagcagctgtttacaacttaaacggccaattaacaatcgaaaaatctaacattaccaataacttaaaagacattgttatccgtaacggcaatgcaggtgacttattggttggtgtagttgtaactaccggcgacactttaattaaagactcatactttgcaaacaacacaggatcttggggtggagctatcagttcattaggatacatgaacaccgatgattacacattaaccgtaaaaggcactacctttgaaggaaacaacgctaccttcggtggagcaatctttgtagaaagttccaaccttgttgtagatgactgtatctttaacgaaaacactggtgtaggtaaaggaagcgatggaacttccaacactcaaggaggagctattgttgtacaccctactggatcaaaagctactatcaccaattccaaattcaacaaaaacagcgctaatactggtggtgcagtaagcctcgctggtgtaggccaagatagccttattgaaggatgtacattcactgacaacactgcaaatgatggtggagctgtatacctctggactggtggaaatgctattgtaactgtaaaagactcttcattcagcgacaacacagctaatttcggaagcgctatttctagtgatggtactttaagcttatcccacaatgaaattgcaaatgattacaccattactccaataggtagctatgatggaacaattgtatcagcgatttatgtaaccacattgaatggcgaaactatcataactggcaatccaactcaaaatttaactgctacaattactgatgataatggaaaccctatcgtagagaaaggccttgtcttagaagtatacggcgaagaagttgaaacaagctatgataaaaccactggtattcattctgcaattcacactttcactaaaccaaactcttacagaataactgcaaaaggtttcgatcaagatcatactactccaggttatattgtttacactggaggaactttcaatgaattgcaagacttgatcaatgcagctgaagaaggagcaaccattaccttagaccacagcattgtatacgatgaagaatttgatggagtgccattccttgatggtattacagtaaataaaactgtaacaatcgttggtgctgaaggtgtggaaatctgtgctaacaatttagcaagagtattcaaagtaactgatggagcaactttaaccttaaaagatgctaccgtttgtcatggtactgctcaaaaaggtgctggtgtatatgtagatgctggcgcaagcttaattgctgataatgtaacattcactaaaaacactgctgtaaaacgtggtggagcaatctactctgaaggtatggtatacataggcaactctgtattagacagcaacaacatcactttcagatctgcaaacgatgacaacggtggagcagctgtttacaacttaaacggccaattaacaatcgaaaaatctaacattaccaataacttaaaagacattgttatccgtaacggcaatgctggtgacttattggttggtgtagttgtaaccagcggcgaaactttaattacagactcatactttgcaaacaacacaggatcttggggtggagcaatcagttcattaggatacatgaacaatgaagattacaccttaaccgtaatcggcactacctttgaaggaaacaacgctaccttcggtggagcaatctttgtagaaagttccaaccttgtagtagatgactgtacctttaacgaaaacgctggcgtaggtaaaggaagccctggaagcgcaagtactcaaggtggagctattgtagtattccctagtggtactaaagctactatcaccgattccagattcaacaaaaacagcgctaatactggtggtgcagtaagccttgctggtgtagaccaagacagccttattgaaggatgtacctttaccgaaaacactggtaatgatggcggagctgtatacctctggactcaaggagatgcaaccgtaactgtaaaagattctaccttcactggcaacactgccggctggggtaatgctatctcaactgacggtgcattaaaattagaaggaaacacaatcagttcaaccagtgcagatgttggtaactgggcgggtactattgattccaaagtatatgctcaaatcttagctaatgatacatacaactggcatatgggaggattcgtaattaacgctaccttaactgatgatatgggtaacttaattaacgaccacaacttcaactatgtaattactaaagaaggcgcaactgattctatttcagttcctgcaactttctacactagtttaggttactaccaaggcactttcactcctgctgatattggaacttacttgattagccttgattatgctgttgaagaagtaaacacttcagttgtagttgtatccagatctttaattgacttagcaaacatcattgctgctgatgaagatggcatcattgacttggacgatagctatacttacattgaagaattcgattcaagcattgtagatggtatcgtaattggtaaagatgtaactataaatggtaatggacacactatctgtggtgatgataaagcaagacttttccatgtaacagataaagctttaaccttaaataatgtaactctttgccatggtaatgctttaaacggtggtgctgtatatgttgaatcagctgctactttaaatgctaataatgcagaattcaatgaaaacactgctacttaccgtggtggagctatttggtctactggtactgttaatgtaaaagattcatctttcgacaataacaatatcacttacagagcaagaaatgtggataatggtggagctgctatctttaacaatggcactttaaatgttgaccattccaactttacaaacgatcttgtaggttatgttgtaagaactggagacactaacagccctcaattaatcgatggtattattttaagctctggtgttgctgtaatcaataattcccactttgaaaacaacagcggtacttatggtggtgctataactgctgtacctatagctagtttaggttctacagctacttccttaactgtagaaaattgtgaatttattaataacttagcatactgtggtgctggaatttcaattaatgctgacggcaacggcaaaaccacttattctattaagaattctactttcataggcaataatgctacaggtgtaggcagtactggttctacaagcgcaggtggagcaatatctatagctagagattccgaaggtaccattacagattccaaattctacaacaacaccgctaccactggtggagctattgatgtaagcgctaccagaagttcttcaaaagtgacaatcgataactgtgactttgaaaacaacactgctacagcaggagatggtggagctgtacgcattagcaaaaacaatttggaagttgctgtcaaaaattccaacttcacaaacaatgacgcaactggtgatggtgcagccatttacaacaatggcgttttaacattagaaggaaacaaagtcacttccggtgaaaccgaaatctatgtaggtcctaatggttcagttgttaactcaattgtcaaagctatattcttaggagatgcagaagacaatacaattcttgctttccttggtgatgaagtacatccatatgctactttaacagatgataatggcaatgcaatatatgatgtagacttcaacatcactgttgacggcgttgaatatgaaacatcctatgatgattcaactcaacaatatactgctacatacactatcttacatgctggagacaatattgtaagcactaactatgatgctcaaaagaccgatggtaaatatgatgttcctaaagcaaacgcaaccattgtcgtaactactgaaagcattagtgtaggagacaaggctactgtaaacatcaacttaactggtacagatggtgtcggcttaaacggaactgttaaaatcactatcaataaggcattcactgatactgtagtaactgaaaatggtattaatgtaactgaagttgaaggattagaaattggcgaatacttcgtttacgtctacttcgaaggcaactctgattataaccctgaatacaactacactctattcagagttaccggtaatgtatcctacttcaatgttaccattgaagatgtaacctatgatgatgctgcaactattaaggtaaccgttcaagatggtcctatagacgatcctgacaacggcgtaactggcattgtacttgtaacaatccaaggaaaagatgtaaactttgaaaatacctatagcgtatctgtaattgcgggtgaaggatcatacactgtagaaggccttgcacctggtaattactcatatgctgctaaattattagcagatgagctttacaatgaagcttatttagaaccacaaaacttcacagtattcgaaaacccatactctgaattagaagtaactgatgacggccctattgcatctggtgaaactgtaaacattacagctaccctcactgacttccaaggcaaccctatagaaggagctaccttagaagtatatgatactggcgtatggattgctaatattactaccaatgcagaaggtattgctgaaacttctattgataatttaggatatggtcttcacgacattactgtaatattcaatgacactgtacacgatgtccaaactgaaaccgtaactgtatctgtaactcctaagaagggtactttcacagacttgcaatacttaatcgacactgctgatggaagattagtcttgccatacgacttcgcatttgatgcagcttatgatgaacaattcttcttaacaggtgtgcttgtagacgataacattattatctctggcgctggacatatcattgacggtatgaaaaaagcaagaatcttatacatcaatgctcctaatgtcaagatattcaatgtaagctttgtcaatggtaaatctgatgtaggtgctgctatttacaccgaagctgattacttacttgtagacagctgttacttcgcaaacaacgaccctgaagctggtgctgcaatctatgctgaaagcggtgtaactgatgtagaagaaactatcttcttcaataacactgctgtaaacggcggtgccatatatgttgaatccggtgctacattaaacgttgctgattcagaatttaatcaaaacactgcaacctaccgtggtggagctatttggtctaatggtactgttaatgtaaaagattcatcatttgataaaaatgatatcacttacagagttaaaaacgatgataatggtggagctgccatctttaacaatggcactttgaatgttgtcaattccagatttacaaataaccttttaaactatgtcataagaactggagatgataatcatcctgaattagttgacggtgttattttaagctctggaaaagctaaaatcagcaattcccactttgaaaacaacagcggtacttatggttctgcaataactgctttacctataggcactgaactcagtgatttaactgtagaaaattgtgaatttataactaacttagcatactgcggtgcagctatctatgtaggtagtggtactacattattctacattaatgactgtgttttcataggcaataatgctacaggtgtcggcagtaacggatatgttgctactggtggtgctattaagatagctaagaaagctactggtataattgcagattctcaattctataacaactctgctgctaacggtggagctatagatataagtgctactagtggtaatactgcatcagtacttattgatagctgtgtctttggatataatgttgcagatcaaggtggagctatctacattgataatagaactacagtaaacctttatgactctacattatactacaatgaaggtgaagctctcaattaccacatcttcttaaatggagatgcaactcttggctttgaaggtaataacttctatacaacaatacctaccattgtagcagaagacacctacgcttacggtgaaaccataaccattaatggtacattcgattggggagtaaacaacaaacctatcaatatgatttacaccattaacggtgcacctggcactgcagaagtagttgatggcaattacacaatattaattgacaatcaaccagatgtaggtgattacactattgtaattactgcatttactgatgaaaacggaaatgtataccatgtagaaactgctcaaaaaacaattagtgttactaaagcaacccctatcttatctgttgaaggtgatgaatacttaatgcctcctagtgatgatgctactgttaccatttctcttaccgataaagatggaaacggtattaagggcactgttattgtaactgttgctggtgaaacctacttagttgaaactgatgaagatggtgacggcgagctcactattaatgacttacctgctaccacttgggccattgacgctaaattcataggcaacgataactataatgaagttgtaaacgacactgaagagattaccttcatagctgatgttgcatacttcgacataattatcgaagacggtgtttacggcgataagcttactgtcatagttgaaaacgcaactgacattgacggcaatagcttaactggaatggtcacaggcatgatttctacaggcgatgatgacatttcattcatagtatatgtgaataacggtcaaggaaccaacactaccactactgctggcggagttggtaaattcactggagatgcatacttctatgattcaatgatggaatttatgtccggccctgaagaatgcagtgcatatgtaagcccagctaatgctacattatatctagttccatgggatgcagatgatctatcatcagacattgcatatggcgataccatagaattcggcgctgccgtattcggtgtaaatctagaggaattaaacggtactgtatattacatcataaccgaattaaataaaaaaggtgaaattgcgattgtaaacggatctggtgctgtaaacctcactgatattttagatgtaggaacctacactgtcataagctacttcgtagatgacaaaggcaactacgacccagaatcatcagttaactacactaacttcaaagtggccaaagcaacccctaccttaaatgtagagaatgctcaacaagtatatgctgataccaatacaataacattcaatgttacaggcattgatgataaaggtgttaaaggtactgtaattgctattaaacctatttcagaagatgtgtctggtgcaatctacgatcctgaaaccggtcttggagaattaacattcaatggtttagttgtgggcgacaatccaattgtagtaaaattcttaagtgacgatgataactatgcaaatgcagaaaagaccattaacataactatcactcaagctacacttgcaatcgactctacaataaccactcaagaaattgtatatggcaaagatgttgaagctgatgtaaccgtaaccggcatagtccaagaagatactgtaattgcaaatgtcagtttatacgacaacgctactggagaattattagactcctttaacattgcccttggcttggaagacagcatctcattcgaagacttagaagttggcgactactactacacaatcgaatttacaagcgaattatacgctggagacaacttcacatctgaagtattcactgtaaacacagccgaaatccttgatttagattcttccaatgtagacaatgtatcctacggcgaaggaatcgacataaccgtatatgtagatggaatgattgaaggagacctcattgaagttaacttcactgtagttgacgcaacaaccggtgacgatgtattcaatggaacttacaacatcagcaacggtgatgttatcacagttcctccattagatgtaggtaaatacagctatagtgtctcattctatggagatgataaatataacactggcggtgcagattccattgctgctgtcggaagctttgaagtattggatatgtctgatgtagatgttcttgtcactgcagatgaaagcatcacttacggtgaaaaggtcactgtagaaattgatcctatcgtttctgaaggtggattacctgtaacaggtactgctaccatttatgtatatgatgatccagcatctgtagatcctgtatatgttttagctgatgtagaacttgataaagacggcgctactgcagtccttgataccatattgcctactggcgaatactggattgttgtagactttgaaagtgatgatggctactatgatggcagaggcgtaacttcaaccattgttgatttagctctagctaaattatccatagaccctatcactgttacctatggcgaaaccatccctattactgtaacagctcttggcaatggcggtgaactattaaacggaaccgttgaatttaagatttacggtccaggatttgaaggaacagtcactgtcaaaaatggtactggagtaaccaatattacagaaaggtttgatgttggaacctacactatcatagctgcatttggagatgatggtgctaattacgaaggattcaacattacttccttagaaatcactcctgctacccctatagtccgtgtaactggaagtgaagttgaatatggcgaacctagcactgtaactgtcagtgtaagtgacattgatggcatgccattatccggtaaagtaatcgtaactgttgactgggtcgttgacggtcttacccaagtaattgaccttgacgattccaatgaagcttcattcgatctcagcccatatgtccatcaaggaacatacgatgtaactgtaacctacattgcaaacggcaactacggcgaagctgtaaacgacactgaaacagttaatgtaactgcttccactaccgctacagttaacgttgaagttccagaggacgtatcatacggcgatgaactaactatcaaagtcactgctgaagacggcgctggcgaacaaatccctctagaagcagtcaatgtaactgtaaacggtgaaaccaaagaataccctgtagatgaaaacggcactgtaaaccttggcgtattgcctgcaggagataatgaaatcaccgtagctctcgatgacggtactcacaagcctacaaaaactgaagctacagccaaagttgctcctgctgaagctgttgtatttgttgacactgacaatgataacccaagctatggagatgtcgttgttgtaactgtcaatgctaccaacaaggacaaacctatagatgccgatgcatgtcttgttgtagacggctacttaatcggctactacgatcttgaagacggccaagttgaaatctctattaaagacttagcccctggcaaacatgaaatcgaggtttcagtcgcaaacggaaactactctgaaggtagttacggacgcgcaattgtcaatgtagataaagcaactcctgtaatttcagcagaaggcgaaacagtcgaatggggtgaagttgcaactgttaaagttaatgcaaccggtgcaaacggcgaaaaattaaacattcctttagtagtaagagtcatctgggaagtatctggtgtcgatgaacttattgaaattgaaaacggcactggagaagctgctttccaaatctccaactatgttgctcctggaacttacaatgtaactgtcatattcttaggaaatgatgaatattacccagtaaacaacactgaggctaagattatcttaaccgaaccaaaaactgttgaaatggaagtatccatcacccctgacgaatacggcaaagctacaaatgtaactgtaacccttaaggacgttgcaagcaaaccacttgaaggctcaactgtaaccgtaactgtagatggcaaagaatacgctaacgctacaatcggcgaagacggaaccgtaaccgtccctgtagaaggattagaagctggcaaccacactattgctgtcgacttcgatgacggtgaacactcccctgttcatgaggaagaaaacatagcaattgaaccatcaactgatgctaccgttgaagctactgtaaacgtaggcgaaaacgaaaccactgttgatgtaattgttaaggattccacaggtgaaggcataaatggtactgtaattgtctatgtagacggcgaacctgtcgctaacactacagttggcaatgacacttcaagcgtatccattggccaattagctcctggcgaccacacagttgacgttgaatttgtaaaccctaactatgctccaacaagctactccactcatgtaacagaatctacttcactcactaacatgacagttaaagtagacaagaaaaatatcctctatggtgaatcagacataactgcaaccattgaattcacctcagaaggcaaagctcttgacggtgtagttgaagtattgttaaacggtgaagcacaaaacgtaactgtaaccggcggaaaagcaactgtaaaattcagcgacttagctgcagatcactacactgttgtaagtaacttcgctggaaacgctacatacgctccttcaagcgactcagcaaacttcgtagtggaaagaaaagcaaccaagttcaactacaacgacatgaataccacagcagtcaaccctaatgttgatggaagaatcggcgaatacttctacttccaattagttgaccaagacggaaaagcccttgctaacaagagcgtatccatcggattcaacggaaaagtatacaaccgtacaaccaacgaaaccggttgggctaaactccaaatcaacttaagaatcgtattcggatacacctttgcaatctcattcttaggagacgacaactacacaggcgcattcaatgtagccttaatcaacgtaagcgctcaaactcctaagctatccacaagcagcaaggtttacaaagcctctgctaagactaagactttaactgcaaaactcttaacaagctctggaaacgtggacaaaggtaaaaaactaacatttaccgtaaacggtaaatcctactctgcaactaccaacgataaaggtgtggcatctgtaaaagtaagcatctcccagaaaggaacttacagttttaccgtcaagaacgctaaagacaatacatatgcctctgtatctaagactgcgaagttagtaattaaatag

SEQ ID NO: 2089 - DNA, 1794 bp, Methanobrevibacter ruminantium
  source 1..1794: mol_type = genomic DNA
gtgtttaaattgcaaagtttagagctctctggtatgtctgatgaagaattgaaaggtcttaacttagagggcaagacctttggcgtaattggagtatgtggcgtagttggaaaccttgttgctcgtatcattatggataacggatatgaggtaatcggtacagacatctcatctaaggaagattgcagattctattcatcctttgatgattatgatattgaaatattctttggaggccatccagatgaattctttaagcaaatagactttatagttccacctccaagcatgagtgatgatgctaaggttttagagcttgcaagagagaaggggattgatattcttcatttaggagatatttttaagcttttcaaggcaaacaaacctattttatgcattagcggcactaatggaaagaccaccacaacaactcttttaaagcatattgcatattccaatggaataagccctgccgaacacaatcttaaggggatgcagggaaacaacgaatttattccatcacttcagacaaggcttcatggggatgtggctattttggaaactggaacagacggcactcctggcggattgaagtctgtaatcgatttgacccatccaaattatggaatcttgacgaacatcacaatcgaccacctggttgaccctgatgaccataaggacggcgttgatgaaagtctaagcgcaatttcattggatattggtgacgatgaggtatcccatatcgacagaggatttcttgaatatgcgagagttaagggtgagcttatagagggaatcgaagaaaacgacggcctattgatttacaatagcgacgatcctaccattgtagggcttttggataagttgaactacagcggcaaatccattagctttggggtggaaatcgatgaattcgataattttgagttggaaatcgatgaattcgattttgattcctcatttgattctgtttcccctatcaaaatccacacaaagccatgctggtgcggcagagatattaagatatatgaaaccatctcaggcagcggattctatgaatgccagtgtggaataaagtatgaaaagcctgtttacattgcaaaggatatagatttaatgaatcgcagcttcaatcttgcatctcgagacgatgagtttgaatttaagctgacacttgatggacttcataatgtatacaatgcagttggagccataatcgctgcaaaagagtttttaggcctatccaatcaggatattcaaaaaggattgtccacattcaaaggtgtggctggccgtatggagataatcgataaaatagaagacactacaatcatggtggattatgcccataatcctgcaggggtcgagaccatattggatgccatatccaagatatatgacaagacttgtgtagttattacagtcagttcggagtcaggggttgaaggggacttcgatatacttgattcagctattggaaaagtggattatattgtccctgcttcacatgactgcaggtatgctgccgataagcttattgagttgacaaaggaaaacaggcaagaagaacttcatttaaatagtgtttatactttagatgagctttgcaagacttttgtattgacagatgaggatttaaagcaggaatccattaaaacacttggagcaagcgaagaccaggtgataggaggacttaaggaggcattgaaccttgatactgatatcattctcatcatcggagaagctgcatttaagtttgaatcagctattaaagacttctgtgatagtctttga

SEQ ID NO: 2090 - DNA, 1497 bp, Methanobrevibacter ruminantium
  source 1..1497: mol_type = genomic DNA
atgaatgttattgttgtaggagcaggaaatgcaggtcgtcctgttgcaagattattaaattatgctggccacacggttaagataacagatcccaagaacatagaagacttccatatggatgttcaaaagacattaaggcttatggaaagcgaaggagttgaattggacttaggagtattcaagccaagtcttgatggaatagacacagtctatctctctccaacagttcctgaaaactctccagcctataagatcattaaggaagctgatttagacgtattcaccaatgatgactttggcagattggcagacagcttcattgacattgacataatcggaataaccggcagcgtaggcaagaccagtaccacccatatggtgactgaaatattcagaactgcaggttatcaggtttggatctgctcatctatgactcaaaaccttgtaagcgaagtcattgtagacggaataatcaagggaattcctgaaaagtctgacattgctgttcttgagcttcctcatggaacagccggccttatggcagagcttaagcttaaggttggagcactcttaaacatatatgaggagcacctttcagagttcggtggctctatggaaagatacacccaaaggaagatgttcattgccaaaaacagcgaaaacttcattacaagcattcactgcaaggacaccgtaaaggaagcaagacctgatgcaatcttttacgcaatggttaaggacctccctgcttatgacccatccaagaaatcactcttctttgacaagatagcaaactttgaagagatagctatcggagaaggccaagtatgcaatttcattggagacagtgctaaaggcgctattgaaattggctataagtttagaaacaagtcaaatgagcttagaaaaggaagcttccagtctgagttccatatgatgagctattattatgagaatgcggtggcagcaactgctatagcaatggcatatggattaagcgtagagataatcaaggaagggcttgctaacttcaagggtctttctgtccatatggagtatattggagactacaatggtagggaagtttatattgatgcatcatatcttattgaaggtattacagtcgctcttgactttttaggagataggagtcttgttctgcttctggataactttgatacttccacttacagagataagaaggaaaccggtaagcttatgggcaaatatgctaatgtcatggttgccacaggatttaatgaggtttatcaaagggtagatcttgagcctgctcaagagctattggatgcagctgttgactcagatgcagttaaagttatagctggaaccatgcaggaaggggctgagcttgcaatcaagtattcaaagccaggagataccattcttcaccttggacctcaattgatgcaggaccctgaaggaattatggaaaagatagttacaggccttgaggaaggttgtaagaagtacaaatga

SEQ ID NO: 2091 - DNA, 972 bp, Methanobrevibacter ruminantium
  source 1..972: mol_type = genomic DNA
atgaaacgacccaaaaaaatgtacaatccagaggacatgtttataaaaagaagcaatacataccttggaagagtaatgcatagttttcttaaactcccaggcagatatgtaaacagcagaacaaaccaatatcctgacttttttggaaaggaaagaaaaactgatgcaactatattagttgatttggaattagaaatggaagaatctgaagttctagaaagctcatatgaagtttttgtaagtgaaaaggaaactgaagagatccctcaattagcagaatgcctccacaatgaaaaaggaaaaatgattatcgacattgaagatgaaagttcaaaagtagataaacagactttagcaaaagattttgaatataattatatcattcattatgaatcaggattaccagtttattctgtcataacaacccctattccattaaaaagatgtaagacatgttacatatctggaaataccgtctttaagccaattataaaatcttatgatgaaatggatggtgaagctaaattaaaagaatttcaagaaaaatatgaaagaggagaatatttttctgatttggaagggtatgaactaatcagcatccctagaatgtatggtgaaaaaggaaatgaggtcattgaagaagtttgcatcctatttaataaaataaaaatgaaaaatggaagagtgaaaatacaattagcaagatgtttagactgccttataaacaaatatggcggaacattagaagaaataaatcgcttagaaggactgataaacatgacaaaactaataaatctagaaaaagaatatgaagatagactaagacaagaaggagaagaaaaaggaagacaaaaaggaagacaagaaggaagactagaaggaaaactagaactagcaagacaatttgttgaagaactaggtgtggataaagtttccaagatttctaaaattgaaaaaaatcttttactataa

SEQ ID NO: 2092 - DNA, 354 bp, Methanobrevibacter ruminantium
  source 1..354: mol_type = genomic DNA
atgtatggccaaaaaggaaatgaagtcattgaagaagtttgcatcctatttaataaaataaaaatgaaaaatggaagagtgaaaatacaattagcaagatgtttagactgccttataaacaaatatggcggaacattagaagaaataaatcgcttagaaggactgataaacatgacaaaactaataaatctagaaaaagaatatgaagatagactaagacaagaaggagaagaaaaaggaagacaagaaggaaaactagaactagcaaggaaacttgttaaagaatatggtgtagatgaagttgtaagaataagtggcttaagcaaagaaaaaatattaaatgaaaaaaattag

SEQ ID NO: 2093 - DNA, 1236 bp, Methanobrevibacter ruminantium
  source 1..1236: mol_type = genomic DNA
atgtttttaactaatgaagaagaaaagatggctaatggagaatatggagagaccattagaaaaagcatggacatacttattgctttaggagacatttatggtgccgagaagttcgtagacattaagtctgcgcaggtctctggagtgtcctataagactataggtcaagccggacttgaataccttgaagaccttgcaagcacttctgaaatcatatataatgaaaatggcacaatcagcgataaaagcgggatagcaacaatctctgctacacttaatcctgctggaactgaccttgacaactgggaggactttggttttccagctgattttgctcgaaagcaagtagatatctgcaatgcatatggagctctaggaataagcacaacctgtacctgcactccatatctcattggaaatgttccaaggtttggagatcatgtttcctggtctgaatcatctgctgtggcttatgtcaattctgttattggggctcgaaccaatcgtgaaggaggtcctggggcgcttgctgcagctattgtgggaaaaactcctttatatggcttccatttagaggaaaatagaaaggccaatcttcttgttgaagtggaatcagagcttgagagagccgactttggcgctttaggctatgcagtaggtcagatagttaaagatggaattccttattttaaaatgcaaaacaaaccttatgaggtatccaatggcaatctaaaggcacttggcgcagcacttgcttcaagtggtgccgtagcactttaccatgtggaagatgtcactccggaatttgcaaatgcagctattgatgatgtggagaataagattacaatcactaaggatgatatagtaagtactagagagaaattatccactgcagatggctatgcagatttggtttgcttaggctgtccgcatgcttcccttgaagaggtaaaggaagttgctgagatagttaagggtaaaaaaattaaaaatgagctttgggtctgcacttcaattaatattaaagaggctgctaaacgtttaggctatcttgagacaattgaaaaggcaggtggtaagatctgctgtgatacatgtatggtagttgctcctatcgaacagatgggctatgaagtgattggagttaactctgcaaaggcagccaattatgtcccttcaatgtgtggattaagggtaatttataatgatatagaggatttattggactttgaatag

SEQ ID NO: 2094 - DNA, 960 bp, Methanobrevibacter ruminantium
  source 1..960: mol_type = genomic DNA
atggatattggaaaactagttggaaatacaccaatgattaggattgattatgaatacgaaggaaaaactggcagtatttatactaaacttgaattttacaactattctggaagcataaaggataggatagcattatatatcattgaaaaagaaaaggaaagaggcaatcttaaggatggccaagcgattatagaggttactagcggtaatactggaatagcattcagtgcaatcggtgcgctatttggccatgaggttcacatattcatgcctgattgggtctctcttgagagaagaaagcttattcaaatgtatggagctgaagttcatcttgtctcaaaagaggacggaggattcaagaaggctcttgagcttgtagatgactttgcagatgaaatcggtgcatataagcctcttcagtttgacaatgaacttaatgtggaagcccaatatgaaactacaggccaagagatcattgatgatcttccagatgtaaatgcctttgtttcaggaataggaactggcggaactcttatgggaataggcaaaagattaaaggattataatccagaatctaaagtatttgcattggagccaagtacattatccattcttaaaatgggtatggatgaaggcagtcaccttattgaaggaatcggagatgatttcattccgggaatcgttgatgaggacgtaattgatgatattgtcttaatacatgactgcgatgcaatcaatatgtcaaagataattgcacagaagcttggtttaggaattggaatctcaagcggagctaacttcttggcaagcgtcataatggataatgatgacttgaagattgctacagtatttccagatgacaataagaagtacataactactaaattgtctgagccgattgatgaaaatcctgaattgatttctaataagattaatattattgattttgaagtggtctaa

SEQ ID NO: 2095 - DNA, 1299 bp, Methanobrevibacter ruminantium
  source 1..1299: mol_type = genomic DNA
atgcttaagaagcatatcgaaaatgaagacattattagattaatttctcataatgatgctgacggattgtcagcagcaggtgttatagcaaacgccattaaggaagaaggcggacagtttcacataactattgttcctagattaaagccggacgttatcagagacgtatctaaggaaaaatatgaattatatgttttctcagatatgggaagcgcttgtatcaagcagctcaatcgtcttaaatctgatgtgattgtagcagatcaccaccagccaagcgagcacgagccaaaggataatctcattcatgttaaccctcacttatttggaatcgacggaagtcgccatttaagcggagcaggctctagctatttagtggttagaaatatgaacaagaagcatttggcttatatggcgcttatcggtgcttttggtgatatgcaatgtgccaatagatttacaggcataaatcaactaatcttaaaggacggccaagaagctggaaacttggaacttcatgaggacttaaaaattgtttccaaggcccaagagcctctatacaaatcaattgcttataccttgaaccctgctttgccaggattaactggcagattggataactctcaagagctccttgagaaaatgggggtttcatatggcataagcttcttggatttggaagatgaggaaaaggatgttgttaaggatgagcttgtaaaggtcaatccacagatatttggtgacgtttacagtgttccaagcgaacatcctgttttaagggatctggaagagtattcatcaattcttgatgcctgtggaaagaacaaggagtatggcttggccttaagcataattttaggcgaaagagaaaaatctcttgacgaggctttaaaacttcaaaagagatatagggaagaccttaccaaaggttttgaatggatcagccgtgaaggcgctcagcaattgggcagtatccagtatctttatagcgaagataaagttttaaaaagcataatgggtacaatagcaggagttggaatgtcagctaagattctaagcgatgaaaaacctgtcattggcttgtccagacttcataatgatataaaagtctctggaagagcaaccagattccttgttgcacgtggagttaatttaggcaaggctttagctgatgcctctgttaactttggcggacaaggaggaggtcatgacatcgctgcaggtgctatgataccttatgaggctaaggataatttcttacatttgcttgatcagatagttgaagatcaattgcaatag

SEQ ID NO: 2096 - DNA, 399 bp, Methanobrevibacter ruminantium
  source 1..399: mol_type = genomic DNA
atggcaagaccagattggattatgtattctaatgaagaaatcgaagaatttattgttaagtttaaaagagaaggtaaaactgcaagtcaaattggtattatcttaagagaccaatacggaattcctagcgttaaggaagtaaccggtgagaagatcactgaaatcttaagaagaaacggacatgcagatgaatatcctgaagatttaatgaacttaattagaagagcagtaaatatcagagatcatttagaagaaaacccaaaagaccttcatggtagaagaggattaactatcattgaatctagaattcgtagattaggtagatactatgcggcaaatggccaattaccagaaggatggagatacgatccaacaaaagcagcacttctcgtcaaataa

SEQ ID NO: 2097 - DNA, 558 bp, Methanobrevibacter ruminantium
  source 1..558: mol_type = genomic DNA
atgataacatttataactgggaacgaacataaagtaatagaagcagagaatatttttcaaatttttggtgttaaactcgagcatattgatttaggttacatggaacctcaaggaacccttgaggatgtttctaaatttggtgcaaaatatgcttgccaagaattaaatagacctgtgattgtggaagatgctggtttattcataagagctttaaacggttttccaggaacttattcatcttatgtgcaagattcacttggaaatgaaaatattttaaaacttatggatggaattgacgatagatacgctgaattcaggtcagttattgggtattgcgctcccaattctgagcccaaggtctttttagggcgtgtcaaaggtcaaatcgctcatgaagaaagaggcaatctaggctttgcttttgatccgatatttttagtgccggaagagggcaagacctttggagagcttactactgaagagaaaaatcagttttcacatagaagaaactctttagagaaatttatcaattggtatgtaagccaagatgatgaataa

SEQ ID NO: 2098 - DNA, 1698 bp, Methanobrevibacter ruminantium
  source 1..1698: mol_type = genomic DNA
gtgatatctttaggaattgaaggaactgcagaaaagacggggattggaattgtagacagtgatggaaatgtattggctatggctggaaagcaattgtaccctgaagttggagggattcatccacgtgaagctgctgaacatcatgctaaatggattccacagctaattccacaggcaatggaagaggcaggccttgattataaggatattgacttaatctcattttcacaagggcctggacttggtcctgcacttagaatcgtagcaagctctgctagaagtcttgcccttagcttaggaattcctattgtgggagttaatcactgcattggccatgtggagataggaaagcttgatactggggcaaaaaaccctgtaacattatatgtaagcggtggaaacagtcaagtcattgcatatgaatctggcagataccgtatttttggagagactttagacattgcaataggaaactgtcttgatcactttggccgtgagaccggccttggacatcctggaggccctgttgttgaaaagcttgctaaagatggttcttatattgatttgccttatgttgtaaagggcatggacttttctttctctggacttttatcctctgcacttcgtgcccatgagaatggtgagagaatagaggatatttgcttttcccttcaggaaactgcatttgcaatgcttgttgaggtaacagagcgtgcactggctcatactgaaaaggatgaggttctattgtgtggaggagtttcagcaaacagcaggcttagggacatgatgaagattatggcagaagagcattatgctaagttctatatgcctgaaatgaaatattctggggacaatggtgtaatgattgcttggctaggtcaattgatgtatgataacttcggtccacttgacattaaggacactgcaatcatacaaaggttcaggactgacgaagtggatgctccttgggtagataacagaaaggaaaagttaaatcttccagaagaattaaaggcaaagggtgccgaatctgatatttttgaagcaaaatggcttggaatggacgctattgtaaagcaaagggtctctaaatcatataggataagagaaattgatgataagataagaaggcaaagaactaaaagcgaagctaaaatcctttcagatgttaaaaagacaggtataagaagccctattttgtatgatatcaatttggatgagaaatatatagttatggaaaagctaaatggacctcttgttaaggatgtgatgcataaattggattatgataaaaggaaggaattatcttatgcaattggggaaaacattagattattccatgatggagacataatccatggagatttgactggttctaatatgatcttgttaagcgatgattctaatgactctaatgatgatttctctaaatctgatgacgatttcaataatggcgttaatttagataatcttgattttgcaaacaatttagctatttttgacttcggccttggaaagtattcagatttattggaagataaggcagcagacctcttggttttaaagaaatcattccaaagcatagattatgatatagcaaatgaatgctttaattggatattggaatcttatggttccgataagataattgataatattgcagatattgaaagcaggggcagatatactcattga

SEQ ID NO: 2099 - DNA, 1065 bp, Methanobrevibacter ruminantium
  source 1..1065: mol_type = genomic DNA
atgattgaaggattaaagacatacggctcagataaaatcgtagatgaacttaaagacttaaagaatcctatttttatatgtacaatagctacaacagaaacatctaaaatcccaggacttacaggagcaggagctactccagaactgaccaaatacacacctgcaggggatgcagagcttatcctagagggagaggtcaaatgcatgaaggacataccacagaccgtcatcggagaggttgtcactccaactccttccatgattacaaaaggttcccttgccctatgcgactgtccggttatggttcttgatgccggaagcgaaataaaggcacaaactgatgtatttgacattagcgacggaaagcatggaatggacatacgcactggaaaggctgtcgaagactcagaggaactctttgaaaaaggatactctctaggagagattttatctgaaaagcatggatatatcgttgttggagaaagcttaccagcagggacaaccactgcccttggagtattagttggcctcggatatgatgcgaaaggaaaggtaagcggatgcatgaacaccaatccacatgagatgaaaaatgagcttgttgatgaaggattaaagaatgcagggattgttccaagcaaggacaataatccatttgatgttgtcaacgctgttggagatcctatgcttccagcagttgcaggacttataatgggttccagtgtgcctgtagttttagctggaggaactcagctaactgcagcttgcgcaatagttaaggcattggatgatgaattcgacttttcaaacacctgtcttgctacaacatcctttgttgtaaaggatgagactgctaatattcttgatataatcagccagatagatgatataactgtaaatgcagttaatccaaactttgaaatatccaaagttgaaggattgaagaattatactaaaggatatataaaagaaggtgcaggagctggcggagcaatgtttttagctcttcttttaggcaatgacattaatagcattagagaatccatagaggatgcatgcagttaa

SEQ ID NO: 2100 - DNA, 201 bp, Methanobrevibacter ruminantium
  source 1..201: mol_type = genomic DNA
atggctaatgataattttcaagtaaacaagcaatttgctaaatttaaaggtaaaaatgtccttataggactaaagaattgggaagaagttgaaggaaaaattatcaccattgataactttttaaatttagtcttagatgatggaaatggtttaaaagttattaaaggtggaaaagtagcatttatttctattcaagaataa

SEQ ID NO: 2101 - DNA, 147 bp, Methanobrevibacter ruminantium
  source 1..147: mol_type = genomic DNA
atggcaattaatcaacttgaagctacattacaagctgtaactcatacattagctaaattggaaaaagaaggatgtagtgatgaaaaattattaaaagaacttagagaagaaagagataaacttttgcatgaattaaatcttaattaa

SEQ ID NO: 2102 - DNA, 783 bp, Methanobrevibacter ruminantium
  source 1..783: mol_type = genomic DNA
atgattcatatgaaaattttattatctaacgatgacggtgtaaacgcttctggaattcttgctgcaaagcatgcagttgaagacttgggagatgcaattattgttgcaccatctaatcagcaaagcggaattgggcatgcattaactctttttgaaccattaagagtaaataaggttattttagccgacaatgacattggatatggagtttctggaactccgactgacgctgtaacaatcgctcttttcgagcttcttgacgaatgtcctgatttggccatatctggaataaacactggtatgaacactggtaaggcagagctaaccacttccggcactttaggagctgccatcgaaacagccacattcaatattccgacaattgcagtaagccagcatgtttcagatgatgacttgaagtttgatgaaggggaaatagagatagatttttcatctagcgtcaaggtcttaagggagcttgtaaaaaagataatcaaagacggctttcctaaaggcatagacattttaaatcttaatgttcctagccatcctgattcctatgagcctgtgatttgccctttaggagataggatgtattggccggttgtagagaaaagacatgatccaagaggcagggagtattattggattaatggagatgaatatgtgggaaaccctaaagattcagatattgatattttaaatcagaatatacctacaatcactcctttgactttggacatgactcataatatggattatttaagagagtggtatggttag

SEQ ID NO: 2103 - DNA, 711 bp, Methanobrevibacter ruminantium
  source 1..711: mol_type = genomic DNA
atgttatctattggtcaatgttacttagaatttgttaataaaatccttaaggaaggtaaagaaacctataaggacagcgatcatcatcttaaggaatatcttggtaattattactatattgatgatcctcttgacttgaaattcagagctaaatatcagcatatgactccagagcttatgttagaggaaatcaagaagggaagatatgatattgacgcctgtccaattaaaggtgatgctttatatgaatatgtaaagtcttttgaaataagagacgatcagggctttgtctatacttatcctaatcgtatccttgagcattttggtgtagatcagtttgaagttatgaaagagagaatcctaacagctacaggaagtaacagagctgttgctgtaacctacgatcctaaattggaccatgatagggaagacattccatgtctccagtttgtacagatgcttgttagggatggggaattgactatccatgtaatattccgttccaatgacatctttggagcattctactcaaatatgttcttcatatgttatatgggaataaagatgaaagaggaagtcaataaggagattatgggagagaaattgaactttggcggtatccattatcactctacctcagggcatatctataataatgatatgagggctgctaggaagttgatttctgctaataaggctgctcttaaatag

SEQ ID NO: 2104 - DNA, 1200 bp, Methanobrevibacter ruminantium
  source 1..1200: mol_type = genomic DNA
gtggaaaagccacaattagttaattttatagctaaagtgcttgaagattctggctttaaagtctataagaactttaaaacttcccaacagaccgtagatatatatgcagtcttgccaacatcaatgggcgattttggtatggttgttgcatgcaaaaactatgacaaggaatgggaagttggaatcgatgtcttaaaggaaatggaagttatcggaaagaaacttaaggcatcaaaggtcagcgttgtcacaagttcaggattctcctcacaggcaaaaagatatgctgaagagaggaaaatcaaattggtagacagaaacgatcttgtagccttagctaaaaaatacaacaacaagaaaaaacaggaaaatgaaccggtaagacttagaaaggaaagtcctgctaatatcgatagggattcattctataatagggatgtaagccgtgactacatagacaatgtaaatggcacccaatatgatgccggactcaatagagtcccaaatccatatgacagctatgaggaatatgaatcagatatcgattattatgaaaatcaggtgggaggaattgacttaagcggatacagcgcgtatgatgatgacttatatagggctgaattccttaataggcaccctagcaatgaatccaactataatggattattgattgcaaacaatcgagacccatatgtaaattccaaacctagttccaatagcagaagtctattctctagaaataaagcgactgaaaagcttagcagcttaaattcaagaggatacacaaaaaatacaaacaataataataacagacaaagaaatagcagaaccacaactgtcagtagaaacaaaagtccttcaagaaatttcatatcttcaagggacaatgctttatctaagttctcaagaaatgaaagcagatcaagtggcggtttaaaagaaatgattaagccaatacttggaaatacaattgtttcaatcattgttgtaatagttgttgcttatctgattgcattcatacttggaagcatagttaaagtccctacaggatatttaggattaactgaacttgcagttgcattggtattatcttatggactagtcttctatacagacagaggctccgatgtacttgtaaaaggaacaatcatattctttatttccttagtggtattgatgataatactgattgcattctag

SEQ ID NO: 2105 - DNA, 924 bp, Methanobrevibacter ruminantium
  source 1..924: mol_type = genomic DNA
atggcatttgatgaaaatggtaaagtatggatggatggggaatttgttgcattaaaagatgctaaaatcagcgttctttcccacgtaatccattatggatctgctgtatttgaaggaattagatgttacgaaactgaaaacggacctgcagtattccgtcttcaagatcatgtacacagattatttgattctgctaaaatctataagatggacattccatttactgaagaggaaatctgtgacgctatcatagaaacaatcaaagtaaacaacttaaaaagctgttacattcgtccaataacctacagaggatttggcgaattaggtgtaaacccattaaactgtcctgttgaaaccaccattgctgtatgggaatggggggcatacataggagaagaagaaatggaacaaggtgcaaacattggtatttccacctggagaaaaccagcaccaggtaccttacctgttcttgcaaaggctgcagctaactatatgaactctcagcttgcaaaccttgaagcaggtgaacacggctacgatgaagcaattcaattagactaccacggccatgttgcagaaggaagtggagaaaacatattcatagttgaaaaaggcaagatcgtaacccctgacttaggctcttccatccttcaaggaatcactagagacagcattatgaccattgctaaagacttaggatatgaagtctcccaagaaaccatctcaagagaaaggttataccttgcagatgaagtattcttcaccggaagcgctgctgaagttactccaatccgtgcaatagacaacagacaaattggaatcggatcaagaggccctgtaactaaagagttacaagaaaaatacttcgacgcagtaaacggaagaagcgaagacattcataactggttaacttatgttgaatag

SEQ ID NO: 2106 - DNA, 825 bp, Methanobrevibacter ruminantium
  source 1..825: mol_type = genomic DNA
atggatattttacaagcaataatcattggacttgtccaaggattaactgaatttctacctgtaagtagttctgctcatttaatatttattcaacaagcattaggattaagcaatgttccacttgcctttgatgtcttattgcatgtaggaacccttgtagcagtatttgtatacttctttagcgatattattcaaatgattcaaggattcttctatagcctattggatttaagggatggaaatttcattccagaaatcagaagggacccttataagaagcttgcatggcttacaatcattgccacaatccctgttggagttgtaggaatcctattcaatgacattatagaggaaatgtttacaggattgaccatacctgcattcttgcttcttataacaggatgtcttttatatgtatcccaaagaatgaacagtggaaaaattgatgttcaaaacataaccatcaaagaagcattgcttatgggatgcggacaggcaatagcagtattgccaggtctttcacgttcaggaaccacaatagctgccggattatttgcaggactagacaaggaatttgctgccaaattcagctttatcctatcaattccagcaatcttaggtgctgctgtagttcaattgaaagatctaagcggaggcaatatagagattggtgcatgtttagttggatttatcgtagcagtcatttcaggatactttgcaattagcttcttgcttaagatagtaagggaaaagagcttagacatatttgcttactattgttggatagtaggagtaattgttttggttgggagtattcttttatag

SEQ ID NO: 2107 - DNA, 1002 bp, Methanobrevibacter ruminantium
  source 1..1002: mol_type = genomic DNA
atggtatatgtaggtatggatcatggaactactgggatttcatttgctataatggatgatgagaaagttcttgatgtttttaagatatctagagaagatagtaaggctggaagagtttcagctattgaagaattgtctaaacgcattgatttagaagatattgacttaatgattattacttatgctatgggagatggaataagcactattcttcctatggaaaaggttgaaaatagaggaatactctccattggaggtgccggcaaggtaactggagggggaacatctgtctatagtgagatagagaatgctaatcttccggttttaatgattccaggtttgcataaggattgtgattggcttgacccattgtttagggcagcatattcccaccatgcaagtcctgaaaaggtaagcattgtatataatgcctatcttgagacccaatgggagaatatggtagtggctgacatcagctccaatagtgttgaccttcttattgaggatggcaagatcaagggagccattgatgcctgttgcggtgcaatgggtattgttcatgggccattggaccttgaaatgattagagacattgatgagggaaaaagaactgccaatgaatgtttctcacatgcaggagctgttaagatagctaatgttgataataaggttgcattgatgaaggatgagctattggaaatgtattccaaaggggacgagagggctgttttggctattgacacaatgattatgactgtggctatggagattgcaggtcttattgcagttagcaagaatgagatagatggaattgttcttacaggttctatgggttctatgaaagagcctgttgactttgaggctggattgaataagtactttaagaataagtatgagactaggattatttcatctgaatctggagctatcggtgcagcacagatagcaagagacatcttcaatggaaaaagagatattatgggtataaaagtggactattag

SEQ ID NO: 2108 - DNA, 996 bp, Methanobrevibacter ruminantium
  source 1..996: mol_type = genomic DNA
atgaaaatgtattatgatgacgatgttgacgctgaagttgttgcagataaaaccattgcagtaatcggatacggaagtcaaggacgtggtcaatctagaaacatggctgacagcggattgaatgttattgtcggtcttagagaaggaggttcatcctggcaaaaagctattgatgatggaatgaatgttaaaaccatagaagaagctgcagaagctgcagacatcattcacatcttacttccagatgaaacccaagaaaaagtatataaagaacaaatcgctccttatgttgaagctggaaacacaatttcattctctcacggttacaacattcactttggattaatccaacctggagaagacgtaaacattgtaatgtttgcaccaaaaggccctggttccagagtaagaaccacttatcttgaaggattcggaattcctggtcttgtcgctattgagcaagacgctactggagacgcattgcaacttgcattaggtatggcaaaggctgtaggccttaccagagcaggtgtcattgaaaccacatttaaggaagagactgaaacagacctctttggtgaacagaccgttttatgcggtggtctcactgcacttatcaaggcaggatttgaaactcttgtagaagctggataccaaccagaaatcgcttactttgaaacctgtcacgaagtcaaattgattgtagatgacatctatgaaaacggtatggctggaatgtggcatgatgtaagtaacactgctgaatatggtggattaaccagaggaaacagagttatcaccgatgcaaccaaagcagaaatgaaagcaatcttaggggaaatccaagacggcacattcaaaaaagagtttgctgatgaaaacgctactgacgcagctaacttaaaggaaatgagagctgctgaagaaagagaaaccattgaagtcgttggtaaaagattaagaattgcttgtggtttacagaaagaagatgaataa

SEQ ID NO: 2109 - DNA, 492 bp, Methanobrevibacter ruminantium
  source 1..492: mol_type = genomic DNA
atgagggaaaagtctcatgttattagtactttggttgaacacaagccaggtgtgcttcagaaagttgcaggactgttaaacagacgtggatttaacattgacagcatcactgtcggagcatctgaagttgaaggcttggccagaatggtttttgttgtaaaaggtgatgaaaaggttctagaacaggtcatcaagcaattgcacaagcttgttgaagttgttaagattaaggaccttgatcctgaatatgttttaaaaagagagctctgtcttgttaaggtaaagacaacaaaggaaaagtctagatctgagataatcgagtatgcagacatcttcaaggcaaagatcattgatgtatgtgatgatttcattacaatggaggtcactggcaatcctgagaagattgattccttcttgagattgcttaagccttttggaattaagaagattgctcgtacagggcctactgctattgcgagagggcatcactaa

SEQ ID NO: 2110 - DNA, 1896 bp, Methanobrevibacter ruminantium
  source 1..1896: mol_type = genomic DNA
atgagaggcggagacgctattataaaagctttaatggataaaggtgttgacaccatattcggttaccctggaggaaccgttattccattctatgacatgctatatgactcagacttaagacatatacttgtcagacatgaacaatgtgcggcacatgccgctgaaggttatgcaagagcttccggcaaggttggtgtctgcttggccacttccggacctggtgcaaccaatctggtcactggtattgcaaatgcatatatggattcatctcctataattgcaattaccgggcaagtggtaagcaatctgattggaaatgatgcatttcaggaagtggacatcataggtataaccatgcctatcacaaagcattcctaccagccaaaggatgcaaatgacattccaagcattataaatacaagtattgaaattgcttcgacaggcagaaacggacctgtattgattgacgttccaaaggaagtccaagagatggaattagatgaatatgtccttggaaccattcctacccctggatataagcctagcgtaaaaggaaatgataagcaaatagctaaggcagctaaaatgcttttggaggctgaaaagcctataatattagcaggtggaggtacaatccttgcagatgcatcatctgagcttaggcaagttgcagagcttgtcaatgcgcctgttgcaacaacccttatgggtaagggagtcatcgatgagaaggatgacttgtctatcggcatgcttggaatgcatggaaagcaggtggcaaatcagtctgtaaataaaagtgactgcctgcttgcagtgggagtcagattctctgataggaccactggaaaattagagaagttcatgcctgatgctcaagtgattcatattgatatagatcctgcagagattggaaagaacgttccagttgacttgcctattgtaggggatgctaagatagtccttgccaaattggctgatgaattggccagctccagatttgctgaagagtttgatgatgatgaattgtctggctccaagattattaagggactgatggaaaatgatttggctaaggaattatacaagagcaaattagtcaaggaaattgaaagctccaagtttaaggagaattatgaattcaattatgacagttacagcccttggctcaagtcagttgttgactttaagaatgctacaatcccaagggttagctatagcgacattcctttaaagccacagcaggtaatcaaggaaatcgcaagctccattacagatgatacaatcgtaacaactgatgtaggtattcatcagatgtgggcggcacacttcttagacatttcaaagcctcgcaagttcatctcttccggaggtcttggaaccatgggattcggccttccggcagctatcggcgctaaagttgcatgtccggatgatgcagtccttgccattgtaggtgacggaggattccttatggtctcccaagagcttgcaacaatcaaggagcatgacattccggttgtaattgcaatgctcaacaacagaaagttaggtatggtatatcaatggcagaataagatgtatgataagagatactctgaaactgacatgggaaacactccagactttgttaaattggctgaaagctatggaatcaatgctgtgaaagtcgaggaagttgacaagactcaagaggtattatccaaggcacttaaggacaatgaagccattctattggacatcaccgttgagaaggatgagtttattccaatgttcccgccaggcggagctataacagaccttcttggtgagtataaatatgaaagcgatgttaagaacgttgacttagagcaaaaggaatcagaagattctcaaaccgttgaagggggaaaatag

SEQ ID NO: 2111 - DNA, 1377 bp, Methanobrevibacter ruminantium
  source 1..1377: mol_type = genomic DNA
atgatattttctaaactggaaaataatcaattgcttaaaaaactcttaaatggagaaataaaaatgaaagtattagttgttggaaccggtgcaagagaacatgcaatctgtgatgcattaaaagatgatgtagacttatacgcttatatgagcaagaacaaccctggaataagcaagatttccacctttaaaaaaggagatgaaggggaagttgacgaagttgccaaattcgcaaaggaaaatgaaatcgaattggcagttatcggacctgaagctcctcttggaaaaggaatcgtaaacgctttagaagcggttggagtcccttgtgtcggaccggcacaggaatcagcaagaattgaaactgacaagtcattcatgagaaacctatttgaaaaataccaaattaaaggatctttaacctacaaggtatttgacaactacgaagacatcagcgcattccttgatacctatgaaaaggatgttgtagtaaagcctgtaggtttaactggtggtaaaggtgtaaaaatcgtaggagaccaccttaaagataatcaagatgcaaaagcctatgcaaaagaagttatggacaatgcaatgggtggatttgcacaagtaatcatcgaagagaaagtggttggagaggagttcaccatccaagcattctgcgatggggaaaacctagctgcaatgcctgcagcacaggaccacccacatgcattcgaaaacgaccaaggattaatcaccggtggaatgggctcatactctgatgttggaggattattgcctttcctcactcaagaggactatgatgaggctgtcgacattatgaaagagaccttaaaggcaatagctaaggaaacaaccccatacaaaggaatcctatacggccagttcatgctatcaaaagacggccctaagctcattgaatacaatgcaagattcggtgaccctgaagcaatgaacgtgcttcctctcttaaagacccctatggttgacgtatgtaaggccatcgtcgacggcaagctagaagatgtcgaatttgaagacaaggcttctgtctgcaaatacatagttccagacggatacccagacactccacatgcaggagagcttattgaaattgatgaagaggctatcgaagctcttggagcaaaggtcttctatgctgcagtaagccaagaggatgacggagtccacctttcaggctcccgtgcattgggaattgtagctcaaggcgatacaatcgctgaagctgaaaagatagctgaagaagcctgtggtcttgttgaaggaaatgtctaccatagaagggacgttggtaccgaagcgttaatccaaaaacgtatagaccatatggaagcaattagaaacgaataa

SEQ ID NO: 2112 - DNA, 897 bp, Methanobrevibacter ruminantium
  source 1..897: mol_type = genomic DNA
atgaatgaatgtgtgatctttatgtctaaacaagctaaatcaaagaatacaataatcaaaaaggccaaaaaactggaaaggcaaggtaaatacataaaggccttaaaagtctgtgacagctatttagacaacgaaagatctgaagaaacattaatccaacttaaaatagacatattagtcaatctatacaataacgacacattcatcaatgaaatcaatgaaaacaaaagcaaaattactgattttatagaaagggatgaagagatagagcttctaaagctttacaacactttagacaattatctagaattgaactctcaaaatatggctgatgagagaaaggttggaacctatctcgccggaggcctattggttgacaatttagagactatccttgttttaaatgaaatggctaaggacaataaggctgaaaataaggagccatttaaagcaaattccgacttgttagaattcatatacaatgtcaaaaagacaagctatcaatatctggaccttatcctgccaaactcacttgaactattagccaattccaattttaatattgaagcaatcatttcaaagattagacagtttttagagcctaaaaaatctacagattctaaggaagaaagcattaaagaaaatgaagaggatgattcagaccaatccgattcaaaaaacgccctaaaatcaaaagatgataccgaattaatttcagattatagcatagaagatgagatgaaaggcttaaaagaaatgattagctacttaaatgataaaaatgaatttaaaaaagccctaatttaccaaagaagacttgtaaaattagcaagagaggaaaacattagagcagaacaggaccatgattccaagcaaaagacacttagcgactactaa

SEQ ID NO: 2113 - DNA, 915 bp, Methanobrevibacter ruminantium
  source 1..915: mol_type = genomic DNA
atgagaagtcttttatcagtctgtgatatagaagaagaagtagaaacaatactcaatattgcaagtgactttaaggcaggcaaaatcgaagaaaagccccttaaggaccaaaagctagcaatgatctttcaaaagtcctctacaagaacaagagtctcttttgaagttggaatgtatgaattaggtggaactgcactgttcttatctacaaatgatatccaattaggcagaggagagcctattaaggacaccgctaaagtcttaagcagatttgtagatgtaataatgattagggcaatcgaacatgacgatgtcatagagctcgagagagagtcagacgttccaattataaacggccttaccaatcttgagcacccatgccaagcattggcagatatgctcaccgtaaaggagcataagggtggattcgatggaaaattcgtttatgtaggtgacggaaacaatgtctgtaactcactactgcttatctgcggatgtttaggaatggatatggctatagcatgccctgatgaatataggcctaatgaagaaattaccaaaaaggctaaagaatatgctaaagctaacaattccacaataacaatcacatcagatatagaagaagcagtaagcggcgcagatgtaatctatactgacgtatgggtaagcatgggagatgaagaggaatctgaaaaaagaagagcagactttaaggactaccaagtaaatcaaaatcttattgatatggctgatgatgatgtcatattcatgcactgcttgcctgcaataagaggagaagaggttagcgctgaagtgattgacggacctcattctgttgtctacgatcaggctgaaaacagaatgcatgctcaaaaggctgttttatattacttcttaaaagaattgtataaataa

SEQ ID NO: 2114 - DNA, 984 bp, Methanobrevibacter ruminantium
  source 1..984: mol_type = genomic DNA
atggaatttaacgaccctgcattggagcatttggtaaacaagatcacagttgcgctgaacgagaacaataaggaagatgcagcacattatatggacattatcatagataagtaccctgaagttgcaaatattttaatgaactctatcgagtttcaaaacataatggctcaaaacgaagatgttgaaggtgaagaagcatcagatgactttgcaatccagcccggaagtgctatggaacttgatgaagagaaaatcataaatgacatgaatgcaatgcttgatatagagccaaccacagctcaagaatacattcaaaagggtacagtattaacagttaccgaagaatatgaaaaggcattggaatgctttgacaaggctttagagttggacgaaaacaatctttcagcactgatatcaaagggaaacaccctagagcttatggaaaaattcgatgatgcctcaaaggtatatgatgatgttatgaacactgaagtggaagaggtctatgaccttatgagcaaaggatatatctttgaaggccaccaaagatacaatgacgccttaaaaacatatgacaaggctcttcaaaaggaaagatataacgctaacattctatttttaaagggaagctgtctaatcaagcttgaacagtaccaaaaggcaatcgacagccttgaggaagctatagaaaggtatagcgaaaacccatatgaaaccatattcgagcttgaaaacgcataccacaacaaaggagtctcattgcatgcaatcggtgaagatgacgacgctcttgaagcattcagccttgcattgggattaaacccagaatactactactcctactatgaaataggcataatccaagaggacagagaaaagtatgacagcgctttaaagaactataataaattcttagaatatgacaataccgactctgaagttgtagaggctaaagaaagagtagaagaattgttaaaagaataa

SEQ ID NO: 2115 - DNA, 1722 bp, Methanobrevibacter ruminantium
  source 1..1722: mol_type = genomic DNA
atgtattttaaaataaagactgaagctgaagaggctttaagaaaggcagtcgaccagtttgactgtgaatttgatgaggaaattaaattggagtttcctcctaatcctgaattaggtgatttggcaagtacaatttcattccaattagctaaattgcttcgcaaggctcctaatttaattgctcctgaagtggttgaaaaaatcgagcttccagagatttttgaaagggtggaagctacaggtccttatgtaaacttcttcattaatcatgacatctttgcaaagcagctattggactctgttgatgaggattatggtcaattggctgcagtagatgagaagatcatattggaacacacctctgcaaaccctaacggtccgttgcatattggtcatatcagaaactctgtaatcggagattcattaaggagattgcttacaaaggcaggatataatgtggatacccaatattatgtcaatgatatgggaaggcagttggccatgattgtatatggtatggaagagcttggattgaagcttgaggaccagccagcttccaagattgaccacaaggtgggagagctttacttcaaggtaaaccaaatgattaaggaagatgaaagcttgaacgatggcgttgatgcaactatccgcaaatatgaaggcggtccaagcgagcttgatgagaagtttgaatatgctgtcaacagctgccttgaaggtgtaaaggaaaccttgaagagaatgaatgtaaagcatgacgcctttgtatgggaaggacagttcgttagaactggcattgtagacaaccttacccaagagctttatgacattggatatgcaaggcaggaagaggttttataccttgacttaagcgaattcgacattcctaaggagctagtccttagaagggcagatggaacttccctttactctacaagggacattgcttatcacatttataagtctaaaaactgtgacaagatcattgacatattcggctctgaccataagcttgcagcaaggcaggtggagcttgcacttgagattcttgaggaaatcgagccaaacagcgataagattgaagtcattttctatgagttcattaccttgcctgaaggttccatgtccacaagaagaggagtcttcatctctgtggatgagcttatggatgaggctgttagaagggcaactgaagagattatttctcgcagaccggaccttgataaggaaactatcgataagattgctgaagagattggtatcggcgcaatcagatattacattgcaaggctctctcctgaaaagcacataacattcaagtgggatgaggccttaagctttgagagaggatgcgcttcaattcaatatgcccatgcaagagcatgcaaattgcttaagaaggctcaagaggaaaagggcattgatttagctgacttgactgttgaggatacttggtccttggatgaaaacgagaaggagcttgttaagttgattgcaaaattcccaagtcttgtggaagactctgctaagattagaagggtccatcctattgctcaatactgtcaggacttggctagcgcattcaataggttctataaggcagagcaggtaattggctctgatgtggaaaatgcaaggcttcttttggttgaaaagtctagaatcactcttaggaatgctcttgaccttttaggtgtgagtgcgcctgatatgatgtag

SEQ ID NO: 2116 - DNA, 414 bp, Methanobrevibacter ruminantium
  source 1..414: mol_type = genomic DNA
atgaaagaaattgctatttatctcatccttatcataattgttcttattgccgcacaacacttaaatgtagttgtctcaggtagtatggaacctgttatgtatagaggagatattgtagtacttcaaaaagctaatttatttggaatacatgaattcgaccctcacgatgttcaagtaggggatatagttgtttataatgccgcttggtatgacagcccagttatccatagggttataaacactgcagagatcaatggaactacctgctttgagataaagggagataataacaataaatcggacccttattgggtgactccagagcagattacagatagagtcattacaattaatggccaaccattggtaattcctaaaataggatatatcactttatgggttaaaggtctttaa

SEQ ID NO: 2117 - DNA, 1656 bp, Methanobrevibacter ruminantium
  source 1..1656: mol_type = genomic DNA
atgaatagcgataatataaaaaaaggagttcaaagagcacctcacagatcacttcttcgtgcttgcggacttaatgataatgattttgacaagccattcatcggaatagcaaacagctatacagacatcgtacctggtcatattcaccttagggaacttgtcgactatgtaaaggaaggaataagagaagctggagctattccatttgaatttgacaccatggccatctgtgacggaatcgccatgaaccatgacggaatgaaatactcacttgcctcaagggaaatcgttgtaagcactgtcgagagcatgaccatgggtcattgctttgacggacttgtcctcatgcctagctgtgacaaggtagttccaggaatgcttatggcagctgcaaggcttgacattccatcaatattcctaacaggaggtcctatggctccaagcacttacaaaggaaagaatgcagacctaataactgtgtttgaggctgtcggcgaactctcatcaggaaaaatcactgaagatgagctttttgaattggaatcctgtgcctgctcaggtgctggaagctgttcaggcctatttacagcaaacaccatggcctgcattaccgaaacccttggaatgagccttccatactgtgcaacaacactcgccctctcagaggaaaagaagaaattggcaatagaaacaggaaagagaattgttgaaatggtaaaggaagacttaaggccatcccagatcatgacacaggaagcctttgagaatgcaattgcaatggacatggcccttggaggaagcagcaacactgcactgcatattccagccatcgcatatgaattggaggagaagggagtccatgcagatttggacctatttgaccagataagcgataaggttgcacatattgcacttctatctccagctggccaggacactatggcagacctccataacgacggaggaatcccagctgtcttaaagacaatctcctctaaattagacacttcagtcatgacctgtacaggaaaaaccctagaagaaaacctaaaggatgcaagtgtcacaggaaatggcgttatacacactttagacgacccaatccacgaagcaggcggacttactgtactcaagggaaaccttgctcctaacggctcaatcgtaaagtctgcagcagttccagaggatcttatgcatcttaagggaccggctaaggtctacaacagcgaagaggaagctgtggaagcaatattcgaccatcagcttaaggaaggagacatccttgtaataagatgcgaaggacctaagggaggccctggaatgagggagatgcttaaccctacctcagcaattatgggaatgggaataaagaatgtaggactaatcacagacggacgcttttcaggtggaacaagaggcccttgcataggccacgtatctcctgaagcaatgagcggaggtcctattgcagcccttaaggacggagacataattgaaatagacatagcaaatggaaatttaagcgtagagctatctgatgaggaaatcaaagaaagaatagagaaagccgacctaccagaaaagaaggtaaaaggatggcttaacatctacagacgttccgtatcctcagcagacgaaggagctatcttaagatag

SEQ ID NO: 2118 - DNA, 324 bp, Methanobrevibacter ruminantium
  source 1..324: mol_type = genomic DNA
atggatattaaaggaactccaataaatgtagaagatatgattcaatatcaaaaagactctgttgtaagcatggaaattataaaaaaagagcttggaactgtaaccctatttgcatttgaccaaggccaaggattaagcgaacatagcgctccttttgatgccatggttcaaatagtggatggagaagctgaaatcacccttgcaggtgagcctcatacagtcaaaaaaggcgaaatgataatcatgcctgctaatgtcccacatgccttgcaagcagttaacatgccgtataaaatggtcttaaccatgattaaatcagattag

SEQ ID NO: 2119 - DNA, 1299 bp, Methanobrevibacter ruminantium
  source 1..1299: mol_type = genomic DNA
atgagtgatttcaacatgttttgttatcaatgcagccaaactgccagaggcagtgcttgtacaaatgcaggagtttgcggaaagaacgcaactgttgcaagacttcaggataatttgatcttttcaatgaaaggaatatcagcttacaattatcactgtaaggagttaggagtaagcgacgaatctgtagacgaattccttacaaaagggctatacactaccctaaccaatgtcaactttgatatcggcgaccttgtccaattggcccttgattccggtgaagccaactttaaggttatgaagatgcttaaggaagcccacattgaaaacttcggtgagccagtgccagctgaagtaaaggtaggggctcaagaaggaccgggaatacttgtaaccggccacgacctaaaggcattggaagagcttttaaaacagtgcgaagggactgacgtaaaggtatacacccacagtgaaatgcttcctgcccacggataccctgagcttgcaaaatacgaatcccttgccggtcagctaggaggctcctggattgaccaaaggaaagtctttgctgattacaatgtagccatcttaggaacaaccaactgcgtattgcctcctaaagacgcttatgctgacagattattcaccatggacatagtaaagattccaggtgcacaggtaattgaggattatgacttcaagcctttgattgacaaggcaatcgaattgggaggacttgaagcggaagagctctccaccattagcacaggtttcggattaagcacaatactgtcccttgcacctaaaatcaaggaattggtacttgagggcaagataaaaagattcttccttgtagcaggatgtgacagtccaaacccaagaatgagctattacagagagtttgtagagaatgttccagaagactgcatagtattgaccttagcttgcaataagttccgcttcaacaatcttgaattgggagacattgaaggaattcctagattattggacttaggccagtgtaatgatgcaattgtagcaatcgagcttgcagtagcattatgcgagctctttgagatggagcttaatgacttgcctttaacaattgtcttaagctggatggaacagaaggctgctgcaatcctttggacattgctatatcttggaaagactgacatgttcataggaccggttcttcctgcatgggcaaatgatgacatattgaatgttttggttgaaaacttcaatctcactccaatatcaacccctaaggaggacattaaaaaggttatgggttaa

SEQ ID NO: 2120 - DNA, 795 bp, Methanobrevibacter ruminantium
  source 1..795: mol_type = genomic DNA
atggagaatattatcgaatcattggagaagttcggccttacaaggtatgaggcaaaggcatatataggaatgacaaacatcataagcggaaaggctgaggacattgccaaggcctccgagataccgcgatcaaagatctattccacattaaaggaactggacaagaagggattcattacaataacccatacaaggccaatcgaatataaggttgtccctccaagggaagtctacaaaaggaaaaaggaggaattgattaaagagctggaagactcagaggaaaagctggatgagatatacaacagccaaatatctgaagtacaggctcctatctggcttataaaaacaagcaagaacataatcaataaagaagttgagattgtaaagaagacaagaaaatcattgaacatgagggttggattcctccttgaaggggaaggtgaggagcttatcaaggcattcaattcaattccaagaaacataccgatcaagatacttgcaagcccatactgctatataaatcaggaaaggattgatatcattgaactgtttgaaagtgcaaggcttgaaaaccttgaaatcataaaggcagacattccttttgttaagataattattagggatgaaaaggagctattcaggacaattgtaaagtttacaggaaaggaaaagtctgtattgcctgagactgctgtaggtgtattgaatcaatattcagacatctgcaagaactttgatgagcgttttgttaatcagtttaataggattaaggcaaaaaagagtagtatgaattaa

SEQ ID NO: 2121 - DNA, 756 bp, Methanobrevibacter ruminantium
  source 1..756: mol_type = genomic DNA
atgatgttaaactatttatttaatatattaaatactaatacatttttattaaaccctaaagagagagttattcaagggattttattgtttattctaatgagtgttttttccttattatttatatcattcattactttagcaagccctaatttatttttccctcttttaatctcttttgagcttttaatgctctttttaggattaaatatttcattacattcgatttataccaattattttaatatgttagtttctgaaaatcctgttttattgagttatgagggagttatagtaaacttattgtgcttaagtttaggagcttttagtttttggttaagcatcgctattttcatcggtcctttttgggcatttttttcatttgccttggcatggttattgcctctatggataatgtttttcaggagagatatttttaatgaaaaaagcaaggtaatatctaaaaattcagacaagcttataggatactcccctatttggttttacttatttggatgtgtttctttatttattccttttcttgtcatgtttaaaatcgtgtttttttcaaagttcaattttttagcattaggcttaataatcattactttgatagaaacaattttaattttttgtccggattattgggataagattttgccttttgatattagaacaaagaaaggcacttttatttattttttactatctattttaattttatcttgcatttctattattctttataaaatagtttaa

SEQ ID NO: 2122 - DNA, 399 bp, Methanobrevibacter ruminantium
  source 1..399: mol_type = genomic DNA
ttgtttgaagcaggtatgattgctcttcctactggtttgcctggacttgccttgttggggcttggtactgtgttaacagcttatggcagtggaatgttcgatgatttaggaacagatcatccaggttatgcaaagccggaaaatcaattaaacttcggattatccatggggcttaactttataggattaggtgctagtgaaggacttgcaagaggggttctctataaagaagttcaagaaaaactagttacaggatttgtaccatcaattaaagcctatggaaaaacaataatggatgagtcattaggtaaaggaaatgctaagatttcaactgttatttgggcttatgtggaaaatagtgtaattcttgctatagaaaattcaatcaatggtggttaa

SEQ ID NO: 2123 - DNA, 777 bp, Methanobrevibacter ruminantium
  source 1..777: mol_type = genomic DNA
ttgttaaaagcaatattcaaaggtggagacttccaatgttcacagggcaatggaacaataatattcgaattagcagacaactcctctaaattgatatttggcccagatggaagtgttgcaagtttaatatcatctgacatattggaaaataactatttgaatggaggcatggatttaggaaccttcaatttcctaaaaaactccacaataatttccaatctaaaaagcatagtaaactcatcctactatgatataaattgtttatctaattggataatatctttggtaaatgattcggatattaatttcacagcaatagtctcctatttgtctgatcctaaattagttgcaagtgttgtcggcggacttttgtttgaagcaggtatgattgctcttcctactggtttgcctggacttgccttgttggggcttggtacagtgttaacagcttatggcagtggaatgttcgatgatttaggaacagatcatccaggatatgcaaagccggaaaatcaattaaacttcggattatcaatgacactgaactttttaggcttaggtggtagtgaaggttttcttaggggagttttatacaatgaagttcaagaaaaactagtagtaggattcgtgccatctattaaagcctatggaaaaacaataattaaagagacattttatgatgataatggtgttttagcaggtgttgctaaaagttattttgataatattttgcaaaatatcttatttgacactttccttaaatggggtgtaagatga

SEQ ID NO: 2124 - DNA, 1089 bp, Methanobrevibacter ruminantium
  source 1..1089: mol_type = genomic DNA
gtggctaagaaagttttgattattgtaacaggcagaggattaggcggagatgccggaattgcattgaatgtttacaatgcccttaccaaacgaggaatggagtgtgagatagcattggatgaatccgcaccaggtatattgtttaaaaagaacaatatggaatggaataaggttatcattccacaggctggaggccattctgccactcttaagacaactgtaaacgctgcaacacgttctgttaaggctctatttaaaacaagaagcctaatcaaggaaaagaaattcgatctggtccttggaatccttggagggggagccatcataggtgctcttgctgcaaagataacccgaaccccttctgtaagccttttaatcactcctttggacactaagatatgcggaaagattggaactccaataattcttcctgaaaacaatctgtttttagagcctaatattccagataggatggtaaagtccttcttgcctgtaaatgacaacattagtcttggggataagaaaaaggcccttgataagttaaatgaacattgcagtgaacttaagaagaaaaacccagatgcaatggagtttgacccgtctaagcaaacaattgtattctcatcaggttccagcctatttgaaaagactgcccaggcaattgaccagttttcaaaatacagtgacagattcaacttggtcttatgtggagatcctctagaagaggagttttataagtatattgatgaaactaagataatcaatgtaggctttatagactgggtaaatgatcttcttcatcttgcagaccttgcagtattgacaaatgacggccttatgctccatgaggccatggtgtgcaatctgccggtggtcattcttaaaagggtgaaatacggacgctatcatgatatggtttcaatattcaagggagctaccattgaatgtgacttggaagaccttgatgaggccatatttgatgtggtggacaactatgatgactatgctaaaaatacagctacctataaggaagccattttaagtgtaggggacaatatagcagatattgttgaaaaatcttttaaatag

SEQ ID NO: 2125 - DNA, 459 bp, Methanobrevibacter ruminantium
  source 1..459: mol_type = genomic DNA
atgaaaaactggaaaataattggattaatattaatcatccttcttgctgtcgtttcagttagcggctgcattggtgatgactcttcatctgataccacatcaatcagtgcagatgcccttaatattacagaagatggaacctacgactccaaggaagaggttgcagcctatatagatgaatatcacaaacttccttccaactacattaccaaaagtgaggcaaaggctctcggatggcatggaggcagcgttgaaaagtatgcacctggaaaatgcataggaggagacatattctccaatcgtcaatcaattcttcctataggccatgaatacaaggaatgcgatatagacactcttggagctgacagcagaggccctaaaagaatagtcttctctacagacgactatgaggtttactataccggagaccactatgcaagctttgagcacttgacttaa

SEQ ID NO: 2126 - DNA, 240 bp, Methanobrevibacter ruminantium
  source 1..240: mol_type = genomic DNA
atgaatgagatagttttatttggagaggatatgaaagaagatcctcataaatacattaaagagactttggatttcccagattattatggggaaaacttggatgctctatttgactgtctaagcgaggtttataataagacaattattataaaggacagtgtattggtggatgaagatataattcagacattcgttgatgccaatgatgaaaatccagatatggacttgattttagattag

SEQ ID NO: 2127 - DNA, 1827 bp, Methanobrevibacter ruminantium
  source 1..1827: mol_type = genomic DNA
atgagagtattgcttattcactctgattatataaaatatcaagtaaaaaacaaaactccagtggctgaagagattgaagaggctaaagaatcaaatgccttcgaagaggctttggttgtctttacagctgttgaaaaggaagatgagaaaaatcctaatgcagttgtcaagaacttagttgctgaagttaaaaaaacaaatgaagaagtaaatgctgaaaggattgtattgtatccatacgctcacctttcctcatccttaagcggccctaaagtaggggttcaggtattgaaagacgctgaagctgcccttaaggaagaaggattcgaagtgttcagagttccattcggctggtataaggcatttgaactttcctgtaaaggacacccattatccgaactttcaaggaccatcggtgctgaagaggaagctgaagaagaggaagaagagaaaaaaccatccaaatggcttatctttgatgatggggaaacaatcgaacctaaggaatacaattaccaaagcaaagaccttgaaaaattagttgcatatgagctcggcgaaggggcttcagacgaaggagagcctccacatgtcaagatcatgagggaaaaggagctatgtgactatgaaatcgcatctgacataggtaacctcaaatggtatcctaagggcagattggtccgtgacttgcttgctgactatgtatacaacttcgttgtagacttaggtgcaatgcctatcgaaacccctatcttctatgaccttgcaaacgatgcaatcagggaacatgcagcaaagttcggagaaagacaatataagactgcaaccaaaaaggaccttatgctcagattcgcatgctgtttcggtgcattcagagttttaggagactctttccttacctggaaaaacttgcctgcaaaggtttatgaactctccacctacagtttcagatttgaaaaaagaggggaagttgtaggtcttaaaagattaagggcattcaccatgcctgatatgcacagcttctgtgcagacatgccacaagcattagaggaattcgacgctcaagttgacatgtgtgtccagactggagtagaccttgacgtaaactatgaggcaatcttcagggcaactgaagacttctatgaggaaaacaaggaatggatggaagcaacagcaaaaagaatcggcaagccattgcttttagaaatcttaccagaacgtaagcattactggtcctgcaaaatcgactttgcggctatcgactaccttggcagacctattgaaaaccctaccgtacagattgatgtagaaagcggtaaaagatttggcatcgaatatatcgatgaagaggaaaatcctcaaaaccctataatattgcactgctcaccgactggaagtgttgaaagggttatctgcagtttgcttgaaaacactgcaaaagaggatggaaaggctccaatgctacctacctggctctctccatcacaagtcagaatcttgcctataggagaaaagcatcttgaatatgctaaccaattggctgataagattgcagcggaaaacatccgtgtagatcttgacaacagcgatgacagggtcggtaagaaaataagaagcgcttccaaggaatgggtcccttacataattgtaattggagacaaggaagttgaaaatgatgtctactctgtaaccgttagggaaagcggtgaaaaggtagacatgactgctgaagagttaattgcagaagtcaaggcaaaaaccgaaggcatgccatttagaagacttccattacctagaaacacagcagaaagaattaattttaaataa

SEQ ID NO: 2128 - DNA, 1041 bp, Methanobrevibacter ruminantium
  source 1..1041: mol_type = genomic DNA
atgttaaatttaaataaaaaaactatcattggagtaatcctttgttttattcttgcaattccttcatttttgctaggaaatctttttccaataattggagggcctatcattgccattttacttggaatgataattgcaagcttttggaaagataagggaagcgctgaagagggaataaacttcacctcaaagtacatacttcagcttgcagtcgtattcttaggattcggccttaacctaggggtcatagtcgcaacaggaatccaatcccttccaatcatcattggaacaatatccatagcccttatcgttgcctatataatgatgaaagtccttaagatggagagaaactctgcaatactcattggtgtgggatcttccatttgcggaggctctgcaatagctgctacagcccctgtaataggtgcaaatgatgaggaagttgcccaatcaatttcaataatatttttcttcaatgtcatagctgcaattatatttccaatgcttggtagaatgctaggcttttctacagtgaatggagatgcatttggcatatttgctggaactgcgataaatgacacttcctcagtaactgcagctgcagctacatgggacaatatgtggggacttggttcagcaaccctcgataaggcagctacagtcaaattaaccagaacacttgcaatcattccaataacacttgcattatcctatataataggaaagaaagataatggagaaaaaagtaatgaagaaggattcagcttaaaaagagcatttccaacattcatagcattctttattttagcttcaatcataacaacagttgcagtttttcttggtgtggatgcaagcctattcattccaatgaaagaaataagcaaattcctgattgtcatggcaatgcttgcaatcggcctaaacagcgatattgtaaaacttgttaggacaggtggaaaaccattgctgcttggtgcaagctgttggatagcgattaccattgtaagcttgattttacagcatttattaggaatttggtaa

SEQ ID NO: 2129 - DNA, 1239 bp, Methanobrevibacter ruminantium
  source 1..1239: mol_type = genomic DNA
atggtaaaaaaagacgatacaatgtttataggtgaagctcttatcggagacggagacgaattagcacacgttgacttacttatcggcagaaaagatggtcctgtaggaaacgcttttgctaatggattaagccaattatcagttggacacactccattgctcagtgtaatcagacctaacttaatgaccaaacctgctacaatcatcatccctaaagtcactgtaggtgacttggatgatgcaagcaaaatctttggaccagcacaaaccgctgtaggaagagcagtggcagatgctgtggaagaaggaatcattcctaaaaacaaggcagaggaatgggtaattaacgcaagtgtactcattagcccagctgctgaagattacagaaaaatttaccaatacaactatgctgcaacaaagcttgcaattaaaagagcattggacggatatccagacatgaaaaaagtattatacgaaaaagatcgtggaacccacgccattatgggattcaaggctatcaagctttacgaaccaccttacttgcaagttgcacttgaccttgacaatgaagaggctatggcaagaatcatcaagcaacttcctaacagagaaagaatccttcttgaagcaggaactcctcttgttaagaaattcggtgttggaattgtcggcaaaatcagagaattggcaccaagcgcattcatcattgctgaccttaagaccttggatgtaggaagggttgaagtcaagatggcagcagatgaaaccgctgatgcagttgctatctctggtcttggtaccattgaatcaattgaaaaggcaatccacgaaaccagaaaacaaggcatctactctatccttgatatgatgaatgtagacaacttcactgaaaagctacaacaaatcaacaaggacttaatgccagacattgttctattgcacagaaatgttgaccttgaaagtaagcttagagcagaaggcaagaaccttgatgacataagtgcttggggtaatatcaaagaaattaaagaaattaccggcggccttgctgctgttgcaggaggaatcactcctgaaaaggcagaagaagcatttgaaaaaggtgcagatatcatcattgcaggcagatacatcattggctctggagacccaagaagagctgcagaagacttcttagctcatatgcctgtagatccaaaccacatgagagtggttatggaagatgacgaacaaatttaa

SEQ ID NO: 2130 - DNA, 315 bp, Methanobrevibacter ruminantium
  source 1..315: mol_type = genomic DNA
atgggattttgtaactcatgtggaagaccaatgggaagaaatgattatggaaccaatgaagacggcagtccaaatcaagactactgcaaagactgtttccaaaatggagaatttacagaaccagatataaccataaatgaaatgattattagaaatgcagaaagaatgcttagaagaaacagagacttgcgtgaagaggaagccactggaattctatgcaatttcttgcctaacttaaaaagatggaatcctaatcctgatgatgaaatagaagatgaggatgaacctgtaagaggctacagaggaggattctaa

SEQ ID NO: 2131 - DNA, 1014 bp, Methanobrevibacter ruminantium
  source 1..1014: mol_type = genomic DNA
atggattttgtaaaaggtattgttaaaaaatatttcaggtcttataatagaaccttaaaggatggtactaaaaagacctataaaactgaacaggttcaggtaacaataccaaaatccgacaatgtctttgacgataaagaggaagtatttattttatccaagaatcaatttgatgaaattcaggataatgaggaactgatttcagcaatggaattgttcaatgccatgcaatctgaagatattaaaaatctgaattattctttggatgaagccagacaggaattatattcaaatagttctaaacttgaatcctttactttggaattggatgacagtaaattggaattggataaatccaataaaaaattactcattttaaaagaagactgttctaatttaagagatcagcttgaagaaagtaagcttaccattgttaatttgaaagaccaattggataataaaaacttcatcattgaagatttaaatgagtatgtcaattcattgaataataaggttgattcattaaatggtgaaattgataacttaaacactatcaatgcagagctaaacgataatttaaacaatttaactaatgaattgaacaataatgaattaaataacggtttaggcaatggcctaaatggatttaataatggcaatggtttgaatggtaatgggtataataatggtttagacaataatggtttgggcaatggcttaaatggcaatggatatgataacaataatctttatggatataataatggtttaaatataaacaataatcatttattgagttctacagttgatgaagatagtgaagttttaattagtgatgtaaaaagcagcgtaagttttgactattctgattatatagaactccaaagagaatatatagttttgcttagaaaatatgaagaagctcaagaaaacttatataatgaaaaagttaaagtaattcattatagaagcttacttgagaaatttaaagctttcattgcaagattagaataa

SEQ ID NO: 2132 - DNA, 17958 bp, Methanobrevibacter ruminantium
  source 1..17958: mol_type = genomic DNA
atgatatcgtttttaataattttattattaaataaaggaggacattttatcaatactaaaataattaattcgattttaattattttgatattattctgttttatatctttattggggaccgcttcggcggaagatatttatactgatgatatagcatcaattgatgcttcaaatgattttgaaagtattgaaatttctaatgaagaagtttcaactaatgctgttgaaaatctcgatgtttctgctgatgacagcgattatgttgtcaatggcagttcatcaaagaatgtattgactgcaaatgaactttctgcaacctatgatttgtctggttccagcgttcagaatatttctgatttatttaattcaggaactattcaatccggtgatgtaatatatctaggaaatcaaagcatttcctcatcatgggacgaatggacaggaaatcatttaatcaatgtaaatgtaagtaacatcattatttctggaggaagcagttcaaatcctgatggcacatcaacaattaatgctaatggtgcaaaattatttaatatacaagcatcaggggttactttaactaatattaaagttataaatgctcatggtggtaatggacctggctgtattaattttgatggctcagattgttcaataataaattgtgaatttgaaaactgtcaatatgctcaaggtggagctattcatggaacctcatctgcttcaaatttgattataacaaattgtaattttacaaataatgtaggtagatggggaggatcaggtggagctatttatttggaaggttctggctgtaaagtgactgactctagatttgagggtaacaccgctcaaaattatggggcaatttactgtgcgggtgatattaatttaaacaattgtaatttcactagcaatggccctggagctatttatggtggtggaaacactgaagtaatagattgtaattttatttcaaataccggtagctctgtcactgtaatcagtggaggttctacaaaagtaagaaattctaatttcactgataatgccggtgcttccatttacagtggaggcaatactgaaataaaagatgtaattttcaccaataatggtgcaggaagctataacaataagaatgttggttccgtttacagtggaggtgctacaactgatgttagcaactctaaattcgataataatgctggaatagcaatttatgccaatgaaaatgcatttgtagatggttgtaacattaccaacggtggtgtagctatttatagtggctcagatgccaatatttccaattccattatagaaaataacagtgctgatcaagcaatagtttacatttatgggattggaaaagtaaacaattccaatttcacaaataacaccgtttcaggccatactcatggtggagcattaagtcttattggtgacaattcagaggtctcagattctatctttgctgacaataccgcaggggcttccggtggggccatatacactaccggtgaaaatacaatgattaaaaattgtagtttcactgacaatactgttatgcaggattatggtcacgctggggctgttgatgttgttggcgttaacactaagattatagattgtaattttacaaataatagtgcgcctaatggaggagcagtttatggtggatcctatggattaagcttatccaattcagtatttgaagacaataacgcttctactggtggtgctttatatatttatcatgacgatttcgctataacaaactgtaacttcactgataatgatgcatcaagtcagggcggagctatttacattgcgtctgagtgtcacaatgagcaaatgactggatgtaatttttccggcaatactgctccaagaggttcagcaatttactgtgatggagacggcaaggttacagactgtaatttcgatgtaaaacctgatttaactgttagtggtggtaattcatctttaacagttactttaggatcagattattcaaatgtcgttgtaggtgatattgaaggtgtatccggaggatctgtgactcctttagttgatgcacaggttaccgtggaaatttttgattctcgcggtaatttagttgatagtgttaccaatgcaactgatgagaatggtaaaatcaaatatgattacagtggtctttcttatggaagctatacttatagggcttctcatatggatggagatactttaatcaccaaagaaggtactttaactaggcaagcttctttggatgttcgtactggctatccagcattaacatccacattaggccttcaaaccagcattgacggaacagctgtcgaaaatgatccttttgtcaatgaagacattacagtggaaatttttgattctcgcggtaatttagttgatagtgttaccaatgcaactgatgagaatggtcaagtctattatgactacagcaatctccaacggggaacctacacttatagggttacctcttcagatggacaaaccgaagaaggtcctttaagtatgggtgaagttgtaggggataacttttcagctattcaagctgcaattgacaatgccccatctggaggagttattttcctacagggcaagacttatctaaatgatattcaaggacagatggtaatcgataagcctattactattataggtaccgacggtactgttttggatgctcaaggaatttcaagagtatttgagattaccagtgatgcagataatgtaaatttggcaaacatgacattaaccaatggtaatgatgtctatggtggtgctatctacctgcaatcaggttgtgacgacggcacccttacagatgttgtttttgacagcaacactgctgagttagctggtggagctatttataatgcaggtggaaatagatggactatagataataccacattcactgaaaatgaagcacatggtgaaaccaattacatataccgtggtggtggtgctatttggtcttgtgatgctgaaatgatcttgtcaaataccacttttgtaaataaccaagcaccatatggaggtgctttaagaggtgcatttgacatttacgattcattgtttgacaataacactgctaccgatggtaatggtggagctattgatgtaacaactgaggaatttctttacgatactctaattcttgaatttagaaattctacattcgtaaacaatgatgctaaaggaagtcgtggagatgacagagctcaaggtggtgctattcacatctatcaccttcaagaggttaacatgtatgattgtttctgtgaaaacaacactgccgataggggaggagctgttgatttctacgaattaggaaagacttgggtagataattgtacctttgtaaacaacaacgcttcttccgaaggtggaggtcttgctattttctgtaattcaagtacattcaaggattcaaatgtttccaataacattgcaggtaccgatggaggtgctatttgggttattggacacaattccttatttaacaatgtaacttcagaaaacaacacagcatcaagaggaggttcctcttatattgaaggtgaaaacactacaatctacaattctaccttcaataacaacaatgctttatacaatgaaagccttggcagccaatcaggtattggtggtgctttagacattctcggtgacaattgtaaggttattggtgtcacttctgtaaacaacactgccgagcttggaggttccactttcattcgcggtgacaatacattggttcagaatactaatctaagcaataatacagctgtcttcaatgaaagcagaaatgagacatctggtattggtggtgcattagacgttgttggtaacaattgtcaaatcatcaacgtcacttccgataacaacaatgcttatcgtggtggatccactttcattcgtggtaatgacactgtcattagaaattccactttcgacaataacaatgctacccttagaggtggtggattgaacattgctggtgaaggatgtaccatattcaatgtagatgtttcaaataacgctgctggtgaaaacggtggaggtatctacgtaattgctgacggtaccgaattcagaaacattactgctgacaataacactgctgaacgtggtggaggcgcattcgttgaaggtaacgacatcattatcgataatggtactttcaatggaaacaaagctattttcaatgaaagtaaacctgacgaatcaggtattggaggtgctttggatatcaaaggtcatggctgtaatgtaaccaatgtagactcattcaacaacaccgcttaccgtggaggttccactttcattcgtggtgacaacacctatcttgaaaactgtaccttagacggtaacaatgctacccttagaggtggcggtttgaacattgcaggtgagaactgtaccatccacaacgttgacatttccaataacactgctgggctcatgggcggtggtatctatgtaatcgctgacggcactgtctttagaaacattactgctgacaataactctgccgaacgtggtggagctgtttttgtcgaaggtaatgacattataattgataatgctaccttcaatgacaataaagctattttcaatgagagcaggccagatgactctggtcttggtggtgcattggacattaaaggtgatggctgtaatgtaaccaatgttaattcattcaataacactgcttatcgtggaggttccactttcattcgtggtgacaacactcatgttgaaaactgtaccttggagggtaacaatgctacccttagaggtggaggtttgaacattgctggtgagaactgtactgtctacaatgtggatgtttccaataacactgctggtctcatgggcggtgctatctacgtagttgctaacggtacagagttcagaaatatcactgcaaacaacaactctgccgaacgtggtggaggtgcctttatcgaaggtaacaatgtcaccattgacaatgctacattcaataacaatagggctattttcaatgaaaccaggccagatgaatccggtcttggtggtgcattggacattaaaggtgatggctgtaatgtaacaaatgttaattccactaacaacaccgcttatcgtggcggatccacatttattcgtggtgatgacacatatgttgcaaactgtaccttggacggtaacaatgctacccttagaggtggaggattgaacattgcaggtgacagatgtattattgatgatgttgatgtatccaacaacaatgcaggccttatgggcggtggtatctatgtagtatcaaacggtactgaatttagaaacatcactgccgacaacaacactgcagaacgtggtggatctgcattcatcaacggtaccggcataacaatcagggatggtgagctcaacaacaacagagctatctacaatgagtccagacctgacgaatccggtttaggtggaggatttgacattgtaggggacaatatccttgttgatagcgttcactccaacaacaactccgcttaccgtggaggttccactttcattcgcggttcaaatgttacagtgcaaaattgtaacttggacaacaacaccgctaccgtacgtggtggaggacttaacattggcggaggtgacggatgtaaggtcatcaacgtcagtgtgtccaataacgatgccggtgaagacggtggtgcggtttacgttattggtgacttcagtttatttgacaatgtcaattcaactaacaacacagctcaaagaggaggttcctctttcattgcaggtaacaatgtgactgttataaactgtaacctggacaacaacacagcttccaatcgtggtggaggtttggatgttaacggttcaggttgtgtctttgaaaacgtaactctctcaaactgtcatgctgataaggagggaggtgctgtttatgttagaggagacaacgtaacatttaacaatgtaacatctgaaaacaacactgcagaacgtggaggttcatcatttgttgcaggtgataactgtaaagttattaattgtgaccttaacaataacaacgctacctggagaggtggtggtttggacgttacaggtacaaactgtctctttgagaatgtaaccctttcaaactgtcactcagatgaggatggtggtgcggtttatatcagtggtgatgataacaggtttgtaaatgttacctcagtaaataacaccgctgtgaattatggtggttcaacctatataggaggaactagcaattctgtagagaattgtaccatatccaataacatagcttacaatggtggtggaatatttattgagggagaggattccaaattcacaaacaacaacattaccttcaataaggctatagctactgatgaagatcatgactttaacattatgggtggaggagtattcattttaggtggaaattccaatttcaccaataacaatatctcttcaaaccatgctaaggataatggtgggggagtgcaaatattcttcggacctgacacttttatggacaagatttatgcatttaacaacactgcagaaaacggtgggttcgcaaatcttctctactgtgataacttgaatgttacaaattcaaccttctatagcaatcatgctacaggtgacatatcacttgatagaggggaaggtggagctttccacatgtcctatgccactaacattgatgttcaaggtaactttagctataacaccgcaacaaacggatctgcaatatattctgatggttcagacatcagagtacatgattcaagtttctttgacaaccaggcacattcctggttcttattaataactccaagtgatgagacctatttgaaaggtcaggatgtaattattaacattagtcacattggaggggataatattgctaacgctatccataatagagatgctgaaagcagtattaccgtaagaaacgtaacttatccattttataacaatggagttttaataaacaaaacaaccccaattgatgaagatattcctatagagattataggatatgaaaacagtgataatggtaatttgatatatattgatgatttagaagataatcaagtcatatactataacattaccaatagggatacaaatgaatccatattggtaggtttcaataaaacagacatttctggtacagtatcactaagactcactaatttgcctgcgggcaattatgtagtaagtgcatattatccggaaactacttattatactgaaattagaaatgtttcatcatttagagtaattgatgttgatatggttgcaaacaagactgttgataatcagacttccaatgttggcgacattcgtgattggaatgtcacaatatggaatgatggtgcgtctgaagctcagaacgttaccatcattgatttcctacctgacggtcttaacttaactgataatctaaccattcatttctataatggcactggtggcctatggaacaatgctgtccttaatttaactagcaataacctgactttcagtgtatataacaaggcagatggcacctggattaatggtgttgccagttatgatgagtcaagcaatacctggacatattatgtccttagtttggctgataacagaacatttgcttacagtgttttcaatcaatccgattacactgatgcgtttggagaggccaggtattatgaggacatcaacagttggacctatagaaatatcagctatgatgtggataatgccgattggtattattacacatttgaatatgatgaccatacctatgtttatggtgttttcaatgggtcttacttcgttgatgcatttggagaggccaggtattatgaggacatcaacagttggacctatagaaatatcagctatgatgcaacaacaggaaattggtattattatacctttgattatggtggaaatacctttgtttatggcgttttcgatgagtctttcttcgttgatgcatttggcactgccatatatgatgatggttcttggaattatgaaaatatcagttataatgcaacagatggcaaatggtattattacagtcttaattatggtgatgattccaataatgtaacttactatattttcaatcctgaaaatttcgtggacgtatttggaagcaattatcattataatgctgaaaacaatacctatgtatatgtgaatgcatattatgacgctgaaaccgatagcctcattagaaatgacaccatttacaatgtcagttctggcatttggacaattaacaatagattagttgttccagaattggtgtcaattaatccaaatgtatcttacatcagtccggaaaagatttatcttgttaataagattagtttaagcatagcaaaccatactaattctactgacatttctttagatgttggcagatttgatggaaacggcagtgtgcttatgaatctcgtcaccaatgtgactaaacgaggtaactttaccaatattgttaatgtgactacagatagtccggaaaagaattacactaacaatgttgctaacaacagcactatagtttacaacgaccttgtaatcaataagactgtaagcgataatctaaccaatgtttcaggcattgtcgattggaatgtcacagttttaaacaatggtacttttgaggcagtcaatgtaaccatgaatgattacttgcctgatggtcttgatttaactaatttgacagtcaaggtctataatggcactggaagtttatggactaacgctactcttgatttaagcactatgactttgtctttcagtgtttataacgagactagtggtgagtggattagcggcattgctgcttatgatcaagctgcaaagacttggacttattatgttcttgcattggatgatgatgttttaacttacacagcattcgatgaaacattcttctctaatctctttggagatgctttctataatgagtctagcaatgtttggactttcgtcaatagaacatatgatgaagtaactggcgatttgattagcgaagtgaataccacttatgacaacaatactggcatttggactattggtgataagacatttgtggaatataaggtcaatttaaccctagttaatggcactaactctacaaatcttactttaggcattaatagtttagatgaaaacagtacaatggtcatgaatttagtaactaatgtgactaaatatggtatctttaccaatgttgctaatgtcactactgttactccagagaccaattatactaacaatgttgcgaacaatactaccgaaacccttactaacattaccgttactaaggtttgggatgatgctaacaaccaggatggaatcaggcctactagcgttaacattactttgattggtagtgatggcagtgaacgttctgttcttgtaactggaactggtggtgtatggaattacactttcacagatttacctatgtttaacagctctggtgattctattgtttacactgtcaatgagtctgttgttcctaatggctatgatgtcagttacaatcaatccaattggacagtatataacactcatgttcctgaagtgactaacattactgttactaaggtttgggaagatgctaataaccaggatggtatcaggcctactagcgttaacattactttgattggtagtgatggcagtgaacgttctgttcttgtaactggaactggtggtgtatggaattacactttcacagatttacctatgtttaacagctctggtgattctattgtttacactgtcaatgagtctgttgttcctaatggctatgatgtcagttacaatcaatccaattggacagtatataacactcatgttcctgaagtgactaacattactgttactaaggtttgggaagatgctaataaccaggatggtatcaggccaagcagcgttaacattaccttgattggtagtgatggcactgaacgttctgttcttgtaaccgaaaataacggtgtctggaattacactttcactgacttgccagtgtacaatggaactactgatcctattgtttacactgtcaatgagtctgttgttcctgacggctatgaagtaagttataaccaatccaactggactgtatacaacactcacattcctgagcttgtaaacataaccgttactaaggtttgggaagatgctaacaaccaggatggtatcaggcctactagtgttaacattaccttgattggtagtgatggcactgaacgttctgttcttgtaaccgaaaataacggtgtctggaattacactttcactgacttgccagtgtacaatggaactactgatcctattgtttacactgtcaatgagtctgttgttcctgacggctatgaagtaagttacaaccaatccaactggactgtatacaacactcacattcctgagcttgtaaacataaccgttactaaggtttgggaagatgctaacaaccaggatggtatcaggcctactagtgttaacattaccttgattggtagtgatggcagtgaacgttctgttcttgtaaccgagactgatggcgtatggaattacactttcactgacttgccagtgtacaatggaactactgatcctattgtttacactgtcattgagtctgttgttcctgatggctatgaagtaagctacaatcaatccaattggactgtatacaacgctcatgttcctgaagtgactaacattactgttactaaggtttgggaagatgctaacaaccaggatggaatcaggccaagcagcgttaacattaccttgattggtagtgacggcactgaacgttctgttcttgtaaccgagactgatggcgtatggaattacactttcactgacttgccagtgtacaatggaactactgatcctattgtttacactgtcattgagtctgttgttcctgttggctatgaagtaagctacaatcaatccaactggactgtatacaacactcatgttcctgaaatcgtaaacattactgttaccaagatttgggaagatgctaacaaccaggatggaatcaggccaggcagtgttaacattactttgattggtagtgacggcactgaacgttctgttcttgtaaccgaaaataacggtgtctggaattacacattcactgacttgccagtgtacaatggaactactgatcctattgtttacactgtcaatgagtctgttgttcctgttggctatgaagtaagttacaaccaatccaaccggactgtatacaatacacatgttcctgaaatcgtaaacattactgttaccaagatttgggaagatgctaacaaccaggatggaatcaggccaggcagtgttaacattactttgattggtactgatggcactgaacgctctgttcttgtaaccgaaaataacggtgtctggaattacacattcactgacttgccagtgtacaatggaactactgatcctattgtttacactgtcaatgagtctgttgttcctgttggctatgaagtcagctacaaccaaaccaactggacagtatacaacactcatgttcctgaaatcgtaaacattactgttaccaagatttgggaagatgctaacaaccaggatggtatcaggccaatcagcgttaacattaccttgattggtagtgacggcactgaacgctctgttcttgtaaccggaactgatggatggaattacacattcaaagacttgcctaagtttaacggtacaactgtacctattgtttacactgtcaatgagtctgttgttcctgttggctatgaagtcagctacaaccaaaccaactggacagtatacaacactcatgttcctgaattagttaacattactgttactaaggtttgggaagatgctaacaaccaggatggtatcaggccaatcagcgttaacattaccttgattggtagtgacggcactgaacgctctgttcttgtaaccggaactgatggatggaattacacattcaaagacttgcctaagtttaacggtacaactgttcctattgtttacattgtcaatgagtctgttgttcctgttggctatgatgtcagttacaatcaatccaattggacagtttacaacactcacgttccaaatgttacagaaattaatgtaactaaagtctggaacgacagtaatgataaatatggtattaggccttctaatgtgactattgagttgtttgctgatggtaagaaagttaatgagaccaatttaaccgctagaggtgcttggacttatactttcagtggtttgcctcaatataataacggcaaattgattaattatactattggcgaggttcgtgtagatggctacagcgttctaattactaataatactgttggaaattggactgttactaatacacctatagcggttcctaacatgacagttcaaaaaatcgctaacgataaagtggtctacatcggtaatgtgactagctttactattcttgttagaaatactggtgattgtaatttaagtggagtttatgtagttgattctgattatagcgcaggtttaagttaccttagatacgagaatggttctcgtgattggacttatgatggcgctaaatggactttagtcggtaatctcactactgataatcctactgctaactttactgtttactttaccgtagtagataatggtactttagttaacaatgtttctgcaggttccaatttaaccaatgaaaccaatggaactaataacactactgcttacaggcctaacatgactattcaaaaggtcagtaatgatgaggttgtttatgttggtaacattaccagtttcactattgttgtgactaacactggtgactgtaatctgtctgatattgttgtgactgattctgatttcagtgctggtttaagttacttgacttatgctaatggcactaggaattggaattatgatgctgtaggtcatacttggagtttagttggtgatttaaccaatggtagttctgccgagtttactgtgttcttcactgttattgataacggtaccttggtaaacaatgcaagcgttagatctaatttaaccaatgaaaccaacgcaacaaataacactactgcttacaggcctaacatgactattcaaaagattagtaatgatgaggttgtttatgttggtaacattaccagtttcactattgttgtgactaacactggtgactgtaatctgtctgatattgttgtcactgattctgatttcagtgctggtttaagttacttgacttatgctaatggcactaggaattggaattatgatgctgtaggtcatacttggagtttagttggtgatttaaccaatggtagttctgccgagtttactgtgttcttcactgttattgataacggtaccttggtaaacaatgcaagcgttagatctaatttaaccaatgaaaccaacgcaacaaataacactactgcttacaggcctaacatgactattcaaaagattagtaatgatgaggttgtttatgttggtaacattaccagtttcactattgttgtgactaacactggtgactgtaatctgtctgatattgttgtcactgattctgatttcagtgctggtttaagttacttgacttatgctaatggcactaggaattggaattatgatgctgtaggtcatacttggagtttagttggtgatttaaccaatggtagttctgccgagtttactgtgttcttcactgttattgataacggtaccttggttaacaatgcaagcgttagatctaatttaaccaatgaaaccaacgcaacaaataacactactgcttacaggcctaacatgactattcaaaagattagtaatgatgaggttgtttatgttggtaacattaccagtttcactattgttgtgactaacactggtgactgtaatctgtctgatattgttgtgactgattctgatttcagtgctggtttaagttacttgacttatgctaatggcactaggaattggaattatgatgctgtaggtcatacttggagtttagttggtgatttaaccaatggtagttctgccgagtttactgtgttcttcactgttattgataacggtaccttggtaaacaatgcaagcgttagatctaatttaaccaacgaaaccaacgcaacaaataacactactgcttacaggcctaacatgactattcaaaagattagtaatgatgaggttgtttatgttggtaacattaccagtttcactattgttgtgactaacactggtgattgcaacctttccgaaatcgttgtgactgataatgattatagtcttggcttaaaatacagcagatatgagaacagcagcagattatggaattataatggtggcaagttcactctggtaggtgatttggctcctggtaattccgcaaacttaactgtgttctttattgttgttgacaatggtacattagtaaacaatgcaagtgttaaatctaatttaaccaacgaaaccaatgcaacaaataataccactgcttacaggcctaacatgactgttcaaaaggtcagtaacgatcaacttgtctatgttggtaatgagaccagtttcacaatcattgttactaacactggtgactgtaacttaactggtgtttatataaaagatgatgatttcagtaaaggtttacaatacaacaataagttcgttcctgttaaaggcacttggacttatgctggaggcagatggaaccttgaaggtcagttaactgttggtgataatgctagcataactgtttactttaccgtaattgacaatggtactttagtaaacaatgctaccgctggttctaatttaaccaatgaaaccaatgctactaacaataccactgcttacagacctaacatgactgttcaaaagatcagtaacgatggtgttgtctatcttggaaacaccactagtttcactattgttgtaactaacactggtgactgcagcttatctgaaatcgttgtaactgataatgattacagtgctggtctacagtacagcagatatgcgaatactagcagtaaatggaattatgatggagataaattcactttagtcggtgatttggctccgggtgcttccgctaacttaacagtattcttcattgttattgacaatggcacattggtaaacaacgcaagtgttaaatccaatttaaccaacgaaaccaatgcaacaaacaacactactgcttacagacctaacatgactgttgaaaaactcatttatgaggatacagtctatgttggagacacagctatctttaccatatttgttaaaaatactggtgattgtagcttgtctgatgttgttatttgcgaatattggttcagtgaaggtttagagtacaatggtgtttgggtacctaacggtgaccgcaaatgggattatgacgatgaaacaagaacatggaccttaataggagatcttgctcctgaaggtttcgctagttttgttgtctacttcaacgttaccaaaaacggtactttatataacaacatcagcgccaaatccaatttaaccaatgagacaaacgctaccaacagcacaagagcatatttacctaatatgactgtaatgaaagtagctaacgatgaaatcgtttatcttggtaataccacaagctttacaattgttgtaagcaacaccggtgactgtaacttatcagaagttgttgttaccgatacagattacagcactggtctaaaatataagaattatattaatggcagtgctaattggaattacaacaatggcgaatggtcattggtcggtgatttaacacctggcagttcagctaactttactgtgttctttaccgttgttgaaaatggtactttggtaaacaacgcttcagcaagttcaaacttgactaacaaaacaaacacaacaaataacacaactgcatacagtcctaaaatgactgttttaaaaattagtaatgatgaatctgtttatgtcggaaatatcaccagctttacaattcttgtaagcaatgttggtgattgcgatttaagtggaatatatgttatagatgatgattattcaaatggtttactctacaatagatatgagaatagcagtcgcaagtggaattatgatggttccagatggaccttagtcggttcccttgaacctggagattctgcaaacttcactgtattctttgacgttgttgaaaatggtactttggtaaacaatgtttccgctggttctaatttaaccaacgaaaccaacaataccaacaatactaccgctaaacctgtctgtgatttgattatttacaaagctgttaatgctacagaaattcttgtttatgatattgtcgaatggaaaattaccgttgtaaatcttggtccggatactgctttagatgtaattgttaaagatcttttagacaatggacttgaattaattagtgtaagcggtggcaattataataatattaccggtgaatggaatattggtgatttagagcctaatactcccgtttctttaagcttagttacccgtgttcttgtaaatggtactattgtaaacactgctactgtaaatactacaagccatgaatctaattatactaacaataatgcaagtaactttactgaagctgactatctctgtgatttagtcatttctaaagccgtaaattgtactaattgtaatgtttcagatctggtacaatggaatattacagttactaatcttggtccacatgatgcttctaatgtcattgtaaaagaaatcttaccgaaaggtttagaattaattgattataatgttagtgttggtaattttaatgaagttattagtgagtggtctattggtactttagaaaaggatactgcagtatctcttgtcttagttactaaagtccttattgatggtactttaattaatattgctactgttaatactactactctagataataattatactaataatgtagcaaataacactacagttgctagtccgatttgtgatttagtcataagtaagatcgttaatgctacaaaagtgaatatagatgatatactcacttggactgtaagagttactaataacggtcctagtgaagctttaaacgtatgtgtaagtgatattttacctgaaggtcttatgtttgttggttataaggcaagtacaggtaggtatgatgacgaaagtggaacttggactgtgggtaaattgtcaagcggttctagtgctactattaatatatatactaaagtcatcgaattaggaaatatcactaacccagtttctgtaaatactactactgttgagtctaattattcaaataataaggctaacaatactacagaagtttatcctattgttgatttagtaattgaaaaatcatctgataaaataaagtataatgtaaatgatacaatgcattggattataaaagtcatgaatgaaggaccttgtgatgcaattgaggtttatgtatatgatgcattacctgctagtacaaaattcattgcttataattcatctaagggaactttcgatgcggctaaaggtatttggtctattggtgatttagcaaatggtgaagaagtgacattagacatatgttgtaaagcacttatttctggaaactttactaacaatgctactgtaaattgttcaataacagataagaacacttctaataattttgataatgcaactatcgaaatcgctgataacaaatccgataatccagatcctattcctgataaaccaaaacatggtgtggatattagtttaagaacaggtaatcctttactaatattcttgatggcaatctttgctatctttggaggtataggactaagatgcaggaaagaataa

SEQ ID NO: 2133 - DNA, 597 bp, Methanobrevibacter ruminantium
  source 1..597: mol_type = genomic DNA
atgaaaattttaggaatttgcggaagtccaagagatggggcttcaagttttctgcttaaaagagcattgaatgaacttgaaaaagaagaaaacttcgaaacaaagtttataagcgtgaaagacaagaatatatccccttgcacacattgcaatttttgccttgaatcaaaaggagagtgttcaattgaggatgatatgaatgaaatctacgattcacttaagcaagctgatggaataatatttgctagcccagtgcattttggaagcatatccgcccaattgaaggctgtaatcgacagatgccaagctttgataatggaggaccttgacatcttcaaaaataaagttggaatttcaatagttgttggaggggacagatgtggaggacaagagttggccatccaacagatcaatactttctatcttttaaacaaaataatccctctaagcggaggatcatttggagccaatttgggagcttgcctatggtcgcaagacgaagggaccgatggagtgaagaatgatgaatatggtttaaaaactttggacatgaccataaaccatttcaaggaatttttattagagtttaaacaatga

SEQ ID NO: 2134 - DNA, 1569 bp, Methanobrevibacter ruminantium
  source 1..1569: mol_type = genomic DNA
atgagcgaagagtcaagcagttccaaagttgcaaaaggcagcgcaattatcctaataggaaacgttatcttccgtgtaggaggatatatctaccgctttttaatggcttcccttttaggacctgccgcatatggaattctcggacttacaactcctttccaagggatctttcaggttctctctgctgcagggcttccacctgcaattgcaaagtatgtatctgaatacaatgcccttgatgagaaggaccttgctcgccaaactatttttacgtcccttaagattatggtattcctagggcttttcttcggattcataatggtattcgtagccgccccaataattacaaactactatcacaagcctgaggctcttcttccattgcaggctgtaggtctcatcactcctttcagcgttatcgttggaggattccgtggagccttccagggagtatataaaatggaatacatcctctatacaagagctatcgaacagatattcatgattctaatggctacagcacttgttcttcttggattatccacccttggtgcagtattaggttccgttttaggttttgtagcatctgcaatctctgcagtctacatcttcaaaagatatatgggcaaatacatacctccggcaaacccagactttaagtttccattgaaggacgagctgaagctggctaagacactgattttcttctcaattcctgtaaccgttgcagcccttgctgaaatgggtatctacagtatctgcacacttcttatgggagccttcctccctgcagctgcaatcggatactttacagcagcagaccctatcgcaaggcttcctttagtcgtatcaaattcccttgctacaacaatactgcctgcaacatctgaagcatatgccttaaaggaccaagtgctccttgaaaaatatgtgacagcaccatataagtatggaatgttctttgttattccaatgtgtgtaggaatagctatcttcgcaagaggaataatgggacttgtatactttacaaacgctgcatatatgaacggagcagtatccttagcaattctagttgtcggaatgactttctactcagtatacacaatatccggaagcatagttcaaggaattggaaatccaagaatccctatgtatatcctgattataggatgtgtaatcactttaggtcttggatggtatttaatcccgctttttggaatagaaggaggagctttagcaacaacaatatcctcatttataatgatggtgccaatgttcctgatacagtttagaatgacaaaaacacatgctccttattcattcttaattaaggtgacagttgcatccttgataatggcaatcgtatccataatcgttccgaataatgtatatggactaatcaccggcattgtggtctgtccgattgtttatgtgatcatggtaattcttcttaagaccctatcccatgaggacgttgctgaatttagaaaatacgcaaataagctagggccaataagaaaatatgccaacaagttattggactttattgacaagcatagttccgactaa

SEQ ID NO: 2135 - DNA, 693 bp, Methanobrevibacter ruminantium
  source 1..693: mol_type = genomic DNA
atgacagatgtaaaagctggagtagaatataaaatcaacatagatggaaactcctttctattagatgagaagaaattcaatcttcttttatacatcaatgaaagcggatccatcacagaggcagcaaaaaggactaaaatatcctatagaactgctctacactatattgaaaaaatagaaaccacattaaacatagccattgtaagcactaaaaaaggcggaaccggtggtggcggaggtaccaaactcaccgaagaaggcttgcaaatcgttaaggaatgtaaaaaaatcaatgctatcatggagcttcacagagatgtcaatgagcttgaagctgaaatccttgaagtggatgcaagcaaaggcataatgaaaatcaagatggaagaccttaccatgaccatgcctttgaataagaaatatgtggttggagataagatacttgccttaatcagctatgacaatatattcataatgctagagcctcaagcatccagcatcagaaacatcttcaagggaatcgttactgaaatgagacttcaggatgagatggtgagagtcaagatagacattggcggagttgacatattctcagacataactctatcagcaggtaaagacttagacttaaaccttggaaaagaagtttatattggctttaaagcattgtcaatagctacattgaaattataa

SEQ ID NO: 2136 - DNA, 105 bp, Methanobrevibacter ruminantium
  source 1..105: mol_type = genomic DNA
gtggcacgtgtatcaaacttgagttattgtcatgtttgtacgctatgtgcaatgaaatgcggtccagatgcaattaaaataataagaaatgcaccagatgaatga

SEQ ID NO: 2137 - DNA, 603 bp, Methanobrevibacter ruminantium
  source 1..603: mol_type = genomic DNA
atgaatatagaaaaacgtgatatcatggaaagaactgcaaaagtttcaagaaagacttccgaaacagatattgaaattgaaatgaacattgatggaaaaggaaaatacgatatagacacaggggtcaagttctttgaccacatgctagaatcattttcccgccacagctttattgacttgaacatcaaggcaataggtgacattgaaatagatgatcaccatactgttgaagatgttggcatcctacttggagaggcttttgctaaggctataggagataagaaaggaattagaagaatgggacatgcgattgtacctatggatgattccgttgcaactgtagcgattgatatcagcggccgcagctattgcaatatgagtcttgactttagaaacgataagattggagaccttagttctgatattattgttcacttttttgaatcctttgcatctagtgccaaaatcaatatctatggaacttgtgaaggctttaatgatcatcacaaggcagaagctgtttttaaggcatttgcaaagtcaatctatgatgcctgtaagatagagcatgatgagattcttagtactaaaggcgtgctttaa

SEQ ID NO: 2138 - DNA, 1221 bp, Methanobrevibacter ruminantium
  source 1..1221: mol_type = genomic DNA
atgatgaattataattatgatatagatatggaaaatccatttgagcctggaaaatcagtatctccagacagatttaaaggccgtgagaaaaacattaaaaagattctaagggatatgggtaaagttcaaaagggaaatgtacagcattttttcttaacaggcaataaaggcatgggaaagacttccttagctgaatttgtaaaggaatatgtcgaaataaactatggcatgattggaatatatgtatccaataagggaaataattctttaaattcccttatcacagctataattcaagcctttttaaataaaattcctcgcaacgttctttttgaaaagataaaaaccctattttctagcattgaaagtgtagaaatcataggcaatagggtaagctttaagcccagcaaaagccttattgttgatattgaaaaggactttccttattacttaaatcagatcattaaagatctccctaccaacaatggtgttttccttataatcgatgacattaatggtttaagcgagtctaaaaagtttgttgattggtataagcgctttgcagacactatagaagtaaataggggggacttcaatcttcccttatatgtcctatttgcagcctatcccgataagtttgacagcctagtatatgaagagccatccttcggcagaatatttcattatgatgaaattgacaggctaagcgatttggaggtaaaggaattctttaaagacaccttttcaagtgtaaataagcaaatcaatgacaattccttggaattattgtcatatttctcaggaggaatccctttgataatgcaggagataggttattcaatctattggttatcagaaaagaccacaattgatgaagaggatgtcttaaacggcattatggaggcaattggagagcttgagtcaaagcagataagaaatatcgtaaatcagatttcaagcgatgactttgaagatttattgcttaagatagcaagccaaaagcagcaaagttatattgaaacagactttaaggagaaattgaattgggatgagtacaatatatgggatgagtttttagattgcatgataaaattgggagtcattaagacaagcaatcgaaaaagcaatttgaagttcagcttttccaatcagttttatttcacttatttctggttgaaatcattaaaccttcacgaggaattcgctaaaattgagtcttaa

SEQ ID NO: 2139 - DNA, 501 bp, Methanobrevibacter ruminantium
  source 1..501: mol_type = genomic DNA
atggcatcaatagactattttgaatgtgaagactgtggattcagatggaaagatcaaggcccactcctcttctttctcaacgaaaacaataaaatagaagaatacatactccttatctcaaacatgaacttggattcaaattccaatatctcaggtgatatcatagagacctattgcacaaattgcgataagaagataaagatatacattatctctacaataaaaagcccatatgatgaggattcggctatagagtcaataagaaaattggcagatgaaaatcagatagacaataaggcccttaagcctttcattagatcttcagacctaaaggacaacttttacatcgtggatttatatagaaacttctattcaaataaggactaccattgtcctaattgtgatagtataatttccaagtatatcttatcaaaaaacaagtgtcctaagtgcggtggagagataagctcagtggatggtctctgtttggataaattttaa

SEQ ID NO: 2140 - DNA, 837 bp, Methanobrevibacter ruminantium
  source 1..837: mol_type = genomic DNA
atggtagttaaaattggtatcgtaaaaagtggtaatattggtacttcaccagtattagatttattattagacgaaagagcagacagaccaaacatcgatgtaagagtatttggatctggagcaaaaatgaaccctgaacaagttgaagacgtcgtacctaaactcgaccaattcgaccctgacttctgtattttcattagcccaaacccaggagcacctggtccagctagagcaagagaattattatctgaaaaagatcttcctgctattatcattggtgacgcacctggtaaaggtaaaaaagatgaaatggatgaacaaggtttaggttacattattgtaatgtccgacccaatgatcggtgcaaaaagagaatggttagacccaactgaaatggctatctttaacgctgacatcttaaaagtattagcagaaactggtgctttaagattagtacaaaaaactctcgacgctgttattgctgctgctgatgctggcgaagaaattgaattacctaaactcattgttactgctgaaaaagctgttgaagctgcaggatttgcaaacccatacgcaaaagcaaaagctatcgctgcatacgaaatggctggagctgtcgcaggcttagacatgaaaggttgtttcatgaccaaaggcttcgaaaacttcatcccattagttgctgctgcacacgaaattgcatctgctgctgctaaattagctcaagaagctagagaaattgaaaaatccaacgacactgtcttaagaactcctcacatgaaagaaggaaacttaggttgcaaagttgatttaatcagcaaacctgtagacaaataa

SEQ ID NO: 2141 - DNA, 669 bp, Methanobrevibacter ruminantium
  source 1..669: mol_type = genomic DNA
atgttaaaaatattggcagctgataaaatggacaaaaaattaatagtcagatatataatgctcattgtaggtgtaatcataatgtctatggggatagcattatctatcaaagcaactttaggaacatcccctatttcatctgttcctgctgtcctatcaattgcctttccctggactgtaggagagtttacaatagttttcaatgcacttcttgttatttttcagatggttttgcttagaaagatcaccatctcccaaatagctcagatgcttgtatgcgtcctctttggatatatgattgacttcagtcttctaatacttaattttccaaatcctacagattatatcagccaatggattctatgtatcataagctgctttgtacttgcatttggcttgcttattgaagtaaagtcagatatcaccatgcttccaggtgacggttcagttgtagccatcgctgaagttacaaatagggactttggacagatcaagccattttttgaccttaccatcgtatccattgcagccatattggcattggtatttttaggccaccttgagggggtccgtgaaggaaccatatttgcagctattgttgtcggattaatcatccagttttatgacaggatatttggatataatattgatgcttatttggctgattag

SEQ ID NO: 2142 - DNA, 315 bp, Methanobrevibacter ruminantium
  source 1..315: mol_type = genomic DNA
atgaaaaaggtaaagattacagttatgaaaaaggcaagatacgatgacctcattgaaaaatacgaaaatccattggagcatgaatgtgaggtagagcttggagatgtcttcattgcaaatggttgggaaaaaccggaggacttctgcagcagcgcttgggatagcatctctccatttgtattggcattatccagcgggggagaagacttatatgatggatggatgaaggataaaaagtcagcaatgatatcctgcaatgatgggtttcgtcctgtaagtttctatcttgaggcaatggacgaggatgctgattaa

SEQ ID NO: 2143 - DNA, 1125 bp, Methanobrevibacter ruminantium
  source 1..1125: mol_type = genomic DNA
atgaattctaaaaatattgctattgctggtgagatcaccccttcaaagaccataattcctctaattcaaaggttaaatgaattagataaggaagataaattaaacttcaaaataaacaagatatatggtctttatcatggggagtcatctaaattgcttcttgagccgtattgtgatgagctttatgatataggtcaaggaagacgaggccaaaagaagaactcaactgctaaattggcttatcttatctcaagagacataataaaggcattcaatgctctaaaaggaaataacatagaccttctaatcactgcaggcaatgcaggtgatgtaagaaagtccattgttgcagccaaccttttaaaaatccctattcttcatatagagcaggacatctacaaccctattgaagtaatttcacatgccaatctagtcactgttcctaaagaggattataaggactatcttgagagaaaatataatttaaaaaacgttgcatctattgacggctatcctatggctaaatatgtggacaatcatataaaagacaataatctgattgataaggaagagatatatggcgaatatggagttaaggaatttgtgctggttgttcttggaggggacttaaaggatgatgagattgagcctcttataagatcagtggaacagcttaatctaaagactctcattgctccttataggtttgatagaaatcttgttgaaagccttgtcctttcaccaaacattaaggttctcccacagtatgttgaccttttaagctttatgaatgcagcatcccaccttatctatgctgcgggaatgggactcaccattgaggcgggtgtattcaatatcccttcactaaagattgaaggatttcataaaacccatggaagcgtagaccttgcaagggaacttaatattcctattgtaaaaatagatgagattccagatgcctttgagaagctatccgctcatcaggataataatcttgttaaaaacagtgaaatcgccattgataagttggtggatctaatcaatggatttgatgagaatggtcttcaaaagagcggattcaagtcaacaaagcaaatctggaacagtcgtaaggtgtttagataa

SEQ ID NO: 2144 - DNA, 1182 bp, Methanobrevibacter ruminantium
  source 1..1182: mol_type = genomic DNA
atgaacttagaaaacaaaagcattgaccttttaaatccatttatcataatcgctatggtaattgtattcataatcattgcccttcctatgtggtatgcttaccaaaaattgccaagtcccagcatggacttatttctatacataggattaggccttattttcttcatatttggaattttgataagcaatctattgctaaacagatttttaaaaaaggatctctctttagattcccttaaggacactataaaaattagcataagcaaaaatccaaaaaagctttcaatctttgaatcctactcaagaaaggaaatgattctggtcatcatggttttaatcggaatcatccttcagataatcaacatagttcgtcttggaggaataccattattctcagcaacactaaaggctgaagctgcaggaaagatatggctcgcatcatatataatcttcttgccatttattaacatactccttgcagaattcaatagggattcacattatcttttagtatttttaggcttgcttttatttactttaactggctatcgaactacaccaattgcaatcgtgttatctatattaattacattatattatacaagaaacataaaattcaagtatcaggtcctatttttaggactctttttagtcattgcagtggcacttctgcttgctatagggttcatagcggtacaggcaataagctggcagcactggagccttaatccaatagaacttgtgtcatatagggcggcatttacattgaatgttcttggccatgcaatcagcaatcagtttgcaactgccggaaagcttttctactcaacccttacaggatttttcactcacacagaccctagggttcttgtaggtcaagcaactcttggaaggaaccattcaataacatctacaatattcggaccggctcttcttgactttggattgattggaatgtgcattcaaatgctcttgatcggattcattttaaagacattgcacagcattcaaaagcataagaaagaggtttattcagcattttatggaatcttgcttgcacagacaataatttggatagagacaggtccaactgatgtggtggtgtggatattctatttgattgcaattgttcttatggcgcttttctttttaaaaggttccagcagggacttggaggcttga

SEQ ID NO: 2145 - DNA, 16956 bp, Methanobrevibacter ruminantium
  source 1..16956: mol_type = genomic DNA
atgagaaataaaaagattttcatttttactttaatgattgtcatgctattatcgcttgctgcagtttcagcaaatgatctggataatcttgaagttgatgatggaaatgttgtatctactgatacggtaatcaatgatgtgcccatggagagtacgtctagtgataagattgccctgaatgtagattcgacacaatctaatactacagagatacttaatgaaaatgaaataataacaaataatagtactttaagcattgatttgaatgaatcgattacaaatgaaatcagttctgatcatgaagattcatatcaggctgatagtaatcaagaggattcctatttcacttcagatggaaacatttatgttaaagtgaaaacttccatgcttaaagcggacggcgatcagatttattatatacatcctgccggtagccctacagcaacaggaactcgcgatgatcctttggatagtatgaattccgccttgaatttatttacttcagatggaacacacactattgtggttatggatgggatttataaagatacatactatgactataacaatacagatgtagacacaaacttaagcaacttgattataaagtccgatgaaggggcaagtccacattttaacctgagcacttcagattatcgaaggtctttatattgggcctttacaggagaaaacataactatagatggattgaagtttactgattcacaatacggctcttttaatgaggatggggtatacaaataccatacagtattgagattcattaattccactaatgttttggttgaaaactgtgtatttgacaatgacggataccttatcaatgcaactgattcaagtgatgttgttattaaaaattgtaatgtttccaatagtaatcgttcaaatgtatttaatgttttgaattccagctttactgttcaggattcaaatttatccaagattagagatagctatattaccaattcaagttttaagctaatcaacaacaccatctgtaacaatgtaaattcaaatttgttcacagtaaaaaattcaagtttggatattataaacaacacttttaaagacagcaattattcatcatattatgtgttccgtatttataacaataatgaaacctatgcgaatttcactggaaataattttacaaaccttacaggcacagattaccttcttcaggtaaactactatgttaacgataataccactgtgtcatttgtcaacaatagccttaaagacgttagtttaggtcttaatattagatattccaatcttactatggacggcaactcctttgacaatcttagtcttagttcccggccttcttattctggaataagtacaagttattcaaatgtatcattcaccaacaataatttcaccaactctgactcttacatttatttaggctatggagtcaatgctacaattgaaaacaataactttactgacaatattccatcatactatggtcttttgcgagctgagggtaacagtcatgacattaaagaaaacaatttcacaaacaacaaaggaaattgttcaattattcaacattactctggcaatgctacaattcatggaaatcatttctataacaattccttgaatggatgtggtcatgttatcaatgttactagtacttcaggttctgaaatttataaaaatgactttgtaaacaacagcgccgacaatggtactgtatatctatatggatcatctaatgtacatgataacaatttcaccaataacagcgtcaccggactcggaggagctatctattcctatagtttttataatattaatactacaattaaggaaaatgtctttgatggaaacaatgctagctttggtggtgcaatctattatgaaaactatcctagctataataataaaagggagattgtaaacaacaccttcataaacaacagcgctgactttggtggagcaatctactcaaataaatcaatcaacaacattatcgatgataatgactttataaacaacagcgctcaaattggaggagctatttttgttgattatctatacataaacgatttcagatacaacaacaccaataacaccattagcaacaacttgtttgcagaaaataatgcgcaaagtggtggagcagttgtattatattcacaaaacagcaccgtggaaggaaacagattcatttccaacaatgcaagtcgctatggcggaggagcattgattacaagcggaaataactctatcatagtaaacaacacctttgcaaacaacacagctcaattatatggtggtgctattggaaccaacgactctaagataattgacaataagtttgaaaacaacagtgcttatcaggctggagctatcttaacaatcaattccacaattcacaacaatgatttcgttggaaatgaagcaactagaggtccggcaatagtatatatagacgactttaattacactgcactcacttactacacttataactgcagctgcgaaaactgcagcaattgcagtggatgcagcgattgtgaatgctgtgtaactactatagtagaccctgaaactggggatgagataaaaattattaattgcagcaactgtgacggttgcaattgcacttgcgaaaactcaaccgtaactgaacataatataacattattatataataataccggcattgatatcgacgaagacgtttacgcctatcatgaaaatcagcttttaagggttgccaaggaaaacaatggaatgtattacctttatgacaatgttaatgttacaagcgctgaaaattacacttattgggcgtattgcatagagcagaacaattcctacccttggctaggaaatggaactcttggagttcatgtagatgatctatactttgtcagaaacagtttggatgactcttatgttggtgattaccttaagatattgatttcatacttctatcataatcttgatgaggataagatcaatgtcaaggagtatatctatatctttacagacaccgactatcgtagcaacaatgaccgcataatccaaaagattattaagctagccaataatgagtcaacagttcttgagaatggtaacaactggataaacggagtttacaactgccttgaattctcaacattcataaaccctaccacaaggcagaacctgattttaatcaatggatgcgaacctctagacaagcctgactttaacataactaaaaaagccaatgctacacatgtgaaaaccggcgattacatcaactatacaattcttgttacaaacaacggaacatgcaatttgcatggtttgaaagtgactgaaagaatgaattccatgttgatatatatgggcttcgatgatgttagcgataattggacccagacaggggatatggaatggatgctgaatagaaccttgaaggtcaacgaatcggcggaattacacatctacttcatgacaaataaggtaaccagctataccaacattacaaatgtcattgaggcaagaagtgatgaaagtgacacaaagatagcagaggaacatattgaaaccatatatcctaaattggtttaccgaaaggtcagcgtggaccctgttgcctatcctgaatccacaattagattcatacttctcgttaagaacataggtactgccaatgcatataatgtagccattgaagacagtggctttagctcaagtcaattgttatatcaagggacatggtccaactataagggaacttggtataatagcggatctagcgcaacatcaaccggacgcttcactcttaatgggtatttggctcctaaccaggaggcgggggtttacgtttcctttaaattgaaggaaggtgttaaaggtacaacagtatccaattcattcaatgtatatttaaacaatacttgggatggaagcgcttccaattttacaagagttgtctcttctgcaatgaaagttgaaaagctttgggtcgatcctcttcctattgcaacaatcggcgatgaagtaactttcgccataaatgtcagcaatgttggagaggccaatctgacaggagtctatgtagaggacttcttcccaagcggattggaatacattagattctataataccgatgcccacaactggactcattatgaaacccttgacggcacccataggttcattttacaaaacaccctacctaacagtcaaaccagcaggacactttcatcctcaatcatttatgttgtatttaaagccaatgaaataggcgatttaaccaatacagctattgtaaaaagtgactacactgaaaatgtcactgataatgaaacaatcattatcagtccttatggaatgaaagttgagaaattcagcaacaacccgatttcacaatctgacaatcaggtttcatacgtaatcagggttacaaacacaggaatatataacttgacagatgtttatgtaaatgaaagccaaaatgaatacatggtttatgaccatttcgaagatagttccaataaatggatctataacgattcaggcgatagcccaagatgggtttacaatggaagcttggagaataatacctattccgacttcattgtatattataacatcactaaaatacctgaaaacggattaatcaaaaacaccgttagggtatattcaaatgaaactgtagagagaaatgcaagcaatgaaaccaaagtctataaattatccctttggaaagtaagcaacaatcctgtatccagacttggagaccaaatttcatttaccattgttgtcaaacatgaatataatggaaattcttatgataaggacttatatcttgacggcgtcttcgttaaggaactgattcctgacggcttgacctatgaccattacgttgatgaaagcggcaaatggtcctatgattacaataccgacaattgggtatatagcggtactttagttcctaatactgaaactaactttaccttgttctttaacgtaaccaaaatggagaacttaacaaatgtagttattctcggtaccaatcaaagcaataatgtaaccgtcaacaacagctccgacagcagatactacagcatgcttgtagataagataagcttgaacgagactgtctttaaaggaaacatcacagaattcctaatcaaggtaactaataacggtgacttgaacttgactaatgtcactattcgcgaagtcattcctgatggattggtctatgttggatatcttaataaaaccggcaaatggatttatgaaggaggaaatggagcttcaagcgatgatcaaccaatgtggacttatcaaggcatattggctccaggagaatctgcagagttcatcattctattcaatgccactgaaacaggcacatttttaaatatagtttatggaacctctaatgaaacagaggaatttgtcgcagaaaacactacaaaggttttaaatcctctcttgtatgtagataaggtcacattgaatcaaacagtatatcgcggtgacttgactgcattcgagatattcattgtaaacattggtgattgcgatttacacgacctttatattgatgagatattccctgacggccttgtctattatggattggtggatgatacaggttcattgtcctatgatgagaaaactcaaagaatcagctttgacggaacattgaaagttcgcgaaactttggtattcacagtcatattcaacactacaaaggtaggcaacttcaccaataaggttgaagtgggctctaacgaaaccaagaaggaatatgctaataatactacccaagtattggaaaaggacttaaatgtcacaaaggttgcaaacaataaaaccgtcgtcaaaggtgacaagacagaatttacaattgacattactaatgtaggcgaatgcaatttaacaaatgtatatgtatatgaggaatccttcgagggactttcctattatgcctacatcgatgaaacaggcaaatggtttaaaaacggcaataaatggatttatgatggtgtcctgaaacctggcgaaagcgttaagttcactgttgtattcaatacaaacgagacaggcaactttaccaatatcatcgttgcaggtgccgatggaatcccaaataaaactgcaaacaacactacagaagtgcttatttgcgacatttccattgaaaagctcacacttaacaaaacagttataagcggagaggacacccaatttgccatccgtgttaaaaacattggattaggcaatttaactgatgtgaccgtaactgacagcttccctgaaggcttgacttacaagaccttcattgacaatagcggaaaatggtccaaaaacggcaataaatggatttatgatggtgtcttgaaacctggtgagtctgccgaattcattgttgtatttgctaccaatcaaacaggtaatttcactaactttgtaagtgtaagcaccaatgaaaccaaatccaagaacgcttccaacaaaacagaggttgtcttggcagatgttgaaattcaaaagatcaccctcaataaaactgttataagcggtgaggagactctatttgaaatagttgtcacaaacaagggcattattgatttgtccgatatcactgtaactgacagcttccctgaaggcttgacttacaagacttatattgacgaaagcggaaaatggtctaacagcggcaacatttggacttatgatggagttttagctcctggtgagtctgctggattcattgttgtgtttgatactaatcaaacaggcaatttcaccaactttgtttctgtaaagactaatgaaaccaaatccaagaatgcctccaacaaaaccgaggttctagtggcggatattgaaattcaaaagatcacacttaacagaacagtcatcagtggtcaagagaccatgtttgaaattgttgtcacaaacaagggacttgttgatttgtccaatgtcattgtagctgacagcttccctgaaggcttgacctataagacttatattgatgaaagcggaaaatgggctgtcaacaataataaatggctttataatggtgttctagctcctggtgagtctgctggattcattgttgtgtttgataccaatcaaactggtaatttcactaactttgtaagtgtaagcagcaacgaaaccaaaaccaagaatgcttccaatataacagaagtcctattggcggatattgccatccaaaagataactcttaacagaacagttgtaagtggccaagagaccatgtttgaaattgttgtcaccaacacaggaatcattgacttgactaatgttgttgtaactgacaccttccctgaaggcttgacttacaagaccttcattgatgaaagcggaaaatggtctaacagcggcaacacttgggcgtatgatggtgttctagctcctggcgagtctagtggattcattgttatatttgacactaaagatccaggcaactttacaaatattgttagcgtaatatccaatcagacaggcaataagtctgcccgtaacattactgaggttatcgttgcagatgtaggcattcaaaagataactcttaacagaacagtttatagcggtgaggagactcaatttgaaattgttgtcaccaatacaggaatcattgacttgactaatgttgttgtgactgacaccttccctgaaggcttgacttacaagaccttcattgatgaaagcggtaaatggtccaacagtggcaacaaatgggtttatgatggcattttgactcctggcaagtctgctggattcattgtagtgtttgacactaaagatataggcaattttaccaatgttgtatctgtaaacacaactgaggtaggtcctaagtattcctataatataactgaagtaattattaaggaaaacaagaccaaccataccaatgaaactcctccaggtcctaaccctccaggtcctagcccacctggtcctaaccctccaggtcctaaccctcctaagcctcatgttcctacacatccgcataagcctatagttccaactaatccgaaccagcctaaattggttaaatccaataaaaatccgttatctgatgtgaaagcaggtaaccctatagctttattattaatcgtattagtggttcttggttctgtgccatttgcatcatgcgatagcggtggaactagaagaagaagaaaaaccaaagagagaaaagcagcgaaacataaggaaatcgataagaagaaaggcattatcattttatccggatgtcttttattgatggtttctgtttcagccatttcagcagctgacactggtgatttaggctatgatgatgctggcagcgatgttgctgtacaatcagtaagtcacgaaccggctcaatattcctattcaactagcgaaaacatggcatatgatagttatgattatggcgattataatgattatggtggctatggcgattatggcgattatggcgattatgatggctatgacacttacaatgactattacatccttgacaacaacgaaacagtctatgaagatggcatggaaaattcagctgatggaaacagcgctgatgcagctaacggtcaagcaaatcaatatgctgaagatggttctgatatggaactttacagcattgatgatgaatcttatgattccaatgacaactatgacaattacaaagaatattcctatgatgatgattcatcccgcgaagatgcatcttcaattgtaagatataatgattgtaccgtaaacggcgataataaagtcaaatcaatttacacatcttcttcacttgctgaaggggaaggtgtagtggtttatgtttcccttgatggtagaacaggtgctgaaggtacctatgacgatccgctcctcactattggggcagcattgactaaattgtccactgtcagttctactgagacaaaaaccataattttgaaaggcggaaactattcaggaaacaattatagatatttatctactcgtttgaataatttgattataaaggctgaggacggcgctgaagtaaatgttgatttaaggggaatgaatcaaaacagtttgtattggactttctatggtgataatgtaactgtaagcggcattaactttatgaatgccaatatgacatcttacaaccttaacaattatcacgctgtattgaaatttatcaactcaagcaattctcgtgtggaagattgttcattcagcaatttgaaatcctatggaattcttgcaggaaacagtactgatgttgtaatcagcaattgtaatttcacaaatggaagctctagaatgttcagtataaccaattcaagtgtcactgttgaagattctatcatgaagaacttctctaccagctacattagaaattccacattcactatggtaaatagcaccgtgacagatttcaatgatgacgacatctttaatttcgcaaacactgatttggatattagggacaatacattcaagaatttgacattcccaaacaaaaccaattttcaacgttttggagtgttctatgcctgggatgataatgctggcataagttataatttcataaacaacacctttgccaatttcactggaacagatgcttatatgatttatcgttcagcatcctcttcagtcaaaccaatgtgcaaagtaaacttcacagacaacaatgtatcaaacgtatctgttggagttaatatatattatggaaatatcactgttgaaaataacagcttcgatcatatgagtccggccaatactttacgtttcagctattcaaacattgacataagagataacaactttacagattctaactctacccatgtttattcagatagatgcaatggtacaattgaatataataatttcattaacaactctgcattgcctgtttcagctgagtggggtaatttgaatatttcctttaacaatttcactgacaataagggcaatttctctgcaggagccattcaatctactggagtagtgaatatatttaacaatactttctgtaacaattccgctcgcgttggtgctgtgaatgttgccagcattagtagtaataaaaccatttacaataacacatttgtcaacaacacaggtgttagcggtaccctttatgtcaatggaaatgcaacagttcatgacaacagattcatagacaataatgtaagcgaaaatggaggagccatctatgcagcatatgataatagctataataattattataatatttctgctaatattactgacaatattttcgatggaaatattgctaataagggtggtgcaatctattatgaacaatataatagcgcttatggccttgataacttggcaaacaacacatttgtcaataacaaagccgaatatggtggtgcaatttattcaaataaaacagtgaatgtcactatttcagagaacgagtttgtcaataacagtgcaacaattggaggtgctatctttttagacaattatacctctgcctttaacactggaacaaacattactctaaacaatttcacaaacaactctgcacaaagtgctggagctgtagtggtttatggaaacaacaccaatgttataggcaataactttgttggaaacaatgctacacgctatggtggtggtgcacttgtgactgatggtgcaaatggattgatttataacaacacatttgaaaacaacaccgcattcctatatgcaggagccatcggaacaaacaacagcaagatcataaacaacactttcactaacaacaacgcttatcaggctggagcaattttaacaatcaattccactatacataataacacattcagtggaaatgacgctacaagagctcctagtgttggctatatagacaattacaactacactgtttcctcttactacgtttactactgtagcagtgaagattgcagcggatgcactgcatgcgaatcctgcacaagcacaatcatcgaccctataaccggagcggaaatcaaggtaatcaactgctctaacggtgatgtacctgagtgcatttgtgaagattcagttgcaacattgtataatattagcctattgtacaataatgaaggtctcaatcttgatgaagatgtttatgtttacgatgaaagcaccattcttagagttgctttaaacaataatgatatgtacttcctatatgaaaacgcaagcattccaaatgccagcgaatatcattactgggcatactgcattgaacagaacaactctaagccatggcaatggaacggaactactggtgttcttgtagatgacttgtactttgtaagaaacagcctggacggctcttatgttggagattacattaaggtattggtatcctacttctactttaaccttgacgaggatgtctataacttgaaagattatgtatatgtatttacagacactgactatcgtgctaatacagatagggtaattcgaagagttattaaccttacagaaagagaggacacatctcttgtaaacggcaataactggattaacggagtttataactgtctttcattccatagctttatcatgcctaccacaagacagaacctgattctcattaattcatgtatggctatgcagactccagacttcaatcctcagaaaatagccaacaaggagaatgtcggcactggagacattgtaaactacacagtcactgtttacaacaatggtactgtgtcactgcataatgtgactgtaaccgaaaggcctaacagcatgcttacctatctatcattcactgatttccgcaatcaaggatgggtgcaaactggtgagatgacttgggtcttgaataggcctctgaaggtccatgaaactggtacattcaatataaactttagggtaaataatgtcacatatctcactaatatcacaaactatattgatgtaggctgtgatgaggtttcaaacaaatctgcttttaccagaaccgaaaccaaatggccacgcatacaggttcaaaaaatcactttggaccaaaatgtaactccaggatcaactgtaagattcttgcttttagttaaaaatataggaacccttgaagcaagcaacatcactttggtggacaattttaatagaaatgaattggagtacgaatatagatgggattcatataaaggtaattggtctggaggacacggatggggaggaagcagctcttcttggcatgtcgacacattatacttgaaccaagtcctctatccgggtcaagaggctggagtgattatctacttcaaagtacctaacaatgtaacagtagggtctgcttataattcagtaaatgcttatagaaacggaacatctgaaggttattcaagcaattacacaattatacaacgtccttacttttcaatttggaaaaccttggttagctcaaaaacttcaaccataggagaggaagtggtattccaaatcaacgtacagaatacaggttatgtgaatttaactggtgtttatgtagaagacattcttccaataggattgaaatatcttaggttctacaatacagataatcataactggactcattttgtagatgaagatggaaaacatagattcctattgcaaaacactcttcctacctattattcagacagtcagaattatgttgcccgactttatattgtctgcaatgctacagaatatggtaattggtacaaccttgctacaggatacacagaacagacaaataagagtacctctcaggcaaatgttacaataattccatttggtgtatcaattgagaaagtcagcaataatccaatatcacaagttggagatcaggtctcatttaccattagggtaagaaacacaggaatatataacttaactgatgtctatgtaaatgaaacaaggaactcctatatggtattcgatcactttgttgacaattcaggcaagtggattttaaatgaatcttatgcaacttcaggcgtgcctagctggaattataatggtacttttgaagtaggagctgtaagcgaatttgatgttttctataatgttactaatattaattattatggaaacataacaaataccgcttatgtctcttccaaccaaactaccaacaggtctgtttccaatcagacagctgcctataatattaaggtaagaaaaatcagcaataatgctacagcaagggttggagatcaagtttcgttcactatccaaatatcacgggatggctattcttgggaaagtcctttctcattatatggcattcatgtaaaagatttggttcctgatggcttggtatttgaccatgctgataacagttactattggatttataatgaaagcgatgagacatggtactatagatctggtttgacagcaggcagaaccattagccttacattgtactttaatgtgaccaaggcagccaacataaccaatgttgcaattgtcggagtcaataacagtacagtgaaaactgcaaataatactacaaacagtatttaccataacttgcaagtggaaaaggtcactttaaacgaaacagtttacccaggaaatatcacagaattccttgttcgtgtgaacaacaccggtgacaataacctcacaaatgtattcgttaaagaaaacattccaaacggacttgtttactatgattatattaataagactggcaaatggaattatacggaagatgatgacggacctatatggctttatgatggcattttagctccaggagcattcggtgaattcattataagattcaatacaaccgtacctggaatctttgtcaacaatgtcgtagcaggctctaatgaaacttccaataagtccactgagaattcaaccaaagtcttgggtccaataatctctgttggaaaaatcactttaaacaagaccgtatatattggagagctaactgaatttagaattaaagtctctaatgatggggactgtaatttatctggcgtatatgttgttgaatacatcccagatggcttaaagttcgttgaatttaaagatgaaagtggtttatggacttacaatgaatcaagcagaacattctattacaatggaattttagaacgtgatgattcccttgagtttgtcgttgtatttaatgcaacaagagcaggcaactttaccaatgttgttcatgcaggatctaacgtgactaacgaatcagttgcaaacaacactactgaagcattggatgtaagaatggacattcaaaaggtcaccttaaacgaaaccgtattcactggtcaggaaaccggatttgtaattgtcgtttccaataccggacttaaggacttgactgatgtccgccttaaggaaatttatccagatggcttagtatattcacgcttcatagatgattcaggcaaatggtttaacagaggtgattattggatctataatggtgttttagctgttggagaaagcactaacttcactgttatattcaacacaaccaagagcggcacattcaacaatacaataattgtaagctctaatgaaacaggtcctaagaacacttcaaataccactaaggtagttgtagcaaatgttaccgttgcgaagatcacattaaatgaaactgtcatgagcggagagcaaaccagcttcgacattgttgtcaccaacgacggaatctataacttgactggtgttgtcgttaccgacgccttccctgaaggcttggcttacagcggcttcgttgatgcttccggcaagtggatctttgatgattccaaaggaaatgcttggatttataatggcactttggctcctggtgagtctgcaagctttacagttgtctttgacactgatgaagtaggtgaattcactaacatagtcaaggtaagcactaaccaaacccaagataagaacgcgtccaatataaccaaggtaatcaagcttattccaaatgtcgcaatccaaaaggtcactcttaacagaacagtctacagcggagagcaaaccagcttcgaaattattgtaagaaataatggagaaatgaatttaactgctgtgacagttactgacgccttccctgaaggcttggcttacagcggcttcgttgatgcttctggcaagtggatatttgatgatgctaagggcaatgcttggatttatgatggcattttggctcctggtgagtctgcaagctttacagttgtctttgacaccaatcaaacaggcaactttacaaacattgtaacagtaagcagcaatcaaactaaagagaaaaatgcatccaatattactgaagtaatcattaaatctgttccaggcattgagattataaaaatcacaatcaacagaactgtatacagcggtgagcaaacttcatttgacattgttgtaagcaatgatggtaatgtcaatttaagcaatgtgactgtaatcgacagcttccctgaaggcttgacctacagcaatttcattgacgacactggaaaatggtttaacataggcaataagtggatttataatggaattctacttcctggtgagtctgctggtttcagaattgtctttgataccaataagtctggaaacttcactaaccatgtaaaagtcacaagcaatgagactggagagaaaaactcatccaatgttaccgaagtaatatttgctgatgtcgctatccaaaagatcactcttaacagaacagtctatagcggagagcaaacctgcttcgatattgttgtaactaatgttggtgaaattgacttgactaatgttgtcgttgctgacagcttccctgaaggattggattacagcagctttgttgatgaaagcggcaagtggatctttgatgatgctaagggcaatgcttggatttatgatggcattttagctcctggcgagtctgcaggatttacagttgtctttgacacaaacattacaggtaacttcacaaacattgcaactgtaagcagtaatcaaaccagcgagagaaacgcttccaatattactgaagtaatcaagctcattccagacattgctatccaaaagattacccttaacagaactgtctatagcggagagcaaacctgcttcgatattgttgtaactaatgtcggtgagactaacttgactaatgttgtcgttgctgacagcttccctgaaggattggattacagcagtttcgttgatgaaagcggcaagtggatctttgatgagactaagggcaatgcttggatttatgatggcattttagctcctggcgagtctgcaggatttacagttgtctttgacacaaaccttacaggcaacttcactaaccttgctacagttagctgcaatgagaccgaggataagaacgcttcaaatattactgaagtaatcaagctcgttccagatattgctatcataaaggtcacacttaacagaactgtctatagtggccagcaaacttcatttgacattattgtatctaatgtcggtgaaactaacttgactaatgttgtcgttactgacactttccctgaaggcttgacctataacagtttcattgatgagactggcaaatggatctttgacgaagaaaaaggaaatgcatgggcttataatggtactttagctcttggagaatatgcaagcttcacagttgtctttgatacaaaccttacaggcaacttcactaactatgtaagtgttacaagcaatgagactggagagaagaactcatccaatgtgactgaggttattaaagtgcctaagaatgacactcctccggtacctgttcctccagagccagtggttcctcctgaacctgtaactcctccagagcctgtaattccaaataaaaaagttccaagacatgaattaccaagaactggtaatccattaatggtcttactcattgctcttgcagcagtaggattaagttctgtaagaagaaaaagagaataa

SEQ ID NO: 2146 - DNA, 1509 bp, Methanobrevibacter ruminantium
  source 1..1509: mol_type = genomic DNA
ttggggttatttagggttaaaagaattccggatgaaaaacaaataaaattaggcattagaactttagattttaacattccagaggatcatatttctcgttttgttggggatttcattgacgaatattatcctcttttaggaatcaaagaaaataaaaagaagaaagggcgtgacagttttccggtgaaagagatgttaaaattgcttatttatgctaaaatcgagcatattgatagtatgagattcttagcagacatggtaaaatatcatgacgtatataaattcgttggaaatggaatttgtccttcagaacgatcattacaacgatacagagaaaaatacggcaaatattacaatgaattgttaaaagcaaccttaaaaaaagcttcagatgtggattacactgatttcaacgaagtttccattgacggaaccatcaaaaaagcatacaattcaaaaaataaagtgatcacagaaaaagaaactgaaatattaacccgttacttcgaaggaggccgtgtaagtcaggaagagctagataaactccataaaccggcccgagagattcttgaaaataaaaaaatcagcaaccaagaaaaattatacctcttggatgacattaaaacacaattcacactgtctggtcaaaaatcagtgccagtaaccgacatagaagcacgttggatgaaaagcaagaaaggaaactcacaaataagctataatatccaatctgcagtcgattacgatacaaaaatgatttgtgcaataaacgtcgtacaagcccctacagaccattaccaattgccaaaaatcgtagataaggcaataaacaacacaaacgtaataccaagattcgtattggcagatacaatctatctgaatgaagaaagcttatcatatcttgcagataatcaaataaatggagttataccagatagaaagcaatccaaggaaaaaatcggaagattgaacaagaacccatatcacaaggatcacttcaaatacttccctgaaattgatgcatttgaatgtccagaaggccaaataatgtattttttcaacaaatacactgaaaaaaatgatgatttggacaagccagacaaaattaagcgtttatattccaattatggtgcttgtaaggcttgcaattgccgtgaaaactgcctttcatccacccaaacccacagaacaatcaccgaatatggcggaagtttaaagaaagcaatgtgggaaaaaatggaaacagaggaatatatggaagaatatgcaaaaaggtcatctgtcgaaggaccttttggcattttaaaggaacaattccatatagaaagcgaagtagtgataggaaaaacaaagacagaagaaagaatactattagatgccgtggcttataatttaatacgattatttaacttagaacaagaaataaaaaatgataaagaagatatagttgatttctgtgagaaaatttctgtccaagagaaattagaggtcagagcaaccatattttaa

SEQ ID NO: 2147 - DNA, 690 bp, Methanobrevibacter ruminantium
  source 1..690: mol_type = genomic DNA
atgttagagaaagaagtaaaacaatataaaaggggaaatagtttcacttatcgtattgatctatctaagaaagataattttgaaggtggagaaaaaataatgatttttaggatgagcgaatatgaagcttatctaaatgaaatagaagatctaaagagtcaaattgaagaaaataataaaaccatctctgaacttagggaaagtcgcagcgaagctaattccaatataaataatgttgttgacaatcataataaggaaatagcagataaaaataaggaaattatggatcttattgaagagaacaaatcagctatccaaaaatgttatgatattattgaggaaaaggacaagctcctgacacaggctaatgaagagattagaatcgaaagggaaaaaaccgatgccactcgcaaacaggcccaggaagatattctcaatgagagaaaacgacatgatgaattaacccttgaaaaggataaacaattgaaattagtcaatgaacaacttcaggatagtctaaaagatatagcttataaggataaagtcattaccgcagataggcttctaattgaaagatataaaaatagaggttttgtagatcgtttacttaatagattgcctgatgacagcgatttaaaaatagatgacgtcaaggaaacctatgttttagaagctgaaaagaaggaatag

SEQ ID NO: 2148 - DNA, 138 bp, Methanobrevibacter ruminantium
  source 1..138: mol_type = genomic DNA
atgatattatcattgcatctattttgctatggttacttttttatagactttgatgatattgtattgtcattgcattctatttgtaatttattttttatagattttgatgatattgtcattgcatctattggatattga

SEQ ID NO: 2149 - DNA, 1443 bp, Methanobrevibacter ruminantium
  source 1..1443: mol_type = genomic DNA
atgaaagtcgtacttgctggaactggaagcgcagttggaaaaactacaatttcaaccggaattatgaaagcgcttagtgatgaaaatgtccaaccatttaaggttggccctgattttatagatccttcctatcatacaatagctacaggaaatgtgagccgtaacctagactcctttttcatgactgattttcaaataattaattcatttgaaagagccttaaaaaaatccaattctaatatgggtatcatcgaaggagtcagaggtctttatgaaggaataagtcctataggagatgttggaaacactgcttcaattgctaaggccatagacgcacctgttgtgcttttgatggatgcaagaagtctcgttaaaagcgctgcagcagttgttcttggatttaaggcacttgatccagatgtcaggattgaaggagtcattttaaataaggtcaaaggtcagcgtcactataaaaaggctaaagaatctgtagaaaagcttgctgatgttccagttataggaggcattccaagagacgataagattactgtagaggaaaggcatctcggccttgtccctgctctcgagaaggaaagaattacaagaaacattaatctttggggcgagattgcagaggagtatatagatttggatgcacttaaggacattatgaagacaagctccaagtctactgcaagggacaataagaatattgcaatggaaaagcatgaagatgactttaatagagagcatactgaagcaatcgacctagaggttaccaatgactcaaagccagggcaattatggaaaaccggcaacaggaataaggtcaagattggagttgcccaggacgagatattcactttctattataaggaaacccttgaatcattggaggaaaattctgcagagattgttccattcagtccattaaaggatgagcatcttcctgatgtagatgcattatacatcggcggaggatatcctgaagtgtttaaaaaagaattatccgataataaaaccatgttaaatgatatcaataaattccataaggaaaatagacctatctatggtgaatgcggagggttgatctacctttccaaatcaattgacggcttagatatggttggtgcagttccatactcatctgagatgactaataaggttcaaggccttaattatgttgttgcaagggccaatcaagataatctcatatcaaatgagggcgatgtattcagagctcatgagttccattatactaaattaaatattgataaaactgattctttagtattcgatgtcttaagaggaaggggagtcctaaacaatatggatggtgtctgtgttaacaatactctggctaattacattcatattcatgcatgttctcatcctaactttggatacaattttactattaatatctcagagttagatatttag

SEQ ID NO: 2150 - DNA, 1116 bp, Methanobrevibacter ruminantium
  source 1..1116: mol_type = genomic DNA
atgtcaaccttagaaaagatgcaagtattagcagattcagcgcaatatgatttgtgcgactatgttagccatagcaagagctctcaagtaaacctgccaggaatataccatgcaacaggccacaacggatgcaagataccgctctttaaaacactgatgagcaataagtgcaaaaacgattgcaaatactgcataaatcaaagcaaacgtgatttcacccgtcttgaacttagcccggaagagcttgcaaaggcatttctccactactataacaacggctatgtaaacggcctattcctatcctctggaatctctaatgaaatcgatgaaacaatgaacaaaaccatagagaccgcaaggatattgcgaagggactatggataccaggactacatccatcttaagataattccaggctcaagcaaggattcaataaaaagggcgatgagccttgcaaatagggtaagcctaaacatagaagctgcaacaaaggacggccttagcgaaataacctcaacaaaggactataacaaggacatcctaaagagaatagactggatgcatcagattgcaaagaaaaatccggattatgcaaaatcaggccacaccactcagctcattgttggagcaaacgatgaaagcgattatgaaatactaaagcgaatggacagcctatatagaaaggcagaccttagacgcagctatttcagcgcattctcccctgtagagggaacagactttgaaaaaagagaagcatgcagcagtgatagaactgcacagctataccatgcagacgccctattgaatgactataagtttaaggtgaaggagcttgtatttgatgaagatgataagttgttccttaatgaggatcctaaaatcctagcagctcgtgaaatggatatcttcccagttgaaataaatacagcaccttatagggagcttataagagtccctggaatcggcccgaaatcagcaaggagaataatgagcataagaaaaaagatgccttttaaaaaactggaagaccttcaaaaattaggagtcgttataaaaagggcagagccttatattcaattggaaggcgcttatcaaaactctttagacaattattaa

SEQ ID NO: 2151 - DNA, 216 bp, Methanobrevibacter ruminantium
  source 1..216: mol_type = genomic DNA
atgtctttagaagagattccttttgaagagcaattacgtggagttatcctagaaggagaaattgaacgtgctgaactaaaaggtgtagaaaaaggtagaaatataatcatcattaaactattggaaactatgaatcctcaagaaatttctgagagcttagatcttcctttagataccatcttaagtattcaagagtctcataccaaaaatgtttaa

SEQ ID NO: 2152 - DNA, 888 bp, Methanobrevibacter ruminantium
  source 1..888: mol_type = genomic DNA
atggcggatgcgaaagattctaaagatgataaagtttatcatcttgaggatctattatttgtaaagtgtctagttcaatttgaagaatttccccaatatattactggatttaaggatattcgcaattcatttgacagtcgttttgcttcttcttctaatttttctagtttaaatcttgattgcgttcggcaaagagaggatttgagtcttattgatattgagcatcatagctctataaggccagatttaatgagaagaaattatgaatatgctgtaaatctgtataatgtgactggatatactgttcatccttttatcttttatactggagacttgcctgttaataaaataatccgtatgaatgattttaatacttttcagcctcagtggtttattttaaaggaaaaagatggaatgaaaagcttaaataacattaattataaaacatttaataaaattgattggaatgtttttgatgctatagattttgcttggatacctaaatttgatattgacatgtcaattgaagattgtatagttgaacttgctgaaatctataaaatgatgcctgctgacaataagttcttgcagttttgtagagaaagtctaaaattgtggacaggtaagtatataaaggataaagaaagattagataaagttaaggagtgtttaaatatgtctgagttagaagagattccttttgaagagcaattacgtggagttatcctagaaggagaattagaacgagctaaactaaaaggtgaagaaaaaaataggattgattttatttctaaagctttgaaacatatgagtcctaaagaagtttctaatatgtttgagcttcctattgaatatgtagatgaaattgcaaattcttattctaaataa

SEQ ID NO: 2153 - DNA, 1536 bp, Methanobrevibacter ruminantium
  source 1..1536: mol_type = genomic DNA
atgtatgcaataaacatggaacagaacaagaaggaattaaatatcccagatgaaatcaagatatttgacaccacccttcgtgacggcgaacaggctccaggaattgccttgaccgtggatgagaaaatcaagatagctcaaaggttggatgagcttggagttaacgttatcgaaatgggatttccaacagtttcaagcggtgagcgaaaggcagctagagagatggtaagccttgggttcagctctgagttatgtggccttgcaagagtggtgcaaaaggatatagatgcattgattgactcagacctttcatatgcacacctgtttatcggaacttctccccttcacagagactataagctaaagaaatcaaagacagagattctaagccaatccatggaaatggtggaatatgcaaaggatcatggccttaaagttgaattttcagctgaagatgccacaagaaccgaactgaactatcttatcgaattctacaagggagtggaaagcgcaggtgcagacataataaatgtgccagacacagttggaatccttgtgccatcaaccacaagaacattaataagaacccttagaaagaaaattaacctcccaataagccttcattttcataatgactttggtttagcagtatcaaactccctaataggcatagaggaaggtgcaaaccaagcccactgtacaataaatggaataggcgaaagagcaggaaacacctctcttgaagagcttgtagtaagccttaaaatcgcttatggagcaaacctaacagtagatacaaccaagctatatgacacttccaatttcatcggatcaattacaggtataaagatgcctcctacaaaaccgatagtgggagacaatgcatttgcacatgaatctggcatacatgtagatggaatcttaaagaacagctcaacctatgagccaatagccccggagatagtagggcataaaagaaggatagcccttggaaagcatacaggccatgctgcaatcaagtcaaagcttgaggagttcaatatagaagtgacccaaaagcagtttgacaatatctataatcaggtcaagacccttggagacaagggaaaatgccttacagatgatgacttaagatccattgcaataacagaaataggaacaagtggcaaggaatacataaagctcctaggtcttagcgtaatgacaggagagtcagtctcagcaacagcaacaattaagctttcaatagacggaaagattatggaaacatcccagataggagtgggtccagtggatgcatctgtcttagcacttaagacacttgtgcaggacagagttaatataagccttgatgaatacagacttgaagcaatcacaggtggtacagacgcattagcagaaacctttgtagtgatttcagacgacaaaggaaacaaggccacaggaagggcaaccagagaggacgttattctttcaagtgtaattgcggtcataaactcaataaacaggatacttgacatccaggagaactgttaa

SEQ ID NO: 2154 - DNA, 792 bp, Methanobrevibacter ruminantium
  source 1..792: mol_type = genomic DNA
atggctaccgtagacagtttcctaccggatttcatacaaaccaccttcttttcaggatacactatattcaatacagtcatctacactctaattcttcttatttttataatagcaatcataaagatgtttaagaagataaaaatagaccctatctccataatctatcctatcatcccatatatctttcttggatctctcatacgtgcattggttgacaatggggtctatccaaaaacagtcttcttaataacccctggcctttacatacttgttggccttataacaattgcatcactgctattcagtctatttctatacaacagaaaaaacatcgactatagatacaccctttcaatcataggagtcatacttctcataccaaacataatcatgattcctagactaaacattattccagtaatctatgtgctaatcacatggataatagcaagttcaatatttgtcttgatttcatacattatcccatttttcaaggacaggataaacttgtcaataatttcagcacatatgttcgatgcttcaacaacatttgttgctgtcgagttcttcaactacagcgaacagcatgttttagcaaatactctatatcaactatttgatacatctattacaatgtttcctatgaaaattatagtcatcgttgcagtattatacataatcgatcaatatttcgatgacgaaaccataaaaagtctattaaaattaaccgtatttgtattaggattggcaccaggtttgagaaactttttgactatggcaataggtgtatag

SEQ ID NO: 2155 - DNA, 666 bp, Methanobrevibacter ruminantium
  source 1..666: mol_type = genomic DNA
atgaagtttgatccacatattcacagtgttttttcaggggactcacgttcggaaccaatagacattctcatacaggcccaaaagatagggctagatgcaattgcaataagcgaccataatgaaataaaaggctcccgacttgcaagaagcatacctggagatataattgtagttccctccatagagatttctacagagaaaggccatatgttaggattgggagttgatgagattattcctaaaggattgtcagctgtagagactgtagatagaattcatgatgctggtggattagctatagttcctcatcctttttcctattatagacacggtctattctgcaatgtggattctaacttaggagtggatggtgttgagaccaagaatgcaagatacatatttggatactcaaacaaacaggcccaaacattggctgagcgaaaaaggcttgccagattaggagcaagcgattctcattttttagaatcaatcggggatgcctatacagaggtaaacactaaaggatatgattctgtagatggcatattaaaggcaataaaacacagacgctgcagggccatgggtcatggaacaagcaactttttggttgcaaaagaagtatttgttaagaaggtgcttagaaggtatccgaaaagggacgaataa

SEQ ID NO: 2156 - DNA, 1077 bp, Methanobrevibacter ruminantium
  source 1..1077: mol_type = genomic DNA
atgaagattttagctattgatgtaggaactggtactgaagatatcttattatacgatacagaaaaggaaatagaaaactctatgaaattggttattccttctcctcaccttacaatcggacaaatgataagcgaatcagagtctgatttatactttgacggagtaatcatgggtggaggaaaaataaaggacagatgtcttgaacatatggaaaaaggatataagatagtatttgaagaactatcaggcaaaaccattcgtgacaacattgaacaagtcaagtcatttggttttgaagtggtaaaagaaggtagctttgacaaggagctaaatgaagattcaagcttaaagtatgcagattatcaaaagatatccttaaaggatgtggatgtagataagttaatagacattttcaagtcatttgacctagaccttgaggttgatgagcttatcattgcagttcaagaccatggatacagtgaagatatgggagatagggacttcagatttgaaaagatcaaggaaaaattgccagagcctcttcctccggaagtttttgcaatggaaagggaagaagttccagagtatttcacaaggatgcagtctgtaatccaatccctagaggagtcaaatccagaattcaagccagttcttatggataccaaattcgcttccttagcaggggtctgctatgacaaggaagttctaaagctaaacagtttcattgtcatggacattggaaacggtcatacaactgttgcgtccattgaaaacggcaagatacaaggtgtttttgagcaccatactagagatcttagtccagagaggtttgaagagcttgtacttgcacttgcagacggcacaattaagcatgaggatgtccacgatgagggaggtcatggcgcatttgcactaaatcctatctcaaagatagagaaggtagttgttgcaggtccaaaaagagcccttgtagaaaagacaaatcttgactattatcatgcagctccaggtggagatgtgatgatgactggaactgttggtctagtaaaatcaatggagtacctaaggaaaaattag

SEQ ID NO: 2157 - DNA, 1302 bp, Methanobrevibacter ruminantium
  source 1..1302: mol_type = genomic DNA
atgcaatacagaattgatttaactaacgatgaagtacctacaaaatggtacaatattaacgctgatttacctgtagagcttcctgctcctaaaaacagtgaaggaaaagatcaaatatcaaccttacctcaaatatttgtaaacgagtgtctaaaccaagagttctccacagaaagatatataaaaattccatctgaagtaagagagctctaccaaagattgggaaggccgactcctttatgcagagcaagaggattggaagaaaagctcaacacaccagcaaagatctattataagagagaagacacctctccaactggaagtcacaagttaaacagtgcaattgcacaggcatattatgcaaaaaaagaaggaatcgaaagaataacaaccgaaacaggagccggacaatggggtactgcattatgtcttgcagcatcaatgatggacattgaatgtacagtatatatggtaagggtttcatacgaccaaaagccattcagaaagaccatcatgcaattatacgacggaaacgtacacgcatcccctagtgaaaacactgaagtgggtagaaaagtccttgcagaaactccggacactcctggttcccttggaatagcaatttctgaagctgtagaagacgctttaaaatatgatgatgtaaaatacacccttggaagtgttttaaaccacgttatcctacaccaaaccacaattggtcaggaaatcaaattacagcttgaaaaagctgaagaagagccagacacaatgattgcatgtgtaggtggaggaagtaacttcggtggatcattattcccattcattaaagacaaaatccaaggaaacagcgacactgaattcatagcagttgaaccttcagcttgcccaaccttaacagaaggtgaatacagatacgactttggagacaatatgggattcactccgcttttaaagatgtttacattaggacacaacttcgttgctccttctgtacacgctggaggacttagataccatggtatgaacactcaaatatccttgcttaaaaacgaaggttacattacccctgttacagctcatcaaagagatgtatttgcagcaggtaagatgtttgcaatgtgcgaaggagtcattccagcacctgaaacaaaccacgcaattaaagcagctatcgatgaagctaaaaagtgcaaagaaactggcgaagagaaaactattgttgttaacttctcaggccatggtttaatggactttaaaggatacgcaagttacatggacggatccatggaaaattccaaatag

SEQ ID NO: 2158 - DNA, 777 bp, Methanobrevibacter ruminantium
  source 1..777: mol_type = genomic DNA
atgggagaaacaatagctgtaatgaatcagaaaggcggatgcggaaagacaacaactgtagtaaacttggcaacttcacttgctgccatgggaaaggcagtccttgtagtggacatggatccacaagcaaacgctacaacaagctttggaattaacaagacagaaatcaaaaagacagtatacacagctttagtaaacgaatgcagtgttcaaaaggcaactataccaacaaggatagaaaacctattcctcctgccaagcaatatcgacttaagcggtatcgaggtagaattaagcaaggaagacaactaccacattgctttaaagaaactgcttgagccaataaaaggcatattcgactatataatcatagacttacctccatcccttggtataattacaatcaactcattaatcgctgctgacagcgtaatcatacctatccaagcggaatactttgcacttgagggactggctgatcttatgaacacaatcaaccttgttgaaacaaggctaagaagcccaactccaataaagggaattgttctcaccttatacgatgcaagaacaagattaggcagagaagtatatggagagcttaaaaactacttcaaaggaaaggaatacatctttaagacagtgattccaagaaacatacgtttagcagaagctccaagttacggcaagccttgcatagcatacgaccctgaaagcaaaggatcaatagcttacctcaaaatggcaagagagctcttaaagctggatggtgaaatataa

SEQ ID NO: 2159 - DNA, 747 bp, Methanobrevibacter ruminantium
  source 1..747: mol_type = genomic DNA
atggcaaaaaaacaaaattctggattaggaagaggactagattcattgattccaaaaattaaagaaatagaacaagatgtagaagaaggattatcattagaagacttattaaaaaaatcagatgatgaagaggaaatagaagaaacagtagaagaaacagttgaagaagaagcaattgaagaacaagaagacatttcaactgaagaaactgaaactgaagaagaacctgatgaagaagaagatgaacctgtagtagaaaaagatgaaacagaagaagaaaaaatagaaattgaagatgaacctaaagaagaactcgaaaccgaagctaaagaagaggaaacctcaaactatacaaacatcttcagtaatgatgatgaaatagtaactgaaaacagtacaaaaaccatagaaatttctagctcaaaaaataatgataaaaatattgaaagttcagttaatttaaacaaagaaactgaagaaagtatcaaaataaatgaagataaaactaaggaaaatgattctgatagtgttcttagtgaaaaagaagaaaaactggtatatgaagttatcgaaactgttgaaaagaatccaagaatcacattatggtctgcaagatcagctgctgtattaaggtatcttagaaagaccgaacctgaattcagcataagcaatgaagcatcaaatcttattgatgaggcaattgctcaaaagtatccagaaatctggacattgtttaatcatttatga

SEQ ID NO: 2160 - DNA, 759 bp, Methanobrevibacter ruminantium
  source 1..759: mol_type = genomic DNA
atgaaattaggattttcactgctttcactgtttatgaaagaagttgatgagatgcttgagatagctgtagaaaatggatttgacagtgttgaactgcttgcagagggaccatacagacaagacatattattggaaaggaaagaaattacagaaacattccactcatatgaccttgacatatacattcatggtgtaaatgtggacataaaccttgcaagcctaaacgagggaattagaaaagagtctgtaaagcaaacaaaggaatgtcttgaccttgcagatgagataggtgcaattggggttactgcacaccctggaaaaataggaaggcctgaaaaataccttagagaaatggcattaggttttttaactgaatcaacccatgagcttgttgcatatgctgaagataaggaggcgaagatatctatagaaaacatgccagaacgcttttcttatcttggaaatagagcatatgagctagagaatctgaccaatgagactggctgcaatattacaatagacttaggccatgttaacacatgcaaagaccaattaagcttctttgaaattcctaacattctttattatcatattaatgataatgatgggataaaagacaagcatcaggccattggagatggaacccttgacttgaatcttttaaaatatgtggacaatggcataattgaattgaataattttgataatgtcttaaaaagcaagaaagttattgaagatttcttagcaaaaaatcaatga

SEQ ID NO: 2161 - DNA, 807 bp, Methanobrevibacter ruminantium
  source 1..807: mol_type = genomic DNA
atgataaaaatgactaaaaaagctattgtatttgataactctggaacattgcttgagcgatttagagtcattaaagacctatctacaggtgaatttatcactcatgtaaactctttagacctaattgacagttgtctaaatgcagctttagttgttcttcaattcaatacaaatcgattaaaagatttagacccaaatactttaataagcgattttgtattggaaaataatattgattttgacattagctattattcaacagacgtttccaaagaagaaataaaggccattttagaaaaggacacagctattatcaaagacattacagacactttccctcttttaaaggaaagggttcctggaatggagctctgcaatggatcagcagtcatcatagacatagaggaagagagaatttcctatacaataacctctgctggtcaattgtttagcggagtaaaggatacaatagcaaagcttcaagacagcggaacagatgttttcattgcttcaggagacaggtcaggagatataaggaaacttgcaaatattactggcgttccagaagatcatgcctttgctacagcaagcacagacagaaaggcagaaatagttgctaatcttcaggatgagggttataaggtaatgatggttggtgatgggcctaatgacattttagcatttcaaaaggctgatgcagcagttctcacaacagaacagaaggatggagattttccagacaagttaaagtcttatgctgattttgttatagaggatattagtgaagtgctgcaaattgatttctaa

SEQ ID NO: 2162 - DNA, 951 bp, Methanobrevibacter ruminantium
  source 1..951: mol_type = genomic DNA
atgcatctagacagccctttaaaaataaaaaacatctgcttatccaatcgcatagtcatgcctcctatggctagggaggagagcatagacggaaaggtcacatatcctctgattgaatactataggatgagagccaaatcaacaggactgattatagtggaacatgaatatgtgagagaggaaggaaagtcaagccctaaacagctttcaatggcagatgacagcgtaatagatggctatatagagcttaccgaaagcatacacagagagggatcctttgcaatagctcaaataaaccatggcagatatgggtcaatatcttcaaataatgtcaatttaaatggaatatcaatagaggaaatcgaagatataaaaaaggcctttgttgaagctgcagttcgaagccagaaatctggatttgacggcgttgagatacatgccgcccacgaatatctcttgaaccagttctattcaccatatacaaacaaaagaactgatgaatatggaggaagccttgaaaatcgcatgcgacttcataatgaaatcattagagaaatcagagaggctgtaggtgatgattatataatagccattagatttggagcatatgactatttggaaggtggatctaagatggaagatattccagctgcagtcaaatcttttgtagaaagcggagttgacatgattgacatatcaggtggactttgcagatatcagaacccttattcaagggagcctggatactttaaggacttgagcaaaatagctaaggaatcttgtgatatccctgttattcttactggaggggttaagaaagcaaaggatgctgaaaggttgattaatgagggatattgtgatttgattggcattggtagggctcttttgatggatggagattggtcaaagaaggctataagaaaagtaagaaaaataaaatcagacaaataa

SEQ ID NO: 2163 - DNA, 282 bp, Methanobrevibacter ruminantium
  source 1..282: mol_type = genomic DNA
atgagggcgagagaaagacgagcacgactaatgagtttatatatttacatagtgatgaccatgatacaaacaaaagtatctgcaaggaatcagacaactattccttcaaaaatccgtaaaaaatacaatgttcaacctaatgacatagtggaatggaaagaaaacagaaatggggaactgacagtcacattcagaaaaagaatttccttcagagatatgataggaaaaggcacaataaaaactacaacaaatgctttagatttggaaaaggatttatattga

SEQ ID NO: 2164 - DNA, 1059 bp, Methanobrevibacter ruminantium
  source 1..1059: mol_type = genomic DNA
atgtttgaaaaaagaaaaattaagagactatctaatcatttaaataattcatatgatgcagaagattatgtttcagcgctatcttattgtgatatgattcttgatattgattctaataatcctcatgctttatttaataaggcaaagattttagttattcaaggagagctcttagaagcaatgtcctattataaaaaagctttacaaacaggtttctttgatatgtctacatgggttgatgaagtctcttattatatggatggggatatttcttcaacaaattataaattatctaatcgaaacgaaatttccttggaattgtgtgagatatgtttagagaaatatgctaaagatattttctttagcatatataaatctcaagctttagataatttaggaagatttgaggaatcattaaatgcaatctctctagatttaactcctgctgatggagagctttatgtttttcaatgtatcggccaatgttttccattatctaatttgaataggtgggaagatctattggaaacatcatcaaatggattaaaattgaagagtgaagatccaagcttaaatagttttaaagcaaaagctttatattatttaaatagattgaatgagtcagaaggattttttaataaatatattcaacttacaaatgatagtagggcatataattttctctcaaaaatagaattcaaaagaaaaaattatacaagtgcattaaaactaattaacaatgcaatacaactttctaaaaaggaacatttagatttactagaatcaaatgttttgatagaagatgatggaatatatgaaaatgattactatatgaaatcactaatcttattaaaattgaatgaattagacaaatcaaataagattattgattgtctaatggaaaaagaggaatctgctaagaattattgtttaaaagcgagaattctatatgaaatgaaagactatagaacttctttgagttttgttaataaatcattagatttaaaatccgattgcagtgaagcaattgaacttaaagaaaaattgggggagttttaa

SEQ ID NO: 2165 - DNA, 1119 bp, Methanobrevibacter ruminantium
  source 1..1119: mol_type = genomic DNA
atgtttacaaaaataaaaattaataaactttttaaagaattagattctgcattaaataatcaaaattttgataaagctttgattattcttaataatattttaattttagatgaaaataatttaggtgcactatataaaaaagccttgattttatataataaaggtgaatacgagaaatctttatctgtattggatcatctgctcagcatagattattgcattgatgcattcctgttaaaaggaagggtttattgcaatttaaatgattatgaaaattctttaaattcttataaggaggcatccattaatttcgatttggataaaatgaataatgaaatgacatattatgcaagccatccttctttatttgataaaggaattcatacaaaaattttcatagatttatgcaatatcatattggataatgcagatattattgaggtccgtcttttcaaatcttatgttttatctgaaatcggtcgcagtagagatgccttaaataatgtgaattatattttggcacataatccaaataatgaaaaagccatttctcttaaatcttccatattaattagtcttaatcattttgatgaagcattggcattaattaatgaaggtttaaatttatatccaaacaaccttcaattaatagatacaaaggctaggctttattatgctttgtctgactatgatgaggctctagaaatatgcaaagaatataattccatggatgattttggaaattattatctcctttcaaaaatagaatataaaaaaggagattattcattggctttgaaaaatattgatattgcattagataaattttttaaaaatcctaattttgatgacaaaaaggaattttctcatgcttattattggtataaatcgttaatcctttctaaattggatagatttgatgaagctaataaaatctgtgattgcctaattgaaaaagaggaatctgctaagaactattgccttaaatcaatgattctttttaaagaaggaaattatacagatgctttaattttcattgataaggcattggaattagattgtgaatgtgataaggcattagaacttaaaaacaatattgaagataaattatcttcataa

SEQ ID NO: 2166 - DNA, 1506 bp, Methanobrevibacter ruminantium
  source 1..1506: mol_type = genomic DNA
ttgagcaacaatcaaatttctggttgttcttatgccttatatctggatggaagcgataatggctcattcattggaaacaagattttcaataatgattatggcatcttagccaaatattcaaatattaatcttttcaaaaataatagtgtattcaataactggattgccattgaggactcttccaaatacaatcagttcctatccaataacatccacgataactatcaagggattcgactcatcgcatccaatagcgcattgatagagaacactaatgtctataataactatttaggcattttaaagtatagctcttcattcataaacaaatccgcatctgtttataacaatacattaataaatgttcagtcattgaatgatggggaaatagtgattcaagacaatatgtggtactgcggccctgcagccctttcaatcatcttcgaaagcctcggattaagcctatcacaagaggacatagccaaaattgcaggaacaaatacaaacggaaccagcctttacggactataccaagcctgcatcaaaaaaggattcaatccctcagtattaaagataaatagctcagacctaatgacaaatgacttagctgtgcttttaataaatgaagactaccatttctccgtgatttatagcataaacgacaccgacattgtattaaatgatccctcaataggattgtttgttctaagtagggaaacattcgacgaaatgttttccggatatgttttagatgttgaaccaataaaagatagggtatctaatgtaagcatagccaaaatgaaaactatagttgggactgttttcccagcacttgcttatggaggttatttggctttagcaggggtaactgtaattgccggctccttagcaatagtttggaattcaaactcacattacaattccaaaagcattcaaaaaccacattatacatggaagcctaataataaaattcattttccacgaaatgtcaaatatcctacaagcactggaaataacggaaatagacctaaagtaagttacaatccagtaaccagttctataagcggcaataagtactacactaataataaggtgtatacatataattataagagcagtaatagaaaagtttcttcttctaatgctgcaataattgcatatcaagaagcttataattattatctaagtactaagaataacgaaagggctaaagtagaaaaacctactaatattacaagttataattattttttaaaggatgtaaaagcatttgaaaaaggttcatataaattttctttaggacctaaggggccagatgatgatttgtatgatagtgcaaagattgttaaagcattatatagggatgctactagaaattataattatgggaaatttctaatcaatacaggtaataaatctagaggtatttgttacatatttttagctacatttgaaatatcgtttattccagctattatatataatcaattatcattgaatccttga

SEQ ID NO: 2167 - DNA, 1404 bp, Methanobrevibacter ruminantium
  source 1..1404: mol_type = genomic DNA
atgaaaaaaggtgttttaatgaatatccttgaaaaattaaatgcaattaaaaatcaggaaataactgcaaaggaaaatgttgaatcttatattaaagtcattgaagagaaaaacgatgaactcaatgcttttctcgaactaaacaaagaagatgcaatagctaaggcagaggaaatcgatgctaaaatcaaggcaggagaggaagttggagctcttgcaggattggtattcggtatcaaggctaacataaatgtggaagaccttatcatctctgcagcatccaagaccttggaagactacattggaagctatgacgcaactgtagtcaagctcatcaaggcagaggatggaatcattatcggaataaacaatatggacgagtttgcagcaggaagctctactgaaacctcatactatggagctgtaaacaaccctgcagcacctggaagaattcctggtggttcaagcggaggaagcgcagctgcagcagctgccggcatgtgcgacatcgcaataggctctgacactggaggatcaattagaaacccatcctcccactgtggagtgtatggtatgaagcctacctatggcgcagtctcaaggcaaggccttcttgacctttcaatgagtcttgaccagataggccctatggcacgtgatgtaaccggtatcacccttgcattggatacaatcgtcaaatacgaccctacagaatgtacaaccttaaaatgggacgctcctaactttactgaaatagcattaagcgtaaaggataaggaaaaacctcttgaaggaatgaagatagcaacttgtaaggaattcaaggaagtcacaaatgacgaaatcaatgaaatcattgacgaatcagtagctaaattagaatcccttggagctgaagttgttgagctcagctttgactatattgacatctgtcttccaacatactatcttatcaactatgttgaattcttctctgcaaccagaaaatacgacggcagaaaatacggctcaagaatcgaagaggtctgcggtcctgaagtacttagaagaatccaaatgggttcatacatttcacaaaaggaattcagcggaaaatattaccaaaaagcacttcaagcaagatccctcattagaaatgcaatcaatgacatgcttgaaggtgttgacttgattgtaggccctactgttccaaagcttcctcacaaacttggagaggaattggagcctatggaaatgtatgcatacgacgttcttactgtaatagctaaccttgcaggaatacctgcagcaagccttaaggcaggggaagttgatggcatacctgtaggattgcaattgcaggccaagccacaagacgatgcaaagatcgttaaggcaatggctgcatttgagtatgcccaataa

SEQ ID NO: 2168 - DNA, 570 bp, Methanobrevibacter ruminantium
  source 1..570: mol_type = genomic DNA
atgatgagcgaacttgaaaaactaaaatccggccttgtatactgctatgacgatgaggaagtctcagcaataaaggacaatgcaatctatcaaagctttagatacaacaatatcgacccaaatgacaagcaaaagcaatatgatgcattggaagagattttaggaagctgtggagatgatgtctggataggaaaaagatttagctttgacaatggaaaaaacatacacataggaaacaattttacaggaaactacaatctaaccattcttgatataagggaagtctacattggagacaatgtaatgataggcccacacacccttataaccactgtaggccatccattagagccaaagggaagaaggaagcatcttgcaatggctgattctatacatataggtgatgatgtatggataggaggaaacgttacaattctccctggagtgaatataggaaacaatgtggttataggagcaggagcggttgttacaaaggacattccagacaattcacttgcaattggagttcctgcaaaggtggtccgcgagatagaaaacgatatagaatga

SEQ ID NO: 2169 - DNA, 864 bp, Methanobrevibacter ruminantium
  source 1..864: mol_type = genomic DNA
atgacagataattcatcaaacatgggaagcaattcagataaaaaggagtttgattcagatagaaaagagtttaattctgataaagagtttaattctaaaaaggagtttgattctaaaaaagaatttaattctaaaaaggagtttgattctaagaaaaaagactttaattctaaaaaattcaattccaattataaatccaatagaagcagaaataacataaacacaatccaagatttaaaaaattctatcgaacttaaggaaaataagattaatgacttaaaagagcttttagaaatcaaggatgaagagaagcaagaagtagaatatgagctttccctaaaggaccaggaattgaatgacctgcaaagcaagttagacattttaacagtggaaaatgaggaattgaccatagagttaaatgaaaaggaaagcaaaataagcaaattaaacaatgctcttgtaaaatgcaaatacgaaaaggacaaagtggacttggttttaaagaatgaagttaacattgaaaaatcaaggcttaaggaaatggataatctaaacaatacaatcaaggaaaaaatagcaattatccatgataagcaagagcaaatcaattatctaagaactctcattgatgactataaagaccaaaccaaaaacaatacagacaatcttgacttgcagcttaaaaagattacaaaaacatatgaaggactgctcaatcaaaaggattcaattatagaaaagcaggaacaaaatataaatgaattgattgaatctcaaaagcaaatagctaaagacaataaagcaactattacacgtcttgaattggaaattggtaaatatagggaagagttgaagaaaagttaa

SEQ ID NO: 2170 - DNA, 795 bp, Methanobrevibacter ruminantium
  source 1..795: mol_type = genomic DNA
atggttaaatgttcaaaatgtgggagtgaaaataagtctgaagcaaagttttgtcatagttgcggtgctaaattagatataaaggacccatataatcttgatggcaaatcaagagagtatggttctacaacaggcaagagtgctggctctgctagcgcctattatgaccatagcgctaattctggtggttccagttcagattccaccggaggaattgataattttagaaatatgagcaattttaaaaagatcatttttgcttgctgtgctgtttttatagttttattcattttgtccttagctgctcaagcacttggatttgatatggaaccttatagcgaaaataaaaccgcttatcataattattcaagtttggatttagatgatgatggggcattatgcttggaagagcttgagatagaatattctaatatttcaagttcaaagatgagtgatatctttaaaaaatccgataagaatcgtaatcatctgataagaggcgctgagtatgatatgctgaactattatgtgaatgagcattttaaagacttggagaaaaagaaaaacgaaaaaacaagtagttccagttctagttctagctctagttcaggttccagttcatacaagtctccatttacaacaagcggttcctcggatgatggagctgaaacatgtccgttctgcggtagtgaagctgtttatgaatctggaaactcgtataaatgtgccgaatgtggtagaactatttcaaatccagatgatttagatttaaattatgatgagggctattattag

SEQ ID NO: 2171 - DNA, 1227 bp, Methanobrevibacter ruminantium
  source 1..1227: mol_type = genomic DNA
atgaaaaaatgtagtaaatgtggttcagaaaatccagataatgctaaattttgtcataattgcggctcaaaggattttggaacaaatgaaaatatttgtcctaaatgtggcgaatccaatgtgaaggaagcaaaattctgtcataagtgtggagctagcttaagctctaattcttcttctggcagttctagttcttataatcccactggaatgaacggtccttttggtgctggtgctaatgataagcctggttctgttatgaatggtccttttggtgctggtgctaatgataagcctggttctgttatgaatggtccttttggtgctggagccaatggtgtagctgattcttttgcttttgatcctagttctaatgataaatctagttctagttctaactctaattctagttctaactctaattccagttctaactatagttctagttctaactctaattctagttctaactctaattctagttctaactctaattctagttctaactctaattccagttccaataatcagggttctacggcttcttctgctaatcaatctaattcaacagcctctaccaaaaatcaatctaattcaacaatctcttctaccactgccaatacaggaaatgaagggcctggattaaagaaaatatgctgttgctatgttcctgttattcttttagttctttttataatatttgcaattttattgaatgcttttcctgaaaacttttcagcaacttatgatgacgaattttaccaattggacattgatggggatggaagattgtcactttcagaggctagtcagttaaaccctggaatgtctgattcaagcattagttcatatttcaatgaagctgataagaacaacaatggttatcttataggccatgaatttgatgacttttatagtgatgtgaaaccttattcctcatcatcaagtagttcttcttcatcaaattcccataagtattccagttcaagctcatctagctcatccagctcatctagcagctctagcgattatgactcttccagtgacggttatgtattaacctgtccatactgtggaagcgaggctatttatgagtctggaagctattataagtgtgcagactgtggtagcattattcataatcctgatgacttggaattaaactatcaggaaggttatatggatctcttggctcctatagtccagattaatctagggggtgtataa

SEQ ID NO: 2172 - DNA, 390 bp, Methanobrevibacter ruminantium
  source 1..390: mol_type = genomic DNA
atgattaaaatggaaattacaggaattgttacaacaggtttaggaaaagcagcttactttctaggtcaggatttctacaaaagtcaattcaatgaaaaatgcggttttacaccttttccaggtactttaaaccttattgtagaagagaataagctcgaagacatcagacttatgaaaaacagttgcacaaatgttataaagccagatcaaggatttggcggagtcaaacacatcagagcttatttgaatgagaatattgttggagcaattgtatttccagacaagaccactcatgatgaaaactatttggaatttatttcaaaggataaattgagggataaatataattttaaagatggagatgaggttgtaataacaatagacatttaa

SEQ ID NO: 2173 - DNA, 1710 bp, Methanobrevibacter ruminantium
  source 1..1710: mol_type = genomic DNA
gtgtcttggctagttgttcttatagtgtttctgcttgcttcaataaaatcaactaagaatccatctgtgtctgtggttataccagccttcaatgaagaagcgactgtagctcaagtggtaactgtagctcgcaagctatcatatataagcgaagtcatagtggtggatgatggatcaactgataaaactgtagaggaagcggaaagggcaggagcaactgtcataagccataaaggcaaccaaggtaagggggtagctatcaaaacaggatttaaaaattcccatggtgatatagttgcctttatagatgcagatgtatccaatttcactcctacaaagatagacaagataatcaagcctattttggaaggtaagacagacattacaaagaccaaatttgcacgggaaagtggccgtgttacagagcttactgcaaaacctcttttaagtttcttcttccctgaattgaattatgaacagcctttaagcggtcaatttgcaggaaagcgttctgcacttaataaaatcaaatttgaaaaggactatggtgtggatgttggcatagtattggatgctgatgttcatggaataagcattttggaagttgatattggagacattcaacatgacatgtcttcccttgccgatttaaacaaaatggcaaacgaagtggttagaaccatcattgacagggcagttgattatggccgtgtcactatgatggatacccttggaaattatatcagaatggccatcatgggattgtcccttatcattcttggactgttcatgattttctttgttccattcattccattggtcatatccgttttagtggctcttgttggaattgcactgactatagcctatataattaaaatagttcaaaggtcaattcctattttaaggaaaggggatacaagtacggcattaaagtcatttgttaagatgcactttcctgtaatcgtatcaggccttatattgattctaatgctttccacattcttatcagcagcaacatttaatgatggcaggatatcagtggagcttacttcaagaaactttgtatattccccttcagatgactatcatcaaaccatttcagtaagagggccttataccattgacagcgcaattgaaaatgaaacagatatggttagaatccctccagatgcattgagcacgttggagatgtctgcaaacgatacgatgattatagacggtgaatattattctgtcaacacttcaagagaaggggaagtggatgtattccgcctttcaaaagcagtaaggcatgatttggatttatatcctcgtgaagtcataccaaacagtcgtttggctgaagtcttcaatggagtcattgtcaatcataacatcaacttcaataattcctctgaagtcatggaaggatatgtccaattcagcataagtcctaaggctacaaatgcaactttcttcaatcttacattggataatgaatcacttctttcatcagtgggcaatttcaaaaacgattcctattatacaattgcatatgacgacgatattctatgtgcatttacaggagacgacatcaagaagggaaatgttacttttgagtatgcaggcaaggatggaatgatagtgtttgaagacagaaacaatacctctataaggaactttatagattccgatagggattcatttgttaagctgtacactctttaa

SEQ ID NO: 2174 - DNA, 315 bp, Methanobrevibacter ruminantium
  source 1..315: mol_type = genomic DNA
ttgattgcacttgtccttgctcctactgttttatcattgttcacttcttctgtaaccgctgctgcattggttattgtaggtatcttaatgattgtgcaattgaaagaagttgattgggacaatatggttgtagctgcatctgtattcatgactatcatcatgatgcttttaacctactcaatttccttaggtatcgcatggggattcgtcacctacgctgttgcagctatcgctactggcaaagctaaagagttcagttggattatgtggttaatggttattatatttgcagcatacgtgttcttcggactttag

SEQ ID NO: 2175 - DNA, 996 bp, Methanobrevibacter ruminantium
  source 1..996: mol_type = genomic DNA
atgttaaataaatttttcaaattggatgaaaacaatactgatataaaaactgagtttcttgcaggtttgacaacctttttagcaatggcttatattttaggtgtaaacccaaccatgcttgctgaaggtggaatgcctgcaacaggagtatttttcgcaactgctcttgcttcaggggtatcttgtatcatcatgggtcttgtttccaaatatcctgttggtcttgctcctggtatgggtatgaatgcattgtttacctatacaatcatattggctatgggtaacacttgggaaactgcacttgcagctgtattcgtttcaagcataatctttttattaattaccatttccggtttaagggaagcaattcttaacgctcttccatttgacttaaaattagcgattggtgctggtattggtttcttcttggctttcattggtttgaaaggtgctggaattatcgtagcagaccctgctactctcgtaggtatgggaactatcttatccgctcctgcgcttttagctgtaatcggcatattgcttactttgatattatacattaaaaaagtccctgcagctgtattccttggattggtaataactgcaattttaggtgtaatctttacattgttcggtttcggtgctggagatccattaatgcctgccattcctacagagttcatttcctttaatttcgacacttctgtagttggagcatttttaaaaggattttcacaattgttcactaacatccctaaccttatcatgattttattctcattattattcgttactttctttgatactactggaaccttgattcctttagcaaatcaatgtggtttcgtcgatgaagaaggtaaggctgatggaattgacaaagctttccttggtgatgctataagcggaatcattggtgctatcttaggtacttcaaccttaactgcatatgtagaaagtgcaacggtattggtcttggtggtagaacaggtttaa

SEQ ID NO: 2176 - DNA, 9240 bp, Methanobrevibacter ruminantium
  source 1..9240: mol_type = genomic DNA
atgagtattaaacgaatattacttacgagtttaatgctatttataataatattttcaatttcgtttgtaagtgcaaatgaaaatgtaacaaatgacgtaagtacgaatgaactatcaacacaaactgtatcaaacgatataactactagtgaaagtataagcgatactagtctagactctggagaaaaccggggtttggatgagatcaaatcgaattcgacagaagagtcatcatcatccaatttggaccttgaggatggcactttaaataacgatgaaattgaaagtgatgattgtttaactaaaaatggaaaagaagcaacattgcaagcaaataaacttagtcttgacattaatatgagtagaggtacagcccaagatgtactggacgcaatcgtacgaatttccagtcaagggggaggtacactctatctgaatggtggaacctatactgaaggaggccatgccagagtttataataatgacactgatagtttccgtaatatcgtaaggaacgatggaatagtagacatttcaaatgttcgcgtagttggtggtagcgtagacaatccaaatcaatatgctacatttcaaccaaatactcgtgatagtacttcattggcctttagcggttacggtgtttgggatggtaatggaactagatattaccctgattccggttttaatttaactaacgttacttttgaaaatttaaactgtacaggtagattctttagttttaacagcgggtatttgacagattgtgtttttaataatctggagtcctatcagcacctcttcttcgtaactggagcttacaatgatggtggtaagccaatagtactaactaattgtaacttcaccaattccaaacaaacttacaggggtgacggccctggggatggtactgatggtaccggtcagtttggtgtagtattcggtgctgaaatgtatggatgtaacttcatcaatacaagcactgctactcacggtggtgctttttgtctttcagacgaatggataagtgctgcatgcgttccaagtaagttagttgattgtaattttatcaacattacttctcgatggtttgcagtttacatacatggaaattactccaataccaccagatttattacagaacctcaagtggtggaaaactgtagctttattaattgtacagcaaccggtgaatttggtggtgcactcggaataagtcataacaatgtaattataaataacactgagtttatccataacgtcggtggaaaaggttccgctattatggttggtggaatcaataatactcatgacggattcttgggtgttaatacgcaaggtaataatattacgatttataattgtacctttgaggacaatattgcaaaaattgaaggtcaaagcagtgctcacagtactgatcctccattcactacttaccctacaggttatggaggtgctgtttatgtgtatggtaatcataccaaaatcatagatagtacatttaacaacaacactgcagatgattcttgtggtgctgcaatctacattagaggtgacaataccactgtcgttaattctgagttctataaccataccagtgaaaacggtactatatatttagttggtaacgattgtaaaatcaaagattcccttttccacgacaacgatgcagactctactggtgcttgtattttcgttgaaggaaatagggcagaaatcggcaatactacattcgtcaacaacaccgctcctaatggtggatgtgtattcattataggtgaccataccttggtagacaatgacaccaaattcataacaaacaatgctacaaacggtgcaggaatctatgttaacggatcaaacaccatgattctaaataccagctttatcaacaatacagctgtaaacggatcaggtgcattcatctatggtcacgacactgacgtaaacggctcttactttgaaggaaacgatgctacaaacggtggagcagtattcattgaaggaaacatcaacgatatttccaacaatacattcctcagaaacaatgctaccaatcaaggtggagcagtatatattgacggaaaccataccaaagtcaattataacaacttcacagagaatgaagcgattccaattagcgaagatcaggaaaccggtctcggtggagctatcttcataaggggaaacgatacaaatacaactgcaaacactttcctccacaacaaggcacgtaacggatctgcaatctacacagacggaactaacttctatcttcacaatgatcatttcttagaaaaccaagcgtggagttatctgttaattacaactgcagaccctgcagaaagcttatataaggaacaagatattgaaatcaacgttttatacagagctggagacaatattatcaatgctattcacaacaggaacaaaccaaatgaaacacacttcatgaatgtaacctattcccacagtgaattcggtaatatcacaactagtcctgccgaccagtatgtcgaacctgtagacggcgttgaaaacagtcgagaaggagagttattgtaccaagacgaccgtgaaaactatcaacaaatcgaactcagggtagagcatgaaaatggtgatttagcattgccaaggacaccatttagaaccaacatctacggaaatgttaacactaccttgaataaatcttccttaaggaaaggtttatacgttgtaggggctgagcacattgaagattggaactataagttcattatgaattctacaagtttcagaatccttgatacaatggacataatggttaacaaaaccagtgacaaggaagaatacttccaagacgaaatagcagaatgggaattaattttccataacacagacaacggtactgacgctgaaaacgtgacaatgaccgatcacttgcctaatgtatttgaattgatgaatctcagctacatgttctataccccaacagaggcaattacaaatgctacactctacttaaacaataataccttaagatacggagtatataactcaagcagtcagcaatgggtctacggcgatgcaagatataatgcaagcgccaatagttggacatattatttctttgactatgacaatgtcacttatgtctacactgaattcaacgctgatgactttgtacctgtattcggacctgtcatatacagcaacagcactgatgtctgctatgacaacatcagctacaacattcctgaagaggactggtactatgataccatcatggtaaacggtcaggaagtaagatacggtcatttcaatgcaacagaattcgaacaatacttcggaccatcatactatgatgaagacaacaagacttgggtttggatacataggggagaggacccattgaatccaggccaggaaactgatcttcgcactatctatgatcctgagtctaacatctgggttatagatgattatatgcactatccagagagaaagacagttacagaaaaagtcgtctttaccattgtaaacgacacagcaaacaatctgacccatctttcattatacgcaagagactttgatgtaaacgtaacaggttacgtaaacttcacaacaaactgtacaagatcaggtgactacactaacgttgtaaacgttacaaccccagactatgactgggacttgtcaaacaacgtagctaacagatctgtactcgtcgacccgcttccaaacaagacagtcagcaacacaactccttactaccatgactatgtcgactacaacttgacaatcatgaacacaggcaattcaacctacgaccaaatcctaaccgttgtagacagcttgcctgaaggactagtctacaatacaacagtaggcattttatacgctgaccaaatcggcgaaacacttgtggaaaaccaaggacgcacagttacctggaacgttacaaacattccggcaaataccaatgcaaccataattgtaagggtatatgtagatgctcttggaaacttgacaaacaacatgacactcatagctccaagcggagacaacagaaccgtaaacgctacaattacaccggtaacctataccgatgtatctgttaacaaaacagtcgaaaaagaggaatacttcataaacgacactatagtttggaccataaccgtatccgttgcaggaaacggttcaaatgcaacaaacgtcaacctttcagatgtattgcctcctgaagtcgaatatattagcacaaacggtacatacgacaatgcaaccaattcctggtacatcggcaacatgaccaatggaagcagcgtatcaatcacaattgatacccgggcaataagagttgcagaaaatgttaccaacgtagcaaacgtaagctgtaacgaaaccgaatgggactatgaaaacaacagagacaacgcaacagtaagcattattcctgttcctcagaaaaccgtcaacgaaacaaatccaacatttggcaaatacgttgactacaacctaacaataatcaacaatggtgcagagccatatacagacacattgaccgttgtagacaacttgcctgaaggactagcctacaataacaccgtaagcattctatatgctgatcaagttggcgacacaattgtggaaaacaataaccgcaccattacatggtacgttacaaacattcctgcaaatacaaatgcaacaataattgtaagggtctatgtaggcattcttggcgaacagataaacaactacactcttataggtccaaaaggatctaacagaactgtaaatgcttcaattgttgtagaaccaaaagttgacatatcagttgaaaaaacaagcgacaaaatcaactactttgaaggcgaaaccgtaatctggaccattactgtatcaaatgcaaacaatgcaactccagcaaccaacgtaaccctcaaagacatcttgccagaggaagtagaatttgtaagtgccaacgacacatacagcaacgaaaccggaatctggtacatcggagacatggcaaacggaacaagcagaacaatagtaattaatactactgctataagatccaaaacaaatgtcacaaacgtagcaagcgtaaactgtactgaaaaagaatggaattacacaaacaatgttgacaatgcaacaataaacatctacccattgattaacaagactgtaagcaattctacccctgactatggagatgaagttgaatacaacctcacagtgataaacactggagacgtaatgttcaacgaaactgtcacacttgtggacaggctcccagaaggagtcgacttcataaaagtactaaacgaagatggtttaaaggtaataagtttcgaccactctaccaaaaacctaacatgggttgtcacaaacatatcagctaacacaaaagcaaccataaccatcctagcaaattgtaccttggtcggtctccaagaaaacacctggaccatctacggaccagagggcatgaacagaacagttaacgcaacaatcgtagtaggaccaaaagtagacgtatcagttgaaaaaacaagcgacaaaatcaactacttcgaaggggaaacagtcatttggaccataaccgtgcacaatgcaaacaatggaacaaacgcaacaaacgtgacccttaaagacatattaccagaagaagtcttatacgttagctcaaatggtacatacaacaataataccggaatctggtacataggcaacatgaccaatggatcaagcagaacaatcgtgatcaacaccactgcaataaaatccaaagcaaatgtaacaaacgtggcaaacgtaagctgtaatgaaaccgaatggaactacacaaacaatgtagacgatgctgtaatcaacatctatccattaatcaacaagaccgtaagcaatccaaccccagactatcacgaagagattgaatacaacctcaccgtggaaaacactggagacataatgttcaacgaaaccgttacactcgtcgacaggctcccaataggagttgacttcataaaagtagtgaacgtaaccggtttaaaggtaataagtttcgataacactaccaaaaacctaacctggaacgtaacaaacataacagcacatacaaaagcaactataacaatacttgcagtatgtaatgctattggagtccaagacaacacttggacaatctacggaccagaaggtatgaacagaaccgtaaacgctacaatcgaagtaaaaccaatagtggacgtgtcaattacaaaggtagccgaccaagaaatataccacataggcgacaacgtaacctggatcattactgtgcacaatgcatggaacggaaccaacgcaaccaacgtcaacgtcaacgacatattaccaaaagaagtcgaatacctaacccacacagttacacaaggtcaatacaacaacagaaccggaatctggactataggattcatggcaaacggaacaagtcagacactcacaatagtatccgtcgcaaaaatcaacaaaaccgacataaccaatgtcgcaaacgtaagttgcagcgaaaaagaatggaactattcaaacaacagagactacgcaacaatagaaattgttgacactccaatcaacaagactgcaagcaaaccggtcccagactaccacgaagagatcgaatactacttgacagtcacaaacctagcaaatgaaacctataacaaaaccgtgacactagtggacagcctaccagaaggagtcacattccttagagtggtaaacgaaaccggcttaagagtactaggcttcgaaagacgtggcaatcaccaaatctggaacgtcacagacatcgaaccaaacacaaccgcagtaattaccatactagcaagatgtgacgcagtcggaacaaaaatcaacaactggacaatctactaccctaacggagacagcgaaaccgtaaacgcaacaatcgaggtaaaaccaatagtggacgtgtcaattacaaaggtagccgaccaagaaatataccacataggcgacaacgtaacctggatcattactgtgcacaatgcatggaacggaaccaacgcaaccaacgttaacgtcaacgacatattaccaaaagaagtcgaatacctaacccacacagttacacaaggtcaatacaacaacagaaccggaatctggactataggattcatggcaaacggaacaagtcagacactcacaatagtatccgtcgcaaaaatcaacaaaaccgacataaccaatgtcgcaaacgtaagctgcagcgaaaaagaatggaactattcaaacaacagagacaacgcaacaatagaaattgttgacactccaatcaacaagactgcaagcaaaccggtcccagactaccacgaagagatcgaatactacttgacagtcacaaacctagcaaatgaaacctataacaaaaccgtgacactagtggacagcctaccagaaggagtcacattccttagagtggtaaacacaagcggcttaagagtgctaagcttcaacagcactgaaaaagtccaaacctggaccgtaacagacatcgaagcaaacacaaccgcagtaattaccatactagcaagatgtgacgcagtcggaatagaaatcaacaactggacaatctactaccctaacggagacagcaaaaaagtagaaactccaatcgatgtacagccaatagttgacttgtcaactacaaaaaccagcaataaggacgtatacttcctagacgacacagcagtctggaccattaccgtccacaatgcatggaatggaaccaacgcaacaaatgtcgtcatagacgaattgttcccaagtgaatttgaaatcatcaactacacaacaacaaaaggaagatacgatcctagcgcacgtgcatggacaattgatttcatggaaaatggcacaacagaaacattggtaatcacctcagttgcaacagtggttacaccattcgttgacaaccctgtaaatgtaacaagcgatgaaagggattggaacctatccaacaacccatccaataagtctgtaaaagtcatagacattccagatccagaaaaaaccgtgaacaatgcaactccttactacaatgataccgttgtatacagcttgactatcaaaaacactggagacattaaatacactaacaagttaacagttattgatagcatgccacaaggattggaatatgtcaaaaccgttggtataagtggtgctaagttaatcaaggaagttgttaaaggacaagtgatcacttggacaattaccaatatctctgcacactcaaatgcagtgataaaagtaagagtcagagcaaaagcacttggaaacctaaccaacaacttgaccattgtaactccacatgcaaacaagactgtaaactgtaccattactccagtacctattgctgacttagcagtcacaaaaacaaatgaccattatggcaaagactgccttaacagcacatttgtatactggactataaaagttgtaaactacggccctaacaccgcagtgaatgcaatcgcaaaagacatcttacctgaaggaataatctacctttcagatgattctgacggagcatacgattacgaaactggaatctggacaataggaaaccttgcaaaaggcaaatctgtaacaatgaccatagaaacaattgttgacgctatcgacacaagaatcaacaacaaagtggtcgtctcatcagacacctacgatccggacaaatccaacaaccgtgacaacagctctataaaagtcatttcaatcgctgacttgaaactcaccaagacagctaacgtgaccaaaacttatgtaggagaaaacttcacttacactattaccgttgtcaaccttggtcctgatacagcagtaaactctcgtgtatacgacgtattgccaaaaggagtgaaactcctaagcttcaacgaaagcaaaggaagttacaaccctcaaacaggcaaatgggccatcggagacatggcattaggtgaagaagtaacccttaaagtaaacgtcagagcattaacaactggaaaaattgttaacgaagcacgcgtcgaaagtgacacttacgacaacgacacttcaaacaacaatgactcagcaactgtaatcgtgatcggagacaatcctccaatcaagatgctacctacaggtaatccaatactaattgcactcttgtcattacttgcaattgttggcgtaacacttagaaggaaaagttaa

SEQ ID NO: 2177 - DNA, 2187 bp, Methanobrevibacter ruminantium
  source 1..2187: mol_type = genomic DNA
atgatgattgctgatacattatcacaagaacttaatataaagatatcacaggctgaaagcgttataaaacttatagatgatggaaacaccattccatttattgcaagatacagaaaggaacttacaggttccctcgatgatgaagtgctacgtaaattcgatgacaggctaaaataccttagaaaccttgaagagaaaaaggagacagtgttgaattcaatcgaagagcaaggcaaactaacagatgaacttaagcaatccatccttgactgcaaaacacttgtagagcttgaagacttgtatcgtccatacaagccaaagcgcagaacccgtgcaacaatagctaaggaaaagggcttggaagagcttgcaaacattatccttgcacaggaaatcgaggttccattagaggaaatcgctgaagactacattacaaaggatgactctgtagaagaggaattaagagtaaacactgtggaagaggcaatcggcggtgcacaagacattatcgctgaaatcatatctgacaatgcaagcttccgctccctaattcgtgagctaagctatgaagatggagaactaatctctgaagcaaaggacaaggatgcagattcagtctatgacatgtactatgaatatagcgaagaggtcagcaagattgcaagccatagggtgcttgcaatcaaccgaggagagaaggaaaagttcctgaaaattaagataagcgctcctgaagaggatataattagctatcttaccagacatgtgcttatcaataagggcggaaagccaacaaagcctatatataacaagtatactgaagagactcttaaagaggccatacaagactcctataaacgtcttatagctcctgccattgaaagggagcttagaaatcagctctttgaaaaggcagaggacaagtctataaagctcttttcaaaaaaccttgaacagctcctgatgcaggcccctatcataaacaaggttgtccttggctgggaccctgcattcagaacaggatgcaagcttgcagttgttgacgaatatgggaaagtccttgacactacagtggtctatccaacagagcctcaaaacaagatagctgaaacccgctcaactgttcgcgaccttattttcaaatatgatataaacatcattgcaatcggtaacggaaccgcttcaagggaatccgaggcgattgtagcagacataataaaggaccttgacgttcagtatgtgatagtgaatgaggccggagcaagcgtatactctgcaagcgaacttgcaacagaggaattcccagactataatgtaggggagaggagtgcaatctcaatagcaaggcgtcttcaggaccctcttgccgaacttgtaaagatagatcctaaatctatcggagtgggacagtatcagcatgacatgaaccagaagaagctaggtgagtcccttgacaatgtggttgaaaagtctgtaaataatgttggggttgatgtaaacacagcatctgtatccctcatggagcatgttgcagggataagcaagacagtggccaagaacattgtaagctatagggaggaaaacggcaagttctatacaagggatgagcttttaaatgtcaagaagcttggacctaaggcattcgaacaatgtgcaggattcatgaaagtcaaaggccctaatccattggacaacaccacagtacacccagagtcctatggggcaacaatagctttcttaagcttcttaggctattctattgaggatttagagaataagaagataaaggaatcagaccttgaccttacagacaagcagtttgaggacatggcccaagaactaggaataggttcaataacattgaaggacattgcaaaggagcttaagaaacctggccgtgacccaagggatgagatgcctcagccaatccttagaaaggatgttctaacaatggaagaccttgaaaagggcatggtattaagcggaactgtaagaaacatagttgactttggaatctttgtagacattggggtccatcaggatggcatggttcacaagtcagagataacagacagccaatacgtaaatcatcctatggactttgtaagtgtaggggacataattgatgttaaggtcttggatgtggacattccaaaacgtaggattcagttatctatgattatttaa

SEQ ID NO: 2178 - DNA, 1050 bp, Methanobrevibacter ruminantium
  source 1..1050: mol_type = genomic DNA
atggaaagagtcagattacaatacattgatttattgaagtttttcgctattttttcaatcatagcattgcatgtgtttctagtatggcccaaagcaaaagtcatgggcataaaagtatattcattatcaagtattgtaaggttcggagttcctgtttttataatgataagcggagctcttcttttaaatagggatattgaaatcggttcttttttaaaaaaaagaataaatagaataacatatcctttcctgtttttttacattataacattcatattcatagcattgactaaccatacccatgaacagcaaaacatatttgctttcagatggtatttctggacaatcttaggtgtttatttaagcatacctataataaataaatatattcaacattcatcattgaaagaaatcgaatatttcatttacatatttatctttgcatcaatattctatcaatttacttacttctttgaaataaaacaatatttttacttgactttgttcttatccccattaggatatttggttttaggttattacttatctaaaaaagactttaatctcagtacaagcaagatgattgtcatttccataatcctattcatattgtctacatccataaagatttgcggccagttaggatacatacctataactgaaaattttgttgccagccaatcagtcatcctatcttcatggctagatgtcagcttcataggaatcttgcaagcagcttcattcttcttattatgtaagagcatttatgaagcttcaaaaggtatcttttcaccaatcaagaagtttttagaatcaaatatcatttcaaaatttgttctttcagtaagcagggcaagctatggaatgtatttaattaatctaattcctacagtcattgtttattattatatacagccaatgaatttaacaggcagtcaagtctttttagcaattcccttgatttccataatcatcttcttggtcagttggattatcattgtaatattatgtaaaataccatatattaaatatgtatcaggttattcctaa

SEQ ID NO: 2179 - DNA, 3537 bp, Methanobrevibacter ruminantium
  source 1..3537: mol_type = genomic DNA
atgaaaaccagaattagtgtcatcattccaatttacaatgttcatgaattcctagaggattgcatagaatctgtcttggcacagactatcaatcattgggaccttgtagatgattatcaaaggaatcttcaaatcattttagtggatgacggctctaccgacgacagcggtgaaattgctaagtcttatgcagccaaatatgaaaatgttgaatacagatatgaggaaaatcaaggattaggccatgcaagaaactacggatgcgaatttgctgaaggggactatatcatttttatagattcagatgacatcattcctccaaaggcatatgaaaggatgtatcgcattgcgcttaaaaatgacagcgaccttactatcggatctgtatggcgatttaattcaaagctgacttgggcttccaacattcatgaaatcgcttttggcggaacaaaagagcttactcacattaaggaaagccctgagctattttatgacaccactgcatggaacaagcttatcaaatttagcttttggaaagagcatggtttccaattccctgaaggaatactctatgaagacattccagttacaatgcctatgcattatttggcaaacaatgtttcaatagtctatgaaaactgctatttatggagagtgagggatggaatatccaaatcaataactcaaactacagatgacctgaaaaatgttgaggacaggctttatgtcatgggattggtggataagttctttaacgaaaatgtcaaggaagaggaattgcatagggtaaagaatttgaaatggataaagaacgatttgatgatcttcatcaataagctaaaaagcatggacatagacgagtctcaagaaatcattgaccttttgcttgattatatcgaccgtaacatagaccctaaatactttgatgagataaatgagattgaaaagctcaagtatgaatatttgtttgaaagggattttgacagactattgaaattgcttaattatgagcatgttaatttctatactttaaatattcactcaaaaggttccgatgttgtcattgaaggagataaggacgtttttaagacatcatcattcattgtaaacgatttcattaaggaagggaaaaaagcaaagtacattcaaaaggtcaatctagaggaagaggcattggaagtcagcggttttgtagtcattcccggtttggaggcaaaggaattcaaggatgtggaatattccttttatttggtaaatagcgaaaatcgcaagaagattgccttgcgtcatgaacagatttatttgggtaatatcaattcctatcgtcttcgttttggaaagaaattctcttataaggctgcaggatatacggtatttgttccttatgaattgattgaagacaacgaggacttcttaggagaaaataaaatcatagtggtctttaagcaaaggggagtcactcataatatttttgcaggaaacgctaaaaagaatgtccgcagcaggagcgaaaacagggcggttctcattggaaaaacatatatgtccattggatatgataagaataacgagattataatcaatgtttcaaaagccagacattcttatgataggatagagattgaggatgatgatctatgcatattcggcccttatgatggggatgtcttcctccattacaataaaagtttcatcagtcccgaaagcaatattccatttgcttatgatgatggcaatcagtgttaccgtttagatttagataatattcggtcaacagaaggccagattctatatgataatggagaatcccttgtttataaagataaagagcttttatgtttgtattcttctaaaggccaatgtgtaatcagcagtcttttggatcataatattaagataaataagtttaagaatttttcattagtctctgagattagtgaaagaaataatgagatagatattgtttcaaggcttcactctttagaccttggtgatagacagttgaagtctgcaaccctttatttctttttagataagaatcaatcttcttatcctattgcagaggctaagataattaaagatgtttctactacacaagatagtcatattggggataatgcttacattgatgataaggatagtgaggatattgattcttcttcccttaatggagaaaatacttatgaattgaattttaaattcaatatgaacaataagataatcacagaaaatctttatcatggttactttgatctattaattcgctatgattttggcgatttggtcttttcaacacctatacatcttttggatgatttcaaggcccttcttaagaagaaggtatttcattttactatctataggggaaatgcttggactttaaggataagggcaaagaaaaaatggaattggtgggatggcagacctagaatatatacaagagcatatagaatcttcaagcacttgccaatcaataagaaacgaataatgtttgagtcaatgtggggtgcaaaatacagctgcaatccaagatacctttatgaatacatagacgaaaaccaccctgactatgaatgcatttggtccttgaatgatgagcatatccctattaacggaaatggaattcgcgtaaggcgttggactctaaaatatttctattatcttgcaacttctaagtattttgttgacaatgtcaatttcaatgagcgctatgaaaagagggagcctcaaagatatgttcaaacaatgcacggaacacctttaaagacattgggattggatgttccaggggatttccctacaaaagcaagtgaggaacgcttcattgaaagatgtagccgttgggattatatcactgttcagagcgaatatgttgaagacattgccagaagctgctttaagttcgataaggacttcttaagatatggctatcctagaacaagcatgctttatacaatgaacaatgaagaggacataaataagataaaggaaagaatgaacattcctttagataagaaagtgattctttatgcccctacttggagaaagaaaaataaggtggaaatcatgttggatttccagtcatttaaggaaagcctctccgatgattatatcttgattctaaggctccatcatttgatgttttcagctgattttgcccctatagaggatgattttgtttatgacctttctagacatgattccatagaggaactgtatttgatttcagatattcttatcactgattactcctctgtaatgtttgactactccattttagataggcctataattctttttgcttatgatttagaggattacgctgaaaagctaagaggattttatattgatattcaagagaataagcccggccctattttgtttagctcaaaagaagtggaggatgccatcagtaatattgaaaaaacagaagaggatactaaatatcttagagaagagtttagaaataagttcattccttatgaatgcgctaattcttctgaaaagatctttaatgatttggtttctggaaaataa

SEQ ID NO: 2180 - DNA, 3675 bp, Methanobrevibacter ruminantium
  source 1..3675: mol_type = genomic DNA
atgaaaactagagtaagcgtgatcattcccatttataatgtttacgaattcttagaggagtgccttgaatccgtcgttaatcagaccataaatgatatggaactgactgacggatatgaaaggaatcttcaaataatactgatagatgacggatctacagattccagccctataatcgcaaaagaatatgcccaaaactacgaaaacattgaataccaccatgaagtcaatcaaggattaggccatgccagaaactacggatgcgaatttgcagaaggggactacataattttccttgattcagatgataagctttctccaaatgcctatgaatggatgtataaaacagccataagaaacgatagcgatatgaccattggaggattctggagatttaattcaaaaaaatacaagatttcaaacattaataaaatagctttcaatggaaacaaagagaaaacacacatcagcgaaagcccagaactcttttatgatacaaccgcttggaacaagctaatcaagcacagcttctggaagaaacataatttccagtttcccgaaggaatactctatgaggacatacctgtaacaatacctatgcattttctagcaaacaacgtttcaatagtctacgaaaactgctacttatggagaataagggaaggaaaatccaaatcgattacacaaacaaccaccgaaattaaaaatctcgaagacaggctttatgtcatggggctggtggacaagtttttcgatgagaatgttgatgatgaaaggctccgccatgtaaaaacaatgaaatggcttaaaaccgaccttcttatttttattagaaagctaagaagcatggataaggaacagggatataaaataatgtcactaatccgagattacatccaaaataacatagatgctgatgaattcaagtacttgaatgagtatgaaaggttaaaatatgaatatctgatggatgatgaaattgacaagatagtttcaatattgaacttcaaggctgaaaatataaaggagacaaaggtctatcaaaaaaacggacatataatgttcaatgcagataaggaagtgtttaagcaaagcccattttacatagaccaatacatcagggaaagatacaatagaaaatacattcaagacattgagattagggatgacggatttctaataagaggatttatgcttattccaggactggatatcaaaaactttaaggacagagagcacagattccatctgacaaatgccaatagccataaaaagatcaagatagattcagaagatgttgaaactggaaacataagctccttcaacataaggtttggaagaggattttcatatgatgctgcaggatataagatcttcataccattctctaaaatatgtgatgatgaggacttctttggagagaatagaatatctgtagacttcaagctaaatggcatctatcaaagcccattcctatcttatgaaaaaaaggaactctgtcaaaatttctttttaggatatgcgaaaaaggacattcgtcaaaaaaccaatatgaaagctgtaatctataaaaacacctatttcctcattagatataccttgaaggatgaaatcattattgaagcactccctttaaaaaactactttaaagagattagactagatgaaaatgttttaaaattagatagcgaccatatcggaaatttatacatttattacgaagcggactcaataaatgaagaagaaaaaatagcttttgaatatgacaacgaggataaaagctaccagatagatattagaaagctaaagaagaagccaggtaaaatactttgtgatggggaaaattccatatacaagtcaaaagaacttatattattagattccaaatatggacaatgtcttattagtaccttaaatgattattacttggacatttattattttgatagcttgacacaagttttagatatcagacaaaatagggacagaattgatattgatgccaaattatattccaataggtttaatgaaacaagaagcacatataaagcagatagaataaaaacagccaaactatactttaaagacgattcaagcaaagagaattacatactatctgatggaatgatagataggcaaaccggagatataaaattcagcatagacttttcaaataaggagattactaaaaacctatatgagaagattcatgatctctatgtggaatatgcttatgatgaaacttctacagaagaagaagcaattgtaaataaagaagtagatgaaagtgaatatgattcagtctcaaaagaagaaaaagaaaataataaaatagaaaaaaccgaaaatgaaccagttccagttgaaggaagaaacaataaaatcaatgaagaatcccgattttcaactgaactctatcttttcaagggtgatgataaaaccatctctaaaagctactatgaatataaggtctatcatgatttaaaaggcttcttaaaactaaaagtcttaaaaagatggccagtctatgaagacacccctggaaaaaggcttaaacattcacaaatatcctataaattgttttcaaaactgcctataaataaaaagcgcataatgtttgagtcaatctggggtggaaaatacagctgcaatccaagatacctttatgaatacatagacgaaaactaccctcactatgaatgcatctggtcctttaaggatgagcattaccctatcaaaggaaatggaaaatgcgtaagaagatcttcactgaaatacctctattacctcgcaacttcaaaatatctaatcaataatgtaaactttaagaagcatttcataaaaagaaaaggccaggttgaaatacagaccatgcatggaactccattaaagacaataggactggacgccccaggagagtttccaaccaaaaagagccaaaaggactatatcaaaaagaataagaattgggattacctcactgtgcaaagcgattatgttgcagagataagcagaacatgttttaaatatgaaaaggacttcttaaaatttggatatcctcgaacagacatattatatacaaaaaacaataaggaagacattcaatcaataaaagaaaggatggggcttccatcagataagaaagtaatcctttatgcccctacatggcgctttaaaaacaattttgacttgatgctggatttgaagtcctttaaggaaagcctgaaggatgaatacatattgattctcagattgcatcacttttcagcgggaggctggaaacagcctctggatgatgatttcgtatatgacttttcaggatatggctcaatcgaggagctgtatctgatttcagatattctaataaccgattactcctctgtaatgtttgattatgccattttagacaggccaataatactgtttgcatatgatttggaagaatatgatgaaaagcttaggggattctatatggatattgaatcaaataagcctggacctattttacatagctcaaaagaggttgaggaagccattttaaatattgaaaagactgaaatgaaatataaggatttaagaagaagcttcaaagaaagatttaatcagtatgaatgtgaaaactcatcagagaaaatatttaataaagtgatagataaaaagaagaataagaaataa

SEQ ID NO: 2181 - DNA, 2091 bp, Methanobrevibacter ruminantium
  source 1..2091: mol_type = genomic DNA
atgcaagatcctaagatttctgtaattattccaatatataatacagaagactatatcgaagagacattactgtctgtaattaatcaaacaatctttgatgagatagaggtcatcatagttgacgatgagtcaacagacaattcaaaatacatcatagagaaatatgcattggactacagcaatattcaagttttccatcaaaagaatgaagggcagggaatatcacggaattatggcctatcaaaatccaaaggagaatatatccactttttagactctgatgattatctgccaccaacagcatatgaaacactatataatatggccttaaagaatgaaagcgatattgtcataggaaatgtcttaagatttgcattatacaacgtatgggaagagagcctttataaaaatgcatataatgactttgatgaagacattgccatcatgagcttaaacgaaaggccttccatattatgggatacccttgtaacaaataagttattcaatagggaattcctgattaggaagaatataagattcccaaacaaaaaaatatcattccaagacattccattttcactggaaagttatatcttagctgattcaatctcattttcaaaggaaatcttccactattggagattgagatccaatcaaagctccgtcacacagcaggacaagagcctaaagaacattaaggaccgccttgaaatcttaagaattgtgcaaaatctcttggaaaagtacgaagttgaagaggagataaggaattatgagtattcaaaatggctgaatcatgacttgaaattctttttgaaaaggttcaactattatcctaaggaatatcatgaagaattgtttgaagaggtctatgggatagttaaaataataccagatgcgctgatagacagcttgaattcatataagaaggttcttttcaccatgataagaaataaggattatgagaatttcctcctgtttgcacctttggaaaatgagctatacaagaatcctgaaattccatcgtttttaaatgatgaatataagtcctatttcgattttgaaaaagcgatggaagaggaggaattgaatatagaattgctggactttaaaaatgataatgataacttatacatagattttgatggctaccttaattacttatcaccgaatgataattacaagattatagcaaagctagttgatgagaatgattatgaaaatcctcttttagtaaatcatttggaaaataagcaaatagccattccattttatttgctgaaggataagaagcgtgcccaaattaaggtcatttatgaatttgaaagcttcaaaaaaactgcatatctcaaaaacagacatagaaaatccattgaaagagaaaagttctttatagatttggatttaggtaaaaattcctatttatatttagatatacgtgaaaaaaacatagaaaattatattgacattattgatatatcattcaattccaaggaatttacaataaaagccaaatcaaaaaagtcgattgataaaatatcaatggaaaatataattagcttcgaaaaaatagcatatccaatatacgatttaaaatatgaagagaatgaagataataatttaaaaaatgaagagaatggagaatatacgtttaaatttaaaataccttattatgatattctcaaatcagcagttaaaaaatgggaattgaactgtgatgaatactttaattcaataaagctatccgaaacatttgaatttttcactgaaacctataagattaaatttgtaaatacaagaaataagattttgatcgaaaatgaaatatttaatccaattaaaatgatttatgccttaaatcacgaaaatactgatcttaaattgaatatcaagacattgaagggtgaaaacagtagattaaataaagagattaaaaagaccaatgaaaagaatgagatcctgaatgaagaaaataaaaagcttattgataaaaacaagaccttaaataaggaaaataaaaaattgaataagaaaatagaggaatataaatccaggaaagtggttaaaatagtggatagtttaaagaattaa

SEQ ID NO: 2182 - DNA, 639 bp, Methanobrevibacter ruminantium
  source 1..639: mol_type = genomic DNA
atgatattaggcacttatttaatcatgcctattttcaatagatggattaaggattgttcaattagggaagttgaatatttcttggctatttggctaattacttgcatttttgacaatactttattgatcggattccctgttaccttgacctactttacaggaccaataggcatggtggtattaggatattatttaaggcatacggatagaaaaatattcaatagccttccatatgcattagctttcttattgattggaatgattgttataatgctatgttcatatttcctatctagtccagagggaatgtatgtctttgatagatattctattcttttagcgattgaagtagttggaattttcaccctttataaggtcattgataaaaaagagcttaaaatcttccataaggaaaatggtttttttagaagagcatctttctcaattgcaaaatatagctatgggatttatttatgccatgaatttattatgaatatctttattataatatttttaaaacatgctccatttaaagtaaccttgcttttagtctttgtttgcacattaggaacatcttgggctctattggctctattaaatagagttccatatttaaataggattatcggtgctaaatag

SEQ ID NO: 2183 - DNA, 294 bp, Methanobrevibacter ruminantium
  source 1..294: mol_type = genomic DNA
gtgaattgggttgtaattccagaatattcattaattccttctttaaattggtttataactgattttttagggacttgctgcagatgcggtgttgatatatttttaatgctctctggagccttgtccttagggcgtgattgggacatcaagtcttttttaggcaaaagaattccaagaattacctatccgtatctgttctgggccacattattaatttccataatgttagttgcagtttatttcaatcccgatttattaaaactttttttcggcatatcacattcctttatataa

SEQ ID NO: 2184 - DNA, 1008 bp, Methanobrevibacter ruminantium
  source 1..1008: mol_type = genomic DNA
atgatgattcctaaagttatgataattcttggaagtgcatctgataaggatatagcaatgaaatccataaagattttggaaaagcttcagattccatatagcttaaaagtggcatctgctcatagaacccacgataaggttaaaaagcttgttaaagatgcaacagataaaggcgtagaagtatttataggaatagccggacttgcagcacacttgcctggcgctatagctgcatatacccacaggccagtcattggagttcctgttgacggagctgtgggaggtcttgatgcattgtatgcatgtgtccaaatgccgtttcctacagcggttacaactgttggaataaacaggggagacaatgcagcaatccttgccggagaaatcattgcaagctatgacgaaaaggttggtcaaaacatttccgatttaagggttgaatatcaggaaaaggttgaagcaggtgaaaaggagcttatcgaaagcattgaaggggaatacttccaaaaagacttcttggaagaagaaaaatacgaaaagatagagtttgaagagcttgatgacactccagatgttatgatccttgcaggaagctattcagatatggaaatagctaaaaatgtagcgatactacttgaaagaatgcgaataaattataaacttgattatatttctccaataagacatgctaaggattttgaatcatatatgagtaaaagaaacaatgctaaaatattcattgcaataagtggcctgtctgcacttgtagcaggaagtgttgtagcacttactgaaaagccagtgattggggttccttgttctaagaaattaaatggccaggatgcattgctgactatggcaaacatgccacctggagttcctgttggaaccgttggaattgataatggtaggaatgctgcaatagttgctggagaaatccttgcaatatccaataaggagatagaagagaacttaaaatggataaagtataagaatgctgatttataa

SEQ ID NO: 2185 - DNA, 1263 bp, Methanobrevibacter ruminantium
  source 1..1263: mol_type = genomic DNA
atggcagaagaattaaacattattcaaattgatgaagagctagatgctgaatatgaagctgcaaaggtgcttcgcaagtatccaaaggatacagtcatgctaaacaatataaaaggatacgacattccagttgtctccggtatctgcaatacaagggaaaagatagcacagtcccttggatgtcaggttgatgaaatattatacaagataattgatggaatgaacaatccaactccaatcaccaaattcatagaccttaaggatgaatacgacagcaaaagagtggatttaggaaagatcccaatactcacccactataaacgtgacggaggggcatacattactgcaggggttgtctttgcaaaggaccctgaaacagggattcaaaacgcttcaatccataggatgcttgttctggaaaagaacaaattagctattagaatcgtcccaagaaacctttacacctatttccaaaaggcaaaggatatgggaaaagacctagatatctccattgcaattggaatggagccttccatacttcttgcatgtacaacttcaattccaatcgatgcagatgaaatggaagttgcaaacaggttcaagaatggagaattggaacttgtaaactgtaaaaacggaataaaggttccagaagcagacattatctttgaaggtaagatattgattgatgagaccgctcctgaaggaccatttgtagacttgactgacacttatgactatgttagagaagagcctgtaatcaaattaagcaagatgtatcttaaaaaggaaaatccaatgtatcatgcaattcttcctgccggattcgagcacaagcttcttcaaggaatgccgcaagagcctagaatattcaatgcagtcaagaacacagttcctaccgtgcagaatgtagtgcttaccgaaggaggctgctgctggttgcatgctgctgtaagcatcaagaagcaaaccgaaggagatggaaagaacattataatggctgcactcgctgcacatccatcattaaagcatgttgttgtagttgatgaggatgtaaatatatttgacccacaggatattgaatatgcaatagctacacgtgtaaaaggtgatgatgatataattattgtacctaaggcaagaggttcttccttagatccaaaggcttcagaaatagatggaaccactacaaaagtaggtgtagatgccactaaatcaattttagaaccacataagttcgaaagagtaagctttagtgagtaa

SEQ ID NO: 2186 - DNA, 972 bp, Methanobrevibacter ruminantium
  source 1..972: mol_type = genomic DNA
atggataaggtaggaattataggagcaggtagtctaggtacagctttagctcaaacagtggctaataatgtagatacagtttatctgcacttaagaagagaagaattagctaaaacaataaattcaactggatataacagcgaatactatccaaacactaaattaaaaaacaatatcatagccactactgacatgaacgacttgattgattgtaagataatatttttatcaattccttcatctgcattcagatcaacccttgaaaacctaaaagaggtcatttcagaagatacaatacttgtgacaacagcaaaaggtattgaatatccctcattgaaatcaatgggtcgcttgatagaagaatactttgatgaaaacttcgtagccttgtcaggccctaattttgcatctgaaattgtcttgaaccttgcaaccgtatcaaacattgcttcaagaagcagtgaaaatgccataaaggtcaagaaagtcctatccacaccagaattcaaggtaaaaatcattgatgatgttgtaggccttgagatatgtggagtcatcaagaatatcaatgcaatagcaaacggtatctgtgaaggaatgaacataaatgaaaacgcaagatatgccgtcttgacaaagggctttgaagatactggtaggattatagaagcatttggtggaaaaatatccacagcaagcgaatactgtggattcggagaccttgtgctaacctcaacttcaagtgaaagcagaaaccacacccttggaatgctctatggccaaagaatcatcgtagatgaaaaggcaagcggtatagtatttgagggtaaaaactcaatcatggccataaaggacatctgtaataataccaatactaacagtgtggttgtaaactttgtatatgatgtaattgttaaacagattccgcctaaaatagcttttaaagacctatggaacaatattgaggagtga

SEQ ID NO: 2187 - DNA, 1092 bp, Methanobrevibacter ruminantium
  source 1..1092: mol_type = genomic DNA
atgatgagtgaagattcaattttgcttactataaaatcttttacagatttacaaactgaaataaacaatactgcaaatggcggaatattaatcttagaaggatattacaagtataatagcaatttagacagtaattttttacagaaaggtgtattagtaaataaaaacataaccatttttggaaatgggtgtgtcattgatggaaataatacttcaagtttaatggaaattaatgcaaataacaataccgttaaaatttatgatttaaattttattaatggtcaccaaaatacttggaactatggaagggttagtattacaaattctattgcttattttaataactgttcattcttaaactccacaaatggttattatggtagtgtatatatagcaaaaacatctcaagcacattttaacaattgtatattcaataacaattatgcaaaatttggtggagctatcttcaataataatattatgtattgtaaaaattgtagctttgaaaataacagtgcacagtctggaggttcattgtgtataaatggcgaaaataatggagtggaaaatacaaacaattatacttacttagaaaattgctccttttcagataactcttcaacagcacatggtgcagtaatatattgtgatgaatggtcaaaaggttgtttcaataattgttcatttgaaaaaaattctgcaacaacaagtggaggagcaataacaatagatggtgcaaatatagatataaataactgtagtttcaataaaaataaaacaggaacatcttcaacatacaatggaggagctatttggataattaaaaatgatataagcggtgcatctaatgtaaatatattaaatacttcatttagtaataattctgcttctcaagatggcggtgcaatttatttaaatggaacttgtgtgcttaaaatttcaaactcttcattcaataataatactgcaactagatatggaggaagcataagaaattatcaaggaacagctaccgcatatctatgtggatttttaaaaagctcagatgcaacttatggaaccataacaaagaatggatgttatgggccttaa

SEQ ID NO: 2188 - DNA, 717 bp, Methanobrevibacter ruminantium
  source 1..717: mol_type = genomic DNA
atgatcggtgtaatattagcagcaggaatgggcacaagacttatgccccttactaaagacatcccaaaggcattgcttaaaatcaatgaaactaccttgcttgaacgtatgattaaaaactgcataaatgcagacataagcaagtttatagtggtcgttggctataacaaggataaggtaatcgacttatgccccgaaatagctgaaaaatatgatatagaaatcaagaccattgaaaacgaaaaatacgatgttacaaatacctctgtatcaacctatcttgcaagcaaattcattgaagaaaacgaccttgacgactttattctagtaaacggagacaatgtagtagaccctgaaatcattacaaggctcgcagtttcacaaaatacaggcatgataatagataacttcaaggagcttaacgaggaatcattcaagcttatcattgatgatgaatcctttaatgaagacaagacaatagctaacggcaaaataaactccataggaaaaggattagacattccatcctctacaggagagttcattggagtttctaaagtcgtatcagatgacgtagcccaattcaataggattttagaaaaattaattgaagaggaccctcaaaactattatgactttgcttataaggacttaagtcttatcaagaccattgactttgtattgacaaacggattaaaaatggaccgaaatagatga

SEQ ID NO: 2189 - DNA, 1221 bp, Methanobrevibacter ruminantium
  source 1..1221: mol_type = genomic DNA
atggcagaagagaaaagaagctttaaaaaactaatcaaagacatattatacatctcagcaaagcgcagcgctagagcactatattatattggctcatacattatccctgcaaatgaaaaaataattctatttgaatcaagcaatgggcgaaactacacaggaaatccaaaatatatctatgaagaaatcgtcagccaaggccttgacaaggagtacaaatgcgtctggtccttcatgcatccggataagaaaatcccaggaaatgccatacaggctaaaagatccttttttaaattcctatattacacattgcgtagcggaacatggatatttgactccagacatttatattacttaaagaagaacaagaaaaccaaatacatccaaacatggcatggaactccccttaaaaagcttgcattagacatggattacattgacatgagtggaaatcaggatattgaagcataccacgaggagtttagaaaaaacacatccgcttggcaatatctcatatcacaaaacgaatactcatcaaatatattcagaagggcttttgactttaaaggagagatgcttgagataggatatcctagaaatgacattcttgtaaacaaagacaacgaaaaagacattgatgagataaaaaccaggcttaatattccaaaggacaagaaaatcattctatatgctccaacttggagagacaatcagttctataccaaaggccaatataagtttgcaacagaaatggacttcgataggctatatgaagaattttccgatgattatgccttaattataaaattccattatttggtcaaggagaatatggattggtccaagtacaatgatttcattatagaatgcgatgcagattgggacattcaagagctttatctaatttcagacatgatgataactgattattcctctgtaatgtttgattattccatattaaaaagacctatgatcttctttgcatatgatctagatgattataaaaacaatcttagggacttttattttgacatggtggaagatgttccaggccctatatgccaaactaatgaagaattggttgattttattaaaaattacagcgaaaatgcttataaaaacacgtttggagaaaaatacgaaaagtggaatgataagttcaatcaatttgatgatggaaaggcgtctcaaaagattataaatctgataaaagaaagataa

SEQ ID NO: 2190 - DNA, 1053 bp, Methanobrevibacter ruminantium
  source 1..1053: mol_type = genomic DNA
atgaaggaatctagcttttacatcaaactatatgaagagaacaattccaccgaccatatctctaactcaaataagtcagtacaatgcaatctatgtgctagagaatgtaaaataaaaaataataatacagggttctgtaaaagtcaaaaaaacatagatggcaaactatttgcacttaactaccaaagaattgcctcataccatatagatccaattgaaaagaagcctctataccacttccttccaggctcatccacttactccataggcggttttggctgtaatttctcatgtttgaactgtcagaactatatgctttcaatgaattcttataatgaaaacaactcaattaagatactgccagaaaggattgttaaaaatgcacttgacaatgattgcctatcaatatcttggacctataatgaacctacactatactttgaatttgctgaggaaacttctagacttgcacatagtcaaggccttaagaatgtcttcatcagcaatggttatatgggtgaagaagtcttgaaagaaacagtaagttttattgacggattcaacatagacttgaagttttttgacgatgagctctatagaaagatttgcggtggcagactagacattgtccttgacaatctaaggactatttatgagtctaagaaaaagtacaataatcatttggagataactactcttctaattaatgatttgaatacggagaaggagcatattagagcaattagcagatttgttttagatgagttaggtcctgaagttcctcttcacttttcaaggttctttccgatgtataaaatgactgataaggctccaactgatattgattatcttattagggcaagagaaatagctatctctgaaggattggagtatgtatatttaggaaatatgcctgctgataacaatacttattgcccggagtgtggtgagctattgatagagagaaataggtattgcaatagggataaaaatagaataaaggatggatgttgtgttaattgtggacatgaattgaattttgtctttgattag

SEQ ID NO: 2191 - DNA, 1242 bp, Methanobrevibacter ruminantium
  source 1..1242: mol_type = genomic DNA
atgaaaagcactcttaaagtctctgatattggtgaaaaacaactaatagaaagaatcatagaaaaatcaaaattatgttccctaaaaaatccatttgatttagatgatttcaattctaattacccgagttctaattttaaaacatcaattggagacgattctgcactcttaaaccaaaatctaaatactaatcactatttagtggcatcatctgatatgcttatccaatcaagccattttccaagagaaatgacttattaccagatgggatataagtcagtcatagtcaatgtaagcgacttggcaagcatgggggctaaaaatataggattccttttaaacatagctatccctaaagacacatcacttgacaattttgacgatctcatttgcggcattattcgtgcatgcgacaattataatattccgcttgtcggcggagatacaaatgaagcgagtgagataatcttatctggaacagcaatcggacaggtagaaaaaggcaaggcccttatgaagcacggatttaaggaaggagacttggtctcgataagtgaccatcttggctatgccgctttaggctttgagcttttaaaaatcaaggaagagaatattgacaaatacaatgatataattttccaaattaataaaattgacccaacagttaaggatttggctctttttaaggcattaaagccagaagccaaatatgaagaaggccgtattttagcaagccataatagtcaagaaaacagaatatctgcaacagacattacagacggccttgcaagtgaattctatgagattttaaatgccgataaaaagtattatctattcaataaagatactgaatcccataatccgaatgattcgaatgattcgaatgatctgaataatcagcagaataatcagaataacacaaataatcaagatgtgattgatgaatatgatgatagcaattattcaaaaggcataagaatttatgaagacaagcttccagtggacgatgaatttaagcaaatagcagatgttttaggtattgattaccttgatttatttttacatataggggaagactttgaactcctatttacaatcaataaagaactaaagagccaattagaaaatgatatgaatttttatgtaatcggtgaaattacaaacaataatacagttgaaatagtactctctaatggagatataaaaaatataagttcaaaaggatacgagcatcttaaataa

SEQ ID NO: 2192 - DNA, 684 bp, Methanobrevibacter ruminantium
  source 1..684: mol_type = genomic DNA
atgaatttaattaagggattagataagaataatggccttgatttaatattacatgctcccggaggagatgtaggggctacagaatctataatagattatttgtatgaggtttttaatggagatattagagttattatacctcaaattgccatgtctggagggactatgattgcatgctcatcaaaagaaataattatgggtaaacaatctagtttgggccctattgatcctcaatttaatggcattcctgctgagatagttattaaagagttttatagggctaaaaatgaaatttctgaaaagccagaaaccattcccttttggcagactaatatttcaaaatatcctcctgcatttattattctttgtgaaaatgcaagaaaatggtctgatgaaattttagataaatctttaagatatgctatgtttgatgggtcggatgaggaaaaaattaataaaataagattagaattaggctctcatgaaaatacgaaaagtcatggcagacatttatcagctaaagattgtcaagaattaggcctaaaaatttcatatttggaagatgatgacgagttccaagacactgttttgtccattcatcatgcctgtatgaatttttttagtattaataaggattgttgcaaaatagttgctaataatgactcaaaatttttcatacaataa

SEQ ID NO: 2193 - DNA, 168 bp, Methanobrevibacter ruminantium
  source 1..168: mol_type = genomic DNA
atggctgtagaatttaatgaggtgataaaaatgaacgaatcttatgtaaagagattatatagagatcttggaatcccttattatcgtccaaaaaaagataaaggagatgaggagttcgatttttttccaaagtatgacctaatgcattggatacctttgaaagtatag

SEQ ID NO: 2194 - DNA, 321 bp, Methanobrevibacter ruminantium
  source 1..321: mol_type = genomic DNA
atgtttaagataagaaaattatccaataaaattatagttttgcttatatgcgggctattgatctgtagcatacaggcctgctcggcctcatgcactgcagtctatgtagggcctgatgtcagtgcagacggttcaacaatcattgcaagatgcaacgaccatcagggagtttggggaaaccatatcacagtgaccccaagggtagagaacaagtcaagccgtcttatggctgtatgcgaagatggaagcgtaaaaacagagcttccggcaacaacttacaaatacacagccacaccatatatgaacagcacaaaagcatga

SEQ ID NO: 2195 - DNA, 1452 bp, Methanobrevibacter ruminantium
  source 1..1452: mol_type = genomic DNA
atggataatcaaaatcaatggaattcaagaattgcttttttattatcaatgattggagctgctgttggattaggcaatatctggcgttatagctatgttgtttactcaaacggtggaggaactttttttataccttatttagttgcaattctaatcatgggaattccatttcttgtattggaatatggaattggattccgccataaagactctttttccaatatcttaaagagcatcaatcctaaattggaatacatttcatgggcattggttttaattatctattttgttctaatctattatctggttatagtaagctgggatttggtctatttaggctcaagcataaatttcagctggggagctgattctgctctttatttcgtgcagaatgtcggaggaagctcaaacctctccaatatggcaagctttataattccaacaaccatttccatggtcttagtgtggatttgtgtctggtacatctcccacaaggatttaaatgagggaataggaaaggcttcaaagattctaatccctctgctttttggcataatggctttcataattgtatttgcattgacccttccaggtgcaggcataggcataagcgcattgctgaatcctgattggcaaatgcttttgaatgtaaacatttggcttgcggccttttcacagattattttctcattaagcatgggagagtcaatttcactgacatatgccagctatttgcctgaaggatctaaattgaccgacaatgtattgattgtggtttttgcaaattgcgcatttgaagtctgcacagcttttggaatattttccattcttggttatatgtcctacacttccggaacaccgattgtagaattggtaagcgaaggcacaggacttgtatttgttgttttcccaatgattttcaatattatgggtgctataggtcatataatcgctccattgctatttatagcaatattgttcgctggaattacttcagctgttgcagtatttgaaccgatgataaattcaacagtccataagctgaactggtcccgtaaaaaggctgtaactgtatggtcaatagtaggctgcatagtttcattattattcacaacaggaatcagcagctatcttgtaggaattgtagacagcttcattacagaattctgcatccttcttttaattgcaattcaatccataatattcacatggttctatgacatagaaggagtcattcctatattgaatgaaaatgacagggtaaaagtaggaaagacatgggtatttgttctaaaatacatattgcctatcttattgttcttcatgtgggctagtggagtatatcatttgcttttaaatgcaaatacctttgaattgattgtttatggtctaattacagtttttattataattttgacttatgtttttacaaatattcctgaaaagtcatag

SEQ ID NO: 2196 - DNA, 462 bp, Methanobrevibacter ruminantium
  source 1..462: mol_type = genomic DNA
atggaaacaatattaaccaacgaaaaagacgaaagattcatagagctttctaatgaattgaacaatgaatattactctaatattggagaagactctctaaagtatctcgattacaacaccttagaagatcctcatgttgtattgcttgtattaaattggggaaatcctatagcctgtgccagctatcgtatatttgatgagcagtcagttgaaatcagacgagtctatgtaaagaagagatatagaaataaaaaaatagcttataagcttgtcaaggccttggagaagttggctatggaaaacaatttcaaatactcaattattgaaactggaagtgaaaatatggctgccatcaacttatataagaagctaggctatgaaaagatagataattttggcttttttaaggacgatgatgcttgcatttgcatgagaaaggagtttaagactcttattttttaa

SEQ ID NO: 2197 - DNA, 468 bp, Methanobrevibacter ruminantium
  source 1..468: mol_type = genomic DNA
atgcatcaaaaatttatggaagaggccatcaaagaggccgaaatctcatcaaaagagggaggattgcctataggagcagtccttgtaaaggaaaaccaaataatctctagaggccataacagacttattcaaaaggattcatccatcctacatgctgaaatggatgctatcgaaaatgcagggcgattaaatcacgaagactaccaaaaatgcaccttatacacaacattatctccttgtccaatgtgctcaggtgcagtgattctatacaatatcccaagagtcgttatcggagataatcaaacccttatgggagcagaaaagctattaaaagataatggtgttgaaataattgtcttaaacgatgataaatgcaaagagctctttgaagactttgtaaacaataatccaggaatatgggaaaatgagcttgctaaggtgggaaacactacagagctaaaggaataa

SEQ ID NO: 2198 - DNA, 969 bp, Methanobrevibacter ruminantium
  source 1..969: mol_type = genomic DNA
gtgattattatgagtgaagatactgctgttttattattaagtcatggaagtagtctcccttatgcagaagaagtttttaaggacatatgcgctaaatttaaggaacagactgaatttgacgctgaagtaggctatatgaaagtggctaagccaagcctccctgaggcaataaatatcttaaaggaaagaaacccaggtctaaaaagaatcatagcaactcccgtatttttagcccctggaattcatacaaacatcgacattcctataatattaggccttgagcctaaggaaaccgacccaagacagcctgacggcaattacccagaaggccactatctctatggccttgaagaggttgatttcgatggagaattaaaacttatcgatgcaataggccctaatccaagacttattgaaatcataaacaacagaatagacacagctcttgaagattccaagctagatgatgatgcaaagacagcagtcttacttgtatcccatggaagcagattaaactacaataaagagttcatttcatgcgtattccaacagtttgaagaacaaaccgattatgtatgtgactttgcattcatggaacttgtagatcctaacattccaactacaattaacaagcttgtaagcgaaaatgaagttgacagattaattgtagtccctgtattcattgctccgggcgttcatacaacaagggacattccgacaatattaggccttattgaggatgatggtagcggacatcatcaccatcaccatcatgatcacgaccatgaccacagtcacgaccacggacatgaccatgatcacggacactctcacggacatcatcaccatcatcatgcccatggggatgaaaagatggagttcgatggagaaatcttatatccagaaccaatctgtgatgatgacatattgattgaaatattagaaaccatggttaaagaagctctttag

SEQ ID NO: 2199 - DNA, 399 bp, Methanobrevibacter ruminantium
  source 1..399: mol_type = genomic DNA
atgtctgatactgtaagaacatggcgtcatatccaacaaagatacaatcttattggatctaaatgtactacctgcggtcaagttttcttcccgcaaagagttatctgtcctgaatgcagaagaaaaggaaatatagaagatatacaattttccggaaaaggaaaaattcacacctattccgtgattagaacacctacttctgactttaaaaagatagctccttatgctgtagctatcattgagcttgaagagggcgcaaaggtcactgcacagattgttgacgctgatgttgatgatattcaaattggcgaccctgtagagatggtctttagaaagattcgtgaagatggccctgatggcgttatctcatatggattcaagtttaaaatcgtaaaataa

SEQ ID NO: 2200 - DNA, 1158 bp, Methanobrevibacter ruminantium
  source 1..1158: mol_type = genomic DNA
atgacaattaaaaaatatttcaaaacaagaaaaggaactaaaaaatcagtccaagaaagagattatgatagtgattactcaaataaagggctccataaagaatcaagaattaaaaacttgcttaatgacaataaaggaaactattcaatcgtcattagtgcaattctactaatatcctttttgattctctctattattgtgctgaacacagttttagaggaaagggaagaacatacagacacaatagcttcaaaccaataccaatacatcatagaagattataagcgaaatttacctaatattgagcgtgaggcattggaagagctgagcttatatgtcattgagaataaaagaccctgctttaactctcgtgatgacttaaaggagataatagatgaaaaactggctcaaaagaatcaggaatattatcaaaactataatattgaaataaactcctcaatcatagggattgaaaacactagcgatccattttcctataagtttaaaacatatatttcaagtgtaaagggagacttttcctatgaggagatagatgaatcgtatgtgaactgctataatctaaaagatccagtacctgttctcttttgcggtgatgattcaagctttagaatagaggactatagtcttttaggtgactctgattttggaactcatgactccaattttgaaaatgatgattcctcttccaatcaaaaggtattttatggccattctttggctaaattcctcagaaggcatcatgttgaaaactattcattctatgagaatgcaagctctccatttataataaaaagatgcccttacgacccttataagcatcatggagatgacaatggaagaatcatgaaaaactgcagagacaatggatactatcacgaaagcgcagatggagcttgctacttatgcaggctagaaggaaagtcaggatgtgaccattatggctttgaaacatttataaatcctcaaaagaccaatgaaaccggaggtgtcagtgcctgcggctctgaccatgtaatattcagtgatgacatctatccaggggttgaggttatttataatagtgaaaatggattgaatgaaatattatatcttgaccctcatggacataaggtgaagtatggaatgagtgagtattaa

SEQ ID NO: 2201 - DNA, 1017 bp, Methanobrevibacter ruminantium
  source 1..1017: mol_type = genomic DNA
atgtactcctcagaattgattctgtccctcatattgattatattcatcataggaatcatggccaatataacagacagcgtcaatgaaaaggtccttagccaagaggagctttcctccctagaggccataagcatagaaagtgtagattatctattgaacaatcctggaagtccaatgaattgggaggaagatgaaggattgaataatggaattgtatcaagacgaatcataccaggacttgccataaataaaaaatctgtggaaaatggctttttttatgaagaaagcagtagtgatgaagagataatacctaactccatatcatatatcaagctcttaaagcttcaatctaactatgatgacttgatcaatcggaatctatttaattcgactcttaaaagttcaataactatttatccccactctgatattgatataatagctatgggagatgatttagaatcatctagtgatgttgtggctataaatagaacagttagatgtgactatcttagcaattttgtgatatataggttcaatgactttgagctttatggtgagaattataaaaaaaccgaactctgcaatcatgacagcaatgttaatctatctaatcatagcaatgatcgaaggtatttttggctttgcaagaactttagaatctatagaagttctctaaataactataattattacttgatttctgattcgtcaataaggcatgcaaatagttattatatactggaaagccttaacagaacaagggatgatatggaaagattaaatgatgaggtgattgaattaaatccgttctttgctgaagatatggtaaatagctctaatgagatttattcaattcattttaaggttccacatgatgatattgatgattttaaaacggttatggtagctatccataagaatatgactgatgagattgtatccaataatcagttgagatatgattattttaatagcggggaggtggattttgttttaaaaacggcttatagatag

SEQ ID NO: 2202 - DNA, 435 bp, Methanobrevibacter ruminantium
  source 1..435: mol_type = genomic DNA
atgagcactacaatcagaattaacaaagacgtgaaagaattattaaaattaaaaagtgttgaaacaggtgtaagtcagatagatttagcaaatagatacattctatatggaatcaaatacgatgatacccctagtaaacctataaaatcaatcgaagaaatagaaaaactattaaattacgatgaaataagagaatctgtcgaagaaatagatcttaaagattacgaatacgaaatacctcaaggaatttcattagttaaagaaggagaagaaaataaaccaatcaatactgaagaagaaattaaaaagatattaaaatatgataaaccagaaggagacgatgtttcaagaagcatcgccggaataataaagacagaagaagtcacagatgcggtaaaactaaagaaagaaagattaaaagagaggtataaatga

SEQ ID NO: 2203 - DNA, 393 bp, Methanobrevibacter ruminantium
  source 1..393: mol_type = genomic DNA
atgatttttttagatactacctatataattgcattaataaatgaaaatgataaatatcataagaaagctttaaaattgatggaagatgtggattatgaaaagaagatgacaaacagtgttgttttcgttgaatcattaaatatgttggataaaagaagcacacaaaaggatatagataacattgttaataaattatatcaattagacaaaatacattgtgtaaattctgcaaatatcaaaaactcactaaatatatttaaattttacaatggttctataaattttgcagattgcactataattgatagtatgatcacatatcggataaatgaaataatatcttttgattctgattttgataaggtgaaagggataaaaagaatttatatttaa

SEQ ID NO: 2204 - DNA, 2289 bp, Methanobrevibacter ruminantium
  source 1..2289: mol_type = genomic DNA
atgctagttaaaaagatgcttagagacttatctgaccataagattcaatttgtatccatcttccttatggcctttttaggcgtattcgcctttacaggaataaatggagaagtggttggaatcacagatgtgtcaacacactactatgaagacacaaatcttgcagatggttggatatatggcgagaactttgataaggatactctaaaagatataaagaacatggaagaggtcaagaatgcccatagggagatggtagttgatacggtagccaactactcttcggacccagacataactctccatatactggaaggaaagcaagagatatccaaattccatctgtttaagggaaaagactttaatcctaacgacaaggaaggaatatggattgacaagcgctttgcagatgcaagagacctagatattggagataagatatcccttaaatttgatggaaagacagtgtctaagaccatccgaggaattatatactctccagaatatgtctactacatccaggaaggaagcatgatacctgacttcagccaagtgggctatgcattcatgccaagtaagggagctgattttgacatagagtacaatagaattacaatagacggcaagaaggaacttgacgctaaggagttcagcagtgaggtatcagagcttttaggccaatacacctatgcccaattcgttccaagggaagacaatgtaggggtaagcacattgcaggatgagatagaccagcataatatgttttcaggaattttcccaattatctttgttatggtggcccttttaacccttttaaccacaatgagcagggtgatttcttcacagagaacacagattggaacactgaaggctatgggatatgacaatactacaatcattctccattatctctcatatggattcttcctatcctttgcaggctctcttttaggccttataataggtcctctcacccttccatatctcttctatccaagcatgtcagcaatgtattcacttccatattggggtcctgcatggaatctcagttttttccttgtggcagctcttatggtaatcatttccgttcttgtaacattcatatctgtcaagacaatcaatgatgaaaatccggctgactcaatcaagcctaaggttccaaaggcagtaagctctggaataatggagagaacaaagatatggaaaaagatgggattcaatggaagatggaactatagggacgcaaaaagaaataaggtaagggcaataatgagcatctttggcgtatttgcctgtgctcttcttataatgtctgcatttggaatgtatgactctatgaatgacgttcaggactggcaatacaaccagatttataattacaactcaaaattatatcttgatgaaaacattacagatgctcaattatcaaccgtagttaaggacacaaacggcgaagagatgatggagcaggccattgaggtcaagtataggggaaataagcataccgcttcgatgacggtctataatgattcagaactctttagaccaaccgacatcaatagaaactatatagagatagatccagatggcgttgccatttcagacaggcttgctgaagtattaggacttaaagtgggggataaggtaaggtggcatcttgttggaaatcctaaatggattgattcagagataactcagacctattcaactcctttcggacagggaataatcatgtctgaaaagacctatgaaaagtatggcggagatgactataattattcaactaatgtggttttaacagaggataaggacattaagaactatacaggagtcaccagtgtctctacaagggaagatattgtaaagggctgggaagacatgactgaagccatgaatcttatggtttatgttcttataatatttgctgtcattttggctgttgtggttttatataatcttggccttctctcatttacagagattcaaagggaaattgcaactcttaaggttcttggatttaatacaaagagcttgagacgacttttactcactcaaaacctatggttttcaacaattgggttcatattggcaattccaggtgcatatattctaatggaggccatgatgggctcaacaggagctgactattatttcccaataaatatctatccgttgaactttataatcagccttataatgacattcggactttccatacttgttaatctgctcttttcaagaaagattaagaaggttaatatggtcgaatccttaaagagcaatgaatag

SEQ ID NO: 2205 - DNA, 705 bp, Methanobrevibacter ruminantium
  source 1..705: mol_type = genomic DNA
atgacaacaatgatagaatttcaaaatgtttcaagagaatatcaaagtggagatcacatattaaaggcattagacaatttaagcctaaagattgaaaaaggagaatttgttgttattttaggaccatcaggtgcaggaaaatccacatttttaaaccttttaggaggattggataccgcaactagcggaaaaataatcgtaaatggggaaaacatagcagattatgatgataatcaattaacaaaatacagggcaaaggaagttggattcatattccaattctataacctgattcctaatctaacagcaaaggaaaacattgagcttatgagtgatataaccaatctaaaggtagatggaaataagatattggattctgtaggtctcttagaccatgcaaaccaattccctgctcaactctctggtggagagcagcaaagggtctcaatagctagagccattgcaaaacaaccggctatgctattatgtgacgagcctacaggtgcattagactctaatactggagtactgattctttccttgctccagacaatgtgtcacgagaagaatacgacagttgtgatagtgactcacaatgccaaattggcagatgcagctgataagcttatcagaatcaagaatggacagatagaggaagttaaaatcaatgaaaatccattagatattaatgaaattgagtggtaa

SEQ ID NO: 2206 - DNA, 1332 bp, Methanobrevibacter ruminantium
  source 1..1332: mol_type = genomic DNA
atgaagatgatacgtcaattcggggaatcctccatcgctcttgtcgtcaatctaatactgtttttatttaatggaattaaatacatatttacccttcctaatcgtatttatgtctatataaagctatttttagaagatactgatgcagtattaaaggaaagcctgattgctctttctatctgtgctgtaggggatttatgtgcaggtatcattttaggaaatatggaattcttcctaaagacctatcccggccttatggtaatcattccaggtgcaataggaatgaggggaaacatctttggctcttttggctcaaggcttagcacacaccttcacattggtactttgtctcctgaatttaaaagatcagagatacttagcgaaaacattacagcatcccttattttgactatggtactatccatattgcttgctgtaatcgctaaaggagtctgcatagcctttggatttaaaagcataagcatttatgactttgttcttatttcatttattgcagggcttatttcaactatcattatgctgcctattacaatgtttatctcacttaagagctttgaaggaggctgggacccagacaatattacaactccattcattgcagctgttggagactttttcacccttccagcaatcatattaagcgtaatcatagtgggattcatttccataatccctatagtcaagatgattgtctttgtagcggtaatatttgttacaatagcagcattgattgcaggatacacagcaaaaagcgatgtaaggcatattgtaaggcaatccactcctgtactattcatttgctcactccttggaacatttgcaggtggaatattgaatgattctcttacaaccttgcttaagaatcagactttactcactcttgttccactcttctcaggtgaaagcggaggattggtaagcatattaggagcaaggctatcatctggccttcactcaggtcttattgacccagtgctcagacctaagaagcatacagtagagaattttgtagctatattgaccctttcagttgtaatgtatccggttataggatttttggctgagtcatcaacaatcgcatttggcaatattggtgtaggaatacttgaatcaatgtcaataagcttcttggcaggtatgattttgattcttctaatgttgcttgtagtgttctacatctctacaatttcttatagaagaggattggaccctgataatattgttatacctttatccactagcctaacagactctatatcaacattaattttaattgttgtgtctttaggtctattgaattatgttttttaa

SEQ ID NO: 2207 - DNA, 609 bp, Methanobrevibacter ruminantium
  source 1..609: mol_type = genomic DNA
atgcctagcgtaaaagatattttaattgaaatgaaagatatgtcggaattaatggtcgatttagcttattcagctgtattgtttaacaacagagcagctgctgaagaggtaatcaccttggaaaacaagttaaacagcatgaattatgagattaaaaaacaatctcttgttgctgcaagatctcttgaggatgcagaaaagctaacaaccttgcttgagattgcagaagctgcagaatccatcggaaatgcagctaaagacttagccgacttgacattgaaaggattcgaacctcacccagtatttaaaatggttatggaagaaagtgaaaagaccattatccgtttgaatgttgatgaaagttcagttcttgtaaacaattcattaggtgacttattattattaaaccgtactggtatgagaatcatttccatcagacgtggagattcttggatttacggacctgataaaaacacagttatcattgcaggagatgtattgatagctaaaggttctgaagctggtacagagattattgaaaaattagcagaaggagaaatggatttagaagatttagtcaatatggaagactttattgatgataattag

SEQ ID NO: 2208 - DNA, 1365 bp, Methanobrevibacter ruminantium
  source 1..1365: mol_type = genomic DNA
atgatgattcatcttattggtattgggaatgataaaggaaatataactttaaatgcttttaaggctattaaagaagcagatgttattattaattacaatgatattgatttaagtttctttgattctgaaattaaagacaaagagattatttcagctattgatttgattaatgacatagatttagaagatgatcttgatttaaatgatgatgtagctgaaaatattgattctgatgaggatttagattctgaaattaattcagatgacttagaatctaatattatttcagatgacttagaatctaatattatttcagatgatttagaatctaatattatttcagatgacttagaatctaatgtgggttcagatgatttagaatccgatattgattcagatgactcatctgacatcgatttagaagatgatctaaaatcaaacccattattagaaagaatacttcaagaaaacttcttaattgaactagccatctctaaatcattggaatccaagcaagttgctttaatagtctcagatgacccaaatatcctaggcctatccaatcgcttccttcaaattaagtccaagtatagcgatgtaaaatataaaatatatcctggggtttcttcaataagccaatcagcatctatagttggtgctcctttaggtgattttgctcttatagacctatcaaacccaattacatctttatctgaaatagaagacaaggtaaaacacattttagatgccaatttagtcttggcaatcaaaaatcctatcgacgataaaagagaagatggaagagaggcttataatttaattaaatcaatcataaacgaatacaatgatgaattattgactgcaatagtctatagtgatggctattactctatagatgagtttaaaaatatttatgatgaagatattgatgaaaattcaatctttttcattggaaataagttatcctatattttagaggaatcaatggttacttcctctgattatattgtagagactaaacttatctcatggtctattgagttctttgaaaggtatttgaatggagaggttccaagaggccttgattatgattgcgatttccttccatgccatgtgaatctggaagcttgtgacttttgctattgtccattctatccctgtgcagatggagttacaggaggagaatggattaaggacagggatgtttggagctgtcagcactgtgattggatacatctggaagagccttgtgtagctattagagaaggcttggatgatatcttaaaggaaattgatgatttgaaggataaacatattgagctacttaaattaagacgtaagagtcttttaaagaccttaaaatag

SEQ ID NO: 2209 - DNA, 786 bp, Methanobrevibacter ruminantium
  source 1..786: mol_type = genomic DNA
atgaaaatatcaagaattatacttatattattgctttttgttgtattttttgaaataggactgttcagctcatataccatagtaaatgctgaagttccaaaccctcaggaattatgggatatgcaggtaaacactgttagttcattcttcagccctgaaaatgtaggcggattgcttattaaggatccagataacattaacgttacaaataaatatgatctggccacagaactggctgaagtggcagaggtggatggagtcaatgtggaaaatatgacaatcactacaagtgcagatactgatgaagagccattcaatgcaactgtaactgcattcggttattccactcctaaaggaaattccggttcaatcgttattagcggacagcctgattataagattgtagcttcagttcaaattaagcataccataaatggctatgaagcggatttggacactatcaatattgaatccatattaaaggtatatgactcaaatgacgctaagaacgtaagctattccggttatgattcaggacctagcggcgcttctcaaagctatagctattcatctgactcttccagttcaaatgataatgcttatatctcttcagattcatccagtggcagttcaagctatgacagcggagcatcttcttcatctggttcctatagtggaggttccagttatgatagcggtgcttcttcaggttctggttcttcttctggttctggaagtggagatgtagtgattaatctattaagtcctatattttcatttatttaa

SEQ ID NO: 2210 - DNA, 1974 bp, Methanobrevibacter ruminantium
  source 1..1974: mol_type = genomic DNA
atgacagctgaaacacttcttaaatttgcaagaaaaggaataatattaacaccaggggcgtatgatttaattctaggctcagataatcctttagatttaagttcatcaattattttaaaattaaaaagcggaaagtattctaatgaagatctggttccggtagatgagaagcagataaaagaaatgatgaaagcgcttggaataagtgttaaagagaacaagggattagatcatggctctttagatgactttggtagtagaactagtggagaaggtcttgaaagaaagattgaaacaagacctgaaaaaactgtggaaaaagcagtagagccacaacaagcagtggaaactagagaacaaaaaccacaacaaaccttcaaaccaacacaagaaaaaactgtggagaaacctatagaaaaaccacaacaaacattcgaaccaaaccaacaaagaaccgtggagaaacctatagaaaaaccacaacaaacattcgaaacacctgcaaaacaaacccgtgcagaaaaaccaataaaaccacaaataaaaccaattagtgcagaaaaaccaacagaagcaccacaaaggcaagaaactaaagaaatagaaaaaaccatagaaaaacctaaatctgataagcctaaagtaaatgcaggctatcctagtgatcatattgtaaaaatagacaatgtagaagtgtctgaagagactaaaaagaaatacagaagaaacttaacagaatctaaagtcaattttgacggtttcaaggtcctaaaggacacaagcaacaagtcatacacaagcggtgagataggaaaccttatcgaatatttccaaaacaggtataagaaattatctgacatattatctaaaaggccagaactacgtacatggcagaaaatcaatgaaatcaccgagactcagactgatttaaatcttattgtaatgattacagacataaaaagcactaaaaacggccattacttcatagaagtggaggacgataccggctctatgcctatccttgtaagcaaggataacgaccagctgatacgagctgccaagaatcttatgaaagatgaggtcattggtattgtcgctcaaaaaaggccgggaaatgagcttgcaatctgtcaaaacatcatagatccgggagttccaagaatagctaaaaaggaagtgaactttggaacagtatttacctcagacattcacattggaagctcaaccttccttgaagacgcctttacaagattcatcaaatggattaatggcgatttcggaagcgaagagcagatggaaatggctaataacgttaaatacatgattattggtggagatatcgtagacggaattggtgtctatccaaatcaggataaggaattggcaataaaagacattacagcccaatatgatgaggctgcacgtcttgtaggcgacataagaagcgatgtaaagatcatcattactcctggaaaccacgacgcttcaagagtggctgagccacagcctgctgtacctgaaaagtatgctaaatcattatatgaattgaataatgtggaattcctctccaatccaagtatggtaagtctagatgggcttgaagtgctcatttaccacggaaggggaatagatgatatggttatgggttcaaatgacttttcacacgagcgaaatgaccttgtaatgaaagaattcttaaataaaagacatttggctcctttatatggtgagagaaccccacttgcttcagagcttgaagatcaccttgtaatcgatagggtcccagatgtactgcacacagggcatgttcacataaatacctatacaaactataagggaattcattgcattaattcaggaactttccagactcaaacagagttccagaagatttataacattgttccaacccctgcagaggttcctatcattgatgttgggggcaattataagcaattgaagtttatagactaa

SEQ ID NO: 2211 - DNA, 588 bp, Methanobrevibacter ruminantium
  source 1..588: mol_type = genomic DNA
atggaaaaggaaatagtaaaatcagttgtagagatgtcagcttatgtatttgaaagaggccttgtatcagggaaagctggcaatgtaagcgcaagattcaagacagaccatggtgacatagtcgccataactccaacacttaaatcccttgctgatttggaagataaggacataattcttgttgattcagagggcaataatctaactaaaggcaagccatcctctgaacttggaatgcatctggcaatctatcgtgaaaagccagatgtctatggaatcgtacacacccattcaccttatgcaacaggattcgccttttccaataaaagaataaagcgtttggaaggattcggacaaataaaatcagaatacattaaagatatagactactataagcctggaagtgaagaacttgctaaaaatgctgctgaagcattgaaggaagaggatgttattgtcctaaggaatcatggagtcatcgccactggatctactgttaaagaggctgccacacttgttgaattcgttgaagaaagtgctaaaacccaatttgtgacactagtcttgaattccttagatgaaaaatag

SEQ ID NO: 2212 - DNA, 492 bp, Methanobrevibacter ruminantium
  source 1..492: mol_type = genomic DNA
atgaaaattgaatttgacaccataggaacaatacactctccttttaaagagctagagggaatgcctattcaaccaaccggtgcgaaaggcattaaaggagaaatacatattaaagatgaatataagcctggattaaaggatattactggtttttcacatcttatacttatctatcacttacataaaaccaatggaaatgcattggaagtgaagcctttcatggataataagacacatggagtctttgcaacaagatctcctaaaagaccaaataacataggaatgactgtagttgcattggatagcgttgatgatgactgtgtcttgcacatatccaatgtagatattcttgatggcactccacttcttgatatcaagccatatgttcctcaattgcatgaggacaccattgtagacttaagaattggatggtttgaaaccaatcataaaaaagcgaaaacacaaaaagcggatgatagatttattaactaa

SEQ ID NO: 2213 - DNA, 249 bp, Methanobrevibacter ruminantium
  source 1..249: mol_type = genomic DNA
atgacaaatgaaacttttgaggaagtatcacaaatattaaagcatattatggaaaatcctagtgtaccacgtaatatcagaagagctgcagatgaatccttcaacactttaaacaatgaagaagaagatgaaactgttagagcaagcgctgtaatcattaaattagatgaaattagtaatgatcctaacattcctgttcatgctagaaccttaatttgggaaatcttatctaaattagaagctatttaa

SEQ ID NO: 2214 - DNA, 357 bp, Methanobrevibacter ruminantium
  source 1..357: mol_type = genomic DNA
atggtaaaaaatgaaaaattcataactgtaatttgttttaataaatttcatggaaagaagatttttaaaatcggatctattttaaagcttgttaaagagcctgacaatgcctatgacgctgaagctatccgaattgagatgagatatgcaggtaaggttggatatttggcaaacagcgttaaaacggtagtgcgaggcacaatgagtgcaggaagagtctatgataaaataaatgatgaggctgcttatgctcaagtgaaattcatttcaaatgaaaatgtgattgcacgtattcttgaagaggaagaaataaaagaccttaaaagagatccggaaagtgatttaaactttatttaa

SEQ ID NO: 2215 - DNA, 1008 bp, Methanobrevibacter ruminantium
  source 1..1008: mol_type = genomic DNA
atgtcaaatacagaaaaaataaatgtaaatgtagaatccaataaagataagggatttagtgatgatatcaacacaatcttcataaacttcaatggtctaaacattagccttgaacttatggaaaaacaatcctataaaaatatggacattattcctataaaaactgacagctttgcaaaaaaagatttcatcacacttaaaaaaggctttgaaatgggccttgttgaaataaaggagcttgaaaatgaggaagtaaatacagtaatctgcaaaaacgatgcagttgttccgcttatcctaatcgatggtgatgaaataataggagccaagcaaaacagaataatgaatgaaagccttctaattccagcaaagtctcaagtgaaaatcccagtcagttgtacagaacatggccgctggagattcaagtcaaacgagagagaattccaacattctgattattcccttaacttcgaaagcagaagaatcaagtcaattgcaagaaacgaatgcagagactatcaatctgatgtatggagtcatataagcgatcttgaagacagacattcctttagatcaaggacaagctcaatgaacgacaattacgagcattctaaaaccgctcaagatgactatataaagaatttaatgattgcagatggagctaatggtctcatttgctttataaacggtgaatttaagggattagagttattctataatcatagcatctataaggaatattatgaaaagacattaagaagctatattattgaagccatttcttatggaggaaataatacagttggcgaagaattatttagagtgattaatggtgaaatgaatgatttatcttcatctgaatttatagaatatgaaaccgttggccttggaaagaatataagattcgcaactaaaggaggatcaggttctggccttatatttgaagatgaattagttcatatgacttacttcaaagaggattccaataaaaactatgaaattttatag

SEQ ID NO: 2216 - DNA, 1026 bp, Methanobrevibacter ruminantium
  source 1..1026: mol_type = genomic DNA
atgataactgaactttactccaattcaatttatatgttacttacaatcttgctattttcacttgcagtagatcttcttctaggtgagtttccaatgcagatacatcctgtagtatggattggaaaaataataagcttttttaagaatatcctaatcaaatacgacaataagatagctggattgattctctcaattgctgtaataattgtttcatcacttattgttctaattccaatggctatagcaaggtatctattgccatataatgatatgatgatttatctattcaagctgatagcgattttgcttcttacttcaacattttcagtcaagctgttgttggattctgcccgtgatgttgaaaaggacttaaggaacaataacttaaataaggcacgtcaggccgttagctatctggttagccgtgacactaatgaattgaataaggagcatgtcatatccgctgtaatagagactctaagtgaaaacatacctgactcctatgtttcaactgtattctactattcaattgttggaataatagctagcctatgtggaattggagactttgatgtcataatacttgctgttcttgctgcatttatccatagggttgttgatacaatggattccatggtaggatacaagactaaggaactctacaatatcggttttattccagcgcatttggatgatgctttaaattacatacctgcaaggttttctggagctttgattgttgtatctgctatgtttctacgtttaaattggaaaaatgcattgtttattatgagaagggatgcaaacaattgtgacagtcctaattcaggatatacgatggcaacagtagctggagcattaaacattcagctagaaaaggaaggagtttataccttaggggataatataaatccaataaatgttgattgcattgaaaaggcagtggatctagcaagactgaccatatttttagttacaatattcttcatgtttgtatttatggatttaattcttttaatgctttaa

SEQ ID NO: 2217 - DNA, 465 bp, Methanobrevibacter ruminantium
  source 1..465: mol_type = genomic DNA
atggctgtaatagatgaagaacaagtaagagaatggttaatggaagaagacatgattagagaaaagatttatgatgaaaatgctaatttccattatattatcaatttcccaaataacaatgcaatggatgtaattcagcctagaacaaaagaagacgttctccttataggctgtgcaacagaagtctcacaagtagagcaagacatgataaaaaacactgataaggcaataaatcaggagtttatatggaacgtaagatttgccttaaacgaaatgcttctagactttgagttggaacatccggatgatcaattgaaacgttttatcataactgaagacatattttctgatgggcttacaaaacatgtccttgttaaatcaattaaaaaggtatttaaagcaaaattacaatgtatttggttgttaggtaaaacatatggaacagtccagatgaaaaaagaataa

SEQ ID NO: 2218 - DNA, 1167 bp, synthetic construct
  source 1..1167: mol_type = other DNA
atgacaaatattttcgaggatctgcaggaagagagcgtgggcgtgagtatctttaaagacaaaaagcccttggatcaccggtttctgcctgagaatctcccccatcgaaagaaacagatcacggaaatagcgaaacactggattgaagccctgaatggcaacacccctagcaacatcacaatctacgggaagacaggaactgggaagactgccgctgccaaattcgcgaaagagcagctgattgaggcatctagagataaaaacgtcttcattaaggtagagtacatcagatgcacagacttcactacagagtaccaggtcctgacctatctgtgccagaggctaggccgtgatgttcccaaccggggatggaccaagggggagatcgtaaacaccttccgggacattctgaggagaaatgcctttggccgcaatctgattttgatcgtcattttagatgagatcgacatcctgctggagaaggacggcgacggcatcctctacacccttacacgcacggataatattgccatcctgtcaataagtaattatctagactttaagcaattcatcaagccaagggttgcaagcagcctgcgcgataaggagatagtgttcccgccctatgatgcagagcagctcgccgacatcttgcacgaacgaagcgaactggcctttgaagagaacacgcttgaagaaagcgtgattccactctgttccgccatggctgctaaggaagagggtgatgcacgctacgctctggacctattggagaacgctggggacatcgccgtggaggagggtagtgaaatcgttaagggaaaatatgtgcggcaagcaaaggacgtcattgagtataacaaggtgaaagacgtgattattacacttccaacccagcagcaaagggtgctcgccgcgataatgaaactgactcaggacaacgaggaaatcacttcaggtaagctcttcgaagtctacaaggatatctctaaaggagactccgtgacctaccgccggatctttgacttcatcaacgaactggagatgctcggaatcatctcgaccaacaccatatcccgaggcagagggaaaggcaggaccaatattatcaagctgcagacggattctaagctcatacaggacaacttatccgctgtgctttactga

SEQ ID NO: 2219 - DNA, 705 bp, synthetic construct
  source 1..705: mol_type = other DNA
atgacgagactcattgagttcaagaatgtgaacaaggagtataaatctggagactacattctgaaagctatggataacgtgaactttacaatcgatgagggcgagtttgtagtgattctgggacccagcggggcaggcaagtccacccttctcaacctgctgggtggcctcgattcagttagcagcggggagataatcgtcaatggcagtcacattgaatcgttcgacgacgaccagcttactaactacagggcccggaatgtaggctttgttttccagttctacaacctgatccccaacctgaccgccctggaaaacatagaactgatgaaggacgtggttgacttcgacatcaacggactggctgtcttggatgctgtggggctcaaagatcacgccgaccattttccagcacagttatccggtggggagcaacaaagggtgtccattgcccgggcaatcgcgaagcgccctagtatgctcctgtgtgacgagccgacaggagcactggattcaaaaaccggggctttgatcttggccctgctacaggacatgtgcgagaagctcaatacaaccgtggtcatcgtgactcacaatgccattctaagcgaagcggccaataaggtgatccgaataaagaacggccagatcgaaagcgtcatcgtgaatgagatgccaaaaaaggtctctgaattagagctttga

SEQ ID NO: 2220 - DNA, 2268 bp, synthetic construct
  source 1..2268: mol_type = other DNA
atgctcaaaagaaagatgctccgggatatctggaattataaagtgcaatttatatccatcttcataattgcattcatcggcgtatttgtctttgccggactgactgccgaggcagacgggtttgaagcctccatcgactcattctaccagcggagcaacctggctgacggatggatctactcaaactaccttgttgacgacttcctcaagcaggtctacctgcttggcgccaccactagtatggagcgccagctggttgtcgattcccaggcggaattagacggcaagcccgatattacgctgcacttcgttgaaaacaacaccatctctaaatattatcctctggaaggcaacgaactgaacattagcgattctgagggtgtatggctcgataaaacgttcgccgatgcccgaaacctgaagatcggggacaccatcgcatttgaaagcaatgggattaaaatagagaagaagattaggggtctgggctattctccagagaacgtctacagcttggtgcccactcagacagttcccaattatacggcaaggggctttgcttatatgtcctataaggcattcccaagcgacaacatcacttataatgtgctaaacgtgaagtttgatggacgccctgaaatcttcagtgagctactgtcctaccgtctcgatggatactatgaattgtacctgccccaaagcaaccaatacagcgtaaatgcggtgtcagactcgatcgcgcaccagagttcattgaacgccgtgttcccaattctgttcacactcatttccatgctgatgcttagtgtgaccatgaaaagaatcatctcgaaccagcgcacccagatcggggtgctcaaggccaatggatttagcaacaggagcatcgctatccattacatgtccttcggcttcttgctggtcacatcagggagtatcctgggtgccattctcgggccgatcgtattccacttcgtggttcatgaatcccgcatttactattttaagttcccggtatgggcttacgtgggtcttgagcggttcattttcgtaatcgtgataatcagtttgatctcactgattgtgagttacctcagcattaaaagcattgtcaatgagcctccaagccagatcataaagccaaagccgcccaaaatggtcagttcggggttcattgagaagctagcaatctggaaaaggctgtcattcaacatccgctggaactacagagatatcaaaagaaaccgattcaaatccctcatgacaatcgtcggcgtgatgggatgtaccatacttctcatctcaggctttgcagtgtatgagcagatggagattagcaaggactggtacttcaatgacgttaaccattttgaatccaagctggtgatcgacgacaatacagacctttcgcaaatcgacagtatcgcccacaaggttaacggggatgagataatggagtcctccattgaaatattgaagggggatgccaattttgcttccctcctggtgctgaacgacaccgatcttatcacaatgaccaacgacaaccgtgagaagatagatattccaaaaaacgaggtgagcatcagcaagaagatggctgatattctggacctgaaggtgggagacaccatcgactgccacctacttgattccaacaagctggtgaagatcaggatcgatcggatacacagcacccccttcacgcagggccttgtcatgtctgccgacaaatatgaagagctgggcttcaattttactcccacaagcattatcactagcgagcatgtcaataagtcctacgatggagtcaaatccacaatctactcagaagacatggtgcgaggctgggaccagatgcagaaaaccagcatgatgataatcaccagtatattgtttttagccattgtgttagctgtggtgattctgtataatatgaacctcctgtcgttcatcgagatggagaatgatatcgccaccctgaaagtgttaggctttaagagcaagtacctcacgaaactgctagctacccagggctttttctttattattgtcggttttatcttggggctgcccgtcgcgtactacattctgacactgttgatgcctgccttcggaaataagatctatctgatccctaacatttctgtgctcaatatggcctttagctttctgataattgtctctgtgttcattgttatgaatctctacttcagccggaagatcagaaaactcgacatggtggacgctctgaagactttcgagtga

SEQ ID NO: 2221 - DNA, 2238 bp, synthetic construct
  source 1..2238: mol_type = other DNA
atgaagaatcgcatgattttgattatttccctgttccttatttcactgctcgccatcggggcggcatcggcatctgaagacataactgataccattgaggcaccggcggctgatgaggtggtgacggttgatagtgagatccaggagattgagacggtggacaataacctggaagaaatagagaccgatacaaataatattgaggaggtggaggcggccgacgatgaggtcatcaatgaaaccgccgaaactgagataaaagacgagaccgagattacagatgaaactatcatatctgaggaaaaggtgcaaatcgctaatgatgaaaaaatcgtccaggacgggttgctgggctttagcatcaatttaacggacctgctgggaggagagtcgtcatctctgaatttgagcaaactcctgagtggcgacaacttgaacctgaatttgagcaagctcctgagtggagacaatttaaacctgaactggagcgagctcctgagtggagatagcttcacccttaactggacagacctactggggggtgacagcctgacggtgaactggacggacctactcggcggcgagtcgacaaccctcaactggacagacctactgggtcgggacagcctgacagtgaactggacagaccttctcggcgaggactttacccttaatttgaccgacctactggggcgggacagcctcaccgtcaattggacggacctgctgggcggggacagcctaacagtcaactggacagacctgcttaacggagacagcttgaccttcaactggacggacctgttaggggacaacttgacactcaatatgtcaagtctgctggggggcgagtccacgaccatcaactggacagaactgctgggtgacaatttaacgttcaatatgtcaagccttctgggcgaagactttaacctgaatatgacatccctgctgggtgaagatttcaagcttaacctgacaaacatctttggggataatctgacagcaatctttggagaaaacctgaccaacaagctagaggagctcttcggagacgatttcacaattaacatgacagatctctttggcgaagacttagctcttaatatgtcagacatcttcggcgacgattccatcttcaatctttccaatattctgggcgagagcacaaccatcaattggaccgatctccttggagaagggtctacgcttaacatatcaaaaatcctcggcgagagcctgacactgaatttgactgacctctttggagagtcctccaccctcaattggacagaactattgggtggcgagagcctgacactgaactggacggagctcctgggcggagacagcttcaccatcaactggaccgatctgctgggaaactcgacaaccatcaactggacagacctcctcggccgcgacagcttgaccgtgaactggacagacctcctcgggggagacagcttcaccatcaactggaccgacctcctgggaggggaaaccctcactatcaactggaccaaaatcctgggaaacgatacttcattgattgataacatcacttccttaattgatgatatcagtcccttcgttgataaccttaccactgccgtgaaagatctgattaacaagttcctgaaagaggaaaagactgtgagtgtgatcaactatgaagatatgaccaccactgccttcgactctaaaattgatggcagaatcgggaagtacttcgtagtaaagctgaccgatgacaagggcaaggccctgtccgacaagtttgtgcagatcggcttcaatgggaggatctacaaccgaaccagtgatgagaacggtacggtcaaattgcagataaacctgggctataagggggattacacctttgctatttgcttcctcggtgatgagaaaaccaacggatcatttgcagttgccaaaattactgtcaagaagcagaaggcgaagctgaccggtactgccgctagctacaaagcctccgctaagaacaaatacatctccgctacctttaagacgactgcaggctccccaatcgccggtaagaagataacctttaccatcaataagaaaacttacactgctaagaccgatgcaaagggggttgccaaagtgaaggtaagcattaccaataagggcacttatgctttcactgccaaatacgccggcgacgatacttatgccactattacctccgccagtaaaaagcttactataaaatga

SEQ ID NO: 2222 - DNA, 960 bp, synthetic construct
  source 1..960: mol_type = other DNA
ctgtacttcaagtgcaaactgaaggagtgtaatattatttttggccataataatgtgatttcaataaaagactttgaaaaggaggacatcaagttcatcctagatgaggctgagaagcttgaggacatcgctcaatcgaaagagaaatccgaagagctctctggaaagatcctcgggctcctgttctacgaacctagcacgcggacccgcttgtcctttgagaccgccatgaaacgcctgggcggggactgcatctcccttggagaaacttcaaacagcagtgtagccaagggagagagcattgcggacactgctaagatgtttgagagctactgcgatgccatcgttatacggcacgacctggaaggtgtgagccgattcttatctgatgtgatcgacgtgccaatcatcaatgcaggggacggtgcaggccagcatcccacccagaccctcttggacctgtacacgatccggaagcacttcggcaagatcgatggcctgaacatagccctgctgggagacttaaaatacggccgtaccgtccacagtcttagttatgctttggggatgtatgatgttaaaatgacattcgtgtcccccgaggagctaaagatgcctaaggaaaacctcctcgaccttgaaaagaacaacataaaatataaggaaacaagcaacctgaaagacatcatcgatgagattgatgtgctgtatgtcactaggattcagaaggaaagatttccggatattgaagagtatgaaaagatcaaaggggcgtatctgatcaacaaagacctgctcgagggcaaggagctgattgtcatgcacccattgccccgcgtagatgagatagactacgatgtggacaatacaaaatacaacaagtacttcgaacaggccgccaacgcaattccagtcagaatggccatcctgaagaatctcattaggcacaggtacgagtga

SEQ ID NO: 2223 - DNA, 504 bp, synthetic construct
  source 1..504: mol_type = other DNA
atgaagaccgccattatttatgcaagcaagaccggaacgactaagaagattgcaaaggccctggtggacaagatcgacggggaagtcctaaccataccaatcgcgcgagccaaaagcgcctgtctgctcaaatacgacttcgttatcatcgcaggctcgatccactacggccgcattcaaggggagataaaatccttcgtaaataaaaactataaaacattgcagggaatcaattacggcctttatatcacgtgcacaaaccagggcaaggctgaggaatacctgaacaagagcttctcagaggagatcgtgaaaagcgcctttgtgactgcctgcttcggggctgaaattaaccccaataagggtgacatgattaccaaacggatcataaactccaacctgaagaggtttaaaaaggagaacaaggagccgcctagtattgattgggagctcgtcgatgaatttgcggataaaatcaataaaagaacaatcaagaagaagtga

SEQ ID NO: 2224 - DNA, 807 bp, synthetic construct
  source 1..807: mol_type = other DNA
atgaagtttctgcgcttcaaaaagaagatcaatgagttgggcaaggacaattcaatcaaaataggattctacgatggggaaaagatcatcgagctcaaaggagacatactcgactattttaactctaatcttgatgagatcaaggaaaatatgattgagagctattcgctcgaagacatcgaaatagaggcccccgtgaatccctccaaaatcatctgcattggcctaaactacaaagaccacgccaaagagctgaatttagagcttccaaagaagcctgtgattttcatcaagcccaatagcgccctgaacagtacagagaagaacatcatcttcccgaacattagcaagcaagtggattatgaaggggaattggcggttgtcattggaaaggccacgaaaaaggtatctaaagaagaggctgatgattacattttcggctacaccatcataaacgatgtcaccgcacgggacttcaccctgggggacggccagtggaccaggggaaaaagctgtgacgggtttgcccccatcgggccttttattgagacagacctggacccactgaaccagagaatcgtgacaaaggttaacggcgagattaagcagaatagtaacacttccatgatgatcttctccccgcaggagataattgagtttatctcacagacgactaccctcaaccccggcgatatcattgcaaccggcacacctccaggagtgggtccaatggacgctggttccactgtggaagtcagcattgaggagataggcatcctgaagaactacctgatcaaagaagaatga

SEQ ID NO: 2225 - DNA, 1452 bp, synthetic construct
  source 1..1452: mol_type = other DNA
atgaaccaaaatgcccagtggaacagtatcataacttttatactggctatgattggcctgaccataggcatagggaacatttggcggttcagctacgtactctacagcaatggtggaggatcattcttcatcccctatttcattgcaattatggtgatgggcatcccgttcctgattctggagtacggactgggctttagcctcaagaagtcgtttagcaagctgatgcatgacatacgcccggaatttgaggtaattgcttggatgctcgtcatcttcgtcttcatcgttgtcatttactacatggtgatcataggctgggattttgtgtacttcctaaacagctttagcttcggttggggaagcgaccccaactcgttcttcatgacgtacgtggggggcactcgggagatctcccagatcggccgacttctgctgcctacactgatctgcaccacagtcctgtggatcatcttttggttcgtttccaacagggatgtggatgaaggaatcggcaagatctccaccattctcatgcccctgctattcattataatgatctttatcttcctgtactcattcaccctgccaggctttgacattggaatcaagacattgctgaagccaaattggtctctgcttttagacattcacatctggcttgcagccttcggacaaacaatcttcaccttaagcatcggccaggcgatggtctacacctatgcaagctatttgcctaggaatagtaaattggtcgatgaagtccttcttgtggttatcacaaacaccctctatgaggtgttcatcgccatcggggtcttctccatccttggatatatgtccctcaagtcatcgatccccatcgaaaaactaatcagtgaaggaacgggcctgatctttgttgtattcccaaagatatttagtgagatggggtttgtagggcagatcatcgggccactcctctttctgtcaattctatttgcgggttttacgtccgccttggccttgtttgagcctttcctcagctccctgtgtgataagtttaacctcagtagacgcaaaggggttacaatccttgtaattgtggctgtgatttgctccatccctttctcaaccggtattagcagctatttggtggggatcgttgacaagtttgtcaacgacttcggaatactgattttgattggtgtgcaggccattatattcggctggttctacggggtggagaaggtcatgcccgtgctcaatgagctgtctactttcaaggtgggcaaatcctgggtgtttaccattaaatatctcctgcccgtgctgattatcatcatttgggtcaatggggtggtgggcctgttcagtaataccaacagctttgaactgatcgtcgacctgattatcacttttgtggtggtgggcttctctgtgctcttcactaaattaggtgtgaaagagtga

SEQ ID NO: 2226 - DNA, 750 bp, synthetic construct
  source 1..750: mol_type = other DNA
atgatcttctactatacaggcactggaaacagcaagtacgtcgcagagacgattgctaagagtaacgaagaagagattatctcaatccccgactgcatcagggaaaacaaattcaccttcgacgtgaaggaggatgagatcatcgggtttgtgtgcccaatctattccctaggcatacccgattccgttcgaatattcctgaagaaactccgccttaactataataagaagccatacatcttcctggtagccacctatggaagtactgttgggaacattaagagcattgtgtcgaagtactttaaaaagatcgatggcttcttcaatgtcaagatggtcgacaactgggtgccgaaatttgatttgacagaccaaaactacatcaaacaggcggaggaatatggagagaaaagattagaggaggtgaacaacctgatactcctgagaaagaccgggaaatacctggaaaatgaaaataaaatattcagcggtttcatttacaaggtgggttatgacttcatccggaatacaagcaattttaagctggatgacaactgtattggctgcgggatttgccggaacaattgtcccaccaatacgatcaaaatcgagaacaagcggcctgtctggaagcgtaaaaagtgcgacatgtgctttgcctgtctccaccgctgtccacagtttgccattcactacggaaagaggtccatcgagcatggccagtaccttaatcctaacgtgaaactgtga

SEQ ID NO: 2227 - DNA, 864 bp, synthetic construct
  source 1..864: mol_type = other DNA
atgaaaatcaaaatcgccgtcccttccaaagggaggataagtgagccctccataaagatactagaaaaggctggcctcggcctgaaggacagtacgaaccggaaactgttctcatcgacttacaatgagaatatcgacgtgatgttcgcccgggcggcagacattccagagtttgtagacgaaggaatttgcgatatggggatcagtggctatgacctgattgaagaggcaggggccgacgttaaaatcctgaccgacctccagttcggtgctacaaagctggtgctggccagccccgaaaactccgagataaacacaaaagatgatttgaaggatggaatgaccatcgctacggagtttccaaacttaacgcgaaaataccttgaggagaacaatctgaacatcaagatcgtaaagctcacaggctctactgaaatcgccccattcattggcatagcagacgccatcacagaccttaccagcaccggaactacactcaatatgaatcacctaaagatcgtggatgtcatccttgaaagcagcattaagttgatcgctaacaaaaattcatacaccgagaaaaataacctcgtcgaagcggtgagcaccagcattcagggtgtgctggaggcggagcgcaagaagctggtgatgatgaacgtcgcaaaggaaaacctgtgtgaggtgcagaaggtcatgccggccatgagcggacccactatctctcaggtgttgtccgaagaggagaccatggccgtacaagccgtggtgggggaggatgaagtctttgacctcgttaacaagctgagaaatgctggcgcccgcgatatcctggtggttcctattgagaggattattcagtga

SEQ ID NO: 2228 - DNA, 204 bp, synthetic construct
  source 1..204: mol_type = other DNA
atgagcattcccgtagccccaattggccggatcatcaaagacgctggggccgaacgcgtgagcgaggacgctaaaaaggaactgaacgcatacgtgacagcccaggccgaggccgtggcgaagaaggcaatcgagttcgccgctatggcgaagaggaaaaccgtcaaagccgaagatatagagctcgcaatcaagaatctgtga

SEQ ID NO: 2229 - DNA, 1020 bp, synthetic construct
  source 1..1020: mol_type = other DNA
atgggacgaagaaaaaaacaggattcgacactggatagttattttccagactctgatttgatcgaggagaaaaagaagaaggatgaagcatgcaagatctgtgggaatcctatagaggacgccacctttcagcggtgtcgcaagtgccttaacaagctggcactgatagacgacctgagggaactactggaatacgtgtctccaggtgagagcttcagggaaattgacctaatcaataaaggctttaaaagcttgaagctcaacatcctcatctctaaattcttaaaagagcagctcatcctgattaacctcgacggtttatttactctgaacaatatcgactttctgaacgccttcatcaaaaaatatggcgagaaggaaaagcccctgaaggagacagattacctcatagtgcgcgatgacaagtctgccttttacatcgatgtcaacaactattcagattacataaagatccggttcaatccccggatcaacaagtggcaggtggacttcttcaatgagaacggcctcgccaataccaagtccttcattgactccaacgatgcaaataaggaagccatctattacattaagcagctgggtgtgatcggatcatcagctgacgataagaaagaggaaaagtccgacaaacggctttacagttcccatgagggcatctactacagcccgagccgtgggatgtggggagctaaagtcaagggatataagggatttaagttcattgggcacttcagtagcgaagaggaggcctatgaggcgagatgcaagtatctggaaaataaggaacgaacgcgccaaaagtacatctccgagaagagagggttgaaatccggcctgaggaaccagagctcgggggagctgatttacttcagcaaacagaagggcaaatggattgtgaggcttaaaaacaaggaaggccaaattgttaacgtaggccagtttgacaccgaagaggaggcgaataaagctaaagaggagttcattaaggacaacagttga

SEQ ID NO: 2230 - DNA, 321 bp, synthetic construct
  source 1..321: mol_type = other DNA
atgagtgaactcaagctggatctggtgttcgatgactaccagatcaaacgcgccaagcccgcaagggggtcatctgttatccatgtgaacaagagatggataggaaaggaagtgagcatcattccgctgccatttgacgtggatgaaaagttcattgacgaaaccaaaggggaggacggtctctaccaccttgagttggctgtcaaggagatcttttccaaaacagtcagcgatcggaaagacgtaggcttcttttacctaaaggagtccctgctgggcttattcttcctcattatagaggcccctgacatcgtgtattga

SEQ ID NO: 2231 - DNA, 1464 bp, synthetic construct
  source 1..1464: mol_type = other DNA
atgtacgagaaggaagacatcctgatcgactacatcaataatgagattaacactgtgcccttcagcctcaatgataaacttaaaattagaaacgagaagtttcggtgtcgggaggagttctatgagataaaaaactacgtggacgatttcctcgagggaaactataccaatcgctacatagtgcttcctggactaagggggctcggcaaaacaaccatcatctaccagctgtatcagtacctgttgcgcgagaaggaaatcaaccacaatcagatcctttatatctcctgcgacgacctgaatgactatatggacatcaatattttagacgtcgtgaactgcttcctgaagcttcaccacaattctaacttaagaacgctggataagaagatcttcattttcattgacgagtcacagtatgactcgaattgggccggggctggtaagagaatttacgacaagacgaataacgtgtttctcatattcacggggtcaagtgccctgaatctggaatataacgctgactccgcacggcgcctgctgaaaaaaagcatcacaccattgaactacgggcactttctgaaactcaagtacggcttccactatgacgaatttagcgatgcactcagtgacctgatcttcttgggcgatgagaagaaagccattcagtgcgaaagggaagtttactcgaaactgtataatttggagggctacaacgataatgtctgggacgatttcttaagaaatggaggattccccatctccttctacgagaagaacgatgacaacgtgtctcaacgcctgcgagaggtagtgaagaaagtcttgataagcgatatcgctaacatctccaccatttcaagtgaaaagtacattaacagcatcaggctactgaatttcctcgcggtgcaaaagccaggggacattagccagaacaagctggcaaactttctgaacgtctctccgaccaccgtgaagggtataatagaccttctggagaagacacatctcatctttcatacagagccctatggctctgccgccaaacgatctaaaaagtcatggaagtacttttttgcgagttcatccctcaaacatgccctggttaaggatctcgggagttccatgcgggatgtaaaaagctacgaaggcatcctgctggagaatcttgtcgcatccactttctttaactggacaaaccggaaaaacatttccttcaacctattttacgatgccaacgacgatgagaaaaacaagactaccgtggactttatcattaaggaaggcttcaacaagccaatccctatagaagtcggtattggaaaaaaaggcgataagcagatctccaagtcgattagtgactacagggctgattacggcattgttatcagcaataagaccaagttcatcgaacgacagggaaacgtgatctatctgcctccccgtagcttcagctttttgtga

SEQ ID NO: 2232 - DNA, 3846 bp, synthetic construct
  source 1..3846: mol_type = other DNA
atgaaactctacaaaaatagcatcatcatcttgttgttaattttgattctgtcgattggagcggcggcagctgtcgagaacgattactcgaatgccgatctggatatttctaacgattttgtgttgagtgataactccaacgaaattttaatcgacagctcgggctctttagatgactcctcgagtgccctggtgtcagaggggtcgtctaacggattggactcatattactccaatgatctggttctgaatgattccctgtcttccagaagttctgtgattgaggactcttgttctattgacagcacgacaattgaagataaggccttggaaaaaagcctgtcttcaaatgagctggctgaaggcacaaagacatatacagacctgctcaaggacatcaagagtgcgaagaatgtgctcaacctgaaatacgactacatctacgacagcactattgacaaaagtcttaaaaaaggtatcgtgttaaccttcgacgaggactatgagctgaccatcaacggcaacggccatatcatagatggcaatgggatcgctggtggattcaacttcgaaaacggggaatttgtcataaataacctgagctttcagaactgtaagatctcctctctcatcctcacgagctgtgatttcactaccaattatgtcactttctcaaacaactacgacaagagctctggggcctgcgtttatctggacaactcttacttctacagcagtcatgataattttattgacaactatgcgccatcaggcagcgccatctacggcgagtgcagtgtgatagacgtgtacgatggcctgtttgagtctcaaaaaccgattgactggtcctttatctatggctgggatgagacggagatctacatcgaggactgtctcttccgaaacaccgtatccaactactcaacggcagtctacggcgattatatcattgaaatctccaacagtcactttactaatctcttctccaaattcaccggaggcgccatcggagtaaggaatgctagcctgaccgttgagaaatccgagtttaacaacgtctcctcgcttagaaacggcggagtcatttacgcagacatgaatgtggatgaggaaaaatccagcgaggagacaatcattaaggactctagcttcgtaaattccaagtccgacttcgggggggctgttttgcagctgggcgggaaactcaagatatacagatcaaattttaccgagaatactgccaactactatggtggtgccatttatacttccaacgtcagcttttacaccagtaaaagcaaattcagtaataatgtagccaacgagatgaaaggctccgcaatctattttgacaatggagacctgaaaatcgaaaactctaacgtcctgagcaacccctcctgcgagggggccatttatatttacgatagcttttataatataagtggcagtacgttctcaaacaacgatgtggcaatacattcattcttcgaccgcacacggacggtaaaaaactccaaaacaggtaaaagcaccaccgtgaagtcctcgctaaataacaatacgtggggcggcgatcgcaataagttaaacaacgtggaatatccctattttgtgtccaaccttgggcaggacattatcctcaatccagtgaaaattaatgccaccatcaaggacaaatactttaatctggttgacctgggattggtgacccccgtgaaggaccagggggacagcggcgcctgctgggctttcgggggggcagcggcccttgagtcagccatcctgaaggcaactggagtgagcctggacatctccgaaaacaacatccagtcggccgggctgcggtatagcctgtacggtaagccctccctcaccgagggaggctatgactacaccgccctggcctactacctcagctggctcggtcctaataacagctctatcgatgagtatgaccagttcggtaagatctccccccagctgttctcggaagacaattatcacatcttggatgtgattttcctcgaccccgcaaataccagctcaatcaaggatggactcatcaaatacggggccttgtctgcctcagccaacggtgcagactcagattccaacgactttttcaacgaaaagacctatgcccagtactgcaatgacgatgaggcgtccgccaaccacatcatcagcatcgtgggctgggatgacaactactccaaaaacaacttcctcatcaccccaaagggaaatggggcatggattgtgaagaacagctgggggtctgactgggggaaaaatggctactactatatctcctactatgacgagagtctaaggtcctgctacgctgtggcctacctactgaacaacacgctgcgctacaataagctttatcaatacgacctgactaattacgatgactttgatgacggcgattatgatggggtgatctattccaacaagttcacctcaaatggggatgacctgattgccgctgttgggacctactttgaatatgaggacgacgactatgtcatcagtgtgtatgtaaacggcaaaaaggcctaccagcagaagggcacatctgcatttgtcggatacaacaccattaaactgaacaagtatatcgccgtaaataagggcgaaacatttacagtggccatcagcagttctgccatgccttacgttgatgatacgaggatacacctgcctaagggaagctcattcttaaccgttgacggcgaacagattgacctgagccaacggggccagatagcttgcatcaaggtgtacacctttaacgacacaaagataactcgggaccaaagcacttattacggtagtgataagaagctagcgattgaatctgagcttgaagggaccacaatcagcctcacagattcaaactgtaagagccttggctcggctaaggtcgtcgacggagtggctcagttcgatttggtgctgggcccgggaacgtatttctacacaagttcatacgctggagagaaaataataaatagcttcaaagtcttcagcacaatcggcggagtgtctaacaagaacattggatacaaggctacagccagctttagcctatcctttaaagatgagaatggagagattctcaacaatagtcaattcacttacacactggatggaaagtcaaagacgctgaccaccttggatgacgggacttacaatatctcctttaagaatctcgccatcgggacacacaagctgtctgtcaagaaccttataagcggccaggtgtccaatgccaccatcaaggttgtcagtcgattcagcggcgctaaagacattagcatgttctatttcgatggcacatgctacaaggtgcgtataatgggtaacgatgctaaagctgtgggtaagggccagacagttactgtagttctcaacaaaaagacctacaagctaaagaccgacgcaaacggatatatcagcctgaagatacctaacacactgactccaaatggcgcaaaggccaaggtgtacagtattaaaatgacgtatgctggtcagagcctgtccaagaagataacggtgaaacaggtcctgaagaccaacagtctcactgtcaagaaaaaagcaaagagcttttcaattaaagtcacacttaagggaaaaacagttctgaagtataaggtgctgaccatcaagttcaaaggcaagacctacaaggtcaagaccaacgcgaaagggattgcaactctcacccttaagaaagcggtgatcaatgggcttaaaaagggaggtaagtacaccttcactgtgacctaccttaaggacactattaaggctactgtgagtgtgaaatga

SEQ ID NO: 2233 - DNA, 507 bp, synthetic construct
  source 1..507: mol_type = other DNA
atgaacaagaagctgatcgagtacctaattattgcaacagtaattatcctgatcctgtacgggtgctactcgctcattgattatcaatccaacggctatcagttccggatggtgaatgctacggactccatgaacatatcttgtcccagcagtagcgcctacagcgtcagtggcgacacagtggagttccgcaacggacttaactcattctacaatatggacgtgagcaagctcaactcttcagacggtaaagtcaaaaacatactgaatcagtattctaagttccacaagtccgggactttagatcttaaaaatgagacctgctatgtgctgaccgtggaattggaggacgataaaggattcaattatcattccatgatcatcagcgtcgattcatttgacaaggacagcctgtcctttaacaaggaagccaccgtttacctctttgatgggaacaatagggaatttgttgtggacactgtctacggcagtcaggtggtaatctga

SEQ ID NO: 2234 - DNA, 939 bp, synthetic construct
  source 1..939: mol_type = other DNA
atgagtccctacgagctgattaaggatgatggtgaagtggttaatctgggcgggtctcccgacgagagtcaggatttcgacgtgtctttagagcgcctaaacgataaatctttagcggattcagacggcgatggaaagcatgacgtattcatcagctatagtaccaaaaacagcgacatcgcaaacgagatatgttaccttcttgaaaagaacgggttggaatgctggattgccccacgaaacatctcaagcggcaaaaactacgtggatgagatcgccgatggcatcaagtcaacgaaaatagtcgtgctggtcttttccaaatattcgcaggaatccaagtacgtgaacaatgaagtgatgatggctttcagctacaacaagcctatcatttcctttaatatcgaccaaacagagcccaatgacattatggggtactatctgaaggtggcccagtggctgccggcataccctaaccccaagagtcagtacgagaccctggtcactgacgctttgaaactctgcaatgagaggccacggacggtcattacaagcctggacggcttcattccagaagacatatccaagcaaaagaaaaattggatatcgctcatcctcctgtttactcctatctactgggcctcctttatctatatgggccttgtgtctaagaaaaagagctggaccctactcgggttcctgtacgcgattcccacagtcatcggactgctgctgtatttccaggtattcacccgcctgttccttatctacccgatattcaggctcttcaatctaatctttatcctgtgctggatcttggccattattcacggattggttatcagaaacgagtttctcacccggtatagcgtgctcggactgatgtcctttgacaaggacctcttcgagtatctgtacggtatgtactataaaatgtga

SEQ ID NO: 2235 - DNA, 876 bp, synthetic construct
  source 1..876: mol_type = other DNA
atgagtcacgacgtgtttatttgctacgatgaggaggacaaagattgcgcagaggccatttgccgtatctttgaagagaataatattaagacgtggatacgcagcagagacgtgagctccaaggacgccgcccgcaacctaacagaggctatacgaaattccaaatgtttcgtactggtctattcaaagaacggaaagaacaccaattatatcattaacgaaacagacatcgccttcagcaaagaaatccccatcatcctctttaagctggatgagaccagcatcccgaaggacttggagttcattttgataagcaaaaagaagatagtggcctacccccatagcaagcggcagctgaagactctggtaaaagagactagcgatatactggacagacccacagatgacatcaagcttgattcgaactcagtcaagaccattgagaggtcgaacccaaaacggaaggaaaacaacatcaagaaagctattggagcagcggctctaatcgcagcggtgttaattctgatctacctgttcgtcatcgtgcctacaggccagaacatcaccgatagcggtgttttctccatggacgtcacccacgttgaagtggacgaactcgccaaaggcaacaagtacacgatctacggcgaatcctataatctcccaagtgacagcgacaggtacttcatgaacctgcaattctttgatgataaggataatgtggtgtacgaggtgaatagcaccgccgacgagtttaaatcaggcattatttggagtggagacattaacaaaggggatatcaagcacatcgggttcaaactcactgacatggacaacaagatcctctcccaggaggattataatcttgggctgtga

SEQ ID NO: 2236 - DNA, 1221 bp, synthetic construct
  source 1..1221: mol_type = other DNA
atggtgaaaatgaagtttaagcggagtctgatactcgccgtgattctgataatcctattttccctagggactgtggctgcgagtgaaaacatcgtgattgatgagtcgagcgactccaacctggtcatagaccatgccaaggacaactacctgttcaatggaccgatcaaagataattacctgagtagcagttctatcagtgataactatctgagcaaaggtgtccttgatgacagctacctgtcccgcagcgatctggacgatagctacctctccatggatgatggcaaaggctcgatcgacctgacgaatcacaaccagctctctaacagcgacgataaacagcttaagacgagcaacctggaggacgaaaaacagcttgaaagtgtaaataaaggagacaagctgttgaaggattcaaacgacaatgtcgacctgtttattaacatggacgtcaagacatcactcaccaacaagcaatataaccgggcaggaagcgaagttccatggatcataactgtctcctcgctcaacgggaccagctacaatacccaagtccgggacgtactgagcgaaaatttgcagtacctgagccataacgccaccatgggcaccttcgatcccgagaatggaatctggactgtgggtgacctcgagtcgtctaaaaatgctagcctgacaatattgacacgcctgaagagagatgggacatacatcaacaaggcttacgcgactaccgactccaacgacgttaatctattgaacaacttcctcatcatttccatcaggaccggttcatcaaagatcacgtcaaacattaccgagacaagtgatgaaagggagggcatccagcacaacgttcactacgctagtatggtggatacggacttcatttacagatacgaggaggactcctcagaggacgatggcggcaatgaggaaggccagagcgagggcaattcccacaccaagactcgttctttaggaaacaaactgaaacttttcaacgcccagaatatcgactatcactctctgtccaagaacatcgggggtgcattggggtttgggtataactcaaatggagggttcctcaattccaaggacatttatgaggcccttttcgtgtatgactacacacgaatccctattatcgtatttgccgccttcctcgtggtgttagcaagcattgtgggctatgataaggtgaaaagctccaagtga

SEQ ID NO: 2237 - DNA, 6015 bp, synthetic construct
  source 1..6015: mol_type = other DNA
atgaggattatgatcaataaaaaactgtttttcgtgttcctcctgatggtgctcgtgattgggaccatttctgcagtgagtgccaatgaatgcgccaacgacctgacgatggagatcagtgacgacaatatagctattgatagtagtagcgcgctcgaaggggacgatttagccattgacagttcgagctcagatctgagtaacgaaaataatataaactcgatgaatgatagtgtgattaattctaactcgatcaactctgattctatcaactctgattctattaacagcgatagcatcaaccccaatcctaacattgatgatgagatcaataaccacaaagatagctttttaaaggctgtacaggcctctaaaaccggaacatttacagagttgcaaacgaagataaacaaggcaagcaaaggcagtacaatctatctggacaagaattacctctacaatgatgactttaaaggcaaatacggaattgtgataaacaagtctatcacaatcgacgggaaaggccacgtcatcgacggtctgaagaaaagcaacctgattttcatcaacgacgcttcaaacgttgtcttcaagaacatcatctttcggaagggcgacggggacgagaacggagcgataaacctgattggctctgaccatatcgagttcaacaactgcagcttcaattacaactatggtgaccgcggggcggtcttcctgtccggcagcgactactcctcctttgtaaattgcaagtttaacgagaacattggggagaacggcggcgctctgattctggctgatagtgattatagccgcctggtcaactgtatcttctttgggaacgaggcatcggacggaggggccgtatttatcacctacagtgactacagctactttttcaactgcactagcgagggcaacagcgtcgactataccggaggggccttctatctggattattccgataactcctctttcatcgattgcgtatttgacacttccagcgcgaaggatggcggggccttttacctgggcgattgccataactcctctttcattaactgtagctactggaacaaccaagtggactattatggtgcggtgtgttacttggacaattgctatgactcctccttcatttcgtgtaatttcacgggaaattctgggagcaaccctgaactggatgagacaccctccatcggcggtggcgtattttacatcagcgagagccacggcctgtattttacccattgtaacttttccgagaatgaggcaaaaaacgatggcggtgccatatacgctagcgattccgatgtgcacattgactcctcggtattcgaggagaactgcgctctgtgcgggggtgccctttatgcgatgaactctgacattttcatcgactcatcccttttcgagagtagcgtgggagatagggggggttcaatattcgccaataagagcaacgtgtattcgaaaaactcctcgtttatccagtactatgaaatcgaagatgaatatgtctacatcccggcttctggggcctaccaccttatggaaggaaacatcggcggagcaatttactctcttcagtcggtcctgaacatttcgtctaataaattcaacaacaactttggcctcacctccgggggagatatctactcccagtacagcatgatctacatagatgactgcagcttttccaactcattctccaatgggtttggaggctcactgagcttcaacaacgactacgtccagatcacagactccagctttgagaactgcagctcacgagataacggcggaggggggatctactccatcaattccattttgaattgctccgatagtgacttcaccaattgctattcatacttcggcggttcaatctgttccttaaacaccgacctatccattaataacaacaacttctacaaaagcagcgctgaatattacggcggatcaatttatttcctgtacggaacgcttgacattaacggcagcctcttctccaattcatacggtcagtatggaggctccatttatataagaagtccccagacaataaagaacattacaaacaatcagtttctcttttctcaaggcatcagaggccccaggatttacatcgaccagtattacggggaaatctccaacagcggcaacgtgtacaccgatgagtacgaggagaaaggattgtttagcgattacggaatgggaattagctttgaaagcaatgaagggttggtcccactgattcactactaccctagcaacgagtcattgccatccttctacgacccccgaggggggggagactcagaagatgactacgaagacgaggacgacgattccgatatcgccgtgaaagaccagggcatcggaggcaactgttgggcattctcaggaatcgcaaccctcgaggcctgccttgagaaggtgaccggtgaggagtttggcttcagtgagggcaacgctaaaaaccttatggccatcagctccatttacggcctcaacatcgacaccaacaatggagggtatgacacaatgttccttgcctacctcgcaagctggctcggtcccatctatgaggaatacgatacatataacccactctcctccctctccatcgatctccctagtgtcttccacatcctcgacattgacttcctcgcgccccgtaaaaacagcctggacaacgacgagtacaaacgggcgataatgaacaacggagccgtttcagtgaccttcgattgggtggaaaacaaggtgtccaacggcttccacagcgtgtccatcatagggtgggatgatgactacgatgacatcgactccctgggaaactatgcaaagggcgcctggatttttaaaaacagctggggctatgaatggggagatggcgggttcggttacctgtcctataagcagaagctttccgaggagatagcgccctatatgcatgcatacacattctcattcaaggaaaatgacattggatataccgacatttatcaatatgacttttccggactgagcgacttcctgattttaaattccacaaatgcctattataagaacaagttcatagcagaggacaatgaatttctatacgccttttccacatattttgataaggagaccgacttcacctattcagtttccattaatggcaacgtcattacaaaaaccgaggacggcaaagacatactcacttctatccatcactcgccggcgggataccataccattccattaggctataacctgaccttgaaggagggggacgagtttgagataatcatcaaattgctgaatgacaaccagaaccgcatcccggtgtgccaggctgacgaattgtaccggacctcactgccttcaaatgcaagcttcatgagtctgaacggcaaggattggattgacctgagcaatctggcttcctccaatgagttctctagcctcggcatcaaggcaaacacttcacaagtggcttgcataaaggcattcacgtccaactggagaatgaatagtgattccagcatcgtgaactctaagaaccacagcatcatcacctcagaaggaacagagctgagccagtacgaaatctgccagctcaaggtcggctcatttaccagggcctcagccaatgaaactatcattatagccatgagcattccagagtggcgaaattaccaggatgaatatgaaaattacatcgaggtgcacatcaacgacgaattttactatgtcagggtcaacgagggagttgcctatctggatatcagctttgataagattggccactacgacttcaaggcccagttcaagtccaatatctactcatctgatatcgtcgagtttgatttcgaagtagtgaaagactcaatcttcgatgtggacgatctcgatgcctcaaacccaggaactttcaaggagctgcaggacataatcagaaacgctaagaacggttccatcatcagtttggataaggactacgctttctctagtggggacgagtctgtggttgacgattatattgagatcaacaaatctctaattatcgacgggaaaggccatataattgatgggtcttcggactcaggcattttccgactaagttccggtgacaacctgacgctgcggaacattaagtttatgaatgcagacaatggggccatcgtttcgaatgggaacctgacagttagcaattgttacttcatcagtaattgcgctagcggttctagttcgacctctacttccagttctgatagcagttctaccgcttgtggcggtgcaatttactgcgagggcacttgttttatcgtgaatagtctatttgagtctaattctgccgacgccggtggtgctgtttactgtgaaggcacgtgctttatcgtgaacagttactttgactccaattatgccgacctgggtggggctgtgtgttgtgacggcagctgttacatcgtgaatagtctcttcgactccaatttcgcagtttacggaggtgcagcttccatcgttggaaatgagagctgtgagattatcgacagcaactttatcgaaaatgaggccatctatggcggtgccatatacctggaaagctactgttaccttctggactcaagtttcaattacaattacgccaacaatggaggcgccatctactctattgctgaccttgacattcacaccactggcttcaattacaatgaagcctataaggatgggggtgcaatctacctggtgaacagcacctcctatatcaatgagggaaatttcactgaaaacagtgcgaaagagcgcggcggtgccatatgcgccctggaatttagcaatctaacgatcagatgggcttatttcatggataactctgcttcaaaatatgggagtgccatctttagcgtcaatgccctgaacattacagattcggaagtgactgtaagttctggtaaggtggaacttatctgctttgcttacgattacgcgtcaaatggccaggcctacggggatctgtactttgacgaaaacagcttctacatcagtggggcgcctgagatttactacttccgggaaaagatagcccataaattagccttggatcttgagttcaacaacatagagctcatcagagggggaggcgtggagatctcccgcgacttgaatgacgatggctgggaggataaaatcaacaacaatatgcttgagatatgccgtctcgtggacgacgacgattacatgacggtcctccggatgaaggagatcgaagtgattctaataaacaagaacaatcggtctgacattcaaaagtttaagatcccctttaacgtcaagctgaacggctacttcctgaacacgtcatcactaaagtacggctcttatatcctcactggaaatctttcgaaggatctggccagcaattgtattgtcaagaatggaactctgaaagtgctgaggaaaacaaccctctctagcctgtctacgttcactaaagtgtatgggaatagtaagaatctggtagtgaccctgaaggacagtagtgggaaagctatcgttggtgttaatattgctgtgaaattgaacggaaaaacaattaaagcaaagaccaatagtaagggtcagatctccatcgccatcagtctgaagccaaagacatacactgcatacatcagcttcgccggcaatgactattatgcaagcgccagcaagaaggtcaaggtcgtggttaaaaaggccaaccctaaattgaccgcctcgaaaaagacctttaagttacgcaatgctaaaaagtatacagtcacgcttaagaacaacctggggaaggcattgaaaaatgccaaggtcactattaaggtggctggaaagacttataccgctaagaccaatgccaaagggcaggtgacattcaatctgaaactggccaaaatcggcaagttcaaggcagtggttagcttcgccgggaataagctctataacggcctcaagaaggcggtggttttaactgtgaaaaagtga

SEQ ID NO: 2238 - DNA, 558 bp, synthetic construct
  source 1..558: mol_type = other DNA
atggaatatgagaatatcctggacttgaagagctcagaggagttcagggagtggatgatcaaaaaccactcctcgcaacgcgaatgctgggtgaactgcaaacggggaaaggccgataaggacgagctgtcctatgtcgatgcggcctacgtggcattgagtttcggttggatcgactccacctacgggctgatcgacggaaagagaatgcagcggttcagtccgcggcgcaaaaacagcaactggagccagctcaataaggaaagatgtcgatggctaatcagaaatggcctcatgaccgacagcggctacgaaagccttcccgacctggaggaagatttcattatcgactcagacattttagatgaactgaagaaggataatgagacgtggaataactttaagaactttccagacctgtacaaacgaatacgcatcgcaaatattcagaaagagaaagatagggaggccttcgataaaaagctcgctaactttattaaggacacaaaggacaacaagatgaaagggaactggaacgacgatggcaggctgatatga

SEQ ID NO: 2239 - DNA, 255 bp, synthetic construct
  source 1..255: mol_type = other DNA
atggcaaatgagatcattctgaatatagacggcaatgagcatcagattaaatacgacaacatggaagtggaccacgtcagtatcatcgaccttgagaaactggggcggtccctcattctcgaactggagatagatggaaaggtggacaggaacagcctggatgatgctatcaacagctttttggataccatctacgatgacattaagtatttcgccgtagagtacgccgacgacaacgaaatcgaactaatctga

SEQ ID NO: 2240 - DNA, 468 bp, synthetic construct
  source 1..468: mol_type = other DNA
atgagaaaccccaaagactacattatgaaaaccgattatctcattatccttatggccttactgctgatctctatcgtctcaccaatagccgctgcagacagcttcgactttgatatcccagaaggctatcatatcgagaacgcgagcgatgacttcgtactcctcgagaacgaggactactacagcatttccatctccattatggacaattccacagaccggaagacgctgatggacatgctggaaaggcaccgatgctacgactttcgcaacggtgtcaactataccaaaggggatttctatatagaggaaaagccgtactatcaggagttccagatgggaatcttgtacttttgtgaaaatggacgggacctggtggtgattgattacaaggggcccctgggcatggacctaaacaatagtcctatagatggcatcttggattcgttcaagtgggtgagttactga

SEQ ID NO: 2241 - DNA, 759 bp, synthetic construct
  source 1..759: mol_type = other DNA
atgggccaggacggtttcaagaacgaagatttaatgctggaagctctgaacaacaaaaaattcatggatttgaacgataacctcaagcagatgattctggacatgtacggggaggaaattagccaggacttcatcataaaggcctataagaaaggaggcgtaaacaaaactgacttgaccatcgacatcaatagccaaaattttaacgtcagtataaagaagggaaccggaaacagtgtccaccaggaaaaactagaggagttcgtttcctttctcaaggaggaatatgggatcagcaatgtgctctcagatgacataaggttctttatctggggggatggcaccctcgatgggacgggtgaggtttcagatcggcttagcgcctccgagtttcgcaagcagttcccggagaaaatcagaaatattcgtgagttcttctacactgtgaagcgggacctgatagagcggtttgtcatcaaaggacccaaaagcaagtctaggcctgactttatctattacggcacaccagataagggtatcatcgtggaatcccagtccgtgatcgactggctgtcggatgacaaaaacgaaaagagcagctccccaattcccatcggcagactgacattccaagcatggaaccgaaatattaatggcggagacaaatctgagaataagcgcggggtgattcagcttaaatggagttcagtgggcaaggacctggtgaagatttacaaggagaagaaggacgacaaatga

SEQ ID NO: 2242 - DNA, 582 bp, synthetic construct
  source 1..582: mol_type = other DNA
atgacaaaccgaggaaccgcagaggggacagaagaggagatttccttcgttaagctcctgaacaagaaggaggacctgagctactgggatgtactgaacctggaccataattgtcacttcgctatccacgtgttatatcagaaattcagtaaaataagtaataagaaagtttaccccaaggccgatgtgtacattgccaagggtaacgtgccgtacagctatttggaagataatgacttctacctaagcgaggataataccgaagacttcgacctggaaccaatcaagtacactggcatttcagtcaagcttcagaacagctcccggtaccaaatcaccaagatgggccctaataccttcaaggacatttttgggtgctatgaattgggggccggagcgtctatctactgccgcgacgtggatgacctcgagaaaaacccccaggtcctgactggctggaacacgaactttgaggacttcataaagtattttaaatcttttgatgtcgtgtccagctcagatctcgacatctcgtcctataagaaacttaaagtgtttctcatcaagagactgaggaaatga

SEQ ID NO: 2243 - DNA, 1020 bp, synthetic construct
  source 1..1020: mol_type = other DNA
atggtgagtaagaagagggcaatgcagtacaccctcgaagattttaaagagaaaaaccttgacgagaccgaagaaaacgataaggatttcacattcatcgatctgttctcaggtatcggggggttcagattggccttcgagagcgtagggggcaaatgtgtcttttcctccgacatcgacaaatgggccaatgaaacttattacatgaactttggcgaatacccccacggagacatcagcgagatccctgcaaatcagattcctgaccatgacattctatgcgccggatttccatgccagccattcagcataggaggctatcgcaaggggttttgcgatacccgggggactctcttcttcgaaatcgaacggattcttaaagccaaaaagccccagatgttcctactggaaaacgtgaaaggcctgacaaaccacgacaagggaaagacctttaaagtcatcaaggagtccttatggaatctgggatactcgatcttttaccaggtgctgaactccaaggactacggcgtcccccaaaaccgagagcgcatattcatagttgggtttaaagacaatgtgaacaccttcaagttccctctcccttttgagaacaaggccaatattaatgacctgttggagaaaaatgtgaaggatcatgagctgagtggaatcgcttcagaccacctcaagaagcactacgaggagtttctgaagaataaaaaggtgaacaagaattaccccatcttcgctacagagattcggccgagcagatgttctattaggaacgatggcaattctccctgtctgacggcgaaaatgggtaccggtggcaacaacgtcccggtcctggtaaacgagaacaggaagctcacggttcgtgagtgcctccgccttcaaggcttcccagagaattacaaaattaaagataactattctcagagctataagcagatcggcaacagtgtgacagtgccagtggttactttgatagcgaaggaaatgatcaagtatctgaattga

SEQ ID NO: 2244 - DNA, 1029 bp, synthetic construct
  source 1..1029: mol_type = other DNA
atggagaagccaacagtgatcgacctattctgcggcatcggcggattcagtaaagggtttgagatggccgggttcgatgtgctcttcggcattgacatttgggacatcgcaatagaaaccttccagcataaccataagaacaccgagggcatactggcagacctgacagaactcgacgacgacttttttaaacagtacacaaacaaagttgatgtaatcatagctgggcccccgtgccagggattctcaatgtgtggaaagcgagaggtcggcgataaaaggaatgaactgttccaggaggtggtgagagccgtgaagattattaatcctaaaattgtgatcatcgaaaatgtcgtaggcctgctgtcgatggagaacgtggatggggaggacgtgaagggccttatcgtctctgaatttgaaaaactgggctacgagactaactataagatcctcgatgcctccgagcacggagtcccccagaaacgcaagagggtcattttcattgggagccgtatcggtgatgtggaatttcccaagccaaaggacaaaaaggtctccgtgatggaagcattaggcaacattcctgacaccaattttgagtattacgatgagcccacgaatagctttcaggagctcatggccgatggtgagaagaagatctacaaccatgacgctatgaagcacaatgagaaggtgctgaaacggatcgagaacgttcctcaaggagggaattggcaggacatccccccagaaatctatgacgtggggggaacccacagcaacaactacaggcggttggacccaaataaaccgagcataactatcaaacacgccatcaagtcaatgataattcacccaaccttcaatcgcgtaattacggcgagagaagccgcgcggttgcagtccatccccgatagtttcataatcaaaggtaacaagactgcccagcaccagcaactcgctaacgctgttcctcctctgcttggttacgagattggcaagcaaatcatcaagaagctgaactga

SEQ ID NO: 2245 - DNA, 174 bp, synthetic construct
  source 1..174: mol_type = other DNA
atgaagcggatacaagtcaacttcaccaaggaacagtacgagctcctgcagaagcttaaaggggagctcggcaactccgactcagaggtgattaagaatatcacgatggcctggctaagcgagaaaagtctgatcagcacaaccctgaaggaaaaaatctttaacaattattga

SEQ ID NO: 2246 - DNA, 753 bp, synthetic construct
  source 1..753: mol_type = other DNA
ctgaacgagatcatcaagaccacactgatcctacttctcaagcaggagatccgaaaagaacagaggcggggcattaagaacatccttttatacttccgtgatgtggatacgctggatacaaactccatcaattggaaaatccgctatgacaggaacaatcagaactatcagatgattgtcggcatctgctacctgacgctgaaaggactcctccagtcggacagtaagggtgaaaagaagctgatgagctttttggacaatcaaaggatgaaccgcctctacgagaaattcattctgaactattataagcgggagcatcccgacatcaaggcgtcctcccctaagatagaatggcaattggacgatgattttggcgagatgctgccgcgcatgcagacagatatcactctggagcacaaaaataagatcctaatcattgacgccaagtattactcaagcaccactcagacctactacgacaaaaagaccatccactcacacaatctctaccagattttcacctatgtgaaaaacaaggaagttgaagtggctaatgaggcaaacggggtggaacttgacaacaaggtctctgggatgctgctctacgccagaacaagagagaaaatatacccagacaatgactacctgatgagtggaaatcggataagcgtgaaaaccctcgatctgaaccaggatttcactctgattaagaaacaattagacagcattatagaggtatatttgaaggcctga

SEQ ID NO: 2247 - DNA, 471 bp, synthetic construct
  source 1..471: mol_type = other DNA
atgaataataaaaagatctttgtggccggactggccatattggccattgtgctaatgggaagtgtcgcggccgtcgatatgggcatcctgtccgggtcgcccaccaaattcagcatcgacggcatcgacttcaatattccacagggatatgcagttactgacaactacacacgcgtgaacgacaccgacacggctggcagctccagctaccgggtgacccaggcgacctttgaaaacaacgtacatgatgccatctcagtcctcgtggctgattacgaccacgacatgagtgaggatatcatctctcagaggggcaataagacaactataaacggtgtggacggctatatgcaaacccagggggactacacgacattcaactatcttgtcgatgggaacctggtgacaatcactctcacgaacgcagatctgctggaggacattattgttggtaatcagaccgatgactga

SEQ ID NO: 2248 - DNA, 4416 bp, synthetic construct
  source 1..4416: mol_type = other DNA
atgtccgaagatatcggaatcaatgacaacaacggtgcgttgatagccgacgtgaactttgcggatgacaataataacgctctgaaggcggaatccaactctgctagtcagaatgacgcgtccatagacgaatctgctaaccccactcaggatcttgtagacaccgataacgggctgaaccagtccatcactaagagccccctaaagtccaacactggcctcaccgtgacaaaaaccattgataacagctctaaccatatgcctgtagacggattttacgacatcggagacacgatctactacaccatcaacataaccaacaatctcgaggaaagcataggcaatatcagtgtggttgaaaacttccccgacgggttgatttgggagtatatctggtttgctgacgacaatcccaactggaagaatgagagcaatgtgttcaactatacaaaagcacttgagccggagcacagcatcctgctcaagatacggatgaccggaaataaaacaggcacttacattaacaccatcaacgtgagctccaacctcaccagctctcaggagttcctgtccgaagaggtgactgtgtacgctccaaacttaacaatcacaaaggtggccaatgacccaatcgttaccattggcgagatcgcaaactttaccatcaacgtgaccaataacggcaacaggccgctgagtaatttgcggatctatgaagaccctgaagagtccttattcctcaacgagttcaccaacataagtggaaattgggactcttttgcaaatcggggtggagactacggttttagcttggaccagctggatattggtgaatctgcggctattattgtgtcgtttctgacaaccgaaatcggaaacttcaccaataacgtctatagcaactacccgaacccccaagtggaggcaaatgccactgtcacagttgttccccgcatcgaaaagacggtcaatgccaccgagattgatatgggggagtctgttgaatacaacgtttacatcgacatgacaggcgccaacaaactgggcattgacgactttaagatcaaggtcaccgacatcttaaacgaatacttcgatttggataaggacagcatctcctcaaattggaaatataacagagatgagaaggcctttgagtacatgctcagcgacattccagagtcattcgagtttaactttgctgtctatatcaccgaacgaggaaattacaccaacacagtttcccttaaaattggtgacctgcctgaggtctccgctgagtctgatgtcactcacgtccgcatcagtgatgccaacatcgcagaaacggccctagattcaacagtcaatctgcaggaacaggcggtgttcattgtgaacatcaccaacacgggggataagacatttaatccttatgagctcgttgtgaacgacgactacgacgaggatgctctcacgtacctcagtcacgaagatatcacaggcaaatggatagagaatatcgaaaccgattccctttcatttaccttgaatagcaccctggaggtgggcgagtcggcaagctttaagctttacttcaataccagcaaggtagggtcttattccaattatgtctacatcaacattaatgataaagaggacgattcaattgtcattgtacttgccctcatgaacaaatcagtcaattcaagggagattgatgcaggggactctgttgagtataatatcttcattaatctgagcggatatcagggcccggtgaaggttgaggacctgttcaatgatacatttgccttggataaggacacgatctccgagaattggcattacgacgaaacagagaacgctttcatcttcgatctgagcgacaatcctgacaccctgaacctgagcttcaatgtgacaatcaatgaaaaaggcaattacaccaaccttgccaagctgatcctgtcttcagattaccctgaaatcacagctgaagctcccgaggtctgtgtctacaagccggatatgacagtgacaaaaaccgtcaacgacactgaaatatatatcggcgacactgtaaagtacactgtcacgatagacaacactggagatagaactctgaccaacatcattgtcaaagacgaactggaccctgcatttatcctggacgaatccagcatcactgaaggctggacttacaacaaggacaactcttcattcacttacaacaacaacattagcgtgggggaaagcgccatcctggaatttatcgttgagattagcaaagagggcaagtacaccaacattgtgaatgtcagcagtcccggggttgctaacaaagaagctaggtcggaggagaccgtggccaaaaccattccgaccaatatctgcctcgaaaacgtgaccgccgatcccgacagttttgtgcgtataattatcaacatcacggccgacaaaggcctgattaatggcaccgtgaacattacgttccctgacgggacaaatgaagctgtggagatcacaaacggaatcggggagacagtctggtatgtgcccgataattatgcttcaggcaactacagtgtcttcgcctactatgagggcaatgggacctacctggagtctgagggccagggaaacatcgaggtgatcccttactacactgagataagcctatcgaacgtgacggcgtatccagacagtgatgtggagattgaaatcaacataacggcaggagatgccaagctgataaacgggacggtgacggtcagcttcccagacggcaccaacaaaaccgccgagatcatcaacggtaccgggaacgtgaactggactgtacccgatgattataagggcaactactccataagcgccagttatcccgggggtggcaactatctggactcaaatgccaccgccaatattgaagtcatagcaaagatcagtactcagatcaccgcagacattcccaatgcctatccgggggaggagattgacatctctgtgaatgtcacagcagacaacgacgtgccattcaatggcaacattaccgtgaaccttcctgatggctcgaaagagactgtggagattaaggacggcaagggaaacattgcctggactgtgccagacaacttggacgtaggagattataatctcaccctcacgttcgatggagataataattacctgccttcaaacgccaccagcaccctcacagttgagaagataaaactgctcatcatcattgataacattaccgcccacccaaaagaggatgtgaccatttcggttaacgtggccattgacgacggtagtgagtcggataactcaactaagggttcgttatctgataacaacctaaacaagggtgccctcagcgataacaatctcaacaagggtgtgctgtccaataatgataacaaggccctgctgaaggcctacatcagctcagcgaagggcatcctgtccagcaaccatcttaatgatggggacaatttcaacggctatgtcaatattaccttacccgacaattccaccgttgaagtgcaagtcaaggatggaaaagctgctctcaattggacggtgcccgaggggtacgaaggtgagtatccaataaaagtcactttcaacggcaacggcaaatacctatctgccagcgagacagggtacattacaatcgagaagatccctacgtccatcgacctggaaaacatcgggaccaagccaaaccgcgagatcataattcccatcacaatcaagacggacgatgacgttcctttcaatggaaaagtaagtgtggagctgcctgacggcaccattcaaacagcagagatcacagagggcattggcaacacaacctggactgttccagacgattacaatggggaatacaattataccgtgagatttgaaggggacgagacctacctcccaagcaacaataccgccatcattaaggtggattccaagatcccagtggaaatcattgtggggaacattacagcaaaaccaaaggataaggtgacaattcccatcgaagtgatcactgccgaagagtccctgtttaacggaaatgtaactgtgcgcttgccagacggaactgaggtcactgcccagatcacgaatggtgaaggcagtgtggagtggacagtccccgaggactacaatggcacgtattccgttagcgtgcgattcgacggagacgacacattcctggaggcggacgggactggattcatcaccgtgactcctgagactccggataatcccgtgcctcccatatcccctgtatcccccgataacccagtggcccccgcaaaacactccgcgaataagccgatgccaatggataagacagctcctggtaaccccataatggcattgctgatagtgctttcaagtctgattttcgtaagacggagtaggaaatga

SEQ ID NO: 2249 - DNA, 978 bp, synthetic construct
  source 1..978: mol_type = other DNA
atggactttaacaatttcaagtatcttgatgagttgattcatagtggtgcgaaggagattaatctagattcagacattatcctggaggacaaggaggagcaaaagtacagtgatgggattaagctgaacattgacaatctcgtgatcaatgggaatggccacatcattaacgccaaggaaaagaccagaatcttctactccacagcccagaacatcacaattaagaacattcggctgaaaaatggaaaaactaatacaatagggggagccatctacaacctcaagggcaaaataaaaatcatagaggccaccataaaggaaaaccagagcaagtatggcggcagcatatacaatgacgagggagaaatggaaattataaagtcgacattcacgaaaaacaatgccaaaagcaacgggggggctatccacaactataaaggcaagatgagcatagaggagtcaattattaatgaaaacaccgctaagcagggcggagctatccacaactacagggcgattctgagcatcgagaacaccacgctgcgcaagaacgatgctaaagactttggtggggccatctttaacgatggcaatgagcttaaaatcaccgaaagcactatagaagagaacacctcgagccagggaggggcaatttacaataatattggagagattatcatcaaaaactccactatcacaaaaaacatcgcaaagatcggtggagccatccacagctggaacaagttaagcatcatctcctccacactcaataaaaacaagtcatatgagtatggcggcgcaatccataacttcgatggggaaattttcatcaaggacagcatcatcaccgagaacatcagtaacaaaggtggcggcatcttctccaacaataagaagtacaaaattacgacttccaccatcgaaaacaatgaatctgacaatatccacgagattgacagttttctggacatggattga

SEQ ID NO: 2250 - DNA, 1098 bp, synthetic construct
  source 1..1098: mol_type = other DNA
atgagcaagagttttcgggacctggaactcctcattgagaactgcgacgatgagatcgtgctagactcagacattgtgttgggcgatggtgagggcccaatctacctggaaggcatcaatttggacagtgacgtaattatcgatgggaatggacattcaattgatgcctgtgggaaagtgagaatattctattcctcaggagaacttacaattaaaaacatcagcctgctgaacggctactccgatgaaagcggaggtgccatagtggtcgacgggggaaagatggacataatcgactccatcatctctggaaactactcggcggacgatggcggggctatacacattgaggaaggtgagttggccctaatcaactccaccgtgaaggagaacaaagccaaggagttcgggggagctatcaacaactgggacagcctgaagattgtgaactgtgaaataagctccaacgaggcccgctttggtggcgcaatcctgaataacgacggcaacttagagatcagcgattcgctttttaaagacaacaaggctgataagggaggcgtgatctataatcaggatggtgacttttccgttgaaaaaaccctcttcgagaaaaacaaggcaagtgctgatggcggcgtcttctacaatgaaaactgcgatataagcgtgattgaatccaaacttaatgacaaccaggccgacaaagggggagtcatctataacaacggggtcttcatcattaaggactgcgaactgatcaacaatcgggcaaatgacggcggatctatcgtcaattacgaggctgagctgaatgtaatgggctccagtctgagtggcaatctctctaattatggcggggccatttacacgtacgatggggagatgagcattgacgagtcacgatttgacgataacagggcagagtgtggtggagcgatctacagcgagaagtgcatctgggatgtttctaactcagagttcaatagcaataaggccaagaactcgggcggggccattctgctcaagaaatctaagtatgaagttgacaatgtgagtttccgcgacaatgagcccgatgatgtgtccaacttctga

SEQ ID NO: 2251 - DNA, 276 bp, synthetic construct
  source 1..276: mol_type = other DNA
atggatgacctgattaccacagccgggatgtatggggagccagtaagcagccggaagggaaactacatcgtggagggtctctttggcaagcctatttactatatagacggcgacatcgtgagagagaacaatccgttcggaaaacccgtctaccggatcgagggcaactatatcaaggaagggatgtacggaaagcccaaatactacattgatggtgacctgatcagggaaaacaatcagttcggcaaagtggtcggccgcaaacgaaagttctga

SEQ ID NO: 2252 - DNA, 273 bp, synthetic construct
  source 1..273: mol_type = other DNA
atgaagtactgttttaaatgcggagcgaagctgattgaggagaaccagaagttctgcatcgaatgcgggtccaatctggaaaagcgcaaagaagagcacaacaaggacctgaaggagagccataagaaatacaatccgaaaaagggcgaaagttacaatgattatctaaaccggatcgactcaccaataaaagacaagatagcaaccgaggatgagatcatcaaagaaagcattgcctataaagagtacaaccccctcaagaagagggtgtga

SEQ ID NO: 2253 - DNA, 1815 bp, synthetic construct
  source 1..1815: mol_type = other DNA
atggattttcgtgaggaattaaataaaatcctgaaatctgatgatgaggagaataataatctgaagtccactgagaacaaaattaaagacaagaaagaggacaacaacctgaaaccaatcgataacaaaatcaaggacaaaaaagaagacaacaacctgaaacccatcgataacaagatcccaaatgaaaacaaggaacctaaggagaagaagacgcctcagaagacggatgaagaacgaatgcagaacagacctaaagagaccattgaccacctaaaacgattcaaggagctaaacaccaccacggacagtatttttaacataagtccctaccaggtcctcatcatcctcaaagatggtaccaacatcaccgattggaaagagatcgaggacaagaaggacattctctacatcagtgaagacctgtctggcgagagctatatatcaaacaaatacagagacctggagggaatgcgccttatcatagcccaggggattacaagcaaagtccaattcatcgaatcgatgttcgcggactgcaagtccctgattgacgttatcggacttgagacatgggacacctccaatttgctgagcttggagaacatgtttggcggctgctccagcttgaccagctgcgacggtctcaggtacctggatgtgtctaacgtgaatgacatgaccgccctcttcaatgactgttaccgcctcaatgacattgatagccttaaggaatggaacacatccaatcttacaaagatgtggagcatgtttgcaggctgcaagtcactgaaggacctgcggcccataagcaattggaacacaagcaacgtgacaaacatgaccagtctctttacagagtgtgaatcattgaatgatattaacggcatcagatcatgggacagctctaatctaaaggatatgggaagtctcctttggggttgcaaatccttaactgatattagtgccctgagcaattggaacactagcaatgttcggaagatggggcgcatgttctggaactgtgagtccctcacggacatcagcccattaaaggattggaacgtctcgaacgtggaagacatggtgtacatgtttgttaactgcaagtcccttaaggacctcactccgctctctaactggaagccttccaaagtcattataatgcggagcatgttcgacggctgctcctctatcgaaagcctgaacgggctggaaaactggaatctggaaaatgtcacgactgtagagaggatgttcgatagatgcaagtccctgagtgacgtgtctgccctgaagtcgtggaacctctccaacgatgtaatcgccggtgggatcttcaacgagtgtccgaatgtgaaggagaatcccctgaagaaagagatcaaagataaaaacaagccattgcaccatattgacttgaatatcaagtttctagacatctatgggaccggatggtgtctggtcaagctgggggacatctacagcagggcttcatatatcactgatgtgccctatgattgcctgtcgtcaatcgtaaacgctattaagaatgatgaaaacttccacgtggacttcaatggcgagggctggaccttcgatgtggaggcagacaatgagcagtgttactttaacttccatggcggagagaagcacgcgtttgacaccatgaacaagtacgacctggcaattgtgatatatcgcaacatacgggacaacctgtcatcttggaagggatggacacacagggatctgagtcccttgcttaatgagctctgttccctgattaatgagaacgaagccgatgaaaattga

SEQ ID NO: 2254 - DNA, 1344 bp, synthetic construct
  source 1..1344: mol_type = other DNA
atggagctgctcgaccggcttatcccaaaatacaaagatatcaattggatgaaaaggattgacattatccgcaaaaccgatgaccaggccctgctggaggagatcgcccgaaaggaggaggagggtatcgtgcgaaagtacgccgttaagaagatcaacgaccagtccgtcctcatcgacattgcctacaacgatccccattgggaaagctccagtgaggctgtaaagaaaatcgacaatcaggacgtgttaatcgacatagcatacagcaagctgaaggccagcccccggtcgaaggcagcggaacgcatcaaggaccagaatgtcctaatcgacctcgctcaaaatgacaaggaatatcaggtgcgccgtgcggctgtgaagggaattgatgaccccttcgttctaaaagaactggccctgaacgacccggacagttctgtgcagatggaagctgcaaaaaagataaacgatggggaggccctggcggagatcgccctaaaggaccggagcgagttcaaacgattggaggccaccagacacattgatgatgagaagatcctctcccaaatcgtcctcaatgaccctgatttctacgtcagactggaggcatccaagaagatcacggatgagaaaaccctcgccgagatgggcaagaatgacttttattggcagattcgctcaaacgcccttaataagatcaccgatgagaaggtgttggcgtatatggcctgcaatgaccctaatccaagcacacgttacgaggcagtgaagaagattaatgacaaagctatcctggtagatatcgccctcaatgcattcgactggaaagtgaggctgtgcgcctgccgacggatagacgatgaggaggtgatgacaaagatagtgaaaaaggacacctgttggcgcatccggaggaacgccgtgggcaagataactaacgaaacatttctggaagaaattgcctttaacgaacctgcctggagagtccggctggaaagcataaagaacattgaggatgaatctgctttgatttatattgctcttaacgattcaaactggcacgtcaggaggcaggcgttgagcaaaataaaagataaatcgatcctggaagacattgctcaaaacgaccccatcttcgagcttcgcaaactggcagtaaggatgatcaatgatgagtcagtgctcagaaagattgctaagaacgacccagaatggaagatcagacgcctggcaattagaaacattgaaaacacggacatcctgaaagatatcgcaatgaacgattccaacattgacgttcggttagctgccagtgacaagatcactgataaaagcgattga

SEQ ID NO: 2255 - DNA, 1917 bp, synthetic construct
  source 1..1917: mol_type = other DNA
atgaccgctcccgatagtaattacgagaccatggcggagatgaccattagaaactccattatagagaataacagtgctaggaatggaggggcgatcctcaatgatggaaacctttttattgaaaagacgacgttcaagaataaccttgcctttaccgccggagccataagcaacgggggctacgtttccctgaaggacgtgagcatggaaaacaacatcgcagtgacaggggctgccttcatcaatggaggcgatgcgaagattgaagacagctttataattaagaacatcgccatcggtgaaaaacgtggcatgaacggcgagcatgacgtcggcggagccgtcggtaattcagataatcttttgctgaaaaacacttccttcatcaacaactcgagcccctttggaagtgcaatctacaacctgggcatcgatatcccaaaactgaaatacctgtgtaagataaaaatcgaagactgcaggtttgagaacaacagctcgcatattagcggtgagattcacaacgagataggtgaaatctcaattgatgactccaaattcaaaaacgaaactgcgaaacggggatcagtcatctacaacgacagttatctgacaatcacatcctgtgattttaaagacctgaagaagatagttcataatttcaacctcatgaccatccacagctctaacttcgagagcaaccagtccgacagtgctgtgatcgagaacgacggggagattgggatcttgagcatcgagaagggaaaaatcgccaataatatcagcgactacaccaccgtctacaaccacggcaaggactgcaacatcacaggaaccattttcgaaaacaatcactctaaaaaggaaaactgccacaatatttgtaatcgctccaatatggtactgaaagaaatcatcctaaaggataagactgtcagcatctttaacgagggaatcctaactgccgagaagaaatacaagaacttcattttctcggtaggcaaggtgttctatctgggtatggaaaacgagttcaattttagctatctggatgagctgattcactctaatatttccgacacaatttcttttgatgaggacattagcctgctgagcgacgagtttgacttttacgaggggggcatcgaactcgaccgcgacaatatggtgatcgacggaaagggcaagaccatcgatgccagtggccggtcacggatattcctggttacagggaacaatatcacgctgaagaacataatcttcaagaatggccacgctttcgacaactatttcatgagtaacaacgaagggggggccatcaaggtgtacaaaggccttgatctcaagatagagaactgcaagttcatcgacaatatctccgagagcaaggggggagccataaataacaaggggcatctcaccatcagcaacggcctgttcgagtccaacaagtcaaatgaggggggtgcaatctacaatcaccagaaattatccatcatagatacgtgcttcaagggcaatgaaggccatattggaggggcaatttataataaagaagatctcgagattgtgagtactaaatttttaaaaaacattgtgaaagagtcactattcaaggccaggtttattccgatcctccagttggaagacgagtcctttggtggggcaatctttaacaaaaagagaatggtgatcaagcaatcaagctttaagaagaacatgggcttggatgataccgacggcgcttggggcggtgctattcgaaccattggcgatgaagaggtgacaatcattcagacagagttcatcggcaactatctcaaggacagcaacttcggaggggcaatatcttcctataaaacgccaaatctgattgattgtactttctcggacaattaccctaatgacctcaattga

SEQ ID NO: 2256 - DNA, 1350 bp, synthetic construct
  source 1..1350: mol_type = other DNA
atgggcatggtgttgaagatcaatgtgaaaatcggggattccgtaaagaaaggtgacgtggtctgtattctggaggctatgaagatggagagtgagatcttcgcggataagtcgggtgtcgttgaaaacatccttgtgaaccctggagacattgtaaatcagaacgatttgataatgatcataggggattctatcgatcgcgacgagaataagtcaaacaaggaaaacaagcccaaaccaaacaaggaggaccctaaagacagaaaaaatgagttttccaaatccaagaatgacaaaaagatcaacagtccaaatgagatgcttgataagctcaaaaataacattaaagtggataagatccttttcgttgacggggccaacatctccatcagccccatcgccgaggctatctttaataaaaaggtcaaaggcatcaaagcttacagcgctggtctgagcgccatcagtgggaataaagccgtgccaaatgcaataaaagtgtgtgaaaatcacgacattgacctctcaagccactgcacagcaaacattgaggattatgacctggacgattctacactgattctgagtagcacgacctacatccggaatatcctgaagtattactatcacgtgtacaaggttgtaaccattaatgaatttgcaggattttcgaatctggatattcaggacccgttttggtctgacttggatgcctttgagacttgtttcagcaagatcaacgacgcaattgacgaaattttcggactcaatagtctagaaaaggacaatatggccttcaactgcgaaattgaggaaaataagaacattcaatccaacaaggaggaaaacaagaacacaaccatcacctcaaacaaagaagaaaacaagaacacaacgattacctccaacaaggaggagaacaagaacacaaccataaccgccaataaagaggagaagaacactcagtccaataaagagtacctcaacgaaaagtcgagcaaaattaatagcttcaagtacctggacgatttaatacacagcaacaagaagaacatcactctggattcagacattattcatatggagggagacagccccatcatcctagacgtggacgatactctcatcgatggcaggggccatgccatagacgcgaaaggcaagtgcggaatcttcaacatcacagggaaaaacatcaccatcaagaatatcgtgctgaagaacgggttcgtcgagtctgatggagtcatttgcaacaagggcaaggtgacgctggaaaacatatcagtgcagaacaaccgaggctctaaatatgagggcaatgcgatagtcaataagaaaatctcctga

SEQ ID NO: 2257 - DNA, 1236 bp, synthetic construct
  source 1..1236: mol_type = other DNA
atgcccagcaagataatcaagcgggaggcttacattcgtgacctgaaggactatgtcaacacggattttgtgaaagtatacataggaattagaaggtccggcaaaacgagtctgatgcataatatcatcgacgaacttaaacgggatggcgtgaatgatgagaacattatcttcatgtccttcgaatcacgagaatatatccacatcaacaacagcgagcagctggatgaactcgtctacaagaaagtggagaatcttgaaggcaaaatttatctttttttcgacgaaatccagcaggtaaaggggtgggagaagtccatcaatagctacagggtgtccatcgacagtgacatctacatcacagggtctaattcaaagctgttgtctggtgaactggcaaccctcctgaccggaagatacctcaccatccacgtgtacccattcagcttcaaggagtttctgcaatacaagaacgagattgagggtgttgaaatcactaagtactcaattgacgagctgtatgaggaatacttcaactttggaggcatgccggggattctctccctgggcagtgacgagtttaagcggttggccctgaaggacatctataatagcatcctctttgaagatgtggtgtcgcgatttaacattagcaatattgacctactacagcggttctctcgctacatgatcagtagcacgggagagatcttctcatctaagagcataaaaaactacttgaagagcaatgatatctacacctcagaggacacactcctcaaatataacgagtacctgaaacaatccttcttcatttcgaaatgcaagtgcttccacctgaagggaaaaaaggagatgaaaatccttgggaagtactatctgaccgatcacggcttccaccatgccctgatcgaggacaacatactcaaagtgactaagatactggaaaacattgtttatgtcgagctactcaggagagggtacaaggtgaacgttggccgcaatgaggataagaccgaagtcgacttcgtgtgcgagaagtctggcaaatataagtatattcaggtctcctatcgcctgaccagcgagcagactcttaacagagaaattaatcccctgttacgcatccctgataaatacgagtccatattgatcacaacagaaaaccatgactttagtaaagacggggtaaggcacctgaacattgtggattttttatgtggtgatgacgtctga

SEQ ID NO: 2258 - DNA, 3135 bp, synthetic construct
  source 1..3135: mol_type = other DNA
gtgtccgaaaagtacacagtggccgagctaaaatacattctgaaggaaaacggcttaaaggtttccggacgaaagcccgatctggttgagagggtgctgcctatcctcaatgctgaagccagtgaagaggccgtggaggaagtgaaagaggaagtgaaggaggaaaccgtggaagcagagatcgtagaagctgaagaaaaagcccccgtggatctgaccttccctgatactgaggaggcactgagctccatactggccctgtatgggctcagctacgacgacctgtcaatcaaagatatcgagtttgccgatgggaaaatctgcataaacggggaagcgttcattcagaacggtttaagcatgagtgattcgaccatgtccatcatcaatgctgacccaacccttaatctgacaatgaatattccagaagtcgcctatagtgacttcgaaagcactatctttagatttaaagaccttgatctgaatctgatccctaccgatgacagtctggagtttaaggcggcgctgaaaggcctcgacatcatgactgatctgaataacatcatcctcaagggccttgatttcgcattcaagagcttcccagaccggggtgtagaaattggtattgatattgacgatttcatctatcctaatttttacaacacaagctttaacttcgagaacctggacttcaatatggcaataggagtggatggacaaagcatcgccattagtgttaatctgccggcattggacctactaaacaaagactatcgcgtaaagctcagcgatttgagtctcaatctagtgctctctgatctgcagcttagcgaccttgacctctccatagctatatccgatttccactacaccaacttcgatgacgtggtcatctacatggaggacattggtgttagtcttgaacatattccagatacaaacagcttcaacgtccttatcggcttgagcgctatggacgcagtgggtctgaatagttttgatgccttgttccccatgatggagatcacgggggtgaactttaactccaaggattcagactcactaattaacttcacagggctgatatctccgatagatctgacgcagattgatctgttggagctcggcgcccttttgggttccggatttgacctggacgcctacacgcggaacatggcatactaccccgacattgcaagtgagggagcatcagatttaggtatccccggattggacctgggtgccatagtggccaactgtgactattcctgtctgggcgccatcgagctgaacctcaccgggctccttgatagcgcagacatcgatctgtccgatctgggcatcgacttgtccgattatgatatttcttcaatcaaactctctgaccttatcggtgcggtcggggattccgagtttgttatgtcggccattcccgctgtcttaaacattttctcacttgacctgacggacgtggacgtctccggactgatcgctgacttcgacgaagagaactttgatatctcgtccctgctggccagcctgaatttaagtagcacagacattgctgctatcctcgatatcctggataagtcagatatcgacttgggagccatatttgccggctgtgatatttcatgcctggatgccattacccttgacctgacgggattcattgattccctgggcattgatttgtctgcattcatcgatctgagcgaatttgacttgagcgctgtgagcttaactgacattatcgccattttaaacagttttgaatttgatatgtctaccattagcgctctcttaaagatattcggcctggacataggggatctcgacctggagggactgatagccagcttcgacactgagaacttcgatctctcgacactcctggcaagccttaacctgtctgacctggatatcgacgccattctcgcgatcttcaataatccagacttcgattgggccggcatctttgagaacagtgacctgtcatgcctcgacgcgattaccctggacctgaccgggctgctcgattccgcagagattgacctctctgccctgggcatcgacctctccgattacgacctaagctcaatcaaactgtctgagctgattggcgtttttgggaaccttgacttcgacatgtctgacatgatatccggcattgacttcgaaagcattgactttgagaatatcgacttggaggggttgatcgctgactttgacgcggagaactttgacatatccaccctgttggaaagccttaacctatccagtacagacctgtctgccattttcgacatgttcatcaactcagatgtcgacttgggcaaggtctttgaaggctgtgactacagttgccttgatgccattgtgctgaatctgagcggactccttgatagtatcggcattgacctggcggatctgggcatcgacctgtctgactatgacctgtcggccatcaaactctctgagctcatcggcatcctgaatggattcgatctcgatatgaacactttatctgctctcctcaagatcttcggaatcgacctggaagagctagacctctcggggctcatcgccatctttgacggcgacaactttgatatgactgcattgctgtccagtcttaatctgggaggggtggatatctccgcgattgtagagctatttgacaatctcggctttgacttcgatggcatgtttgaaaacctcgatatctcatgcttcgatgctatcaccctggacctcaccggactcatcgactcaacaggcattgacctggctgccttcggcatagatctgtctgcctacgacttatccgcaatcaagctgagcgatcttattggggtggtctgcagttccgagtttatcatgagcgccagcggtgctgtcatgaagctcttcaatatcaacgtggacgaccttgactttgatgggctgattgccagcttcgacgctgagaactttgacatctcgcctctgttggagagcatcgagctatccggattcgacatctcagagatgttggagatgttcgatatgaacgggttcgacctgtcgcagttcctgaatcagttcataagctccttcatggagaatgctctgttggagagcggggacgaatga

SEQ ID NO: 2259 - DNA, 294 bp, synthetic construct
  source 1..294: mol_type = other DNA
atgctaaaaatcgatgaatttcggatggaaatggaggagcccaagaggatctacacagaagagctgaagaaattcgcgaagaagtacgacttcctgggcgacttcaccatagtggaggagcgcgacattgatacggccgactatttcttttgtttcaacaatctcaacggaactagtgatgaaaccctgtattccacaagagacgagatatatgatcacatgattaaattctgcgaggataacgggatcgacgaatttagcaaaaatgcatacatcttttacaagagcgactga

SEQ ID NO: 2260 - DNA, 501 bp, synthetic construct
  source 1..501: mol_type = other DNA
atgagccaggaggagaacaaaatgatcgacgaagtggagatgagttcagttgaagaaatcgggcgggattctgtcgaggagattaaaattggctcccaagacgagatagggatgaactcggtcgaggaaatggatttagactccgcagacgagattgacatggacgacgtggaagaaatggagatgaagatcgagaactacgagaatcggatcaaattgcaagatatcctgattgaaagcctgggtgagcgatgcgagggcgaaaaggagagaaataagcagcttcacgaccgcatcatccagctcaacgaagagctaaagaagaaacaggaactggaaatggtaagcgacatcaactattggaggggaattgaaaaggcccatatagagctgcacgataagtactacaagcgcattatccagctcgaaaaacagaatttcctgcttgaggtggagaacgatgagctgaaggatgagctcgagaggataaaaaatgtgtga

SEQ ID NO: 2261 - DNA, 810 bp, synthetic construct
  source 1..810: mol_type = other DNA
atgggtttgttaagcctcaccatttcgtacttcaacaagagcgcaaacggggaatcactttgggcgcccttccttgaaatgttcagaatgcttagcgtcgtcttgattctcacatacatcgccaccaagtccaaaagtttcaaagtgatcatccggggccaacagtcccgcaagaccataatctggcagattatcattttctccattctcggaatcctggcatcatattgcacgatggatgtgaacggtatcccggccaacgcaagggggctgattgtaatgatctccgcgctgctgggaggaccatacgtcgggatacctgtaggaattattgccggtgtctggcgctacggcatgggcggcatcactgccttggcctgtggcgtggccacaataatggctgggatcgtggggagtctcgtttatcggtggaacgatggcgaatttctaaggccatacaaggcggcactgttgatgctgctctatagcggctttgacatgtttcttatcaccattctgaccccccagcctaagggagtgctgatcgctaacgccctgtatgctcccatgacatttggcgctgttctggggatcttactcttcaccctatttctgactgagaagaaagaggaagccgaaaaaagcgatgagcagactgtgtctgacaatcgaaatacggacacacagaatataaatgagatcagccaggagctgaatgaatacaaagataaggtgaaaaagctggagcagaagctcgaggagtacgacaaaaaattcaaccaactggagcagaagctgaaggacaagtga

SEQ ID NO: 2262 - DNA, 306 bp, synthetic construct
  source 1..306: mol_type = other DNA
atgacgaaaatggaatttgatctaacagacgaacaaattgaaaaagtgaaggagctcgagaagagcggaattagtctgggcgaagccatcgacctgctgtttgaaataaaggatgaggcattcaaccagatggacgaagtggacgagaacatcgagattgtctcccagatcaccaagtcaatgaatggcgagaaaaagatcgagatcatagaaaaggcgtatcggaattacgagaaaacccccgagatgaaaatccaggaggtaaagcgcaacctcagctgggggagggatttcttcaagtactga

SEQ ID NO: 2263 - DNA, 1545 bp, synthetic construct
  source 1..1545: mol_type = other DNA
atgaatgaaaccattaaggagcacagctggattcccctaatccttgtgtgctttgctaccttcatcatcgctttggatacaacattcatgaacgtcagcatttcctcagttgtggctgacttgaacacggatgtgagtaccattcagacaatctcatcgttctacacgctcatcactgcctcattcatgctcctgagtaccaagcttcaggacatagtggggaaaaagaagctctttcttatcggggctggaatttacggcgtcgggaccctgacggcagcattaagtgccaatacgctcatgctttttatcggatgggcgttgctggaagggataggcggggcattgatgaccccaactgcagtgtccatcatatccggaacctaccagggcgagaagctgacattcgccctggcaatcgagagtgccctggtggccatcgcggccgctatcggccccctcttcgggggggtcgtgactacctacttcacttggagactgggattcgccgtggaatttatcatcgtcctgatcgtgtttgccctgcagggcaaaattccttatttcgaagctacaggcagtaaaagcgaactcgacattaccggggctataatctcatttgtaggcctggtcctctttgtgatgggtattctgatgctaactgatgataccactttcagcatagctataatggctgcaggattaattgtgctagccctctttgccctctttgagatcaagcggaagcgcaagggcaacgtgcccctgcttgacgttgaactgttaaaggaccgcaatctccgagtgggtactctcctgaggctgctggtgaacctggccatgggcggtgccttgttcgcagtctccgtctacctgcaaagcgtgttggccctgtctgcgttcaacacaggcttgaccctgcttcccatgacccttgggctgcttctctttgccttgacagccccaaagctatctgccaaactgaaccacaagatcctcatgtcaatcggatgcataattagcatcataggatgtctcattctgagccagcagttcaccatggcgacatcgatgctggagctaatgcctggcctcttcgtactgggagcaggcctgggttttgtgatggctttaggggtggacattgccctgagcaatattcctcaggagggtcaaaacaatgcctccggaatcgttacaaccggccagactctgggtcagtctatggggaccgcaatcattggcgtgatccttatcctgggcatcatcggaggaatcagcaatgcagttgacacctatgtgccggaccagtccggtaacgcgactttcgagcatgatgtctacgagggcttccagagcatatccagcatcaacgatgttaaggccgagaacagcacgattcagaatatcgtaaacgtcattgttagggactccatggcgtttgtgatgtatgtaacgatggctctgatggccattatcttcgtcctgacattgcggctctcggataaggagattaaaaaaccagacaaactgaaaaaacaatga

SEQ ID NO: 2264 - DNA, 735 bp, synthetic construct
  source 1..735: mol_type = other DNA
atgactactacgaatgaccaagatgaaagtatatccgagcatataaaaaaagcgttctccttgaaggaggatacggcctctaatgaagagattcggtcccgcctcttagacggcggcaagatcacgggaacaaacatgcgcgttctggtgtgtgctatggtgattgcctccgtggggctgaacatgagctcgaccgcggtgatcatcggtgccatgctgatttcaccgctgatgggcagcattctcgcctcggcctatgccagcgtgaccaatgacaggcccctgctgggcaagcaccttaccgggtttgcaatgcagatcatcatcagcgtaactgcagccgccatcttctttttcctctctcccgtgaaggagccaaccgtcgagctactcgctcggacctccccttcattttatgacgtgttaatcgcattcttcggaggactggcgggaatcataggccagaccaggagtgataaggtcagcacagttatccccggggtcgctatcgccacagccctgatgccacctctatgcacctgcgggtactccattgcaaacggtcgatgggacatgctgcttggcgctgggtacttgtttctgattaactgctatttcatattcctcagctcaagccttattctgagtgctttgaagatcccaaaactgaaggagtacacagaaaaagaatggaaaatccacaagtggagaatgagttacggcattctcttttga

SEQ ID NO: 2265 - DNA, 3006 bp, synthetic construct
  source 1..3006: mol_type = other DNA
atgggattcatcgataaactgaaaaaaggaatcggcagaaaaaataaagagaaaagctccaaaagagacacccagaaggacactgggttgaagaggaagtctccacccattgacaaggcatcttttgacggtagtgacgaggagtacaaattattcgaaagcataatgtcctacagggacgagccagtcgtccacagtatcttacggaagatcagtgacgatcgcctcttgattgaaattgggaagtcccatccgtttctggagcttcgacgtgacgcaatcctaaagatcaaacatgcctcaagagaagacctgattgagctctttgacctgaacgaggaccgttggggcatcggattaagaaacgctatcgccagcaagttcaccaaggagcagttgatggaaataaatgatgagcgcaagttgcgggagatcatacgatactcaaatgaggagaatgcaaattgcatctatgacaagatcaatgacgaggagctgctcattgatatcgtatgtctgacaaggtatgaaagcatccgagacaagtttgtggaacgctttaaaaacgacccagaagtgatgcggcggtgcctggagtccagccgaagccccgagctcaagtctaaagtggcccaatacatcaacaacgacaaggaactcaagaagtacatcctatcccagaatgattggaacaacaccgttgaatatgccctgaacgagatgaaggatgagaaaattgctaatgaagccctctacgaatttgcccacaaaggcaagaatcagctcaacaagtcgatagagttcatgagtgatgacgagaccctattgaatattgccctggaatattacaatctggattacgaccggtactactttgagattgggatggccctcgataggatcaatgacgatagcctgttagtggacctgatgcacaatgagaccgatgagacgctgcgcaggctggctgccaagtacattaagagcgaggaggcgctcaaggagttcgtcaacgaccccaacgagaacgtgcgcaagatcgctatccgggccacctgcaagaacagcctggataaatttatggatctattcaacaacgacgaaatcatccttgacgatcacttcatcttggacggggacggcatctatgagacaatcaccattaatcgggacaatgtgacaattgacgggaaaaaccacaagcttgaatgcatcaaccccaaaatcgagctgaggattgaggcgaacaatttcagcatcaagaatatagagaccaatatgctgattcgccttaatgaaggctccctgaacatctccaactccatcatagacaagtccattgagattaacgaggggaacttgacgggtgaaaactccacttttgacagacggatcaagaacattaatgggagcctgaatctgacagattgtaacattgatcaaatcttcaatgaatcttccctcagcctgaagggctgtataataggctccattaagaacgatgattcctgcaacatagacaactgtacgatcaacgagtttctttacaacaatgggcggtgcaagattgagaactctaaggtggagtcggcaagccgcaattatagtaacccttacgatgggggaggagccatttcaaatgggcagaacgcttcgatggaactgacaaaatgtatcctggccaagaacagtaccgacaagaacggcggggtcattaggaatatcggctcaataaacttgtatgactgcatcttcgaagacaataaggccggactctccggcggagccatcttcaatgagggcaggctcacagctagcaggtgcaagtttaaaaacaacctggttgaatttccgcgatacggctcgttctcgcgcgcaactggccgctatcacttcattaagcatggcaactccattctgaacctggcctttatggatctcttcaactgtcagttcatcactgataagatcaacgacgctcctgaaatcattgcccagttcggtaaagacagctacctcaatattgagaactgtcagttttcaactaataaaaagacttctgttgacgcaatagagggaggactgaactttaataatgcgaagttcaaagtgtcctttgatgacgtggaagagatcaacctagctaacgagggtcctgaggagaccggttctataaataaaaacctcaaagaaaccagctctactaatgagggtcttaaagagcgtagatctacaaacaagggtcttaaggaaacaagctctattaacaaaggtgaggaaacgacggtcagctctaaaaatgaggatatagatgccgaaagcattctggaaaacttcaagggcttcgaatatcttgatgatttgattaacgacggctcaagtgaaatcaccctggactgcaatatccagatgcatgaactggagcaggcattctacgaagggggaattgaaatctacgaagacaacctgacaattgatgggcaataccacacaatcgatgcaaacaatctctctcggatattccatatcaccggcaatggcattgtcattaagaacatcaagtttaaaaacggatattactatcaggattatttcgacaattcaaaagatggggggggcgtattatgcatcacccacagtgcttcggcaaaaatcatcaactgtgagttttcaaataacgaatccagacaatctggaggggtcgtgaaaaacaactcagattccctggaaatcatagactccaacttccgcgacaataaggtgatctatcagaagggtggatgcatcatcaataatgccagtctgaccctcagaaactgcagctttaaaaataacttcagtaatgccggctcatgcgtatttaacagtgaggattcatccctgaagattttcgactgtgagttcaacaataacactagtaggaaggacttcgaggcgggcggagtgagattcagtctggaggtgcccagcagcggcggcgcgatcgctaacgagggaagcctttga

SEQ ID NO: 2266 - DNA, 1974 bp, synthetic construct
  source 1..1974: mol_type = other DNA
atgagagacatcgaagagctgaaaaagacaccaggactgtcactgaaacgctacctgatcctgtttattgcaaatcttatcggattgtacctaatcagctttggattggatttcaccgtcaccaatctcggccgggtgataatattcatattcttcataagcatcttcaatgcagcgatatggcctctggtgacgaggatctacatgcccctcatggtgtggacctttggcatcggtgctctcctcttaaacggaggggtcttcgccttcttcggcccttacttcggcctggacatatccggctggggaattgtgctggccccgttaacgatcgcccttatcactatcgtgttgtcaaccttgatggacgctgaggatgatggcacatattatcaggctgttctgcgggaagcccaaactaagagaaaaggagagattaaggactatcctgggctaatcattgttgaaatcgatgggcttgcctacgacgtgctcctggaggctgtggagaaaggggtcatgcccactgtcaagtcaatgattgacaacaaaacccatatcctgaaaaaatgggagactgacctctcctctcagaccggcgccagtcaagcaggtatcctacacggaaacaatgaaaacatcaccgccttccgctggattgaaaaggagaacaacaaccagatgatgcagtgctctggggttacaaaggtcaaggtgctcgaagagcgcatttccgacggtaacggcctgctggtggaaaacggggcgagcaggtcgaacctcttcagtggggacacagacaatgtcattttcacgttcagtaagatcacagaccttagaaagctctacaatggcgcttggttctcaatcttttcgaatcccagcgagtttgcccgtattgtgattctggtcatcgaagacatggtgcatgagatctattcccagctgaagcacagcattctaaatatccgtccaagaatctcaaggggcatcgcatatatcccaactagggccggaacaaatgtcttcatgagggaaatcaataccgaaaccctgattggggacatgctgatcggtgacattgacgttgcctactccacgtatctcggctacgacgagatcgcccaccactccggggtgcgagatgaggatgtgtggtttgccctcaagggaatggacaagcagatccgccgcctgatctacgggaacaaatactctccaagggaatatgagttcgtcatacagagtgaccatggccagaccaacggtgctacattcaagcaaagatatggccagagtttcgaggactttgtaaagtccttgcttcctcacgagaccaatatctacgcaaagatgtcctccaacgaggaccactttgcagaggtctacattccgtttaaagatcggatcgataaatttaagaaccgaaacaagcccgatgaggacaagctgatttccgagtctgaagttattgtgctggcctctggtaacttggcgatgatctaccttacgcgatggagccaccggctgacttacgaagagatcaacgagatgtttccagatatgataagtgaaatagtgaataacgaatatgtagggttcgttctggtccgctcatctgagaatggtgatatggcgatcggcaagaatgggatttactacctggatagcgatgagatagaaggggaaaatcctctcatcggatttggcgacaacgtgacccagcatttaaaacggaacagctcgttccagtacacaccggacatccttgtaaacagcttctacgatgtggaaaacgatgaggtgtgtgcctttgaagagctggtgggcagccacggaggcgtgggcggaagccagagtgagccctttattctgtatcccagcgattgggacattcccgacgaggagattgtaggtgctgagaatatttatcggattctcaaggataacttggctaagatgaaagagaaatga

SEQ ID NO: 2267 - DNA, 285 bp, synthetic construct
  source 1..285: mol_type = other DNA
atggacgtcatggatatgattaaggaaatcgaaacgggaaacgactattggcaggaaggcttggattaccatatggattgcaaagtaacagtgaacaatgtccgcaccagatgcgatcaagtgagcatagtgcagtgtgatatgagcaagtacggcaaggggatcgagctgctcctggagctacggcgaggtgacttcatctcctggatttacctggacgacgttgtgagttttgacgtgcagatgatggacaatgtcctcagggaggagaaaaagaaccactga

SEQ ID NO: 2268 - DNA, 258 bp, synthetic construct
  source 1..258: mol_type = other DNA
atgatcgatgaaatgatgaagatagagcagtttacaagccactgctgctttgtcgatgaggagggcatgaatagtgtggacggggacttcctgaccgccatcgcactatgtgtgaacttcatgtataatttcatcgacattcagaacattgagtccggaagcgaggatgaggacgacctgaacttccagctcatcatgaacaagatcgaatactaccaaaagatggaagaaatttgcaaaaaatacaaggaggaatga

SEQ ID NO: 2269 - DNA, 687 bp, synthetic construct
  source 1..687: mol_type = other DNA
atgaataaaatcaacatcctttcagtatctcgcctgcgtacatacacagatggggatggaatcacaagccttgtcgccactatgggatgtcccctgcgatgcgcatactgcctgaacccaagctcctgggatggtacggcctatccaaagagtctgactgtggatgagctgtacgaagagctcaaacgggacaatatctactttctcagtaccggtggggggattgcgttcggcggcggggagcctctcctgtaccacaaattcatcaggaagttcatcgagaagtacagctccaccaagtggaaattctatttggaaagctccctaagctataagaccgattccttgaaggatataatcgacctgatcgactacttctatattgactgcaaggacatggacaagaccagatatgagctatacacgaagggcgactacgatctcttcttcggcaatctcatctatctgaaggagcatgtggacaacaacaaaatcaagattagagttcccaggattaagggcctgcacaaatcggacgaggctgaatcaaaccttaaagtgctgcaggagatgggatttaccaatattgaaatatttgactacattgatgatgtcgagatccacaagccgataagcgacaaggccatccggaacaaaaaggactttttagaacgcattaaagaatga

SEQ ID NO: 2270 - DNA, 480 bp, synthetic construct
  source 1..480: mol_type = other DNA
atgaacggccgcgacaagtgcgaactgttgaacgaagtccggcagaggatcgccaaagccaacaacattgagtttgacttcgaggaatgcaccttcgaggggaactgctccgggacgtgccctaaatgtgaaagcgaggttgcatacctggaaagagagctggaaaaaaagcaggacaatggcgaaaagatcgacattgagggaatcttcacactgaaggaaaaagagccaaccaagctactctgtaaggatgtctttgtgcccttcggtaacttcgagccggtgcgacccaagatggagattctcgaaaagagcccctactgtgaaaccttcggcgatatagagtacaaagactacgcttttacataccttaaaatcttttatctcgggaatgatgaggagatagtgctgccatataatgagaaggagtatgatggagacatcactgtattcgagatcaaggaggacgagtacgaatga

SEQ ID NO: 2271 - DNA, 552 bp, synthetic construct
  source 1..552: mol_type = other DNA
ttgtatcagtggtgtaacctattcggaaagatccatcgggggcagaattacgaggacattaaggaggacaactgcaggatgctcctggacctggtgaggaagtatccagagcactcagatattatctacctcaagaaagtaaaagacatcggcacatcctccaaaatggataactcccttgacgagcggatcaaccagatggaggaagccctgaagccagtccacgacatggtggacgatgtctactcatgccagatcaacgacgacttaattaaccttgacgatttcgtgccgtttgaatttctgtcggaatacgcatacaaaaaacgattctggctgacgtacaatgaaaaacccgatatctttgagctcgaaacctcttaccgcgacaagatttatagttttgacagcgtgaccgaaagcgtgatattcgttatggatgagatgaaaaatttcatcgataagtaccctcaatatagcagactgatccccgattacagcagtttcattaagtataaggaaaagctgatagaggagttcgagggcgagtga

SEQ ID NO: 2272 - DNA, 177 bp, synthetic construct
  source 1..177: mol_type = other DNA
atgaaaagcgagcttgtcccagggtacgatttcgaatacacctacgacggcgtgctgctgatcgagtatgacacatatcattacaaaaactacgaaatcaatcgggtatatctcgaggatcacattgagaagctaataaagctccccgacgtgtacgtgatctgcctggaacagtga

SEQ ID NO: 2273 - DNA, 219 bp, synthetic construct
  source 1..219: mol_type = other DNA
atgaacgagaacaataagaaaatcaaagagaagagcgccgaggactacagcgatctggactccttcctcgaggaggtgtttggcccaacagatgacatagagtggacggaagagaagcgcaagaggttcgaggaaatcaataataagtgcccgttcagtcctacccggaacgaatggcccaacatcaaaattcacagagaggaactgaaagaagactga

SEQ ID NO: 2274 - DNA, 2058 bp, synthetic construct
  source 1..2058: mol_type = other DNA
atgaccgaagaaatcaacgagaagatcaacactcagctcgaggaggagatcaaagggttcggcacacgggtggtcgagatatttaaaaacaccaaatccacgaagaaagagaacgaagatccggaggatgataacactaaaaagtcacaggaatttatcaccgtcgcagaatttaatgagttcaaaatcgagaccctcgagtttgtcactgaaatgaacaataaggccaacaaccttattaaagcctctgagaagttcggcgaccccgaggacgactacgctgagatcgtcaacaaggtcgacaccctgctgcagggcttgcacaacgaactgctcggcaaggagatcacaatcgaggaccgactggacaagaggaacacactggttcgaatgtcactgaaggtgcatcagtccaaaaggattctaaagctgttagacaagcagtcacagatgcggtctgcagaagagaataatctcaagaaggacttgagcaagtggttccacaaactggaaagaagaatccagaacctcatagacatctactatgagaacgaactgttcttcctccacatcaacaaggtgaccactatcgtcgaggacatgaagccagaatacaataccatcctccttaagcatgggttgacagtcttctacaatgcccgggagacggccaccacattgtacaccattcaacagaagaaggtgtcctccaagacaggcctctacgaaccaaaaatcatgcgagagactgacgtcggactgttccgtaccaaccccgaaatcgaagacagcctaaggtacagcacctttcaggctagtaattccacattgattcgggtgagtaagaacatcaccaacaacctcgcagatagctaccacaagggcctggggatcgaggatgtggggcataagattacggaggagtttaccggtctgaaaggttggcaggcgaagcgcatcgcgcgcacggagatcaactccgccagcaatgttggaacattctcggtgtacgacgagcttggtgtagagtaccacatgtggtggacaggcaacgatgcccgtgtaagagacagccacaagcccttgcacagccacatagtggcagttgggaacacgttcagcaacggcctgctgcatcctggagacaagtcaggacccataaatgagtggattaattgtcggtgcacgtccgtgccctatattattccgctcgggatgatggcccccccaggagtaaaagagttcaccgaagatcaactgatccctatcccggactatgattctagtaaggatcgcggcaaaatcatcaactctagcagcaatagtttcaataatgtgctgaaggttcccaacaataagctgaagaaagagggacataattttaggaagaaagaactggaggagctcctggaacttaaaatccgggagaagagcctaaaacaacccatcatcaagtccgacaacactccactggtggagctggagcatccaatcctaaaacgcgagcttgacaatttcgacaaatttttagaggacaaggatattgaatatttccagatgtatacttttgatggcagggaagcttcaaaactgtatattggtaagatgcacgaggtggacgtgcctaatgaagaaataattgaagctgtgaggaagggagggaagatctccgtccacaaccaccctactaacttcgataacatgcactctatctcggacatttacacccagattgaaaccggcatagaacttaatatcgtgaagtcgtacactaagaagtatattgtcgttgccgaggatctgagcagcaaagagagaaaatacctgcttaatcagctggagaaaattgagaagaagtacaatgaatttatagagaaggaaaagaaaccttatctcagagggttggataaaatagatttaacagtggctgagcgcgagtacgccgaagagattatacatcaatatgtggtaattaacaactacgacaaatatgaaaaagtgatgagttatttctttaaagcgaatccaagtattgatctctacgtgtacgatatttga

SEQ ID NO: 2275 - DNA, 498 bp, synthetic construct
  source 1..498: mol_type = other DNA
atgctacccgtgttcatcccaaatctgccggattgtgagtaccaatacggggagaagcccctgaccgctgatcagataatccagttcgccagagactatgaggaatggctgattgtggacttggagcacgagtttctctacactgggcaggtaatcggcacagtcataaagagccatgtaaacacagaaccagtcaccgtgaagttcattgacagcacaccacgagaatatcctaccggcacctggttcgttactctgaaaattaccaaccaggatgtgattcagggaatccataacgaacactacaccggcggaagtgccaccactatcgaacgggaggacacggacaagctcaggaaaatcctgaatgttccgataacatccacgacaaagtcaaagatcaaacgcatccccatcagcgagattaaaaaccccgtggtgatcacgatctccattgtgcactcgccttgcgtgcctcttgcaaattttgtcgtctga

SEQ ID NO: 2276 - DNA, 1023 bp, synthetic construct
  source 1..1023: mol_type = other DNA
atggtggaatttgactcctttataaacgtagaaaaggtcatcgaggcaaaagacagtaattacgttactaaggagctgtcctttgacgataaaaccatactcaacacaccatacaagattttcaatgtgtcgaaagtaaagctgaacaaactggagctgccgcttaagggaaacattattgaaacgaccaagttcatcaacaataaaaagtcatatgacgccctgtataacctgcttgaaaattctcctaataaccaaaaaagtaagttgaatcagtttttcaaggtggataatacattcaagagctataaatcaatcataagcttgactttcagcaagaacccttttaagagcaataaatttacccacgggcacagtaagcccctgtcattctccaacttcgagtacttgctagattatatgtacgaatattcaacgttatttgtgctgattcccgacatcgacttcaagagcttcgatagcatggataactacatggagtatatcgagaaggccgtcaatgtggttagctctttcaacaataaaccgatctttgtgccactgtctatgaaactcgacaacagtaaccttgaaaaactcctgcacttctacaaggagaacaactacagcaatatttggttcaacttttattccaaccagataaacactaagatctccatcatcagatattcgctgagactcatcaaccgcctgttcaagggaaacgcggtcacatactttagcaacatgaaaaaggaaatcaataaacatctggacgacgtgtacacattaccctccgacttcctcgggcccttcttcggctgcgattttctaggttcgaatagggagtcaggcttccctggcaagaatattaaacggaccgctaaagagaagagggagttcgagcgcaaaaatctcattaacaagaaccggatctttgattccagcagctactactactttagtattctcgagtacccatccgacctgcgaatcaagttcaaggtcaatagcaccaactga

SEQ ID NO: 2277 - DNA, 570 bp, synthetic construct
  source 1..570: mol_type = other DNA
ctgttctttgcagatttcctccggtttctgtcgtacggcttcttggaggaactaaagcagagcaactgctataattttctggattactacaattttgccatcggtagcaaagtctttgaggaaatcaaccaacaccttgataataacctgattaataagctgcacttctgcccaaacaataactacaactatagcgccctcattgctcccctcctttccaacgaagagaagaacaaaaacaagggagaatacgaagtgataggactgtccttacactacctctctttgaatcaggtgaagtacataatcatcgacgataaacgcgctaggaaattcgcaaagagaaatttcgaggagctgcaggagtatattacgggcacaatcggcatcatcatcttctgtagtaaagacaacttcatttcaaaaattgacgccgccaacatcctcaaggacattgaatttgccatcgagaaccatgacgagacccaggggaatttcatctgcagtctggggaagcagaactataaaaagataatcgacgacgcgattaagatgctggatgtagagtga

SEQ ID NO: 2278 - DNA, 573 bp, synthetic construct
  source 1..573: mol_type = other DNA
atgacactcagcaatgcggagtataagcaaaaatacatcgaatatctgattttgctcctactgggggactttaaaaacaagctgtcagtcttgcacattcagaaggaaatatatttgctgtacaactttgacgtagagctgaaaaagctgttttccttcgtgaagcactataaaggaccctacctagacctgataaattcgtgctgcgaaacccctttctatctggacgggtgctgggagtacttcgaaccgaaggaaaagattagcggaggctttttaaagatcaccgataaaggctacaaagaatacctcaaattccttcagaagatcaaggatgagaaccaggaagaacttcttcatataaataccgccatcagtatgctcaatcggttatacggttccctggattgtgaggagctcctgctgctgatttacactgagttcccagagtacacggagaaatcagaagtgtatagcaacatcatctccaagaagacaaacatcgcaaaaaacctgttcgagaagaaggtgattagcgaggagaagtacaacgagctcagtggcatcctctga

SEQ ID NO: 2279 - DNA, 2769 bp, synthetic construct
  source 1..2769: mol_type = other DNA
gtggagcccacaatcagctcccgactgctaatttttatccggaacgacttgaaaaacgacatcaacgagctactcggcgagccaaaatgcggcaaaggtagcgcaggcatagggaacctggctcatatgccttggctggattttacactgcacaatattgatgagaacttgggggcgattaacgtggcgtacttattcaaaccagacatgtcgggattctacctgacattccgcgccttattttatcaggagattgagaagaagcacggcaagtatctgttgatttacctgaaaaataaatcaagacatatcagagagttcctggaggaatcgaacaaactgcgcgacgactttctctttaatatggacttctctgaagacaccgccgtcctaaagaagcacagtgcaggcaccattgttgcaaaatactatgatgcaagtaatgtgccttccgatgaggaactcataaacgacctcaactatttcctcgatctctatgcttttgtcatcgacaactatgagaacaaaacagacctgagtgtagacgaatgggtcaaggtgctggaaaacaaggagcttattgatgataagatgttcagcatcttagagatcatgaatgagatggacaactattccgcgaccaccagccagatctcgaaaaaaagggaagaactgggattcttggatgaaaagtcttataatagcatcataatcagtaactcccgtaagatcaaggaatttttaaacaagaaaccgatctacaacgacgacgggaccgaaaactactggaccaggttcttctacggaaagaatgtggatggcgcctttgaatttaagatgaaggatgaactcgttgaagctttcaaaaagactaatgtggaaaagcgaaaaaaaggtggggaagaggtgaccaaaaactataactctttctacgatttcctcctggacaacgggtatctgttcgacaaaggaactattgagaactatctgcttagcctgaaggtgaagccgttcgctatcctgaccggtaactccggcactgggaaaacgaaactgagccagctgttctcccagtacatcagcaacaataatcccatcctcgtgtctgagatgaacagattgtcaaaagacactgaagattttgtcgaggtgcaggtgacgaccaggcggtcctcgtggaacatttttgaaaaggggaaagaaatgaaccctgggtggactataagtaacgagtttttcagcaattatctgcctattgaccagttcagtggtgaataccagattgaagttgatggcattgaaggcaatgggattattagtcctgtaattcaggtctattacgacaagaatagccttaagctgaagaaagagtttgagaagttgtacctgtccgagctggaatcaatcgagaaggacaaagagaacaaagtgtcacacgaaattcagctggttgggttagagcttaatgtgaactctcttgagaacatggtgaatacgaatttcacaaaatttaagggagatataagtttcaaaaaagagattaccacaacttctattaagccaggagagtttattgtgccgtacgaaatcttcgattacataccttttaataagaaccaaatggattgcaaaataatctcctgtggaaggttctcgaacgctaatatccatatcaagtttaagctcagaaagctgagcaagaatatccgagagtacttggaagagaagggcgtaggggctgagattgatgtgaaaattaaaaacatcgacacgagcctggaacgcttcaacccagattggagcagcgccaaaaggtactcttcagagcaaatcgcacaacttaacgagaagaatatcgatctgatcgactttaattctcagaattacaagataatccccgtaggtgccaactggactgagaacagaaacatcgtcggctactacaatgtcatcaccaataaataccaatccactccagcctatgacctcatcacccaggcacagaagtctgacgagcctcacttcctcattctcgatgaaatgaacctgtcccacgtcgagcgctactttgccgactttctttcagccatcgagagtaaggaaaagatacccctctatggagaggaagccctggaaatcccggacaatctgttcatcatcggaaccgtcaatgtagacgaaaccacatacatgttcagccccaaggtgctcgatcgggccaatgtcctggaatttaagacatacagcgccgcctcctacatgaatggcgatatcaagctatctggtcccgacggaaacctctcatatctcgagaaccccttggacgggaacaatatccggagtaagggcatagacgagctgagagagcttttcgacggcgtgaaggtggagaataagcccttctggaacatcttgtcctcagagattgagaagttccagagcgtcctaaaggtcagcggctttgacttcggcttccgcgtgattaacgagatagtgcgtttcatggctgttgcctgggagtatgagaacaagcccgacgagtttagcaattgggagcgctactttgacgcccaaataaagcagaagatgctgccaaaactgcatggctccgaaaagatcatcggagatacaattgatgagcttcacaagatctgcttggacagttccatcgatgacgtggagatggcgaaatatccagagtcctacaagaaactgacggagatgcggaaggtgcttcggaagcagaggtacgtttcattcatcaactga

SEQ ID NO: 2280 - DNA, 1644 bp, synthetic construct
  source 1..1644: mol_type = other DNA
atggagcaatacattaaaataaacgcgatcgacaatgaatcgaatcagctgggaacattcaaaatctcaaaagaatatgacggatacatcccatctatcgagaactttaataaagagattattttagaaaacctgatcctctacaacgttcccatcgtcgaatactttgacaacaagactcccatccaatactacaagaacgatagctttaatgcaaatattctgctgctcgaggaatacgagtacaccattgaatttgagggcgatctgaatctcgatgtgtacgaaagtttaaagaacagcaaaaacagtccactgaagctgctgtcaaacaccaattctggctttcttaactttggaagctacgtaggcaagacctttatcgacatctacaaggacgaaggcctgcttttcaaatgccctatcgaggttcggtctcgcaagataaattacgcgaaagactacgccactatgattggggatctgtcgcgtttttcttcggggctaatctatgagctcaactcccccgtctaccagtcattggaagtaagtgacatcaacaagaccccatacgaggactttatgcttctggagtatctattcgaggacgagaatctgccatccactgtggagtatttgagccgcaacctgtacaccttgcttgaggagtcccgggaagaagtgcccagctccctggcaagcaacatcgggccgaatgagctggtggaggtcttctccaacagtgataatcttgaaaggtatgatggcctggacaacggtcacctggatagcgtgctgtctagaacgaaaggataccttcccttaaagatcaatgaaattaagtacgtggacaatatcgacacgcctgagaatcgattctataaaaacttcctactgtacatagacgacctgattgatgatttaatcaaaaggatagacgagggctactccctcgataagctgcatgaatacaaggaaacacttagctactatctcagcagtcgctatttcctcgacattagcccgatggattaccctcctctcaatagtcaggttctgcagaagaaagagggttatcgggacattctggaatattatctgctcttcgagttcggtttcaagctgaactggaatcaggtggtcgacgacttccggggctatgagaagaaggtgtatcggctctatgagtactggtgttacttcgagctcctcgatatagtgggagaactcacagatacggagataagatttgacgatctgttcattgaggagaacttgaacatctccctgagggaaggggctatcaaaagattcgacttgaacttgagcgacttgctggacaacgacctgccctcatctgatgatctcgacatccgaatagacttgatgtataacaagaccttcaacaaggatatggccttccattcctacagcgtggccctgaggccagactataccctttcaatcgagtttgggggcaacgcctatcgcatccacttcgatgcaaagtataaactcaacatcaatgacgaatccttcaagaatgacgacattgtcaagatgcactcctataaggatgctattggggatacaatcgccgcctacgtgctataccctggagatagaaaagagatttttctatga

SEQ ID NO: 2281 - DNA, 3537 bp, synthetic construct
  source 1..3537: mol_type = other DNA
atggagaaaactatgaaatctaagctgtttatccttctcatcattatctctattctaataagcattagctcggttagtgccagtgaactccaagctgatgcgtcaaatatcgataatgattatcaaacgaacatggaatttgatcccatctgcaatgatgaatcaaatcagaaccaggatctgaatctgaaaaacaacaatgaacacattctgaaagaagagaacacaaaccccccagaaatcgaggatgaaacgtgcttcaccactctgtatcaggagatcaaccaaagtgatgatgagctaaacctcacccatgactacatcttcaataaaagttatgacaatgcctccttataccagatgtattacggcccattaatttcggtgaataagaccaattttacaatcaacggaaatggccacatcatcgacggtaacgagatgggggcagaatttgattttgaaaacaacaagggagagattgtaattaatgacttgacctttaagaatttcaaccagacagttctgcagatttacggaaagctgaccctgaacaatgtcaactttactgagagctttgaaagccttgagagcattatatttgtgagcaagggcgtcttgaacgtaaataactgtagtttttacagcaaccgcgccaagaatatcatcagtgggtcacagtcgaatatcaccgtcaacaatagcatcttttctgggaatggcaactatgaacgggccatttcagccaacagatggcagctggtcatccacaactcccggtttgagaatttcactttcaagaacggtgcaatcattgatttcaagggatattacctcgacctggagaactcaagtttcaataatatccattccaatctaagtggcggagcgatcctgggaaagtacttccccgcctatatcaaggtggctaataaaacccagtacctgcccagcgaccctatgataatcaagaactgcagatttgaaaacatttcctgcctcaacgacgggggcgcgattcactttgacttcgactcaggaagccagcgcattgcccagagcctcaacattatcgattccaatttcaccaactgcagcagcaaatacggcggggctatctcgattctgggaggaggtttgaatctcgagaagagtaacctgctcaataactacgctagcttcgaggggggtgccatatactcctcatggaccaacattaacattaccgattccagcattaaaaacaataaggccgagaagaacgccggtgcgatatactttgacaagggcaacctgagcatcaaatcctccgatatcatcaataacagcgctctggaggagtccccaactaccgccaatgccatctatgcccacgacgttgcggcggatttcagtgactccacatttgacaatgggggaattgcagtctatgccgactttgcttcgcacagcaacttcaccaacgtcaataagaatgatgacatcttcctcatggacaatcataattacatcgttagtgttgagacccctggaataaaactcaatctgacgaataacgagataattgtggactccctcccatccaagttcaattcacaggattggggctggacaacacccgggaaagtccagggggacaacgacgactgctgggccttcgcaacaatcgcctccattgaaactggcctgggcaaatccacaggtgtgctctacaacctctcacagaactatgtgcagaagcttcagttgaaatactatgaagtgggggatttgcggaacagcctgacgggattcatcaccagcggcctgggctacgccctgagctggtacggggtcttgcctacagatgcagcttatgacgacagggggatgattgcagatagtgatatgaatgtgccgcgcatccacgttcaggatgcaatgttcatatatacaggcgagaacaacacgatcgatcaattgaaaaaagcgatcattaaatacggcgctgtcactgtgcaatactgggcctatcgagaaggtgaggaaatcctgagcgaaggagaggacatttccattatggaacacaacacccatttcatttcactggtgggatgggacgacaactttacgaatgattttggcggcgccccagggtgttggatcaccaaggattccctgttcgggtactcaaatacggagtacatcaacttcgcggacatcgactattttgccattgtgccgctgagggtggcagtggcctatatcttcgagaacgacattgactatcacgtgaactaccagacagaccttacctgcctggcagggtttgaccagaactatacaatctacagcaacgagttcacttcgaagtacgacgagctgataggggctgtgggcacctatttcaatgaatcaggaattaaatactccttcgacatcttcgtaaacgacaagaaggtccaaacccaaaacgggacaagcgaatatgccggatttaggaccatagtgttaaataattacatccccattaagtctggcgaccagttcaaggtggtcttcaagagtaattcggttccttatcaggcctggtctagggtgcactacctaaatggcacatccctggtaagcgctgacggaagcacttggaccgactttgctcccctgaacaagactgtctgtctgaaagtgtacacgctcaacgacactacgaaacttgccgacgccaacgacatgattattgaatacggcgaggattcctatttcagcgtgcgcgctgcaacggagaataacatctctgtaggtcccggggaggaagtcactttcaccatcaacaacaacacaacaacagtgaaaactaacgacgagggtgtggccaaaataaagattagtgaagctccaggtacctacaagatcacaagcagctacaataatcaaagctatgagaacaacatcacaataattagccgggagagaacgagcacaagaatcctgtatcagaacatgagcactgtggctgtcaactccaaggtggatggccgaatcggcaaatactttgaggtaaacctcaccgacgatgaggggcagccgcttaataacatgcccgttcagataggattcaacggggccgtctacaaccgtaccaccaacgctaccggcggtgtgaaacttcagatcaaccttgggtatgagggctcatacaccttcgccatagccttcttgggcgacaataagtacgcaggcagcttcgaggtggcaatcatcaaagtcagcaagcaggctcctaagataaccgctcctgcaaagacctacaaagccagtgcgaagaccaagaccatcactgccactttcctatccgataaaggtcatggggtgaagggcaagaagatcaactttgttataaacggcaagacctacactggcacaacaaacgataagggcgttgctagcgtgaaggtgtctttaaataaaaaaggaacgtacacctgtaccgccaaatttgcaggagatggaatgtacaaggcaacttccactaatttcaaggtgaagatcatctga

SEQ ID NO: 2282 - DNA, 1065 bp, synthetic construct
  source 1..1065: mol_type = other DNA
atgaaaggactcgcaagaatcgagcaagacgtgctgggctgggtggatgccgagctagacgagtgcggcccgtatgatgctatctgcaagccactggctatggccccatgtacctctgacgtccacatagtctgggggcatgcctacatgagcgatgccccgaaccgggtggtgggacacgaagcaacgggggaggtcattaaagtgggggataaggtgaaagacttcaagcctggcgaccgcgtgatcgttcccgcaatcacacccgattggctgactgtgcctgctgagcagggattctcccaacactgttacgggatggggacaggaatgagttttgtgacgtttaagcatggggtctttgcagagcagttccatgtcaatcaggccgacgcgaaccttgctcacttgcccgataatgtgagcctggaacaggcagtcatgatctcagacatgatgactaccggattctacgcggccgagctggccgacattcagtttggggacacagtcgcttgcttcggtataggccctgttggcctgatggcactggccggggcgcaggtgaagggtgcttctcacctcatcgccgttggcagcagaccagccgccatcaaggttgctaaagagtacggtgcacatgatatagttgactaccacaacggcagtacagtggaacagatcatggaattgaccgatggcaaaggcgtagataaggtggtgatcggcggcggcgggaaggataccctctcagaggccctgtccgtgcttaaggtcggtggtgtgatcggaaacgtcctgcactatgacggtattgaaaccatacccgtagacggcctaagctggggccagggacttgccgacaaaaccattcgtggaggcgtatgccctgggggacgcgcccgaatggaaaaactggccaatctcatcgagtatggacggttcgactcgtccaaattgatcactcacaagttcgataagtttgaagacattgaggaggctatgattctcatgagggacaagccaagggacatgatcaagcccgcggtgattttagatgaatga

SEQ ID NO: 2283 - DNA, 1872 bp, synthetic construct
  source 1..1872: mol_type = other DNA
atgatctcgaaactaaagaaaacgataatcagctttataattatgggggtggttagtttcgcggtcactctgctgcccatctctggcggaatgtcaatgttagcccccgatttaggacttatctatgtgctgggccttctcttcggcccgtatggtgctctgggtgtcgccttggctatcgtgacgctgaatctgattaacggcttcacacttatggagacactgccctttgaaattttcacctttggagtcagttatcttggatacaggctctggtactctgggtttaaaaccgataccattaccaagcccaaactagataacagctaccacatctccctctttcttgttagcatcatcatctgtgggtttatctactcgacagtccagggaatctcttttaacctcatattctgggtggacagattctatatcatgatcctcttttacttcatgagctttaccaccatggcctttctctacggcatcatcggcatttggatctgcaaccgatatgattgtttcgagacaccaaaaaagtcaaagcggcatgtggacaagcggatttaccaggcaattttctgcatgatcatcatcacatccattatcctagccacaagcttcattactactgatgacacgacggtgcgcatcatagagttgatagtgttgggtatcttcctatttgcctacctgaccaagccattcgagtatgatataaccccgaacgacaaggacactatcagcggcaggattatgcggaacttcattattatcacgtttatcctgggggtgttgggtatcgcaatttccatgatcagctacagtgcgtacagtcaaagcgataacgtctacttagtcctgatgtgggggccgataattaccgatacggtgctcctcctgttcctcattccctgcatttttatcctgcgttacattgaggacaaggttgtgcagcctatctcaagcttctccaagatcgaggggttcattaaggaaaacgagaagattgatgaagacggcctggttaagacctattccaagtacaccgacgagaagacagagattggaacccttgcccgctcgtacaccgaactgataaagcacaacaacaactatatcgaaaacattcgagaaatcgaaggggaaaaggagagaatcaatgcagaactggacattgccactaagattcaagagagctcccttccagagaatccaataaaaaccaatgactttacagtggagggctactccattcctgcgaaggaggtagggggcgacttctttgattactatatggtggatgatgagaatctggctatcgtcattggtgacgcttcaggaaagggcatccccgcagccatcctgtccatgatcactcagttcatgatcaaaaactttttgaaacagactctcaaccccagtgaggtgttgtactctctgaataaccagctgagtgaaaataaccctgagtgtatgttcatcaccctgtggcttggaatatataatacaaggactaagaaagtaagattcgctaatggcggccacaaccctcccctggtgaaagaagacaagaaattcaagtatttggacattgatacagggctggttctcgggatcactggagacttcgactacatcaacgaagagataatcctcaaggacgagctgatagtatataccgacggaatcacagatgccaccgacgaggactccaatatctacggcgaggaccgcctcctgaaattcttaaatgagtttaaaggcgatgaagtccctataaaaccactcatttcagacgtgaacactttctctaaaggtgtggaacagttcgatgacatgaccctgctgtgcctgaagctgaataaatga

SEQ ID NO: 2284 - DNA, 300 bp, synthetic construct
  source 1..300: mol_type = other DNA
atgaacgtgatcaaaaactacaatggaaaggaactgacaatggccgtagacggccgcatcgataccataagcgccaaggagctggaggaggaaattaatgctgagatgggtaacttcgactcactgatcatggatcttggcgacctcgaatatacgtccagtgccgggctacggattttgattgcaacccagaagaagctgaaaagcgaggacatacccttcgtcatcaggaacgtgaatgatgcggtgaaagagatcttcaagatgtctgggtttattaaaatcctcaacatcgaatga

SEQ ID NO: 2285 - DNA, 8064 bp, synthetic construct
  source 1..8064: mol_type = other DNA
atggacctttttaatctgtcttcggctcagaagatgctactgttctctgagatcaataaccctcagaatgattctttctatctgaaatttcgcaaagattatgatttgggcgattacgagtacgtgaaatcagctatcgaactgatcagccggaaatatttgaacctgcagattaaatatgatgagaatgctgacttcaaacaatattttgtggatgccgacgaagtgaatgtcgacagctttgatttctctggcagtgaccttgatggaatcgatggggatatcgggggcagcggtgtcggttcatttgacggtgatattggtggaagcgatgtctcttcattcgacggagacctggatgagtttataaagaactacctcgacaagccttttgacgatatattcgactctccattatacaaatgggctgtgttaaaaacaagcgattctaccgtactgataggggtggtgcagcatatcttgcttgatggcaccagtttatacagtatcgtccccagcgagattgagagatgcattgactctctgaaaagcaatgaggagtttattcccatcgactatagttacgagacctatgtcaacgacgaactggaatacctcaactcaagccagagccaggaggataagcaatattggctggatagtctaaagggctatagtcaggactggtactcctttgacgactctgagctgggcttctacgagattcttctcgagaaggtgccggacttcggctacagcccattcgtcactgcactggccctgagctttttatatttcagcaagagcaaggagggcaacgagagttttaaggacatggtgtttaacacgagcgtgcacggacggtacttctcccaaggggatgccttgggaatgtttgtgaacacaattcctttaaggctaagctacgatggggatatgacctttgacgagctcctggcctactcgaaatccgtccttaaggagggcctgggccatgccaagctccagttcagcgagtataccacggacctgagaaatgagggcattgaccctgactgcattagtatgtttagcatcgtatccaactccactgacatgaactctaagtttttaaccctgcaaaaggacattaagttcccattgcactttaggataaacaagaattactctgataagaagggactccagtcaatcttcatagagtatgataaggcctgcttccacaagagggaaatagcgtccattgcggaggggctgaaataccttatcagacagctgatcgacgactctgcgaaaagatgtgccgattacatcgtccacgaggccgaatttttcaagggagaaaactactacaacaacctgatcaacagttttgacaacccgacagcaatctcccccgatttaagtggcgacaaggtgcgttttgtcaacatatccaagcatatagacattgacaagctcaagaacttatctaaccggtatcatctctctaaggaaaagctgctcctggcgatcttcctttacgacctgagcaaattcagtttttcaaaggatatactcatagcctataaccgggttgcagctggatatcacttcaacacagatctgaccgtggaagagtacttgaatgacttcaagcagtccttcgaggaatacaataactatcctctgttaaataatagaaaactgaactttgaaagcgaaatactgttcttcatcaatgactacgacgcgaaagactataaacttgtgtttaattttgagagcggaaagatcaacataagctatgacgagagcttctattcaaaggagctgatggaagctttcctggacagtatggacgtgctattgggtagatttgactccagcgatgagcccctcaaggagatttcaatacgtcgggagctcgaactggacgaggggttcgagatcgagcttgcaaacgaaggtacagtgaaggaaatgttcgagaatatcgctagtgaaaatccggataagacaatcctgtactgtgaggacggccagctcacatacgacgaacttaaccgcaaagccaataggattgccaatggcctgctcaagcggggagtgaagattgaagacaaaataatgtttatgatgagacgcaacagtgacttgattgcagctgttctcggaatagttaaggcaggagccgccttcattccgattgaccccaattatcctaaaaaccgaatccagcagattttagatgatagtgattcgaagttcgtgattacctcctccgaaatagactatgatggggataatcgcattgacgtggacgaattgctgttggatggcgattactcaaacgaggacaacgtggattcgaatcccgatgtggatctcaccccagatgattcgaatccaaaacttgatgctgactctaatccaaaacttgatgcggattctaacccaaaactagacgccgatagcaatcccaaactcgacgccgactctaatccaaaagttgacctgaccccagataatctgtgcttcctgatttatactagcggaagtactggaaagcccaaaggagtgatgataacccaccgtgggatcactaactacatcgcaaatgttaaggagaacgttcctatctacgagttgaaccacaaatgcagcggctttgtgtccatcagtaccgtgagttttatcgttttcctaagggagatcttgggaacggtcctcaacggactgcctgtggtgtttgccaatgacgagcaggccgtggacccactggagtttgctgaacttttcaacaacagcgacgctgacgccttcggttcaacacctaccagactgcttgagtacctgcagctcgaagagattcaggacctggtgggaaaatgcaaagtcataatcgttggaggggaaggattcccgcctgtgctgtacgaccgacttcggaagcacacagacgccgacatctataattcatatggcccaactgaagtgaccatcgctagccactacaagctgatcgattccaatgaggtgacggcaggttgggagatgctcaatgtggtggataagatcatggatattgatgggaaccagctccccccctacgtcactggtgagatctatgtgggaggtgctgggattgccaggggatacctgaacaatcccgagcagacggaaaaggtcttcctgacactcaacgatattccctactacaacactggggacctcggtaaaaaggatgcaaatggcgaactgtacgtggccggccggaacgatacgcaaatcaagctgagagggctcaggatagagctgtctgaaatcgaaggggccattgcaaattacgagaatgtgtccctttccaaggtcctggtgaagaagcttaataatgtggagcatctatgcgcctatttcacggcctcctctgagatcggcctcggagacctgaagcagcacctgattgactcactccccgaatatatggtgccatcctatttcactcagcttgagagcttccccaagacacccaacggaaagacagacttcaagaacctgccggaccctgagatcgatgcggatgaatttatcagccctcgcaccgaccttgaaaaagagctctttgacattgtatctgatatccttgggatggatgagtttggggtgaacacggatctctttagcattgggctcactagcctgtcggtgattaagctgacctccgccatctacaataagctgaatgcacagatgaacgttactgagatattgaaatacaagacaattgaacgaatcgccagcgagatcaagattgaagatgacgagtctcgcgacattatggagctgtatccattgacgagtaatcagcttggagtctactttgactgcatcaaggatctggagaacactgcctacaaccttcccaagaaaatcgaatttactgaaggaattgatgtggaccgcctcaagagctcaatcataaaggctattgataaccacccatacttgaagacccgaattgtaatgaacaacggtgaagtctatcagcaacggcgcgacgagctgaaagttgatgatctgatcgagattagcgatgatgagaacctcgatgacttcgtaaaacccttcaagctggatgaggggccgcttttcagattcaagatcgttggcgactcaatactcctggccgacttccaccacatcattctggacggaacgtccctcaacatcctgtttgacgaaattgccaagatatatgacgggaaggattatgagctggaggagctggacggattcgaatactcattggacgaggtgaaggtggagcaatccagcctgtacaaagaagcggagctcttctttgcagataagattaaggaatttgataatgccagcctgatcccacaggacatcaacggcgacgagtcaaaaggcaaagcggcaatctgtgacgtattcctggaaaaggacagtatcgacgatttctgttcgaaaaagaacatcagccagaacaacctattcctggcagccacatcctttgtaatcaacaagttcgtattcaaccgggacacgctgattgcaacaatcaccaatggcaggttcaatccaaatcagcagaagactttggccatgatggtgaagaccctgcccttggcgctgaaactcaattccgactccaccctgaaggactacatcgaatatgtcaacctggagtggctgaatgtattgtcctattccagttatcccttaaccgaaatctcgaatgagttcgatatcacccctgagatattctatgcttatcacggtaagatcatagaggagattgagatcggcggaatgactgttgagaggcaatccatcgattatgagggcctgaaattcaaggtcaacatcaacgtcgtggaggaggacggccaataccgcattttctgccagtacaatgaccagctatacagcgaaaccttaatcgacaccttcctcgactgcatcaggatcgtcctggacaaattccagcgctttgatgagaataccctcatgaaggacatttcaatcattgaaaatgatgattggagcgtggacgacttggaatatgatgagattcccgaggacaggctaaacaaaatattcgaaagtcaggttgagttgcaccccgaccgggtgatcttatacgccaccgatggggaatttacgtatcgccaattgaatgaaaaggccaacaggattgcacatagcctcatcaaaaaaggcgtcggccctgaagatagggtgatgtttatcctgaatagaaacagcaatgtggtagcgtcaatattcggtatcctcaaagcagggggggccttcatccccgtggattccgaatacccctccgaaaggattgagcacgtcctgacagacagccagtcaaaattcatcattgtggatgatgtgattcggaagaagggcattgacctctcagactacagcgagaacctcttggatgtgaacgagctcctctctgaggaggacacctcgaatcctgaccccgatgtccatgggaataacatggcttacctgatctacacctccggttccacagggctgccaaaaggtgtgatccttgagcatggcaacatcgctaactttgtctaccctgatccacgtaatgtctgtacatatgaactggtgcacaacctggaaaaagaggactataaggtgctgagcacaacaactgtggcttttgacgtgttccagcaagagattatgggctccctgttaaacggggttcctatggtatttgccaatgacacagagtacaaagaccccatcgaaatgatggacctaatccaccgcaccggagctaacgtgtacattgcaaccccctcacgactgctccagtacctggaaatcgaggcgatgcaggagaccatgtatggctttaaggtgtatatccacgcaggagagccattctcggccagactctacgacctgctgtcccaaaactccaagggtaagttctttaacatgtacgggccgaccgaaacaacagtttactgtaacggacagctgcttgaaagcagtgacatccacattggaaaggagctcttcaacgtccatgagatggtgatggacttcgactccaatcctctgcctcccaatgtcatcggcgaactgtacattggcggcaagggcgtgagcagggaatatctaaaccgtccggagaaaaacgccgagtcctatgaggtgatcaacggcatccggttctatcattccggggactttgtccgcgtcactgaggaggggaactattacgtctttgggagaatggacaatcagatcaagctgagaggcttgcggatcgaaatcggcgagattgaagttggcctgtcaaaattccccggcatcaagtctgtggctgttgtggtccgcaagattaagggcaacgatcatctctgcgcctactttaccgtccacgacgagtataaggatgaaaagcggggggaaaacggatattccatcgacatcgacgatctgaaagcctcccttgctgaaaaactggtgtactacatggttccgaccgtctatatggagctcgaggagatgcctcagactgccaatggcaagacagacctgcgcaacctgcccgagcccgtcctaatcaccgaatacgtggctcctgaaaacgacattgaagctttctttgccaacttgttcggtgaaatcctggggctcgatgaggtcagcgccacggataacttctttgagattggtgggacatccctcttagttactaaaatcaccatggaagccttgaaccgaaactacaacctaagctacggggacgtgttcagtaatccgactccacgcgcactgtctgagctgatcctatcagatgagaccgcggagaaaaaaagcgagctctcttacgactactccgaaatcaatgcgctgcttaagaagaacaatctggaaaacatcataaacggcgagattcaggagagcttaggcaatacattgcttaccggggccaccggctttctcggcatacacgtccttcgagagctgatcgaaaatgacatcggagacatttactgtttcatacgagccaacaaggtcttgagcggcgaggagagattgaaaagcctgctattctactacttctctgatgaatactccgacatattctcggaacgactccacgtcatcgaaggggacatcaccagtttcgatgactttgagaagctggtgcatgagcggattgacactgtaatcaactgtgcagctaacgtgaagcacttctcctctggcaccgatattgaggacatcaaccttggaggggttatcaacggcctcaagttcgctaaaatgaaaaacgccaaatatgttcaggtatcgacatacagtattgccggtgaaagcataaacaattaccctccagtggatgttaagtttagcgagaatgacctcttcatcggtcaggcggtggacaatcagtaccttaactccaaattcctggcagaacgggccgtcctggaggctgccgtcaacgatgacttggatgttaaaatcatgagggtgggcaacctgatggcacggagtagtgacagcgagttccagatcaactttgagtcaaacggcttcatcaatcgtctgaaggcctttgtgactattggcaaaatgccatactcaatgcttatgaacaatgtggaatttagtccgattgacatgaccgccaaatccattgtagctctctcaaaaacgcctaaggaatgtactgtgttccatccatacgatcatcatagcgtgtgctttggtgacatcattgaaattatcaaacctctgggcttggacatcgaacccgctgaggaggaggattacgaaaaggccctggatgaggctctggctgataaggacaagcaagacggtgtttcgggactgatcacgtccatcgggtctgggaaggtgaagaaaatctgggtccccgttgaaaatgtatacactattcaggcattgtatagactgggcattaaatggcctttcgtgtcggaggagtacatatataattttgtaaaatacctgaatgacctcgacttctttagtgtttga

SEQ ID NO: 2286 - DNA, 1461 bp, synthetic construct
  source 1..1461: mol_type = other DNA
atgtacgaaaggaattataaactgttgcgggcaaaattctctgaatttttccttcccacattatttacctccatggcaggtaacatctgcctcttcgttgacggtttgattgtcagttttctgatcggcgccagtaaccttgctcccatccagattgtagctcccgtgatcacatttgtcaacctgatctattggatgatcggtctgggcggaagcgtcctctgtagcgtagcaaaggccgagtttgatgacgagaaaagcaatagctacttttccgtgagcatcatctccctcatctccatcggggtactgattacggttataggactcttgttttctggtagcattgcccagttcctctgctcgtcacagcctgagttggtgtcacaagtgtcccagtacttcattgccttggtgattggcatgccattcctctgttacatgatgagcctctcttatttcatacgagcggatggcatcccccagctgccattccgcgccatcctgatagcaaacattgtcaatatctgctttgacattatttacattaagtttttcaaccttggcctaaccggggcggcgctggccaccagcaccgggtatctggtgggttccatcctcatcagctactacttcttcaaaaaggaacgtaccctggaatttataaagctcaaagctaacgctttctttaaattcatcaaaaagatagttacttcaggattcagctcggcgagcactcagctctatctgactctgaagttacttgtcataaactttttagttggcctgtacgtgggcaagtcgggggttgtcgccttcggcatttgctacaacagtctgttcatcctatacatattcctgattggaactgcccagacaatgtctccgatcgtctctgtgtactttaaggaggaggactacagcggggtggactatattatcaagcggtccctaaagatcgtggtcgcttcaagtctggctctgtctgtgctgttcatcttctatcctcaggccctgcttttcttgtatagtgtgaaagacccggccgatgtgcctgtagtgctgaatgccctgcgcatttttgccattagttacgtgggcacagctattacattcctctataccttctacgcccaggcaatccaaaagaacagactgtccaccatcatttcactgctggagggctttctcctgccaatttcagccgcagtcatcttgagtttcgccatcgggggcaatggaatctggatttcctttgcaatagctgagctactgacgatacttttcatcttcgcttacagcagaaacatcaataagaagacaaatggggaatacacgggatttttcatcaacaagcacaacgacgatgagcgggtgtttgaatataccatcaatggaaacatcgaggaggccgtgaatctccttcagaggaagtcccaaaaattaccctatctggggtga

SEQ ID NO: 2287 - DNA, 237 bp, synthetic construct
  source 1..237: mol_type = other DNA
atgctggtaaacatcattaacatcaatgacgtcgtcgacacgattgatatcatcgtgaggaagaatgttgacaatatactcatttccgtgaaggacaccggggttgatttcaaccccgtggtggaaaacgaggagctgaaatttgacaatataagcgtgctcaacaaaatcgccgataagattgattacagccgggtcctaggcctgaacagtacagtgatcaccatcaagaactga

SEQ ID NO: 2288 - DNA, 1062 bp, synthetic construct
  source 1..1062: mol_type = other DNA
atgttcaacaactacaaagacaaactgaccggagatcggaagatcctcattctgtttgtaattttggccatctttaacatagccttgtacatcaacatattcaagtacatggtggacatcaaggacattaacatggcggtgatccatgactttgtgacgatcaactgcgccatcattatcctcggattcactagcaccaggctccccaacctgaaaaagcgggacagttccatttatgagatcagttaccttatcatcataggcctattaagcataaccatttcattcttcaacaagtccatcaatggggaaagcctgtgggctccctatttggaaatgttccggatcttatctgtcgtcctgattctgacattcctcgccactaaaaccaaaagcttcaaggccgtggtaaggggtgaccgctcccgaaagacaatcatctcgcagattatcctctgttcagtgctgggtatccttgcaagttatttcacaatggacatcaacggcctgccagccaatgcacgtgcactggttgtgatgatatccggactgctgggagggccatatattgggatacctgtgggcattatctctggcgtctggagatactcaatgggaggtcctacggctctggcttgcgccattgctacaattctggccggtatcactgggagcatcatccacagatggaatgggaatgaatttatttccccagtgaaggcggggcttctgatgtttttctacagcggctttgagatgtttctgctgaccattctgaccccccgccccacgggcctcatcgtggcgagcaatctttatggcccgatgacatttgccgcagtcctgggaatcctacttttcagcctcttcttggatgagaaaaaggagaaggctgagaccgatactgatgacggcgatgaagataagaagattgagctcatgtcggaggagttggaagaatacaagataaaggccaaccaaaccgagggggagctcaaagagtacaaagacaaggttgaaaagctagaacaggagctgaatgagatcaaaggcaaaatttga

SEQ ID NO: 2289 - DNA, 2919 bp, synthetic construct
  source 1..2919: mol_type = other DNA
atggataaaaagatctttatagtgagctttattctgctcgctattttcaccattggggctgtgggcgccagcgatgtgtcagagctgacagcaaatgatctggacgacaacgctctgagtctcaatgacggtgaagatttgctggctggggacgagtctggtgaatccggcaaagaatcttactttaataatgataataactacaacgatgaaaaccgggtaaatgcgaacaatttggattatggggctggggacaatgacgcctctaaagacaaagtcctctccgacaacgtgtccgattacatctacgccacgaccctcagcgtttctgtcgatgacactccccaaagccagtatcccaccgccactgtcagcctgaatgatttgagtggcaaccccgttgccgaggccagcgtgtccgtcagtgtcgacggtgacgattatatgacggttatcaccacaaccgatgggacatgcccgctctccctggacaactatctgtctgtaggcagtcacaaggttggggcagagtactccggcgacgggacttatggaccctcaagcgcttccaccacattcaatgttctggaggaatattcctcttacctaaacaccgacttgttcatatatacaggcacgggcagggaagggggctacacttctgtgacagggaagctgactcatatcaatcagcctatctccaatgccaccatttccctctacgtcgacgatgacttctactcgaacctgaccacggacaagcaaggcgagatcgaggggatgctgttcaacataagcgttggccgtcacgagcttcgcggagagtacgtgggtgatcgaggattcgaaccctcaaacgccaccaaatacttcaatgtcctgcctaaggactcagtgtccagcaatatccagatgacactgaatgcctctgatgctcaggtgggtacccaggcgaatgcatacgtcttactggagcggcagtacggtggcccgatggaggatgccaccatttccatcagcgtggacgacgtgttttatatgaacgtgaccacgaacgccctcgggtacgccttctttgatttgtcggacgacttgtctgtgggcagccacaagctttccggagagtatcccggcaacgagtacacaggcagttcaagcgctagtatcactttcaatatccttcccgtggacgattccagctacaacttcactgtgaccgaatatgcaaattacctcgacactaataccaccgtgcttgatatttcctcaaaatactacgtcaacggtagctttaacgtgtcagtggtctctccaaacggaacgctgtccactttcacccaggactgcagtcccgacggccataacaactggtcaatggccgactttgggatcgacggcattggaagctacatcatttccggatcgttaatctttaagaacgagacactgacccactttgacaatcagaccttccatgccatctgcatcaggccgatatacatggaaagcactgaagccaacaatccgttggatatcctggtggtgtacaactccagcgacgcaaccaaggtctcggtgaacggctccggcctatttgaaggacgaaaaatcacggatggtcccatcgtgtggaacctgacagacctcaacatcaccgagcttggtgactacaacatcagcgttatgtcctatgacagcaaaggcaacctcattgaccgcttcgactacaacctgaccatcggccccaatggggacgactataaactctatgccaagatagatccaaactcttacagtacggacgatgtggccgtagccctgtattgtccaaatgcatcatggggtaatgacatagaggtgcacatttacatgggcaaccctctggaagttctcaccttcttcccagatagcgtgagtcctacagaggccgcgtcattcaagaaatacacacttgccgatttgagaatcgagaacagcaacgattatagagtggagattaaggacttcgcgctcaaccagttcccagggatcagtttcaacatcaaagtctgttacagcaatatgattctcgtcagcggaaacggaagctttgagattgacttcgatggtgcgtcagtcaacgcaaccctaacagacagtaatggaaaccctatttcaaacgctagcgtttcagctcttgtgaatggggtagagtctaactgcactaccgatgataacgggaatctaataattccatttgaaggcaacacaactgtgaaactgacctatatcgataacaatggagtggaaattaaaggcaccgggaagtatgtcaaggaatcggtgattaagaatagaactgagaccaagattatctatcaaaacatgacaaccactacagtcaattccaacgtggacggacgcataggcaagtactttgaggtaagtctgcaggacgccgacgggaacccaattgcaaacaagacggtattcataggattcaacggaaaggtctacaaccggaccactaactctacagggggcgtgagcttacagatcaacctgggatacgcgggaaaatatacctttgccattgccttcctgggagatgatgattatatgggctcctttgaggtggctctgatcacggtaaacaagcagacgcctaagatcaccgccagttctaaggcatacaggcctaattccaaggctaagtctcttgttgctacactgaagtcggccaagggcaatgcaatcagcggcaagaagataagctttaccatcaatggaaagacctactcaacaactacaaatgcaaaagggctcgctacactgaatgtttcgttaagtaaaaaaggtacttactcctgtactgcgaaatatgccggcgacggtatgtataaggcaacaagtacgaagtttagtgtgaaaatcgcttga

SEQ ID NO: 2290 - DNA, 1464 bp, synthetic construct
  source 1..1464: mol_type = other DNA
atgacggtaaaagtcttcatcagcagtaatcaaaatgaatttttcgaagagaggaagctcatcaaaaaggagctcgaatctgactccatgttcaaaaactatgtggatgtgtttgtgtttgaagaaaatgaggcccgctccctgtcgccacaggaaaatttcatcgagggactgtacaattccgacgtctacatcggtcttatcggctcatcgtatggcgatataaaggacaatggactgtcctctacagagtacgaatatgagattttcagccgccttaagaacaagcagaacatctacttctttataaaggactccaacgagagagaggataaggctctggatttcattgagagaatcaagagcgatacaagcttcaaaattttccacaacactgtggagctcatcgaggagatcaaacggagcctcaaggcacatataaaccagagtctaagcaaccaggagtttgacttccaactgctggcagagagcagttgcgacgatgtaagcaaggaggctctggacctccttttcgactccattgattaccagcccatactggacttgctcggtaatcgggatatggagagcattctggagatcctgagcctgggaaagaaagatctgtcagggacattccggttaaacaatgccggtgccctctttctagccgagaacattgagaagtttaacattgagcacgaagtgaagctggtgcgattcaaagggaataccaagctcgaaatgattgacaaatgctacaccaccagtcctttctttatccttttaaaggagtttgaacacttctattggaaaaacatcaaggtgggctctgtcattaacggcctccggcgtgtaaacattccagaatatcccttcaatgccatcagggaggccatgatcaacgcgctggcccatcgggactacagcttcaagggcagtttcatccagttttacatctatgacgataggatcgagataattagtcctggaaaccttttgtacccattaaaggttagcaatctgaagaacattgaagtccccgtgcaccgaaataagaatatttgcaatttgttctccaagaccatttttatggagcacgttggctctggaatccagcgcatgtgtgacgagatgcgcaagtcaggcttgagggagcctgaatttataaacggcgaggggttctttaaggtcatcttttgggggcccaacggaaaactgatctacccggaagaggctgtggacaacaacgttctggacctaactaaagtggggttgaatgataggcagataagagcactgtcaagaatcgtgaatgaaaaagtcaaatattcctacgaaagatactctaacgagtttgacgtgtcgaagtcaacgtctaaacgagatctgaacgacctggcgaagaaagggctcgttatcgaaaacaaatccaatcgccggaactactatttcgtggaatga

SEQ ID NO: 2291 - DNA, 528 bp, synthetic construct
  source 1..528: mol_type = other DNA
atgattgacgagtccatcctcaatctctttaaagacgagaaaatcaggtccatttgggacgacaagacaggagattactactattcaatcgtagacctgatcagcatcattaccgaaagcaaaaacccggataaatactggtcagatctgaagagaaagatgaaaaaggatgaatacaacctactgaataagtatatcgtccagatggaaatgccctcctctaacggcaagatgcggttgactgacgccggggacattgagacggtgctgcgaataatacaagcagtcccatcgcccaacgcggagccttataaggagtggcttgcccaggtggccaacgagtgcctggaagagtacattaatccagaactggctatcgaaatggccataggggcttaccgcaaaaagggctatagcgaggagtggatcagtcgcaagctcttcagcatggagatcaggaacggacttaagaaggagggcttcaaagaaaagaccaatcgggagcacgtgttagatagtctggcatga

SEQ ID NO: 2292 - DNA, 1230 bp, synthetic construct
  source 1..1230: mol_type = other DNA
atggtgaaaagagaactgtatatgaataaaatcaacagcttcattgataaggatctgatcaaaataataaccggagtgcgcagaagcggcaagtcttactttttcaagctgatcatcaacgaactaaaggagcgcggagtggctgaggaaaacatccttttgatagattttgaacttccccagtaccggcacatcaagacaagtgaggagttagacgagattgtgctggatttcatcgatagccaccctgaaaaaacatacctcttttttgatgagatccagaacgtttccgagtgggagctgtccgtcaactcatactacaaactttccaaaagcgatatttacatcaccggttccaattttaagctgctgtccaaagagctggccagctttttgacggggcggtatgtgtcaatcaacatgtatcctttcagcttcaatgaatttatcgactataagaaggagatcgggtctctgcccatcaacagcaatgagttaaataccgagcttgagaattacttcgacgagtatttccgctacggcgggtttcccaccgcgatttcttcgaatgaccataaggagatcattctgaacgacttgtattcaagtattatcctgaatgacatcgtcacaagatatgagatcagaaacgtaggcctattcagtcgaatcatcaagttcctcattgaaaacgtagggaatctcatatcggccaactccctctacaactacctccgcggacaaggtatggagattaccaagccaactatctacaattacctcaattacctcgagagtgccaacatactatcaaaaatcacgagggaggacctggtcggcaagcgggaaattaacggttctgagaagtattatctgatcgaccagggattctaccgatcccagctggagatcaagcaagagaacactggccgcatcatcgaaaatattgtgtacttggagctgcttaggcgggggtacacaatcactattggctgtattggaaaactcgaagttgacttcgtctgcaaaaggaacaacgagcggatatacattcaggtggcatattatctgagcagtgatgaaaccattgaaagggaatttgaaccattgaggagaatatcagacaactacccgaaatatgtgctgtccatggataagacggaccagagccgtgaaggcattaagcacctcaacataattcagttcctgcgatctagcgaagacatctga

SEQ ID NO: 2293 - DNA, 6606 bp, synthetic construct
  source 1..6606: mol_type = other DNA
atgatgaaaatgacgaaaaagaacctgtttctgatcagtctgatcctactaatcatccttacaattggtgctgtcagcgcagccgacgacctgtctgcaagctccgatctgacagtggaagacagcggagaagccatagcgacggcccccgaagagtctgttctgatcaatgagaataatggagactcgatcgccgacaaggggttgagtgatcctatctcaaatgaaacagcgaacatcgcaatagatgagaagactacaaatgacaaagctatttcggaggaggataattccatctactctaaagacaaggctaatgtgctgcgggaaaatgagacacctgttattctgactataaatgccccaaatatctactacggggagaccgccaacgtgaccgtttctgcaaggtacggggctgggcctctcgccaacagtagcattaatcttgctctggatggcgcagccggggaaaacattttaattttcgacgacgggatcgcgcaaaagaattacacggggctggctgcaggcaaccatgctgtggtggcatccttcagcggatatgggccctatccttcggcaagtgcttcaaaaagctttgaagtgctcaccccgacagtcaatatagagatagaagcgaacgacatctattatggggaacgcgcctatgtcacgctgcatgtgacctatggcaaccagccctttgccaataatactatccaggtatctcttgacggccaaagcagtacaagttttatcgtagaggatgacggcaatattcaagtgacctactccaacttggccctcggcagtcacaccgttagcgcctacttcagcggatacgggccctatccatctgcaagcgcttcaaaagacttcaaggtgtcaaaaaaggagaccgctgtatcactcagcgtgtccaacccccagcttgataagggtgatgagctgcggttcacgcccagcgtcatctcaaacggattttacgtgatggctaactcctactccattatggtggacggcatgagcaattactcttattggacggagaacggcacctacttcctgtcaacttcctcgctgagtagtggcaatcacacgttgaccgtaagttatgcgggggacgcgagtttcttgccctcatctgcaaacgccaccttcacagtcaattcttacaaggccacgctctcactcatgatgatcgaaacagagctgtatccgggggatgattgttacattttcatcgacctctatgacagcaacactcatcagtccatcgccgctaacattacagtcagcgtgggcaacaactcttatctgtatcctattcgagtgaatagtagctttaaccttcctaccgataatctggctccgggagtgtacaatgtcactgccttctttgacgggaacgggctctacgaccctgagactgccgtgggaaccttgactgttctgtcgaagaaggagacgactctgtcactcagcatctccaatcccgttttgagtattggggatgagctgcggttcatccctagtttaacgggcgatgggtcgtacatttggggggcttcctatacaattaaggttgacggcatgggcaatcagacgtgtaggctggtgaacgacacgtacttccttagtacgtccgattttgcgattggaaaccatgccttgactgtcagttacgcgggcaacggggagtacatgccatcctcggcaaccgggtatttcgaggtgactccaaaaaaggccaacctctccctgaacatgctctcaacagagctgtaccccggtgacgactgctacctgtacatttatctcaccgacagcaatacgcaccagtcaattgccgcgaatattacaatcagcgtgggcaacaattcgtatccgtacccaattcgagagaatagcagctttaaccttcctactgacaatctggctcctggcgtgtacaatgtcaccgcattctatcccggaaacgatctatacggtccagaaacggccgtggaaaccctgacagttatggaggaaaacgccacaatcaaaacagaaacctatctaagcataattatggcttctggagataaatatctgggcgacaacataccattcagtgtgagccgcactccatctggcgtttcactctttggcgacaattacatctttagcatcgacggcgttgagtctcaggatatcttctatgagaatttctcctacttcatcgtcacggagaacctgtcccttggaaaccacaaccttacagcatattacccaggagacgagatgtacttgccttcctctgccagtcagaacttcacactgatctctaggcccaaatccgatgtcctcttaagcatagaggccaatgacacgttcattggagaggacgcgactattatcatcaatatgatcgacgagctcggcaatcccattgacggagccaacgtttacctgtacatggataataaggagtttgcgcttccgctggtaaacggggtcgctcagttctcctactccaatttatcactgggcacatacctcgtgagcgcactgtttaacggaacggaatactacaacccggcaaacgcttccgcaagctttgaggtcctcaacgccaacctaactgtgaccaaggataacttcttccagttcttcaataataacggagtactcaatacaaacgcaactgacttaaaattcgtgggggagtttaatgatctgggcattacaagcataaaaatcaacaagccagtgtccatcgtgggtgaaaatgccaatataatcaacattccagtgattgtctcctccgacgacgtctccctcgccaacattgcctttgcctacaacgggagcgagcccataatctatgcaaacaatgtggctaacctagagatcataaacaatgccttctcctataaatccccttcagacaagagctatgccgtgaacattacaaagtcggagaacgtgacaatcatcgacaattcctttaatgtagtgggtggaaacaacacctatggtatcaatatagacgccatcggctttgaaatcgattccaacgatatctacgtggaatccacagagtactatgccagcgcaatcaacatcaacggtccaagctcaggaaatgtgctgaacaacaccattaacgcatacgcgcctatgatggtctatgccatcaatacagacccatctagcggaaccctggaaacaagctacagagacaatgtgattgagggagaatcctacttcgccatcggtatttacgacgatagcgaaacaatcaccgggaacgagatcaaactgactgctaactatgcaatcggaattgtggccctctctgagtcgaacattgaagacaataaaatcaagttagatgccacaaacgtcggggacgaggacgtggaagatgatgaagtggacgtgcagacggccgggattgtcatcaagaacaacgtgcaggtcacaggcaacaatatcgatagcagcgacgcctccattgcagtggtctcaggaagctccaccatcaacaataacgcactgaacgggcacgtgaccgtgggcggcgacagcagcgacaataacatcgtcaacaacatcatcaacacagaatcagaatacgcagttgagttgaccacaacaaccggcaacactgtatacaacaacgagatccacgcagctgacaccgtcggtaacgatgctgtcaacgctgagaatatcggtgcaaacacggtggaggagaacaacgattgggtgaacatcaccaacctcatcttgacagtgaatgacgattcaaccgaagtcaccgccaacttgactgacatatggggcaatcccataagcggcatcatcaatgtgtcactaaacggggccgatccagccgaatgcacagtcaacgagaccggattgtatgtgatcccaatcacccagaactcaaccgtttacgcttcctatataaacgtagacggcagtctgtcctttgataagataaaagtaatcgtctttaacttccccgtggaggttctccccaatgctaccattgccttgaccgacctcgacggcaccgtcgtggcgaatgtgaccgacctggaggggaacgccatcgctaacaaattgctggcagtgaccgttaatgatattccggtgcttggggcccagaccgacgacgagggtatttattcgattgatgtagtaggcaatgccactgtggtggtcagttacatcgatgctaacggcattaccgttagcagttcaatccaaataattaacaatgtggagaccgaaaccggaaccataatcattcgacccaatgccactattgccctgactaatgtggatggcactgttgtggctaacgtgacggaccttgatggcaacgcgctggccaacaagctcctcacggtcactgttaatggtgcctctaagcttggagctaaaacagacgaaaatgggatttattctatcgatgttgacggcaatgccacggtggtggtgagttacactgatgccaacggcatcactgttaccagctccatcaatgtggttgtgaacacagtaacagagaccgagaccctgcggcccaatgccaccattggtctggaacgcgacggcaacgtggtcatcatcaccctggttgactctgatgacaacccgatctcgggtgccgatgtggtggtttacgtaaacgatatcgaaaccctggtcgatcccaccgacagtgagggtaaaaccaacgtgtccttcgaaggaaacgctaccattgaggttatctacctcgacgataatctgatagcggtgagcagctccatcgagattatcaacaataccgaggtcgagatcgagagtgaaacgttacgccctaacgtgaccattgggttggaacgcgacggaaacgtggtcatcattactttggttgatagcgacgataatcccatctctggggcggatgtggtggtttacgtgaacgacatcgagactctggtcgatcctaccgatagtgagggtaaaaccaacgtctccttcgaaggaaacgctaccattgaggtgatttatcttgatgataatctgatagccgtgtctagctccatcgagattattaacgacactgttgaaggcgagaccattattatcaaccccgacgctaccatcaagctgcatcacgtggataataaggtcatcgtgaatctgacggaccttgaaggtcaccctttagcggataaggtgatctacgtatacgtgaattacgaagagatagagggtgccaagactgacgagaatggtctatactctgttgatatcgaaggcaacacatctgtgattgtcacctatgtcgaccccgtgggcagaagggttaccagctccattgacgtggtggtgaataccgaaacggagaccgagactgtggtgatccggcccaatgcgaccattgcactgaccaatgtggacggcactgtggtggctaatgtgactgatcttgagggcaacgctatagctaataaactcctgactgtgactgtgaacggtgctcccaagctgggggcgcagacagacgagaacggcatttattctgttgacgtagatggcaatgccactgtggtggtcagttgcaccgatgacaacggcatcacggtcaccagttcgattatagtcgtcaacagcactgagatcgtggaagttgaaaagatagtgaaccaaacagtggaagtggaaaagatcgtctacgtaaaccagactgtcgaggtgcctgttgaggtagaaaagatcgtgtatgtaaaccagacaaacaataacactattgaggtcgagaagatcgtctatgtaaaccagaccgtcgaggtgccggttgaagtcgagaagattatctacatcaacaatactgtcgaggtgcctgtagaggttgagaagattgtctacgtgaatgaaaccgacaacagcaccattggaaccgaaaagattgtctatatcaaccagaccgtggaaaagatagtgtacgtgaatcaaacagtgcccatcattccaaatagaaccgccacgaatatcatatgtgacaacatgactaccgaggcagtggccacagttgacggaagaataggtaaatactttgaagtgactctggtggacgctgatggcaacccactggtcaacaagccagtcgccatcggattttcaggcaagatctataaccgtataacaaacgagacagggggcgtaaagctacagatcaacctcgggtacaaagggtcatacaccttcgccatagccttcctgggcgatgacgactacaacgggtcctttgccgtggcaaacgtgaaggtcacggaccagaatgccaaactgacagccagtggaaaggcctataaggctagcgctaagactaaagccgtatctgctaccttcaagtccgcaaatggcaatgcaatcagcggcaagaagatcagcttcactgtcaatggaaaaacctattccgcgaccacaaacgataagggcgtcgccaaggtcaatgtttcactcaacaaaaaaggaacttacacctgcacagccaaatttacaggaaacggaatgtataagacaacaagcaccagtttcaaagtcaaaatcttttga

SEQ ID NO: 2294 - DNA, 9162 bp, synthetic construct
  source 1..9162: mol_type = other DNA
atggtgatcatgaacaacaaaaagctttttatcgttagtctgatcatcctaacgatcctgacaataggcgccgtcagtgccgctgacgacggcctggccacctcagatgagataacagtggacgactcgtcagtcgccgtttccacggcctccgcagagtcagatatctatgagactaacggcgatatcgtggccgactatcaaagtgatagcatctccaacgtaactgtggatgatgacaacactaaagacgagatcattcgctcttctcccgctaaggacaaccttctgcttgacgacgacgacgatcccggtgccgtgaatgatgatgacgaaggggacgacgatgaagactaccttgatgacatctcagtgagcatcacaaatgagtacgacgtgaccgatcaggatgcggtgatagtttccatattcgttcccgacgtggaggagggagaggatggcattgaaggatacttcgtcgtttgtcttgacgacgacgacgagatattcctggggcctttcaaccacacaatcactcctgatgactacgggaccgatgtgacctttactgcttctgatttggagatcacagaagcggcgaattactgggtgcgggtgttctatgtgagcgatctggctgagcccctgatcgataatgatgaggaggacgggtacaatatgatcttcgatggggactgcattgcacgggactacactcagttttatgtgatcgtcccccccgacggcagaatcagcatcttcgacactagtgccatctacaccgtgtactgccccccaggcagtgaaggcacagtcaccttgactctaagggatgaggaggatgtggagacgtccttcacccaggagatcgaggatgcggatgatgagaaccagttatactgggatttagactatatgggactcaacaccatcgatgccgccggcaactacgaggtgacaatcaccctggaaaatggcactctcatctgtgaggacgatatacgcattatggaccccatcgagattcccgaagtctcttacatcaacagcacagactatgaccatgcaacgctggtcgccctcattaagatcccatccgagttggacgatgatctggaagaactcattgatggaacagtcattatccagattgacgatgagacagtcttcgaaaagacactcagcgagttcgtcgagggcgaaagccctgacgacccattttgggtttacccaaaaattcactggagtgacgaactcgacacttcagtgaaattatactacgtcctcaacaaccaactcgatatcgatttagagcccggaacatatgatgtgacagtcaagctggacctggacggatgggatgaggtctcaagtactgaagaggtgcgcttggtcgagagcaatgtagtcatcgacgaggacatcggcgcaagcattgaaatcttcgaccaggaggatatcctcaatgacaatgaggtgagaatcatcgctatcactgtaaccggcgataagagtggacgagttaatctcgccgtggaaggatgtcccgagtgggagtgtccactcgacgaactggagaacgagggcgacatctactacattaactccggctttgatattgaaagcggtgaacatgaggttgtcgtctcctatgtcctcaacgatgatcgatcggtttcaaacagcgctatcctgaactttatcgtctatccaaggattttcatttgcggaaatggcggggaagacatcgtgaactacttcgccgacgaggacagtgcaattcacatatatcctaagggagacgacgtctccaccataaggatcgtggtaacaattggcgacgaagttgtgctagattccaccatagatgatttgggcctcagccccaagatcaacgattggggagaaacctattacacagtagggcccgccaacttcaacaaaaagctggagtttggccattacgagccagtggtggcgtactactattccgatgcatatgagttgagcactgaggatggggaattgtcattcatcgacattatcggaatggtccacgtagccgacattgaagacgatgaaacgccagtactggccgtttgctcggaccgggacgggcagattggagtgtacatccgccaatacactgaagatggcgaccaggagttagagccaaaatactttgaggtggaaaaacacggcttcataatgccgaccattgaccaactgggcctggatgagggccaataccacatcgatgttgcatatgccgacgacgaatggatcttcggcaacgacctgatcgtggtcaacagttccgaatactttgtgctctacggctgtgactggctctacactgaagagagtgtagtctatgtatggtgcccggacgatgcggaaggaatcattagcctcactaacaacgatggcacaatcaacgtcgaccatgaaattacagatgaggataagggcaaatatgtcgagttcacccttgaggaactcggcataagcggccctggctggtatgagatcagcgtaagggtgaacggcaatgaaatcgatcacattggattcgatgtgccaagcccgatctacatgcctaattataatgtgtatctgccagaggagggatacgaacctgactattccatgatcattgccaaacttgagctcaactccgagctggaaggcaacattaccattaacctcgatgggaccatcgtcttcaacaaggacattgaggatatggaagctattaaagacggctccaaatggatctacaccatctacacgtctgatctcgatgaggcagaagaaggaatgcatgacgtgacggtcaccttcaacgatctgaacgaagaacggtccatagaatttctgaatcggaccaccgaaagcgatgggaacttaagcatcatcatgctggggggcacctactgcattaactggaatgacgtgattgccgaggtcatcgccccaaccaactacaacggcagactcgtcctacgacttcaaggtgagatcatgcagtcttgggacgaactgcactgggtcaactgggacaactacaatgacacgcacaatatctattacatttacgtagacaacttagataagatgtgcatcgagaatccaggagaatacactgtgtcgctcgagtactactcagacagggaggacgagaatccatccctgcagaacagcgaggaatatagatttgtgagagatgaggagccgtccggtgactttgaatgggaggtctatcactgggcagactatgaagacgaaaacagcctgctcgttacagtccgctacaacgataacatcgtggacggccgaatagaaatcaacattgaagatccaaacggcatcacgctgacagattcaagggacgtcggcgaaggatatgaggacacttggctggtgtcagacttgggcatccaggaatatggagtttacaccataagcgcaaagcacattctcggggacgacgaggagatcatattcgagaatgaacccgtgtatgtaacgaaaattcagattcgcggtgaggaggaagtttatgtagacgacccattgttcgtactggccatttatcatgccggcgatcgaacaacagtatatctcaatggcgcaggaattgagggcagacggctgcccaacggggggcctctggtgtggtacctctctgatttgtatatcaatgaacccggggagtatgactgcaccattcaactgtttgatgaggatgacaatctgtttgcacagaccgaatactacctgaatgtgatcgagggggacgacggctatcggctgattaaaaaccttgattgggactacttcacgtccagcacccctgttgctgcattgtactgccccgaggggtctgtgggagacatttcaattgacatctacgctccagacgacaacgacgatgattaccgcagccgtgatatagtaaatacaatactagactccattggctctgaggacgttgggggcttcaagatatggacgctcggcgacttgggaattaacgaaggtggctggaactatgggtttgtccttaatgacgctgatggggacaccattaccgacgagaatggggagaactgtgagtttggcttcggggcagtgctctaccatggaatcggcattgccatatgggatcagaatcccgtggccttggataacgagtggctggtggacatctactctcctctcgacaatgacggggacgtaattctgatgattggcgacgaggtctacttctccgacacgctgcagaacctggcgatgtatcagtatgacgaagacatagagcagggctgtgcccacttccactttggggcaaacagcttcaaccgcacaattgaaacaggccactacgaggaggtcatagtctactacgatggatttgacgggtatagtacagactccaccgctttcgattgtccaactgtcctcgactttggcaagcccatgaactttgactggtctgtcaaaggcgcttactacgagtattatgacaacaacgtgatcaacgtgtggtacaatgaggagataaatggcgggcaaataaaaatcattgcaagagccgaaaatggcactgagtacgagtctgtgaaagattataatgacaatcgcaacaacgagtggaccatcaccgactttggcataagcgagatcggaaaatacaacctgaccttgatatacattaatgagggcgatgaggagattgtccgtgacgataaggtgctgcaggtgctaaccttcgaccctcgcttcgccaactgggtaacggtggaccacccatatgacgtccttgcaatctaccaggcgacagaggagatcagggtctatgtgaacggcgaaggcccatatgagggtattaaaatgcctaacgatggtccgctgtcctgggatcttgaggcgctgggaatcagcgctgcaggtgagtacgagattcttgtggagtcctatgacggagaaggcaatctcctcagcagctttgaagacgtcctgtacgtcagtgacgagatgaatcctaacgaatacagggtggagtatgccaatgactgggacttctactctctggacagtcccgtattcggactgtactgtcccgaagggagcgaaggccccatcacaatcgaagtctatgggccggatgataacgacgccctgctgaacacaatcaatgacaatatcgagtctggagatattggcaccatcaagagctggaccgtcggggagttgatcacgaacttaaatggctgggactaccggtttgtgatctccgatgcaaatggcatcattaagaacggaaatgacgaggatatcggagaatttaacagaggaatcaacttccacgactcgatagactatataagtattaacgaatggtcttacctggacgacgaatggttcatcgacatctttgcatacacgggaaatgacggagatgtggccgtggagtttgacggtgcaacggtatataatggcagattgagcgatctgctgttcttccagtcagatgaagacatgcagaggggcattgcccattaccacatccccgtgtcatatctctctaatgaaggaaatccaattgaggccggcctgtacctgaacataatcgttaagtattatggtgacgacggctataacaccacaggctatacactgcagtcatacatcgacgagaatggtttcgattgggccaatgtgaggttaagcgtgggggacgatccgaatacaatcatcctcacactgaccaactcccattgggagcccctggcagataaggaggtatacatctcggtgaacggcggagaacgccaatggggattaacggacgagtacggtatcgccattttcacaatagacgggggaaactgcaccgttcgtggagagtatgagaatgccgagaatcagtggtccgcctatgagatgacgctatgcgtatttggggagcctatatatccaaacgcgacaattagactggaatttgttgacggggaggttattgtgaccctaactgacggcgatggggccccgctggctaataaggggctggggctagctatcgatgggatcgtcgttattggccccagcactgacgactatgggatttaccggatggggatagaaggcaatgccaccgtggaaatcagctaccaggatgaaaacggaattgtggtctcaagttccattacgatcgtcaacaacaccgagactgaaactgtgtacgtgggccccaacgccacaatccggcttgagatcgttgatgacaatgttatcgccagcctttccgatggagacggcgcccccatagctaacgagtttattgacgtctcggttaatggggtgcccgttaacggggcaatgaccaatgccagcggtctttattccatcagcgtggagggcaatgccactgtggaggtcagctacactgatgataatgggatcaccgtgtcaagctcaattaggatcatcaacaacattgagactgtgccggagccggtgaacgtgctgcccaacgccaccatcggtttgtcaaaagacggggatagtgtggtgattagtctgaaagatggttctggggctgccattgctggggcttccgtgaacgtgtcggtgaacggtggagatgtcacgctggtggggcccacggacgctgacggtaaggccagtgttgaaatcagtggtaatgctaccgtggtggcctcgtacgtggacaataacggtataacggtgtccagttctattgtgatcaactctgagactgtgcccgagcctgttaacgttctgcctaatgcgactatcagtctttcaaaagagggtaactccgttgtgatcagtttgaaggatggttctggggctgctatcgtgggtgcttccgtgaacgtgtcgctgaacggtggagatgtcaccctggttggtcctacggatgcggacggtaagacgagtgtggagatcagtggtaatgccaccgtggtggcctcgtacgtggataataatggcataactgtgtccagttctatcataatcaccaataatacagagattgtggtgattgaaaagtctcataccgccgatgctctgttcaacgtgattatccaggaggacaaactcggggtgtggctatacaacaacaatgaggaagagctggcaaataagaacatcacagttgtgtttgacgatgatgaagagggacagaactacctgactgatgggcaggggtatacatcgattcctatcggcgatcatagcattataaaactgtcatacacggatgaagatggcgctagcgttttctacacagtgcacctgtttgagaccggcgaggtggtcgacgccgattatgtcgtcatctacatcacccccctggacgatagctcactggaagtgagtgtctctgtcaatggggaagaccttgaggaaggtgaaatcacatattacctgggtgaagatgccgaaggaattaccgttgacctagaggatggggtctatgtcattaactacgacaacaccgtcaatcagacaattgctgtggaatacattgatgacgatgacgtgagttggtatgcctactatgaggtggtcgtatacaacaacaccgtcactgaaaccgtgtacctcagcccgaacgcgaccatcagcttgtcgaagtctgggaacgatgtgctggtgagcctgactgacaatgacggtaaagccattgccaatgccgacttggatgtgttagtgaatggtgccaagtccactgctaagaccaacgcaaaaggtgaggctaccattgctattaatgggaatgccacggtggtggtgagctataaggacgctaataatatcactgtgacaagttcgatcactgtcgtgaacgagactgaaacagttgtgattgagaagaacaacaccattatcgagtatgtgaaccaaaccgtgcctcctaacgctaccgtgtccctatccctcgtggatggaaaggtggttgcggaagtaactgatggcgacggtgttcccttggctaacaagctgctggcggtaaccgttaacggcgctcctaaacttggggctgagaccgacgccaacggaatctactccatcccggtggaaggcaatgcaactgtggttgtgtcctgcactgacaataatggggtgaccgtctcaagctccatcaccgtccttaacaacagcgagactgtggtagttgaaaagaacaacacaatagtggaatacgtaaaccagaccgtatacgtgcctgtggtgtccaactcaagctttgacattgttggggacgagaatggaatcagcgccatcctgcttgacgaagacggcaagcctattagcggggctgtggtggaacttgatgtcaacggagccaagtccaacataacgagtgataagaacggtgagatcgtgattccaacagataagaatggaaccataaccatgacctataccgacgagaacggcgctaagctgatctacacaaccaaggtgattactcagacagagatcatctaccagaaccagaccatagaggtccctgtgtatatcaatgtaactcctaaccgggcctcaacaaaggtcatctacaacaatatgagcacaacctcagtcaattccaacgttgacggacggatcggagaatactttaaggttcagctggttgactccaatgggaaggcactggctaataagacggtctacatcggcttcaacggccgagtttatgtgcgtcagaccaatgagaccggcggagcccagctccagatcaacctcgggtaccagggagattacacatttgcgatagcattccttggagacgatgactataatggatcgtttgaggtggccataattaaggtgagcaagcaaagcgcgaagctcaccaccgcggccaaaacatataagacaagcgccaagaccaaagcattgagctctacattcaagtctgctaaaggtaatgcaatcagcggcaagaaaatctccttcacagtcaatggaaaaacctacactggaaccaccgactcaaaaggtgttgcgaccgtcaaggtgtctctgtccaagaaaggcacttactccttcactgcaaaattcgccggggatggaatgtacaaggaaactagtgtgagcagcaagctcacgttgaaatga

SEQ ID NO: 2295 - DNA, 849 bp, synthetic construct
  source 1..849: mol_type = other DNA
ctgaggaacattttcaatgagggtgaactggacaaggactcagtttgtgccaaaattgcacacactgccagtgacgggaaaatctataaaaccaacttctacaatctcgacgccatgattagcgtggggtatagagtaaattcgatcaaggcgacacggtttaggcagtggtccacctcagtgctgaaggaatacatggtgaagggctacgtcttggacgatgtgctgctgaaaaacggcacgcgctttggcaaggactactttgatgagctccttgaaaagatccgcgaaataagggccagcgaaagacgagcataccagaaggtgaccgacatcttctcccagtgcagctatgattacaatcccaaatccgaggttgcccgggagttttacgctaagatccaaaacaagcttaacttcgccatcaccggacacactgccgcagagatcatcagtgagcgagcagacagtgagaaagagcatatgggactaaagacatggaaaaactccccagatggaaagattctgaagtctgatatatcaattgccaagaactacctctccgaggatgagataaaaagcttgaaccgcctggtcaatatgtatttggactacgccgaaaaccaggcttatatgcacaagctcatggggatggatgactgggcgttaaagctggacagcttcctggagtttaatgatttcgaggtgctcgataacaagggccatattagcatgaatgaggctcaaaagatcgctgacgctgaatttgataagttcagagtcaaacaggataagttctatcagagcgacttcgacaaactgctagaagacgtgaaacggcttaaatga

SEQ ID NO: 2296 - DNA, 3561 bp, synthetic construct
  source 1..3561: mol_type = other DNA
atgaagtttaataaaaataggggcatatccgccatatcaattattctgattctatttttaagtatctctatggcctccgctatagagataagtgcagatgatgccgacatggacagcggagacctttccgtgtgtgaggtcagcacatcggactgctacggcgagactctaatcagcgccgacgcatccggtgcagattcaagtgacgaaattatcatcaacgagacaattgcagatgaaaagacagactatcgcagctcaatcctggccgatggtgagaagaagaacctccacgttgaagtctctaacgacgttttcacacctgataacgactacgagttcatgctctatgatgaggactttaatcagatcggagggtatttggatatctacctcaacgatgaactcacctactctgacttcaccgttgacagtagtgagagtagctccattagcctgagtggtctcgagtgcggattgaataagataactttcatctatgacgaagacgacgtgtataaccgcctcaaccagacaaaggagttttacatttacggagaaaaccccgaatttgtcatgatccctcattacgataccattacactcaatggcaattactcctctcgggtgtatctgaaggagtacgatgaatggggctactacgatgaggacaacgagggcgatattgaacccatcgatgataaattcaatgtgtacatctataaagaaaatcccggggatgagtacgaactggtgtgggaagatgagttcgaggccaacggaaccatcaatttcgacgatgccatcaaaaccacgggaaactatctgatccgatacgtctttaatggaagctccgactatagctacgctccatacaactcatcgaacattataagatgtgtcaatgtcataaccgactttatcattaatgatacctactttatcccggacaaggggttcgggttctcagtgtatctggtggataatgccaccggcgacataatagataaagagtttaagctcatggtttattatattcttgacacctcaaaccccgtgcggatcgttgaggaggaaatggtgaagggaaacaaaacctacacatttgactgcagcgagatccccgagaatattacgtacttgttcatcggatgtatttttgacggggacagggatgagtattcctctgccgacaaggagtatgctctggagctgaccgacagtagaatagaaacttcgattaacgccaacatcggtgactctgtcatcggaaactcaagcagtttccgcgtatacgtccaggatgaggagaactgggggcagatcgatgcaacgctggacatttatctgaatgaagaatattcccagactgttaccgcatacgcctacctggagaacgaggtgctgatcgagaatcttaaaaagggtgagaataccctcagaatagtatacaacgggactgacatctaccaaaattcagaaaagtcgtataacttcacagtatctgacaagagagccaacattgaagtggacgtgagcaacatcatcgtgggcgacgtgacaaagatcactgtgaatctgacggacgaggatggcaatattctcaataaggaatttaacgtctctatctataagggcggctcttattacgatgaagacagtgaattaatatactcccaagtgtatacgggatctgccaacatctcacttccagaccttgagattgatgattactacgtgagggcagaatttgtggatgaaagctttgtctactctcaggccgaagacagcgagtacttcaatgtttactctaagggcagctacatagacctggggaagacttattggcctgacaacgatgacgtggtgctgaacatcagccttaggaattatattgaagagaatattaatggagaagtcctgttccagttcaatggcactgactacccattgacctgcacggaggacggggcaatcttgaacctgggcaagctgcccgtgggcaaataccagatcttcgctaaatttgatggtgacggcgaatatgaggcgtccaacttaaccgatcagttaaggatcgttaaagcaacaatcatcaatgtggaagcttgtgacgtcctgaaaggccaatctgagactgtaaacatcacattcactgacggcgacggcaatccattggatgtcaaaatgcttgatattaacatctgggacacggatggtaactggctggactacggacagttgcgtaattccattgaaattaagaatattcaaaccgattatattatccgggccatgttgagtgatagttatggggagatcgggtattccgactattacccttcaagcgcatacggattcatccgcgtcctaaacggaaccgacccgaccgtaatcacagtgacaaacactgctaacattgatctcgcgatcgatggccccaaagtgattatcacccttacagatgaggacggcaaggccatttccggtgcgaaactgaatgccgctgttgggaacatggagtctatcctaaccaccgacagcaaaggccaggccgtgctggctatcggggcaaacgacaccgcgaaagtgacttataccgacgagaatggtgccggtgtgagtgcctccattgtaaacaatgtgatcaacacgacagtgactgagatcgtggagaagaacataactgttcctgtaaccgcaaacgccaccatcgacctcgcgattgacggctccgacgtagtcgtgagcctgaacgacctggatggtaatgcaatcgcttccgctagcctggacgctactgtcggcacaactaactcgaccctgaccactgatgacaaagggcaggctaaggtggcaatcggcgtgaacgaaaccgctaaagtgacttacacggacgagaacggggcgagtgtgagcgcgtccattgtgaacaacgtgatcaacagcacagttgtgatcaacaacacagttaagcggaacgccactaagatcatttacaataacatgagcaccgtctcggtcaattctgaggttgatggacgaataggcgaatactttaatgtgacgctggtggactccgacggcaacgccctcgccaataagaccgtatacattggattcaatgggcgagtctacgtccggcagacaaacgagacaggcggggcccagctacagatcaacctcgggtatcaaggagattacacatttgctatagccttcctgggtgacgatgactacaacggctcattcgaggtggccatcattaaggtgagcaagcagagcgggaagctgaccagcagcccaaaaacctataaggctaaggcgaagacgaaaaccgtttcagccacattcacttcctcgtacggaaatcccatcccgggcaagaagattagtttcatcgtcaacgggaaaacctactcagctaacaccaacgataagggggtggctacagtcaaggtgtccctctccaagaaaggcacgtatacctgcaatatcaaattcgccggaaatggtatgtacaccgagtccatcgccaaatctaagataacgattaaatga

SEQ ID NO: 2297 - DNA, 1461 bp, synthetic construct
  source 1..1461: mol_type = other DNA
atggagtataaaaagatgcttgccgaaattgatttcagcaaggacctgatcggtttctttgaagacaagaacctgtgcatcattaatgagagcctgctggatggtaccttcggcctttcaagggacattctcttcgataaacgtattctcttcaacaatgatagcctcatcgatagtttcctcctgaacgctaaggcctataacctgaataacgaatttttcatcttactcagcaacatcatcagaaatgactttcaggaggccatctccaacaaatcgaataatgagattctggacttcgaagagactctggagaaagagagcccattctactctggaatacctgtctccaaagaaatgtttgtcggtcggaaggatagcatacataagatcctccgaaacttcccacacatctttaagggacagacccggcacttctttctgaccggggaccgcagaatggggaagacatcccttattgatttcattggcgaatacatgaagtcatacggggtggtaagtgtgtatatctccaataagggcaacgacagcgtggagtttctggcttacgagatcgtcgaagggctgattgatgaactgaccctccctgacgaatcccttaaaacaaagatcgtggacttcttccaggatcacgtggaaagtgtggagtttaaaggcactaagataaagctcacggtagataaaaatctaagcgtctctttcaaagaggatttcattaaccacctgaagagcatctatgatgagtttggaatggacaaaaaagggatcttgatcgttgtggacgacattaatggcctctcaaattcagaggagttcgtgcactggtacaaacgcatggcggacacaatacaggtgtctcatataaacctgccggtgtattttttacttgctgggtaccccgagaagttttacaacctgaccaggctggacgagtcctttggcagcatttttgcctacgacaacttggaccgcttgtccaacatggaagttctggaatttttcgaaagttcttttggcgagaagtccatgcttatcgacaaggacgccttattctacatgattctgttctctcaagggcagcccttgatgatgcaggagctaggcgaatcagtattttgggagtgccccaatggccatattgataaatacatcgcaatccggggaatcataaatgcggccaacgtgctggccagcaggcagatcaaatatactttgaacatcctaagtgaagatgacaaggcaattttcaagtcgctgatcagcgacggaaagttctttttcaactcctcggacatctgtgatgagggattcttggagtctatgttcgacctcagtctgatcgaggtttccaagaaggaggattatgacttttgcttcaagaacacgctcgtctttatctacttctgggtcgaagcaatacaaggtctgattgagaaatga

(The sequence listing continues in the following parts.)

1. A vaccine composition comprising at least one polypeptide and/or at least one peptide of at least one cell surface protein or a fragment thereof of at least one methanogen.

2. (canceled)

3. The vaccine composition of claim 1, wherein the at least one methanogen comprises Methanobrevibacter gottschalkii and/or Methanobrevibacter ruminantium.

4-22. (canceled)

23. A method of treating a disease in a subject, the method comprising administering to the subject a vaccine composition of claim 1.

24-25. (canceled)

26. A method of inducing an immune response against at least one methanogen in a subject, the method comprising administering to the subject the vaccine of claim 1.

27. (canceled)

28. A method of reducing rumen lactate, increasing pH, or combination thereof in a subject, the method comprising administering to the subject the vaccine of claim 1.

29. A method of reducing the activity, number, and/or type of methanogens in a digestive tract of a subject, the method comprising administering to the subject the vaccine composition of claim 1.

30. (canceled)

31. A method of reducing the amount of methane (CH₄) and/or hydrogen (H₂) emitted by a subject, preferably eructated and/or exhaled, the method comprising administering to the subject the vaccine composition of claim 1, optionally wherein the amount of methane (CH₄) is normalized to an amount of CO₂ emitted by the subject (i.e., CH₄/CO₂).

32-37. (canceled)

38. A method of increasing the amount of carbon dioxide (CO₂) emitted by a subject, preferably eructated and/or exhaled, the method comprising administering to the subject the vaccine composition of claim 1.

39-57. (canceled)

58. The method of claim 26, further comprising administering to the subject (a) at least one agent that reduces the level of methane and/or hydrogen produced by the subject; and/or (b) at least one agent that increases production efficiency.

59-62. (canceled)

63. The method of claim 58, wherein the at least one agent comprises:
(a) an agent selected from the agents listed in Tables 9-13;
(b) 3-Nitrooxypropanol (3NOP), ethyl-3NOP, 2-bromoethanesulfonate (BES), 2-chloroethanesulfonate (CES), 3-bromopropanesulfonate (BPS), bromochloromethane (BCM), bromoform, bromodichloromethane, dibromochloromethane, carbon tetrachloride, trichloroacetamide, trichloroethyladipate, lumazin (2,4-pteridinedione), p-aminobenzoic acid, lovastatin, mevastatin, pravastatin, diallyl disulfide, garlic oil, saponins, tannins, flavonoids, nitrate, nitroethane, -nitro-propionate, 2-nitropropanol, 2-nitroethanol, malate, acrylate, oxaloacetate, fumarate, propynoic acid, 3-butenoic acid, 2-butynoic acid, ethyl 2-butynoate, monensin, lasalocid, bovicin HC5, nisin, or any combination thereof, and/or
(c) Monensin (Rumensin®), Optigrid® 45 (ractopamine hydrochloride), Amprolium (Corid), Bacitracin (Albac, BMD), Bambermycin (GainPro), Decoquinate (Deccox), Fenbendazole (Safe-Guard), Laidlomycin (Cattlyst), Lasalocid (Bovetec), Melengestrol Acetate (MGA), Methoprene (Altosid), Morantel (Rumatel), Poloxalene (Bloat Guard), Ractopamine (Optaflexx, Actogain), Tetraclovinphos (Rabon), or any combination thereof.

64-120. (canceled)

121. An antibody produced by the method of claim 26, or an antigen-binding fragment thereof.

122-125. (canceled)

126. Milk and/or a derivative thereof produced by the subject of claim 26.

127-130. (canceled)

131. An animal feed comprising:
(a) the antibody produced according to the method of claim 26;
(b) at least one agent that reduces methane and/or hydrogen production in a subject, optionally wherein the at least one agent is selected from the agents in Tables 9-13;
(c) the milk and/or a derivative thereof produced by the subject of claim 26; or
(d) any combination of two or more of (a)-(c).

132-133. (canceled)

134. A method of reducing methane and/or hydrogen production or increasing CO₂ production in a subject, the method comprising orally administering to and/or feeding the subject the antibody produced according to the method of claim 26, the milk and/or a derivative thereof produced by the subject of claim 26, the animal feed comprising the antibody and/or milk and/or a derivative thereof, at least one agent that reduces methane and/or hydrogen production in a subject, or any combination of two or more thereof.

135-151. (canceled)

152. A kit comprising the vaccine composition of claim 1.

153-162. (canceled)

163. A method of treating a subject afflicted with a disease, the method comprising to the subject:
(a) the vaccine composition of claim 1;
(b) the antibody produced by a subject administered with the vaccine composition of claim 1;
(c) the milk and/or derivative thereof produced by a subject administered with the vaccine composition of claim 1;
(d) the animal feed comprising the antibody of (b), and/or the milk and/or derivative thereof of (c);
(e) at least one agent that reduces methane and/or hydrogen production in a subject, optionally wherein the at least one agent is selected from the agents in Tables 9-13; or
(f) any combination of two or more thereof.

164. (canceled)

165. A method of reducing CH₄ emissions in a ruminant comprising administering to the ruminant a vaccine composition of claim 1 comprising at least one polypeptide and/or at least one peptide of at least one cell surface protein or a fragment thereof (e.g., an antigenic fragment, e.g., a fragment comprising an epitope, e.g., a fragment comprising an extracellular domain or a portion thereof) of at least one methanogen, wherein the CH₄ emissions are reduced by at least about 10%, 11%, 12%, 13%, 14%, 15%, 16%, 17%, 18%, 19%, or 20% as compared to an untreated control ruminant.

166. A method of reducing H₂ emissions in a ruminant comprising administering to the ruminant a vaccine composition of claim 1 comprising at least one polypeptide and/or at least one peptide of at least one cell surface protein or a fragment thereof (e.g., an antigenic fragment, e.g., a fragment comprising an epitope, e.g., a fragment comprising an extracellular domain or a portion thereof) of at least one methanogen, wherein the H₂ emissions are reduced by at least about 1%, 2%, 3%, 4%, 5%, 6%, 7%, 8%, 9%, 10%, 11%, 12%, 13%, 14%, 15%, 16%, 17%, 18%, 19%, 20%, 21%, 22%, 23%, 24%, 25%, 26%, 27%, 28%, 29%, 30%, 31%, 32%, 33%, 34%, 35%, 36%, 37%, 38%, 39%, 40%, 41%, 42%, 43%, 44%, 45%, 46%, 47%, 48%, 49%, or 50% as compared to an untreated control ruminant.

167. A method of increasing the productivity of a ruminant comprising administering to the ruminant a vaccine composition comprising at least one polypeptide and/or at least one peptide of at least one cell surface protein or a fragment thereof (e.g., an antigenic fragment, e.g., a fragment comprising an epitope, e.g., a fragment comprising an extracellular domain or a portion thereof) of at least one methanogen, wherein the productivity is increased by at least about 0.5%, 1%, 1.5%, 2%, 2.5%, 3%, 3.5%, 4%, 4.5%, 5%, 5.5%, 6%, 6.5%, 7%, 7.5%, 8%, 8.5%, 9%, 9.5%, 10%, 10.5%, 11%, 11.5%, 12%, 12.5%, 13%, 13.5%, 14%, 14.5%, or 15% as compared to an untreated control ruminant.

168-169. (canceled)

170. An animal injected subcutaneously with the vaccine composition of claim 1, wherein the vaccine composition comprises about a dosage of between 0.1 mg/kg and 250 mg/kg, or any range in between or any value in between.

171. A method of producing a low carbon animal product, the method comprising:
(a) administering to an animal (e.g., a mammal, a ruminant) a vaccine composition of claim 1;
(b) determining an amount of emissions of at least one greenhouse gas (e.g., CO₂, CH₄, N₂O, and/or H₂) from the animal of (a) following administration until animal product harvesting;
(c) determining a first carbon intensity as a ratio of a first amount of emissions from the vaccinated animal in (b) and the amount of harvested animal product;
(d) determining a second carbon intensity as a ratio of a second amount of carbon emissions from an untreated animal and the same amount of harvested animal product; and
(e) determining the difference between the first carbon intensity and the second carbon intensity.

172-175. (canceled)
